(19) United States
(12) Patent Application Publication
(10) Pub. No.: US 2014/0230087 A1
(43) Pub. Date: Aug. 14, 2014

(54) Regulatory Nucleic Acid Molecules for Enhancing Constitutive Gene Expression in Plants

(71) Applicants: Julia Verena Hartig, Neustadt (DE); Maarten Hendrik Stuiver, Neustadt (DE); Josef Martin Kuhn, Ludwigshafen (DE); Alrun Nora Burgmeier, Speyer (DE)

(72) Inventors: Julia Verena Hartig, Neustadt (DE); Maarten Hendrik Stuiver, Neustadt (DE); Josef Martin Kuhn, Ludwigshafen (DE); Alrun Nora Burgmeier, Speyer (DE)

(73) Assignee: BASF PLANT SCIENCE COMPANY GMBH, Ludwigshafen (DE)

(21) Appl. No.: 14/130,731

(22) PCT Filed: Jul. 2, 2012
(86) PCT No.: PCT/IB2012/053345

§ 371 Date: Apr. 16, 2014

(30) Foreign Application Priority Data
Jul. 5, 2011 (EP) 11172672.5

(51) Int. Cl. C12N 15/82

(52) U.S. Cl. CPC C12N 15/8216
USPC 800/278; 435/320.1; 435/419; 435/412; 435/91.41; 800/298

(57) ABSTRACT

The present invention is in the field of plant molecular biology and provides methods for production of high expressing constitutive promoters and the production of plants with enhanced constitutive expression of nucleic acids wherein nucleic acid expression enhancing nucleic acids (NEENAs) are functionally linked to said promoters and/or introduced into plants.

### DESCRIPTION OF THE INVENTION

[0001] The present invention is in the field of plant molecular biology and provides methods for production of high expressing constitutive promoters and the production of plants with enhanced constitutive expression of nucleic acids wherein nucleic acid expression enhancing nucleic acids (NEENAs) are functionally linked to said promoters and/or introduced into plants.

[0002] Expression of transgenes in plants is strongly affected by various external and internal factors resulting in a variable and unpredictable level of transgene expression. Often a high number of transformants have to be produced and analyzed in order to identify lines with desirable expression strength. As transformation and screening of lines with desirable expression strength is costly and labor intensive there is a need for high expression of one or more transgenes in a plant. This problem is especially pronounced, when several genes have to be coordinately expressed in a transgenic plant in order to achieve a specific effect as a plant has to be identified in which each and every gene is strongly expressed.

[0003] For example, expression of a transgene can vary significantly, depending on construct design and positional effects of the T-DNA insertion locus in individual transformation events. Strong promoters can partially overcome these challenges. However, availability of suitable promoters showing strong expression with the desired specificity is often limited. In order to ensure availability of sufficient promoters with desired expression specificity, the identification and characterization of additional promoters can help to close this gap. However, natural availability of promoters of the respective specificity and strength and the time consuming characterization of promoter candidates impedes the identification of suitable new promoters.

[0004] In order to overcome these challenges, diverse genetic elements and/or motifs have been shown to positively affect gene expression. Among these, some introns have been recognized as genetic elements with a strong potential for improving gene expression. Although the mechanism is largely unknown, it has been shown that some introns positively affect the steady state amount of mature mRNA, possibly by enhanced transcriptional activity, improved mRNA maturation, enhanced nuclear mRNA export and/or improved translation initiation (e.g. Huang and Gorman, 1990; Le Hir et al., 2003; Nott et al., 2004). Since only selected introns were shown to increase expression, splicing as such is likely not accountable for the observed effects.

[0005] The increase of gene expression observed upon functionally linking introns to promoters is called intron mediated enhancement (IME) of gene expression and has been shown in various monocotyledonous (e.g. Callis et al., 1987; Vasil et al., 1989; Bruce et al., 1990; Lu et al., 2008) and dicotyledonous plants (e.g. Chung et al., 2006; Kim et al., 2006; Rose et al., 2008). In this respect, the position of intron in relation to the translational start site (ATG) was shown to be crucial for intron mediated enhancement of gene expression (Rose et al., 2004).

[0006] Next to their potential for enhancing gene expression, a few introns were shown to also affect the tissue specificity in their native nucleotide environment in plants. Reporter gene expression was found to be dependent on the presence of genomic regions containing up to two introns (Sieburth et al., 1997; Wang et al., 2004). 5′ UTR introns have also been reported to be of importance for proper functionality of promoter elements, likely due to tissue specific gene control elements residing in the introns (Fu et al., 1995a; Fu et al., 1995b; Vitale et al., 2003; Kim et al., 2006). However, these studies also show that combination of introns with heterologous promoters can have strong negative impacts on strength and/or specificity of gene expression (Vitale et al., 2003; Kim et al., 2006, WO2006/003186, WO2007/098042). For example the strong constitutive Cauliflower Mosaic Virus CaMV35S promoter is negatively affected through combination with the sesame SeFAD2 5′UTR intron (Kim et al., 2006). In contrast to these observations, some documents show enhanced expression of a nucleic acid by IME without affecting the tissue specificity of the respective promoter (Schünmann et al., 2004).

[0007] In WO/2011/023537 and WO/2011/023539 the authors describe several nucleic acid molecules that, when functionally linked to promoters, enhance expression of these promoters without affecting the specificity of the respective promoters.

[0008] In the present application further nucleic acid molecules are described that enhance the expression of said promoters without affecting their specificity upon functionally linkage to constitutive promoters. These nucleic acid molecules are in the present application described as “nucleic acid expression enhancing nucleic acids” (NEENA). Introns have the intrinsic feature to be spliced out of the respective pre-mRNA. In contrast to that the nucleic acids presented in the application at hand, do not necessarily have to be included in the mRNA or, if present in the mRNA, have not necessarily to be spliced out of the mRNA in order to enhance the expression derived from the promoter the NEENAs are functionally linked to.

### DETAILED DESCRIPTION OF THE INVENTION

[0009] A first embodiment of the invention comprises a method for production of a high expression constitutive promoter comprising functionally linking to a promoter one or more nucleic acid expression enhancing nucleic acid (NEENA) molecule comprising
[0010] i) the nucleic acid molecule having a sequence as defined in any of SEQ ID NO: 1 to 14937 and 14958 to 14960 or
[0011] ii) a nucleic acid molecule having a sequence with an identity of 80% or more to any of the sequences as defined by SEQ ID NO:1 to 14937 or 14958 to 14960, preferably, the identity is 85% or more, more preferably the identity is 90% or more, even more preferably, the identity is 95% or more, 96% or more, 97% or more, 98% or more or 99% or more, in the most preferred embodiment, the identity is 100% to any of the sequences as defined by SEQ ID NO:1 to 14937 or 14958 to 14960 or
[0012] iii) a fragment of 100 or more consecutive bases, preferably 150 or more consecutive bases, more preferably 200 consecutive bases or more even more preferably 250 or more consecutive bases of a nucleic acid molecule of i) or ii) which has an expressing enhancing activity, for example 65% or more, preferably 70% or more, more preferably 75% or more, even more preferably 80% or more, 85% or more or 90% or more, in a most preferred embodiment it has 95% or more of the expression enhancing activity as the corresponding nucleic acid molecule having the sequence of any of the sequences as defined by SEQ ID NO:1 to 14937 or 14958 to 14960 or
[0013] iv) a nucleic acid molecule which is the complement or reverse complement of any of the previously mentioned nucleic acid molecules under i) to iii), or
[0014] v) a nucleic acid molecule of 100 nucleotides or more, 150 nucleotides or more, 200 nucleotides or more or 250 nucleotides or more, hybridizing under conditions equivalent to hybridization in 7% sodium dodecyl sulfate (SDS), 0.5 M NaPO₄, 1 mM EDTA at 50° C. with washing in 2×SSC, 0.1% SDS at 50° C. or 65° C., preferably 65° C. to a nucleic acid molecule comprising at least 50, preferably at least 100, more preferably at least 150, even more preferably at least 200, most preferably at least 250 consecutive nucleotides of a transcription enhancing nucleotide sequence described by SEQ ID NO:1 to 14937 or 14958 to 14960 or the complement thereof. Preferably, said nucleic acid molecule is hybridizing under conditions equivalent to hybridization in 7% sodium dodecyl sulfate (SDS), 0.5 M NaPO₄, 1 mM EDTA at 50° C. with washing in 1×SSC, 0.1% SDS at 50° C. or 65° C., preferably 65° C. to a nucleic acid molecule comprising at least 50, preferably at least 100, more preferably at least 150, even more preferably at least 200, most preferably at least 250 consecutive nucleotides of a transcription enhancing nucleotide sequence described by SEQ ID NO:1 to 14937 or 14958 to 14960 or the complement thereof, more preferably, said nucleic acid molecule is hybridizing under conditions equivalent to hybridization in 7% sodium dodecyl sulfate (SDS), 0.5 M NaPO₄, 1 mM EDTA at 50° C. with washing in 0, 1×SSC, 0.1% SDS at 50° C. or 65° C., preferably 65° C. to a nucleic acid molecule comprising at least 50, preferably at least 100, more preferably at least 150, even more preferably at least 200, most preferably at least 250 consecutive nucleotides of a transcription enhancing nucleotide sequence described by any of the sequences as defined by SEQ ID NO:1 to 14937 or 14958 to 14960 or the complement thereof.

[0015] In one embodiment, the one or more NEENA is heterologous to the promoter to which it is functionally linked.

[0016] A person skilled in the art is aware of methods for rendering a unidirectional to a bidirectional promoter and of methods to use the complement or reverse complement of a promoter sequence for creating a promoter having the same promoter specificity as the original sequence. Such methods are for example described for constitutive as well as inducible promoters by Xie et al. (2001) “Bidirectionalization of polar promoters in plants” nature biotechnology 19 pages 677-679. The authors describe that it is sufficient to add a minimal promoter to the 5′ end of any given promoter to receive a promoter controlling expression in both directions with same promoter specificity. Hence a high expression promoter functionally linked to a NEENA as described above is functional in complement or reverse complement and therefore the NEENA is functional in complement or reverse complement too.

[0017] A constitutive promoter as used herein means a promoter expressed in substantially all plant tissues throughout substantially the entire life span of a plant or part thereof. A promoter expressed in substantially all plant tissues may also encompass promoters that are expressed in at least two of the main plant tissues such as leaf, stem and/or root and may or may not be expressed in some or all minor tissues or cells such as epidermis, stomata, trichome, flower, seed or meristematic tissue. In a preferred embodiment a constitutive promoter as meant herein is expressed at least in green tissues such as leaf and stem.

[0018] A promoter expressed throughout substantially the entire life span of a plant or part thereof may also encompass promoters that are expressed in young and developed tissue but may lack expression at specific time points in the lifespan of a plant or under specific conditions such as during germination and/or senescence or under biotic and/or abiotic stress conditions such as fungi or bacterial infection, drought, heat or cold. In a preferred embodiment a constitutive promoter expressed in substantially the entire lifespan of a plant is expressed at least in fully expanded tissue until onset of senescence.

[0019] In principal the NEENA may be functionally linked to any promoter such as tissue specific, inducible, developmental specific or constitutive promoters. The respective NEENA will lead to an enhanced expression of the heterologous nucleic acid under the control of the respective promoter to which the at least one NEENA is functionally linked to. The enhancement of expression of promoters other than constitutive promoters, for example tissue specific promoters, will render the specificity of these promoters. Expression of the nucleic acid under control of the respective promoter will be detectable in additional tissues or developmental stages the transcript of said nucleic acid had not been detected without the NEENA. Hence, tissue- or developmental specific or any other promoter may be rendered to a constitutive promoter by functionally linking at least one of the NEENA molecules as described above to said promoter. It is therefore another embodiment of the invention to provide a method for rendering the specificity of any given promoter functional in plant to a constitutive promoter by linking the respective promoter to a NEENA molecule comprising a sequence as described above under i) to v).

[0020] Preferably, the one or more NEENA is functionally linked to any constitutive promoter and will enhance expression of the nucleic acid molecule under control of said promoter. Constitutive promoters to be used in any method of the invention may be derived from plants, for example monocotyledonous or dicotyledonous plants, from bacteria and/or viruses or may be synthetic promoters. Constitutive promoters to be used are for example the PcUbi-Promoter from P. crispum (WO 2003102198), the ZmUbi-Promoter from Zea maize, AtNit-promoter from the A. thaliana gene At3g44310 encoding nitrilase 1, the 34S-promoter from figwort mosaic virus, the 35S-promoter from tobacco mosaic virus, the nos and ocs-promoter derived from Agrobacteria, the ScBV-promoter (U.S. Pat. No. 5,994,123), the SUPER-promoter (Lee et al. 2007, Plant. Phys.), the AtFNR-promoter from the A. thaliana gene At5g66190 encoding the ferredoxin NADH reductase, the ptxA promoter from Pisum sativum (WO2005085450), the AtTPT-promoter from the A. thaliana gene At5g46110 encoding the triose phosphate translocator, the bidirectional AtOASTL-promoter from the A. thaliana genes At4g14880 and At4g14890, the PRO0194 promoter from the A. thaliana gene At1g13440 encoding the glyceraldehyde-3-phosphate dehydrogenase, the PRO0162 promoter from the A. thaliana gene At3g52930 encoding the fructose-bisphosphate aldolase, the AHAS-promoter (WO2008124495) or the CaffeoylCoA-MT promoter and the OsCP12 from rice (WO2006084868).

[0021] The high expression constitutive promoters of the invention functionally linked to a NEENA may be employed in any plant comprising for example moss, fern, gymnosperm or angiosperm, for example monocotyledonous or dicotyledonous plant. In a preferred embodiment said promoter of the invention functionally linked to a NEENA may be employed in monocotyledonous or dicotyledonous plants, preferably crop plant such as corn, soy, canola, cotton, potato, sugar beet, rice, wheat, sorghum, barley, musa, sugarcane, miscanthus and the like. In a preferred embodiment of the invention, said promoter which is functionally linked to a NEENA may be employed in monocotyledonous crop plants such as corn, rice, wheat, sorghum, musa, miscanthus, sugarcane or barley. In an especially preferred embodiment the promoter functionally linked to a NEENA may be employed in dicotyledonous crop plants such as soy, canola, cotton, sugar beet or potato.

[0022] A high expressing constitutive promoter as used in the application means for example a promoter which is functionally linked to a NEENA causing enhanced constitutive expression of the promoter in a plant or part thereof wherein the accumulation of RNA or rate of synthesis of RNA derived from the nucleic acid molecule under the control of the respective promoter functionally linked to a NEENA is higher, preferably significantly higher than the expression caused by the same promoter lacking a NEENA of the invention. Preferably the amount of RNA of the respective nucleic acid and/or the rate of RNA synthesis and/or the RNA stability in a plant is increased 50% or more, for example 100% or more, preferably 200% or more, more preferably 5 fold or more, even more preferably 10 fold or more, most preferably 20 fold or more for example 50 fold compared to a control plant of same age grown under the same conditions comprising the same constitutive promoter the latter not being functionally linked to a NEENA of the invention.

[0023] When used herein, significantly higher refers to statistical significance the skilled person is aware how to determine, for example by applying statistical tests such as the t-test to the respective data sets.

[0024] Methods for detecting expression conferred by a promoter are known in the art. For example, the promoter may be functionally linked to a marker gene such as GUS, GFP or luciferase and the activity of the respective protein encoded by the respective marker gene may be determined in the plant or part thereof. As a representative example, the method for detecting luciferase is described in detail below. Other methods are for example measuring the steady state level or synthesis rate of RNA of the nucleic acid molecule controlled by the promoter by methods known in the art, for example Northern blot analysis, qPCR, run-on assays or other methods described in the art.

[0025] A skilled person is aware of various methods for functionally linking two or more nucleic acid molecules. Such methods may encompass restriction/ligation, ligase independent cloning, recombineering, recombination or synthesis. Other methods may be employed to functionally link two or more nucleic acid molecules.

[0026] A further embodiment of the present invention is a method for producing a plant or part thereof with, compared to a respective control plant or part thereof, enhanced constitutive expression of one or more nucleic acid molecule comprising the steps of introducing into the plant or part thereof one or more NEENA comprising a nucleic acid molecule as defined above under i) to v) and functionally linking said one or more NEENA to a promoter, preferably a constitutive promoter and to a nucleic acid molecule being under the control of said promoter, preferably constitutive promoter, wherein the NEENA is heterologous to said nucleic acid molecule.

[0027] The NEENA may be heterologous to the nucleic acid molecule which is under the control of said promoter to which the NEENA is functionally linked or it may be heterologous to both the promoter and the nucleic acid molecule under the control of said promoter.

[0028] The term “heterologous” with respect to a nucleic acid molecule or DNA refers to a nucleic acid molecule which is operably linked to, or is manipulated to become operably linked to, a second nucleic acid molecule to which it is not operably linked in nature, or to which it is operably linked at a different location in nature. For example, a NEENA of the invention is in its natural environment functionally linked to its native promoter, whereas in the present invention it is linked to another promoter which might be derived from the same organism, a different organism or might be a synthetic promoter such as the SUPER-promoter. It may also mean that the NEENA of the present invention is linked to its native promoter but the nucleic acid molecule under control of said promoter is heterologous to the promoter comprising its native NEENA. It is in addition to be understood that the promoter and/or the nucleic acid molecule under the control of said promoter functionally linked to a NEENA of the invention are heterologous to said NEENA as their sequence has been manipulated by for example mutation such as insertions, deletions and the forth so that the natural sequence of the promoter and/or the nucleic acid molecule under control of said promoter is modified and therefore have become heterologous to a NEENA of the invention. It may also be understood that the NEENA is heterologous to the nucleic acid to which it is functionally linked when the NEENA is functionally linked to its native promoter wherein the position of the NEENA in relation to said promoter is changed so that the promoter shows higher expression after such manipulation.

[0029] A plant exhibiting enhanced constitutive expression of a nucleic acid molecule as meant herein means a plant having a higher, preferably statistically significant higher constitutive expression of a nucleic acid molecule compared to a control plant grown under the same conditions without the respective NEENA functionally linked to the respective nucleic acid molecule. Such control plant may be a wild-type plant or a transgenic plant comprising the same promoter controlling the same gene as in the plant of the invention wherein the promoter is not linked to a NEENA of the invention.

[0030] Producing a plant as used herein comprises methods for stable transformation such as introducing a recombinant DNA construct into a plant or part thereof by means of Agrobacterium mediated transformation, protoplast transformation, particle bombardment or the like and optionally subsequent regeneration of a transgenic plant. It also comprises methods for transient transformation of a plant or part thereof such as viral infection or Agrobacterium infiltration. A skilled person is aware of further methods for stable and/or transient transformation of a plant or part thereof. Approaches such as breeding methods or protoplast fusion might also be employed for production of a plant of the invention and are covered herewith.

[0031] The method of the invention may be applied to any plant, for example gymnosperm or angiosperm, preferably angiosperm, for example dicotyledonous or monocotyledonous plants, preferably dicotyledonous plants. Preferred monocotyledonous plants are for example corn, wheat, rice, barley, sorghum, musa, sugarcane, miscanthus and brachypodium, especially preferred monocotyledonous plants are corn, wheat and rice. Preferred dicotyledonous plants are for example soy, rape seed, canola, linseed, cotton, potato, sugar beet, tagetes and Arabidopsis, especially preferred dicotyledonous plants are soy, rape seed, canola and potato.

[0032] In one embodiment of the invention, the methods as defined above are comprising the steps of
[0033] a) Introducing one or more NEENA comprising a nucleic acid molecule as defined above in i) to v) into a plant or part thereof and
[0034] b) integrating said one or more NEENA into the genome of said plant or part thereof whereby said one or more NEENA is functionally linked to an endogenous preferably constitutively expressed nucleic acid heterologous to said one or more NEENA and optionally
[0035] c) regenerating a plant or part thereof comprising said one or more NEENA from said transformed cell.

[0036] The NEENA may be heterologous to the nucleic acid molecule which is under the control of said promoter to which the NEENA is functionally linked or it may be heterologous to both the promoter and the nucleic acid molecule under the control of said promoter.

[0037] The one or more NEENA molecule may be introduced into the plant or part thereof by means of particle bombardment, protoplast electroporation, virus infection, Agrobacterium mediated transformation or any other approach known in the art. The NEENA molecule may be introduced integrated for example into a plasmid or viral DNA or viral RNA. The NEENA molecule may also be comprised on a BAC, YAC or artificial chromosome prior to introduction into the plant or part of the plant. It may be also introduced as a linear nucleic acid molecule comprising the NEENA sequence wherein additional sequences may be present adjacent to the NEENA sequence on the nucleic acid molecule. These sequences neighboring the NEENA sequence may be from about 20 bp, for example 20 bp to several hundred base pairs, for example 100 bp or more and may facilitate integration into the genome for example by homologous recombination. Any other method for genome integration may be employed, be it targeted integration approaches, such as homologous recombination or random integration approaches, such as illegitimate recombination.

[0038] The endogenous preferably constitutively expressed nucleic acid to which the NEENA molecule may be functionally linked may be any nucleic acid, preferably any constitutively expressed nucleic acid molecule. The nucleic acid molecule may be a protein coding nucleic acid molecule or a non coding molecule such as antisense RNA, rRNA, tRNA, miRNA, ta-siRNA, siRNA, dsRNA, snRNA, snoRNA or any other noncoding RNA known in the art.

[0039] The skilled person is aware of methods for identifying constitutively expressed nucleic acid molecules to which the method of the invention may preferably be applied for example by microarray chip hybridization, qPCR, Northern blot analysis, next generation sequencing etc.

[0040] A further way to perform the methods of the invention may be to
[0041] a) provide an expression construct comprising one or more NEENA comprising a nucleic acid molecule as defined above in i) to v) functionally linked to a promoter, preferably a constitutive promoter as defined above and to one or more nucleic acid molecule the latter being heterologous to said one or more NEENA and which is under the control of said promoter, preferably constitutive promoter and
[0042] b) integrate said expression construct comprising said one or more NEENA into the genome of said plant or part thereof and optionally
[0043] c) regenerate a plant or part thereof comprising said one or more expression construct from said transformed plant or part thereof.

[0044] The NEENA may be heterologous to the nucleic acid molecule which is under the control of said promoter to which the NEENA is functionally linked or it may be heterologous to both the promoter and the nucleic acid molecule under the control of said promoter.

[0045] The expression construct may be integrated into the genome of the respective plant with any method known in the art. The integration may be random using methods such as particle bombardment or Agrobacterium mediated transformation. In a preferred embodiment, the integration is via targeted integration for example by homologous recombination. The latter method would allow integrating the expression construct comprising a high expression promoter functionally linked to a NEENA into a favorable genome region. Favorable genome regions are for example genome regions known to comprise genes that are highly expressed for example in seeds and hence may increase expression derived from said expression construct compared to a genome region which shows no transcriptional activity.

[0046] In another preferred embodiment said one or more NEENA is functionally linked to a promoter, preferably constitutive promoter close to the transcription start site of said heterologous nucleic acid molecule.

[0047] Close to the transcription start site as meant herein comprises functionally linking one or more NEENA to a promoter, preferably a constitutive promoter 2500 bp or less, preferentially 2000 bp or less, more preferred 1500 bp or less, even more preferred 1000 bp or less and most preferred 500 bp or less away from the transcription start site of said heterologous nucleic acid molecule. It is to be understood that the NEENA may be integrated upstream or downstream in the respective distance from the transcription start site of the respective promoter. Hence, the one or more NEENA must not necessarily be included in the transcript of the respective heterologous nucleic acid under control of the preferably constitutive promoter the one or more NEENA is functionally linked to. Preferentially the one or more NEENA is integrated downstream of the transcription start site of the respective promoter, preferably constitutive promoter. The integration site downstream of the transcription start site may be in the 5′ UTR, the 3′ UTR, an exon or intron or it may replace an intron or partially or completely the 5′ UTR or 3′ UTR of the heterologous nucleic acid under the control of the preferably constitutive promoter. Preferentially the one or more NEENA is integrated in the 5′ UTR or an intron or the NEENA is replacing an intron or a part or the complete 5′UTR, most preferentially it is integrated in the 5′UTR of the respective heterologous nucleic acid.

[0048] A further embodiment of the invention comprises a recombinant expression construct comprising one or more NEENA comprising a nucleic acid molecule as defined above in i) to v). The recombinant expression construct may further comprise one or more promoter, preferably constitutive promoter to which the one or more NEENA is functionally linked and optionally one or more expressed nucleic acid molecule the latter being heterologous to said one or more NEENA.

[0049] The NEENA may be heterologous to the nucleic acid molecule which is under the control of said promoter to which the NEENA is functionally linked or it may be heterologous to both the promoter and the nucleic acid molecule under the control of said promoter.

[0050] The expression construct may comprise one or more, for example two or more, for example 5 or more, such as 10 or more combinations of promoters, preferably constitutive promoters functionally linked to a NEENA and a nucleic acid molecule to be expressed heterologous to the respective NEENA. The expression construct may also comprise further promoters not comprising a NEENA functionally linked to nucleic acid molecules to be expressed homologous or heterologous to the respective promoter.

[0051] A recombinant expression vector comprising one or more recombinant expression construct as defined above is another embodiment of the invention. A multitude of expression vectors that may be used in the present invention are known to a skilled person. Methods for introducing such a vector comprising such an expression construct comprising for example a promoter functionally linked to a NEENA and optionally other elements such as a terminator into the genome of a plant and for recovering transgenic plants from a transformed cell are also well known in the art. Depending on the method used for the transformation of a plant or part thereof the entire vector might be integrated into the genome of said plant or part thereof or certain components of the vector might be integrated into the genome, such as, for example a T-DNA.

[0052] A transgenic plant or part thereof comprising one or more heterologous NEENA as defined above in i) to v) is also enclosed in this invention. A NEENA is to be understood as being heterologous to the plant if it is synthetic, derived from another organism or the same organism but its natural genomic localization is rendered compared to a control plant, for example a wild type plant. It is to be understood, that a rendered genomic localization means the NEENA is located on another chromosome or on the same chromosome but 10 kb or more, for example 10 kb, preferably 5 kb or more, for example 5 kb, more preferably 1000 bp or more, for example 1000 bp, even more preferably 500 bp or more, for example 500 bp, especially preferably 100 bp or more, for example 100 bp, most preferably 10 bp or more, for example 10 bp dislocated from its natural genomic localization, for example in a wild type plant.

[0053] A transgenic cell or transgenic plant or part thereof comprising a recombinant expression vector as defined above or a recombinant expression construct as defined above is a further embodiment of the invention. The transgenic cell, transgenic plant or part thereof may be selected from the group consisting of bacteria, fungi, yeasts or plant, insect or mammalian cells or plants. Preferably the transgenic cells are bacteria, fungi, yeasts or plant cells. Preferred bacteria are Enterobacteria such as E. coli and bacteria of the genus Agrobacteria, for example Agrobacterium tumefaciens and Agrobacterium rhizogenes. Preferred plants are monocotyledonous or dicotyledonous plants for example monocotyledonous or dicotyledonous crop plants such as corn, soy, canola, cotton, potato, sugar beet, rice, wheat, sorghum, barley, miscanthus, musa, sugarcane and the like. Preferred crop plants are corn, rice, wheat, soy, canola, cotton or potato. Especially preferred dicotyledonous crop plants are soy, canola, cotton or potato. Especially preferred monocotyledonous crop plants are corn, wheat and rice.

[0054] A transgenic cell culture, transgenic seed, parts or propagation material derived from a transgenic cell or plant or part thereof as defined above comprising said heterologous NEENA as defined above in i) to v) or said recombinant expression construct or said recombinant vector as defined above are other embodiments of the invention.

[0055] Transgenic parts or propagation material as meant herein comprise all tissues and organs, for example leaf, stem and fruit as well as material that is useful for propagation and/or regeneration of plants such as cuttings, scions, layers, branches or shoots comprising the respective NEENA, recombinant expression construct or recombinant vector.

[0056] A further embodiment of the invention is the use of the NEENA as defined above in i) to v) or the recombinant construct or recombinant vector as defined above for enhancing expression in plants or parts thereof.

[0057] In a preferred embodiment, the NEENAs having SEQ ID 1 to 141, 2200 to 4768, 5173 to 14617 and 14936 to 14937 and 14958 to 14960 and their functional homologs as defined above under i) to v) are used in methods for enhancing constitutive expression in dicotyledonous plants, the NEENAs having SEQ ID 142 to 2199, 4769 to 5172 and 14618 to 14829 and their functional homologs as defined above under i) to v) are used in methods for enhancing constitutive expression in monocotyledonous plants. In an especially preferred embodiment, the NEENAs are used in the plant family or plant genus, they are derived from: Arabidopsis thaliana: SEQ ID NO 1 to 141 and 14936, 14937 and 14958 to 14960, Zea mays: SEQ ID NO 142-1255, Oryza sativa: SEQ ID NO 1256 to 1877, Brachypodium distachyon: SEQ ID NO 1878 to 2199, Glycine max: SEQ ID NO 2200 to 3908, Medicago truncatula: SEQ ID NO 3909 to 4768, Sorghum bicolor: SEQ ID NO 4769 to 5172, Arabidopsis lyrata: SEQ ID NO 5173 to 5530, Manihot esculentum: SEQ ID NO 5531 to 6278, Ricinus communis: SEQ ID NO 6279 to 6720, Populus trichocarpa: SEQ ID NO 6721 to 7257, Cucumis sativus: SEQ ID NO 7258 to 8104, Prunus persica: SEQ ID NO 8105 to 8377, Carica papaya: SEQ ID NO 8378 to 8882, Citrus sinensis: SEQ ID NO 8883 to 9243, Citrus clementina: SEQ ID NO 9244 to 9685, Eucalyptos grandes: SEQ ID NO 9686 to 10285, Vitis vinifera: SEQ ID NO 10286 to 13785, Mimulus guttatus: SEQ ID NO 13786 to 14056, Aquilegia coerula: SEQ ID NO 14057 to 14617, Setaria italica: SEQ ID NO 14618 to 14829, Selaginella moellendorfii: SEQ ID NO 14830 to 14853, Physcomitrella patens: SEQ ID NO 14854 to 14926 and Volvox carteri: 14927 to 14935.

[0058] Hence the application at hand provides constitutive gene expression enhancing nucleic acid molecules comprising one or more promoter, preferably constitutive promoter functionally linked to one or more NEENAs. Additionally use of such gene expression enhancing nucleic acid molecules and expression constructs, expression vectors, transgenic plants or parts thereof and transgenic cells comprising such gene expression enhancing nucleic acid molecules are provided.

[0059] A use of a transgenic cell culture, transgenic seed, parts or propagation material derived from a transgenic cell or plant or part thereof as defined above for the production of foodstuffs, animal feeds, seeds, pharmaceuticals or fine chemicals is also enclosed in this invention.

### DEFINITIONS

[0060] Abbreviations: NEENA—nucleic acid expression enhancing nucleic acid, GFP—green fluorescence protein, GUS—beta-Glucuronidase, BAP—6-benzylaminopurine; 2,4-D-2,4-dichlorophenoxyacetic acid; MS—Murashige and Skoog medium; NAA—1-naphtaleneacetic acid; MES, 2-(N-morpholino-ethanesulfonic acid, IAA indole acetic acid; Kan: Kanamycin sulfate; GA3—Gibberellic acid; Timentin™: ticarcillin disodium/clavulanate potassium, microl: Microliter.

[0061] It is to be understood that this invention is not limited to the particular methodology or protocols. It is also to be understood that the terminology used herein is for the purpose of describing particular embodiments only, and is not intended to limit the scope of the present invention which will be limited only by the appended claims. It must be noted that as used herein and in the appended claims, the singular forms “a,” “and,” and “the” include plural reference unless the context clearly dictates otherwise. Thus, for example, reference to “a vector” is a reference to one or more vectors and includes equivalents thereof known to those skilled in the art, and so forth. The term “about” is used herein to mean approximately, roughly, around, or in the region of.

[0062] When the term “about” is used in conjunction with a numerical range, it modifies that range by extending the boundaries above and below the numerical values set forth. In general, the term “about” is used herein to modify a numerical value above and below the stated value by a variance of 20 percent, preferably 10 percent up or down (higher or lower). As used herein, the word or means any one member of a particular list and also includes any combination of members of that list. The words “comprise,” “comprising,” “include,” “including,” and “includes” when used in this specification and in the following claims are intended to specify the presence of one or more stated features, integers, components, or steps, but they do not preclude the presence or addition of one or more other features, integers, components, steps, or groups thereof. For clarity, certain terms used in the specification are defined and used as follows:

[0063] Antiparallel: “Antiparallel” refers herein to two nucleotide sequences paired through hydrogen bonds between complementary base residues with phosphodiester bonds running in the 5′-3′ direction in one nucleotide sequence and in the 3′-5′ direction in the other nucleotide sequence.

[0064] Antisense: The term “antisense” refers to a nucleotide sequence that is inverted relative to its normal orientation for transcription or function and so expresses an RNA transcript that is complementary to a target gene mRNA molecule expressed within the host cell (e.g., it can hybridize to the target gene mRNA molecule or single stranded genomic DNA through Watson-Crick base pairing) or that is complementary to a target DNA molecule such as, for example genomic DNA present in the host cell.

[0065] Coding region: As used herein the term “coding region” when used in reference to a structural gene refers to the nucleotide sequences which encode the amino acids found in the nascent polypeptide as a result of translation of a mRNA molecule. The coding region is bounded, in eukaryotes, on the 5′-side by the nucleotide triplet “ATG” which encodes the initiator methionine and on the 3′-side by one of the three triplets which specify stop codons (i.e., TAA, TAG, TGA). In addition to containing introns, genomic forms of a gene may also include sequences located on both the 5′- and 3′-end of the sequences which are present on the RNA transcript. These sequences are referred to as “flanking” sequences or regions (these flanking sequences are located 5′ or 3′ to the non-translated sequences present on the mRNA transcript). The 5′-flanking region may contain regulatory sequences such as promoters and enhancers which control or influence the transcription of the gene. The 3′-flanking region may contain sequences which direct the termination of transcription, post-transcriptional cleavage and polyadenylation.

[0066] Complementary: “Complementary” or “complementarity” refers to two nucleotide sequences which comprise antiparallel nucleotide sequences capable of pairing with one another (by the base-pairing rules) upon formation of hydrogen bonds between the complementary base residues in the antiparallel nucleotide sequences. For example, the sequence 5′-AGT-3′ is complementary to the sequence 5′-ACT-3′. Complementarity can be “partial” or “total.” “Partial” complementarity is where one or more nucleic acid bases are not matched according to the base pairing rules. “Total” or “complete” complementarity between nucleic acid molecules is where each and every nucleic acid base is matched with another base under the base pairing rules. The degree of complementarity between nucleic acid molecule strands has significant effects on the efficiency and strength of hybridization between nucleic acid molecule strands. A “complement” of a nucleic acid sequence as used herein refers to a nucleotide sequence whose nucleic acid molecules show total complementarity to the nucleic acid molecules of the nucleic acid sequence.

[0067] Double-stranded RNA: A “double-stranded RNA” molecule or “dsRNA” molecule comprises a sense RNA fragment of a nucleotide sequence and an antisense RNA fragment of the nucleotide sequence, which both comprise nucleotide sequences complementary to one another, thereby allowing the sense and antisense RNA fragments to pair and form a double-stranded RNA molecule.

[0068] Endogenous: An “endogenous” nucleotide sequence refers to a nucleotide sequence, which is present in the genome of the untransformed plant cell.

[0069] Enhanced expression: “enhance” or “increase” the expression of a nucleic acid molecule in a plant cell are used equivalently herein and mean that the level of expression of the nucleic acid molecule in a plant, part of a plant or plant cell after applying a method of the present invention is higher than its expression in the plant, part of the plant or plant cell before applying the method, or compared to a reference plant lacking a recombinant nucleic acid molecule of the invention. For example, the reference plant comprises the same construct which is only lacking the respective NEENA. The term “enhanced” or “increased” as used herein are synonymous and means herein higher, preferably significantly higher expression of the nucleic acid molecule to be expressed. As used herein, an “enhancement” or “increase” of the level of an agent such as a protein, mRNA or RNA means that the level is increased relative to a substantially identical plant, part of a plant or plant cell grown under substantially identical conditions, lacking a recombinant nucleic acid molecule of the invention, for example lacking the NEENA molecule, the recombinant construct or recombinant vector of the invention. As used herein, “enhancement” or “increase” of the level of an agent, such as for example a preRNA, mRNA, rRNA, tRNA, snoRNA, snRNA expressed by the target gene and/or of the protein product encoded by it, means that the level is increased 50% or more, for example 100% or more, preferably 200% or more, more preferably 5 fold or more, even more preferably 10 fold or more, most preferably 20 fold or more for example 50 fold relative to a cell or organism lacking a recombinant nucleic acid molecule of the invention. The enhancement or increase can be determined by methods with which the skilled worker is familiar. Thus, the enhancement or increase of the nucleic acid or protein quantity can be determined for example by an immunological detection of the protein. Moreover, techniques such as protein assay, fluorescence, Northern hybridization, nuclease protection assay, reverse transcription (quantitative RT-PCR), ELISA (enzyme-linked immunosorbent assay), Western blotting, radioimmunoassay (RIA) or other immunoassays and fluorescence-activated cell analysis (FACS) can be employed to measure a specific protein or RNA in a plant or plant cell. Depending on the type of the induced protein product, its activity or the effect on the phenotype of the organism or the cell may also be determined. Methods for determining the protein quantity are known to the skilled worker. Examples, which may be mentioned, are: the micro-Biuret method (Goa J (1953) Scand J Clin Lab Invest 5:218-222), the Folin-Ciocalteau method (Lowry O H et al. (1951) J Biol Chem 193:265-275) or measuring the absorption of CBB G-250 (Bradford M M (1976) Analyt Biochem 72:248-254). As one example for quantifying the activity of a protein, the detection of luciferase activity is described in the Examples below.

[0070] Expression: “Expression” refers to the biosynthesis of a gene product, preferably to the transcription and/or translation of a nucleotide sequence, for example an endogenous gene or a heterologous gene, in a cell. For example, in the case of a structural gene, expression involves transcription of the structural gene into mRNA and—optionally—the subsequent translation of mRNA into one or more polypeptides. In other cases, expression may refer only to the transcription of the DNA harboring an RNA molecule.

[0071] Expression construct: “Expression construct” as used herein mean a DNA sequence capable of directing expression of a particular nucleotide sequence in an appropriate part of a plant or plant cell, comprising a promoter functional in said part of a plant or plant cell into which it will be introduced, operatively linked to the nucleotide sequence of interest which is—optionally—operatively linked to termination signals. If translation is required, it also typically comprises sequences required for proper translation of the nucleotide sequence. The coding region may code for a protein of interest but may also code for a functional RNA of interest, for example RNAa, siRNA, snoRNA, snRNA, microRNA, ta-siRNA or any other noncoding regulatory RNA, in the sense or antisense direction. The expression construct comprising the nucleotide sequence of interest may be chimeric, meaning that one or more of its components is heterologous with respect to one or more of its other components. The expression construct may also be one, which is naturally occurring but has been obtained in a recombinant form useful for heterologous expression. Typically, however, the expression construct is heterologous with respect to the host, i.e., the particular DNA sequence of the expression construct does not occur naturally in the host cell and must have been introduced into the host cell or an ancestor of the host cell by a transformation event. The expression of the nucleotide sequence in the expression construct may be under the control of a constitutive promoter or of an inducible promoter, which initiates transcription only when the host cell is exposed to some particular external stimulus. In the case of a plant, the promoter can also be specific to a particular tissue or organ or stage of development.

[0072] Foreign: The term “foreign” refers to any nucleic acid molecule (e.g., gene sequence) which is introduced into the genome of a cell by experimental manipulations and may include sequences found in that cell so long as the introduced sequence contains some modification (e.g., a point mutation, the presence of a selectable marker gene, etc.) and is therefore distinct relative to the naturally-occurring sequence.

[0073] Functional linkage: The term “functional linkage” or “functionally linked” is to be understood as meaning, for example, the sequential arrangement of a regulatory element (e.g. a promoter) with a nucleic acid sequence to be expressed and, if appropriate, further regulatory elements (such as e.g., a terminator or a NEENA) in such a way that each of the regulatory elements can fulfill its intended function to allow, modify, facilitate or otherwise influence expression of said nucleic acid sequence. As a synonym the wording “operable linkage” or “operably linked” may be used. The expression may result depending on the arrangement of the nucleic acid sequences in relation to sense or antisense RNA. To this end, direct linkage in the chemical sense is not necessarily required. Genetic control sequences such as, for example, enhancer sequences, can also exert their function on the target sequence from positions which are further away, or indeed from other DNA molecules. Preferred arrangements are those in which the nucleic acid sequence to be expressed recombinantly is positioned behind the sequence acting as promoter, so that the two sequences are linked covalently to each other. The distance between the promoter sequence and the nucleic acid sequence to be expressed recombinantly is preferably less than 200 base pairs, especially preferably less than 100 base pairs, very especially preferably less than 50 base pairs. In a preferred embodiment, the nucleic acid sequence to be transcribed is located behind the promoter in such a way that the transcription start is identical with the desired beginning of the chimeric RNA of the invention. Functional linkage, and an expression construct, can be generated by means of customary recombination and cloning techniques as described (e.g., in Maniatis T, Fritsch E F and Sambrook J (1989) Molecular Cloning: A Laboratory Manual, 2nd Ed., Cold Spring Harbor Laboratory, Cold Spring Harbor (N.Y.); Silhavy et al. (1984) Experiments with Gene Fusions, Cold Spring Harbor Laboratory, Cold Spring Harbor (N.Y.); Ausubel et al. (1987) Current Protocols in Molecular Biology, Greene Publishing Assoc. and Wiley Interscience; Gelvin et al. (Eds) (1990) Plant Molecular Biology Manual; Kluwer Academic Publisher, Dordrecht, The Netherlands). However, further sequences, which, for example, act as a linker with specific cleavage sites for restriction enzymes, or as a signal peptide, may also be positioned between the two sequences. The insertion of sequences may also lead to the expression of fusion proteins. Preferably, the expression construct, consisting of a linkage of a regulatory region for example a promoter and nucleic acid sequence to be expressed, can exist in a vector-integrated form and be inserted into a plant genome, for example by transformation.

[0074] Gene: The term “gene” refers to a region operably joined to appropriate regulatory sequences capable of regulating the expression of the gene product (e.g., a polypeptide or a functional RNA) in some manner. A gene includes untranslated regulatory regions of DNA (e.g., promoters, enhancers, repressors, etc.) preceding (up-stream) and following (downstream) the coding region (open reading frame, ORF) as well as, where applicable, intervening sequences (i.e., introns) between individual coding regions (i.e., exons). The term “structural gene” as used herein is intended to mean a DNA sequence that is transcribed into mRNA which is then translated into a sequence of amino acids characteristic of a specific polypeptide.

[0075] Genome and genomic DNA: The terms “genome” or “genomic DNA” is referring to the heritable genetic information of a host organism. Said genomic DNA comprises the DNA of the nucleus (also referred to as chromosomal DNA) but also the DNA of the plastids (e.g., chloroplasts) and other cellular organelles (e.g., mitochondria). Preferably the terms genome or genomic DNA is referring to the chromosomal DNA of the nucleus.

[0076] Heterologous: The term “heterologous” with respect to a nucleic acid molecule or DNA refers to a nucleic acid molecule which is operably linked to, or is manipulated to become operably linked to, a second nucleic acid molecule to which it is not operably linked in nature, or to which it is operably linked at a different location in nature. A heterologous expression construct comprising a nucleic acid molecule and one or more regulatory nucleic acid molecule (such as a promoter or a transcription termination signal) linked thereto for example is a constructs originating by experimental manipulations in which either a) said nucleic acid molecule, or b) said regulatory nucleic acid molecule or c) both (i.e. (a) and (b)) is not located in its natural (native) genetic environment or has been modified by experimental manipulations, an example of a modification being a substitution, addition, deletion, inversion or insertion of one or more nucleotide residues. Natural genetic environment refers to the natural chromosomal locus in the organism of origin, or to the presence in a genomic library. In the case of a genomic library, the natural genetic environment of the sequence of the nucleic acid molecule is preferably retained, at least in part. The environment flanks the nucleic acid sequence at least at one side and has a sequence of at least 50 bp, preferably at least 500 bp, especially preferably at least 1,000 bp, very especially preferably at least 5,000 bp, in length. A naturally occurring expression construct—for example the naturally occurring combination of a promoter with the corresponding gene—becomes a transgenic expression construct when it is modified by non-natural, synthetic “artificial” methods such as, for example, mutagenization. Such methods have been described (U.S. Pat. No. 5,565,350; WO 00/15815). For example a protein encoding nucleic acid molecule operably linked to a promoter, which is not the native promoter of this molecule, is considered to be heterologous with respect to the promoter. Preferably, heterologous DNA is not endogenous to or not naturally associated with the cell into which it is introduced, but has been obtained from another cell or has been synthesized. Heterologous DNA also includes an endogenous DNA sequence, which contains some modification, non-naturally occurring, multiple copies of an endogenous DNA sequence, or a DNA sequence which is not naturally associated with another DNA sequence physically linked thereto. Generally, although not necessarily, heterologous DNA encodes RNA or proteins that are not normally produced by the cell into which it is expressed.

[0077] High expression constitutive promoter: A “high expression constitutive promoter” as used herein means a promoter causing constitutive expression in a plant or part thereof wherein the accumulation or rate of synthesis of RNA or stability of RNA derived from the nucleic acid molecule under the control of the respective promoter is higher, preferably significantly higher than the expression caused by the promoter lacking the NEENA of the invention. Preferably the amount of RNA and/or the rate of RNA synthesis and/or stability of RNA is increased 50% or more, for example 100% or more, preferably 200% or more, more preferably 5 fold or more, even more preferably 10 fold or more, most preferably 20 fold or more for example 50 fold relative to a constitutive promoter lacking a NEENA of the invention.

[0078] Hybridization: The term “hybridization” as used herein includes “any process by which a strand of nucleic acid molecule joins with a complementary strand through base pairing.” (J. Coombs (1994) Dictionary of Biotechnology, Stockton Press, New York). Hybridization and the strength of hybridization (i.e., the strength of the association between the nucleic acid molecules) is impacted by such factors as the degree of complementarity between the nucleic acid molecules, stringency of the conditions involved, the Tm of the formed hybrid, and the G:C ratio within the nucleic acid molecules. As used herein, the term “Tm” is used in reference to the “melting temperature.” The melting temperature is the temperature at which a population of double-stranded nucleic acid molecules becomes half dissociated into single strands. The equation for calculating the Tm of nucleic acid molecules is well known in the art. As indicated by standard references, a simple estimate of the Tm value may be calculated by the equation: Tm=81.5+0.41 (% G+C), when a nucleic acid molecule is in aqueous solution at 1 M NaCl [see e.g., Anderson and Young, Quantitative Filter Hybridization, in Nucleic Acid Hybridization (1985)]. Other references include more sophisticated computations, which take structural as well as sequence characteristics into account for the calculation of Tm. Stringent conditions, are known to those skilled in the art and can be found in Current Protocols in Molecular Biology, John Wiley & Sons, N.Y. (1989), 6.3.1-6.3.6.

[0079] “Identity”: “Identity” when used in respect to the comparison of two or more nucleic acid or amino acid molecules means that the sequences of said molecules share a certain degree of sequence similarity, the sequences being partially identical.

[0080] To determine the percentage identity (homology is herein used interchangeably) of two amino acid sequences or of two nucleic acid molecules, the sequences are written one underneath the other for an optimal comparison (for example gaps may be inserted into the sequence of a protein or of a nucleic acid in order to generate an optimal alignment with the other protein or the other nucleic acid).

[0081] The amino acid residues or nucleic acid molecules at the corresponding amino acid positions or nucleotide positions are then compared. If a position in one sequence is occupied by the same amino acid residue or the same nucleic acid molecule as the corresponding position in the other sequence, the molecules are homologous at this position (i.e. amino acid or nucleic acid “homology” as used in the present context corresponds to amino acid or nucleic acid “identity”. The percentage identity between the two sequences is a function of the number of identical positions shared by the sequences (i.e. % homology=number of identical positions/total number of positions×100). The terms “homology” and “identity” are thus to be considered as synonyms.

[0082] For the determination of the percentage identity of two or more amino acids or of two or more nucleotide sequences several computer software programs have been developed. The identity of two or more sequences can be calculated with for example the software fasta, which presently has been used in the version fasta 3 (W. R. Pearson and D. J. Lipman, PNAS 85, 2444(1988); W. R. Pearson, Methods in Enzymology 183, 63 (1990); W. R. Pearson and D. J. Lipman, PNAS 85, 2444 (1988); W. R. Pearson, Enzymology 183, 63 (1990)). Another useful program for the calculation of identities of different sequences is the standard blast program, which is included in the Biomax pedant software (Biomax, Munich, Federal Republic of Germany). This leads unfortunately sometimes to suboptimal results since blast does not always include complete sequences of the subject and the query. Nevertheless as this program is very efficient it can be used for the comparison of a huge number of sequences. The following settings are typically used for such a comparisons of sequences:

[0083] -p Program Name [String]; -d Database [String]; default=nr; -i Query File [File In]; default=stdin; -e Expectation value (E) [Real]; default=10.0; -m alignment view options: 0=pairwise; 1=query-anchored showing identities; 2=query-anchored no identities; 3=flat query-anchored, show identities; 4=flat query-anchored, no identities; 5=query-anchored no identities and blunt ends; 6=flat query-anchored, no identities and blunt ends; 7=XML Blast output; 8=tabular; 9 tabular with comment lines [Integer]; default=0; -o BLAST report Output File [File Out] Optional; default=stdout; -F Filter query sequence (DUST with blastn, SEG with others) [String]; default=T; -G Cost to open a gap (zero invokes default behavior) [Integer]; default=0; -E Cost to extend a gap (zero invokes default behavior) [Integer]; default=0; -X X dropoff value for gapped alignment (in bits) (zero invokes default behavior); blastn 30, megablast 20, tblastx 0, all others 15 [Integer]; default=0; -I Show GI's in deflines [T/F]; default=F; -q Penalty for a nucleotide mismatch (blastn only) [Integer]; default=−3; -r Reward for a nucleotide match (blastn only) [Integer]; default=1; -v Number of database sequences to show oneline descriptions for (V) [Integer]; default=500; -b Number of database sequence to show alignments for (B) [Integer]; default=250; -f Threshold for extending hits, default if zero; blastp 11, blastn 0, blastx 12, tblastn 13; tblastx 13, megablast 0 [Integer]; default=0; -g Perfom gapped alignment (not available with tblastx) [T/F]; default=T; -Q Query Genetic code to use [Integer]; default=1; -D DB Genetic code (for tblast[nx] only) [Integer]; default=1; -a Number of processors to use [Integer]; default=1; -O SeqAlign file [File Out] Optional; -J Believe the query defline [T/F]; default=F; -M Matrix [String]; default=BLOSUM62; -W Word size, default if zero (blastn 11, megablast 28, all others 3) [Integer]; default=0; -z Effective length of the database (use zero for the real size) [Real]; default=0; -K Number of best hits from a region to keep (off by default, if used a value of 100 is recommended) [Integer]; default=0; -P 0 for multiple hit, 1 for single hit [Integer]; default=0; -Y Effective length of the search space (use zero for the real size) [Real]; default=0; -S Query strands to search against database (for blast[nx], and tblastx); 3 is both, 1 is top, 2 is bottom [Integer]; default=3; -T Produce HTML output [T/F]; default=F; -I Restrict search of database to list of GI's [String] Optional; -U Use lower case filtering of FASTA sequence [T/F] Optional; default=F; -y X dropoff value for ungapped extensions in bits (0.0 invokes default behavior); blastn 20, megablast 10, all others 7 [Real]; default=0.0; -Z X dropoff value for final gapped alignment in bits (0.0 invokes default behavior); blastn/megablast 50, tblastx 0, all others 25 [Integer]; default=0; -R PSI-TBLASTN checkpoint file [File In] Optional; -n MegaBlast search [T/F]; default=F; -L Location on query sequence [String] Optional; -A Multiple Hits window size, default if zero (blastn/megablast 0, all others 40 [Integer]; default=0; -w Frame shift penalty (OOF algorithm for blastx) [Integer]; default=0; -t Length of the largest intron allowed in tblastn for linking HSPs (0 disables linking) [Integer]; default=O.

[0084] Results of high quality are reached by using the algorithm of Needleman and Wunsch or Smith and Waterman. Therefore programs based on said algorithms are preferred. Advantageously the comparisons of sequences can be done with the program PileUp (J. Mol. Evolution., 25, 351 (1987), Higgins et al., CABIOS 5, 151 (1989)) or preferably with the programs “Gap” and “Needle”, which are both based on the algorithms of Needleman and Wunsch (J. Mol. Biol. 48; 443 (1970)), and “BestFit”, which is based on the algorithm of Smith and Waterman (Adv. Appl. Math. 2; 482 (1981)). “Gap” and “BestFit” are part of the GCG software-package (Genetics Computer Group, 575 Science Drive, Madison, Wis., USA 53711 (1991); Altschul et al., (Nucleic Acids Res. 25, 3389 (1997)), “Needle” is part of the The European Molecular Biology Open Software Suite (EMBOSS) (Trends in Genetics 16 (6), 276 (2000)). Therefore preferably the calculations to determine the percentages of sequence identity are done with the programs “Gap” or “Needle” over the whole range of the sequences. The following standard adjustments for the comparison of nucleic acid sequences were used for “Needle”: matrix: EDNAFULL, Gap_penalty: 10.0, Extend_penalty: 0.5. The following standard adjustments for the comparison of nucleic acid sequences were used for “Gap”: gap weight: 50, length weight: 3, average match: 10.000, average mismatch: 0.000.

[0085] For example a sequence, which is said to have 80% identity with sequence SEQ ID NO: 1 at the nucleic acid level is understood as meaning a sequence which, upon comparison with the sequence represented by SEQ ID NO: 1 by the above program “Needle” with the above parameter set, has a 80% identity. Preferably the identity is calculated on the complete length of the query sequence, for example SEQ ID NO:1.

[0086] Intron: refers to sections of DNA (intervening sequences) within a gene that do not encode part of the protein that the gene produces, and that is spliced out of the mRNA that is transcribed from the gene before it is exported from the cell nucleus. Intron sequence refers to the nucleic acid sequence of an intron. Thus, introns are those regions of DNA sequences that are transcribed along with the coding sequence (exons) but are removed during the formation of mature mRNA. Introns can be positioned within the actual coding region or in either the 5′ or 3′ untranslated leaders of the pre-mRNA (unspliced mRNA). Introns in the primary transcript are excised and the coding sequences are simultaneously and precisely ligated to form the mature mRNA. The junctions of introns and exons form the splice site. The sequence of an intron begins with GU and ends with AG. Furthermore, in plants, two examples of AU-AC introns have been described: the fourteenth intron of the RecA-like protein gene and the seventh intron of the G5 gene from Arabidopsis thaliana are AT-AC introns. Pre-mRNAs containing introns have three short sequences that are—beside other sequences—essential for the intron to be accurately spliced. These sequences are the 5′ splice-site, the 3′ splice-site, and the branchpoint. mRNA splicing is the removal of intervening sequences (introns) present in primary mRNA transcripts and joining or ligation of exon sequences. This is also known as cis-splicing which joins two exons on the same RNA with the removal of the intervening sequence (intron). The functional elements of an intron is comprising sequences that are recognized and bound by the specific protein components of the spliceosome (e.g. splicing consensus sequences at the ends of introns). The interaction of the functional elements with the spliceosome results in the removal of the intron sequence from the premature mRNA and the rejoining of the exon sequences. Introns have three short sequences that are essential—although not sufficient—for the intron to be accurately spliced. These sequences are the 5′ splice site, the 3′ splice site and the branch point. The branchpoint sequence is important in splicing and splice-site selection in plants. The branchpoint sequence is usually located 10-60 nucleotides upstream of the 3′ splice site.

[0087] Isogenic: organisms (e.g., plants), which are genetically identical, except that they may differ by the presence or absence of a heterologous DNA sequence.

[0088] Isolated: The term “isolated” as used herein means that a material has been removed by the hand of man and exists apart from its original, native environment and is therefore not a product of nature. An isolated material or molecule (such as a DNA molecule or enzyme) may exist in a purified form or may exist in a non-native environment such as, for example, in a transgenic host cell. For example, a naturally occurring polynucleotide or polypeptide present in a living plant is not isolated, but the same polynucleotide or polypeptide, separated from some or all of the coexisting materials in the natural system, is isolated. Such polynucleotides can be part of a vector and/or such polynucleotides or polypeptides could be part of a composition, and would be isolated in that such a vector or composition is not part of its original environment. Preferably, the term “isolated” when used in relation to a nucleic acid molecule, as in “an isolated nucleic acid sequence” refers to a nucleic acid sequence that is identified and separated from at least one contaminant nucleic acid molecule with which it is ordinarily associated in its natural source. Isolated nucleic acid molecule is nucleic acid molecule present in a form or setting that is different from that in which it is found in nature. In contrast, non-isolated nucleic acid molecules are nucleic acid molecules such as DNA and RNA, which are found in the state they exist in nature. For example, a given DNA sequence (e.g., a gene) is found on the host cell chromosome in proximity to neighboring genes; RNA sequences, such as a specific mRNA sequence encoding a specific protein, are found in the cell as a mixture with numerous other mRNAs, which encode a multitude of proteins. However, an isolated nucleic acid sequence comprising for example SEQ ID NO: 1 includes, by way of example, such nucleic acid sequences in cells which ordinarily contain SEQ ID NO:1 where the nucleic acid sequence is in a chromosomal or extrachromosomal location different from that of natural cells, or is otherwise flanked by a different nucleic acid sequence than that found in nature. The isolated nucleic acid sequence may be present in single-stranded or double-stranded form. When an isolated nucleic acid sequence is to be utilized to express a protein, the nucleic acid sequence will contain at a minimum at least a portion of the sense or coding strand (i.e., the nucleic acid sequence may be single-stranded). Alternatively, it may contain both the sense and anti-sense strands (i.e., the nucleic acid sequence may be double-stranded).

[0089] Minimal Promoter: promoter elements, particularly a TATA element, that are inactive or that have greatly reduced promoter activity in the absence of upstream activation. In the presence of a suitable transcription factor, the minimal promoter functions to permit transcription.

[0090] NEENA: see “Nucleic acid expression enhancing nucleic acid”.

[0091] Non-coding: The term “non-coding” refers to sequences of nucleic acid molecules that do not encode part or all of an expressed protein. Non-coding sequences include but are not limited to introns, enhancers, promoter regions, 3′ untranslated regions, and 5′ untranslated regions.

[0092] Nucleic acid expression enhancing nucleic acid (NEENA): The term “nucleic acid expression enhancing nucleic acid” refers to a sequence and/or a nucleic acid molecule of a specific sequence having the intrinsic property to enhance expression of a nucleic acid under the control of a promoter to which the NEENA is functionally linked. Unlike promoter sequences, the NEENA as such is not able to drive expression. In order to fulfill the function of enhancing expression of a nucleic acid molecule functionally linked to the NEENA, the NEENA itself has to be functionally linked to a promoter. In distinction to enhancer sequences known in the art, the NEENA is acting in cis but not in trans and has to be located close to the transcription start site of the nucleic acid to be expressed.

[0093] Nucleic acids and nucleotides: The terms “Nucleic Acids” and “Nucleotides” refer to naturally occurring or synthetic or artificial nucleic acid or nucleotides. The terms “nucleic acids” and “nucleotides” comprise deoxyribonucleotides or ribonucleotides or any nucleotide analogue and polymers or hybrids thereof in either single- or double-stranded, sense or antisense form. Unless otherwise indicated, a particular nucleic acid sequence also implicitly encompasses conservatively modified variants thereof (e.g., degenerate codon substitutions) and complementary sequences, as well as the sequence explicitly indicated. The term “nucleic acid” is used interchangeably herein with “gene”, “cDNA, “mRNA”, “oligonucleotide,” and “polynucleotide”. Nucleotide analogues include nucleotides having modifications in the chemical structure of the base, sugar and/or phosphate, including, but not limited to, 5-position pyrimidine modifications, 8-position purine modifications, modifications at cytosine exocyclic amines, substitution of 5-bromo-uracil, and the like; and 2′-position sugar modifications, including but not limited to, sugar-modified ribonucleotides in which the 2′-OH is replaced by a group selected from H, OR, R, halo, SH, SR, NH2, NHR, NR2, or CN. Short hairpin RNAs (shRNAs) also can comprise non-natural elements such as non-natural bases, e.g., ionosin and xanthine, non-natural sugars, e.g., 2′-methoxy ribose, or non-natural phosphodiester linkages, e.g., methylphosphonates, phosphorothioates and peptides.

[0094] Nucleic acid sequence: The phrase “nucleic acid sequence” refers to a single or double-stranded polymer of deoxyribonucleotide or ribonucleotide bases read from the 5′- to the 3′-end. It includes chromosomal DNA, self-replicating plasmids, infectious polymers of DNA or RNA and DNA or RNA that performs a primarily structural role. “Nucleic acid sequence” also refers to a consecutive list of abbreviations, letters, characters or words, which represent nucleotides. In one embodiment, a nucleic acid can be a “probe” which is a relatively short nucleic acid, usually less than 100 nucleotides in length. Often a nucleic acid probe is from about 50 nucleotides in length to about 10 nucleotides in length. A “target region” of a nucleic acid is a portion of a nucleic acid that is identified to be of interest. A “coding region” of a nucleic acid is the portion of the nucleic acid, which is transcribed and translated in a sequence-specific manner to produce into a particular polypeptide or protein when placed under the control of appropriate regulatory sequences. The coding region is said to encode such a polypeptide or protein.

[0095] Oligonucleotide: The term “oligonucleotide” refers to an oligomer or polymer of ribonucleic acid (RNA) or deoxyribonucleic acid (DNA) or mimetics thereof, as well as oligonucleotides having non-naturally-occurring portions which function similarly. Such modified or substituted oligonucleotides are often preferred over native forms because of desirable properties such as, for example, enhanced cellular uptake, enhanced affinity for nucleic acid target and increased stability in the presence of nucleases. An oligonucleotide preferably includes two or more nucleomonomers covalently coupled to each other by linkages (e.g., phosphodiesters) or substitute linkages.

[0096] Overhang: An “overhang” is a relatively short single-stranded nucleotide sequence on the 5′- or 3′-hydroxyl end of a double-stranded oligonucleotide molecule (also referred to as an “extension,” “protruding end,” or “sticky end”).

[0097] Plant: is generally understood as meaning any eukaryotic single- or multi-celled organism or a cell, tissue, organ, part or propagation material (such as seeds or fruit) of same which is capable of photosynthesis. Included for the purpose of the invention are all genera and species of higher and lower plants of the Plant Kingdom. Annual, perennial, monocotyledonous and dicotyledonous plants are preferred. The term includes the mature plants, seed, shoots and seedlings and their derived parts, propagation material (such as seeds or microspores), plant organs, tissue, protoplasts, callus and other cultures, for example cell cultures, and any other type of plant cell grouping to give functional or structural units. Mature plants refer to plants at any desired developmental stage beyond that of the seedling. Seedling refers to a young immature plant at an early developmental stage. Annual, biennial, monocotyledonous and dicotyledonous plants are preferred host organisms for the generation of transgenic plants. The expression of genes is furthermore advantageous in all ornamental plants, useful or ornamental trees, flowers, cut flowers, shrubs or lawns. Plants which may be mentioned by way of example but not by limitation are angiosperms, bryophytes such as, for example, Hepaticae (liverworts) and Musci (mosses); Pteridophytes such as ferns, horsetail and club mosses; gymnosperms such as conifers, cycads, ginkgo and Gnetatae; algae such as Chlorophyceae, Phaeophpyceae, Rhodophyceae, Myxophyceae, Xanthophyceae, Bacillariophyceae (diatoms), and Euglenophyceae. Preferred are plants which are used for food or feed purpose such as the families of the Leguminosae such as pea, alfalfa and soya; Gramineae such as rice, maize, wheat, barley, sorghum, millet, rye, triticale, or oats; the family of the Umbelliferae, especially the genus Daucus, very especially the species carota (carrot) and Apium, very especially the species Graveolens dulce (celery) and many others; the family of the Solanaceae, especially the genus Lycopersicon, very especially the species esculentum (tomato) and the genus Solanum, very especially the species tuberosum (potato) and melongena (eggplant), and many others (such as tobacco); and the genus Capsicum, very especially the species annuum (peppers) and many others; the family of the Leguminosae, especially the genus Glycine, very especially the species max (soybean), alfalfa, pea, lucerne, beans or peanut and many others; and the family of the Cruciferae (Brassicacae), especially the genus Brassica, very especially the species napus (oil seed rape), campestris (beet), oleracea cv Tastie (cabbage), oleracea cv Snowball Y (cauliflower) and oleracea cv Emperor (broccoli); and of the genus Arabidopsis, very especially the species thaliana and many others; the family of the Compositae, especially the genus Lactuca, very especially the species sativa (lettuce) and many others; the family of the Asteraceae such as sunflower, Tagetes, lettuce or Calendula and many other; the family of the Cucurbitaceae such as melon, pumpkin/squash or zucchini, and linseed. Further preferred are cotton, sugar cane, hemp, flax, chillies, and the various tree, nut and wine species.

[0098] Polypeptide: The terms “polypeptide”, “peptide”, “oligopeptide”, “polypeptide”, “gene product”, “expression product” and “protein” are used interchangeably herein to refer to a polymer or oligomer of consecutive amino acid residues.

[0099] Pre-protein: Protein, which is normally targeted to a cellular organelle, such as a chloroplast, and still comprising its transit peptide.

[0100] Primary transcript: The term “primary transcript” as used herein refers to a premature RNA transcript of a gene. A “primary transcript” for example still comprises introns and/or is not yet comprising a polyA tail or a cap structure and/or is missing other modifications necessary for its correct function as transcript such as for example trimming or editing.

[0101] Promoter: The terms “promoter”, or “promoter sequence” are equivalents and as used herein, refer to a DNA sequence which when ligated to a nucleotide sequence of interest is capable of controlling the transcription of the nucleotide sequence of interest into RNA. Such promoters can for example be found in the following public databases http://www.grassius.org/grasspromdb.html, http://mendel.cs.rhul.ac.uk/mendel.php?topic=plantprom, http://ppdb.gene.nagoya-u.ac.jp/cgibin/index.cgi. Promoters listed there may be addressed with the methods of the invention and are herewith included by reference. A promoter is located 5′ (i.e., upstream), proximal to the transcriptional start site of a nucleotide sequence of interest whose transcription into mRNA it controls, and provides a site for specific binding by RNA polymerase and other transcription factors for initiation of transcription. Said promoter comprises for example the at least 10 kb, for example 5 kb or 2 kb proximal to the transcription start site. It may also comprise the at least 1500 bp proximal to the transcriptional start site, preferably the at least 1000 bp, more preferably the at least 500 bp, even more preferably the at least 400 bp, the at least 300 bp, the at least 200 bp or the at least 100 bp. In a further preferred embodiment, the promoter comprises the at least 50 bp proximal to the transcription start site, for example, at least 25 bp. The promoter does not comprise exon and/or intron regions or 5′ untranslated regions. The promoter may for example be heterologous or homologous to the respective plant. A polynucleotide sequence is “heterologous to” an organism or a second polynucleotide sequence if it originates from a foreign species, or, if from the same species, is modified from its original form. For example, a promoter operably linked to a heterologous coding sequence refers to a coding sequence from a species different from that from which the promoter was derived, or, if from the same species, a coding sequence which is not naturally associated with the promoter (e.g. a genetically engineered coding sequence or an allele from a different ecotype or variety). Suitable promoters can be derived from genes of the host cells where expression should occur or from pathogens for this host cells (e.g., plants or plant pathogens like plant viruses). A plant specific promoter is a promoter suitable for regulating expression in a plant. It may be derived from a plant but also from plant pathogens or it might be a synthetic promoter designed by man. If a promoter is an inducible promoter, then the rate of transcription increases in response to an inducing agent. Also, the promoter may be regulated in a tissue-specific or tissue preferred manner such that it is only or predominantly active in transcribing the associated coding region in a specific tissue type(s) such as leaves, roots or meristem. The term “tissue specific” as it applies to a promoter refers to a promoter that is capable of directing selective expression of a nucleotide sequence of interest to a specific type of tissue (e.g., petals) in the relative absence of expression of the same nucleotide sequence of interest in a different type of tissue (e.g., roots). Tissue specificity of a promoter may be evaluated by, for example, operably linking a reporter gene to the promoter sequence to generate a reporter construct, introducing the reporter construct into the genome of a plant such that the reporter construct is integrated into every tissue of the resulting transgenic plant, and detecting the expression of the reporter gene (e.g., detecting mRNA, protein, or the activity of a protein encoded by the reporter gene) in different tissues of the transgenic plant. The detection of a greater level of expression of the reporter gene in one or more tissues relative to the level of expression of the reporter gene in other tissues shows that the promoter is specific for the tissues in which greater levels of expression are detected. The term “cell type specific” as applied to a promoter refers to a promoter, which is capable of directing selective expression of a nucleotide sequence of interest in a specific type of cell in the relative absence of expression of the same nucleotide sequence of interest in a different type of cell within the same tissue. The term “cell type specific” when applied to a promoter also means a promoter capable of promoting selective expression of a nucleotide sequence of interest in a region within a single tissue. Cell type specificity of a promoter may be assessed using methods well known in the art, e.g., GUS activity staining, GFP protein or immunohistochemical staining. The term “constitutive” when made in reference to a promoter or the expression derived from a promoter means that the promoter is capable of directing transcription of an operably linked nucleic acid molecule in the absence of a stimulus (e.g., heat shock, chemicals, light, etc.) in the majority of plant tissues and cells throughout substantially the entire lifespan of a plant or part of a plant. Typically, constitutive promoters are capable of directing expression of a transgene in substantially any cell and any tissue.

[0102] Promoter specificity: The term “specificity” when referring to a promoter means the pattern of expression conferred by the respective promoter. The specificity describes the tissues and/or developmental status of a plant or part thereof, in which the promoter is conferring expression of the nucleic acid molecule under the control of the respective promoter. Specificity of a promoter may also comprise the environmental conditions, under which the promoter may be activated or down-regulated such as induction or repression by biological or environmental stresses such as cold, drought, wounding or infection.

[0103] Purified: As used herein, the term “purified” refers to molecules, either nucleic or amino acid sequences that are removed from their natural environment, isolated or separated. “Substantially purified” molecules are at least 60% free, preferably at least 75% free, and more preferably at least 90% free from other components with which they are naturally associated. A purified nucleic acid sequence may be an isolated nucleic acid sequence.

[0104] Recombinant: The term “recombinant” with respect to nucleic acid molecules refers to nucleic acid molecules produced by recombinant DNA techniques. Recombinant nucleic acid molecules may also comprise molecules, which as such does not exist in nature but are modified, changed, mutated or otherwise manipulated by man. Preferably, a “recombinant nucleic acid molecule” is a non-naturally occurring nucleic acid molecule that differs in sequence from a naturally occurring nucleic acid molecule by at least one nucleic acid. A “recombinant nucleic acid molecule” may also comprise a “recombinant construct” which comprises, preferably operably linked, a sequence of nucleic acid molecules not naturally occurring in that order. Preferred methods for producing said recombinant nucleic acid molecule may comprise cloning techniques, directed or non-directed mutagenesis, synthesis or recombination techniques.

[0105] Sense: The term “sense” is understood to mean a nucleic acid molecule having a sequence which is complementary or identical to a target sequence, for example a sequence which binds to a protein transcription factor and which is involved in the expression of a given gene. According to a preferred embodiment, the nucleic acid molecule comprises a gene of interest and elements allowing the expression of the said gene of interest.

[0106] Significant increase or decrease: An increase or decrease, for example in enzymatic activity or in gene expression, that is larger than the margin of error inherent in the measurement technique, preferably an increase or decrease by about 2-fold or greater of the activity of the control enzyme or expression in the control cell, more preferably an increase or decrease by about 5-fold or greater, and most preferably an increase or decrease by about 10-fold or greater.

[0107] Small nucleic acid molecules: “small nucleic acid molecules” are understood as molecules consisting of nucleic acids or derivatives thereof such as RNA or DNA. They may be double-stranded or single-stranded and are between about 15 and about 30 bp, for example between 15 and 30 bp, more preferred between about 19 and about 26 bp, for example between 19 and 26 bp, even more preferred between about 20 and about 25 bp for example between 20 and 25 bp. In a especially preferred embodiment the oligonucleotides are between about 21 and about 24 bp, for example between 21 and 24 bp. In a most preferred embodiment, the small nucleic acid molecules are about 21 bp and about 24 bp, for example 21 bp and 24 bp.

[0108] Substantially complementary: In its broadest sense, the term “substantially complementary”, when used herein with respect to a nucleotide sequence in relation to a reference or target nucleotide sequence, means a nucleotide sequence having a percentage of identity between the substantially complementary nucleotide sequence and the exact complementary sequence of said reference or target nucleotide sequence of at least 60%, more desirably at least 70%, more desirably at least 80% or 85%, preferably at least 90%, more preferably at least 93%, still more preferably at least 95% or 96%, yet still more preferably at least 97% or 98%, yet still more preferably at least 99% or most preferably 100% (the latter being equivalent to the term “identical” in this context). Preferably identity is assessed over a length of at least 19 nucleotides, preferably at least 50 nucleotides, more preferably the entire length of the nucleic acid sequence to said reference sequence (if not specified otherwise below). Sequence comparisons are carried out using default GAP analysis with the University of Wisconsin GCG, SEQWEB application of GAP, based on the algorithm of Needleman and Wunsch (Needleman and Wunsch (1970) J Mol. Biol. 48: 443-453; as defined above). A nucleotide sequence “substantially complementary” to a reference nucleotide sequence hybridizes to the reference nucleotide sequence under low stringency conditions, preferably medium stringency conditions, most preferably high stringency conditions (as defined above).

[0109] Transgene: The term “transgene” as used herein refers to any nucleic acid sequence, which is introduced into the genome of a cell by experimental manipulations. A transgene may be an “endogenous DNA sequence,” or a “heterologous DNA sequence” (i.e., “foreign DNA”). The term “endogenous DNA sequence” refers to a nucleotide sequence, which is naturally found in the cell into which it is introduced so long as it does not contain some modification (e.g., a point mutation, the presence of a selectable marker gene, etc.) relative to the naturally-occurring sequence.

[0110] Transgenic: The term transgenic when referring to an organism means transformed, preferably stably transformed, with a recombinant DNA molecule that preferably comprises a suitable promoter operatively linked to a DNA sequence of interest.

[0111] Vector: As used herein, the term “vector” refers to a nucleic acid molecule capable of transporting another nucleic acid molecule to which it has been linked. One type of vector is a genomic integrated vector, or “integrated vector”, which can become integrated into the chromosomal DNA of the host cell. Another type of vector is an episomal vector, i.e., a nucleic acid molecule capable of extra-chromosomal replication. Vectors capable of directing the expression of genes to which they are operatively linked are referred to herein as “expression vectors”. In the present specification, “plasmid” and “vector” are used interchangeably unless otherwise clear from the context. Expression vectors designed to produce RNAs as described herein in vitro or in vivo may contain sequences recognized by any RNA polymerase, including mitochondrial RNA polymerase, RNA pol I, RNA pol II, and RNA pol III. These vectors can be used to transcribe the desired RNA molecule in the cell according to this invention. A plant transformation vector is to be understood as a vector suitable in the process of plant transformation.

[0112] Wild-type: The term “wild-type”, “natural” or “natural origin” means with respect to an organism, polypeptide, or nucleic acid sequence, that said organism is naturally occurring or available in at least one naturally occurring organism which is not changed, mutated, or otherwise manipulated by man.

### EXAMPLES

### Chemicals and Common Methods

[0113] Unless indicated otherwise, cloning procedures carried out for the purposes of the present invention including restriction digest, agarose gel electrophoresis, purification of nucleic acids, ligation of nucleic acids, transformation, selection and cultivation of bacterial cells were performed as described (Sambrook et al., 1989). Sequence analyses of recombinant DNA were performed with a laser fluorescence DNA sequencer (Applied Biosystems, Foster City, Calif., USA) using the Sanger technology (Sanger et al., 1977). Unless described otherwise, chemicals and reagents were obtained from Sigma Aldrich (Sigma Aldrich, St. Louis, USA), from Promega (Madison, Wis., USA), Duchefa (Haarlem, The Netherlands) or Invitrogen (Carlsbad, Calif., USA). Restriction endonucleases were from New England Biolabs (Ipswich, Mass., USA) or Roche Diagnostics GmbH (Penzberg, Germany). Oligonucleotides were synthesized by Eurofins MWG Operon (Ebersberg, Germany).

### Example 1

### Identification of Nucleic Acid Expression Enhancing Nucleic Acids (NEENA) from Genes with Constitutive Expression

[0114] 1.1 Identification of NEENA Molecules from A. thaliana Genes

[0115] Using publicly available genomic DNA sequences (e.g. http://www.ncbi.nlm.nih.gov/genomes/PLANTS/PlantList.html) and transcript expression data (e.g. http://www.weigelworld.org/resources/microarray/AtGenExpress/), a set of 10 potential NEENA candidates deriving from Arabidopsis thaliana transcripts from highly expressing constitutive genes were selected for detailed analyses. The candidates were named as follows:

TABLE 1
constitutive NEENA candidates (NEENAc).

| NEENA | | | SEQ |
|---|---|---|---|
| name | Locus | Annotation | ID NO |
| NEENAc1 | At1g58520 | unknown protein | 1 |
| NEENAc1b | At1g58520 | unknown protein | 14936 |
| NEENAc2 | At3g11710 | ATKRS-1 (Arabidopsis thaliana | 2 |
| | | lysyl-tRNA synthetase 1) | |
| NEENAc3 | At4g15470 | unknown protein | 3 |
| NEENAc4 | At5g04160 | phosphate translocator-related | 4 |
| NEENAc5 | At5g12280 | RNA binding protein | 5 |
| NEENAc5b | At5g12280 | RNA binding protein | 14937 |
| NEENAc6 | At5g06960 | OCS-ELEMENT BINDING | 14958 |
| | | FACTOR 5 | |
| NEENAc7 | At1g54290 | eukaryotic translation initiation | 14959 |
| | | factor SUI1, putative | |
| NEENAc8 | At4g19410 | Pectinacetylesterase, putative | 14960 |

### 1.2 Isolation of the NEENA Candidates

[0116] Genomic DNA was extracted from A. thaliana green tissue using the Qiagen DNeasy Plant Mini Kit (Qiagen, Hilden, Germany). Genomic DNA fragments containing putative NEENA molecules were isolated by conventional polymerase chain reaction (PCR). The polymerase chain reaction comprised 10 sets of primers (Table 2). Primers were designed on the basis of the A. thaliana genome sequence with a multitude of NEENA candidates. The polymerase chain reaction followed the protocol outlined by Phusion High Fidelity DNA Polymerase (Cat No F-540L, New England Biolabs, Ipswich, Mass., USA). The isolated DNA was used as template DNA in a PCR amplification using the following primers:

TABLE 2
Primer sequences

| | | | PCR |
|---|---|---|---|
| | | SEQ | yielding |
| Primer name | Sequence | ID NO | SEQ ID NO |
| NEENAc1_for | TATAGGTACCGGCATCATTCAGAGACTGCTG | 14938 | 1 |
| NEENAc1_rev | TATACCATGGACAACCTCTCCGCTTCACG | 14939 | |
| NEENAc1b_for | TATAGGTACCGGCATCATTCAGAGACTGCTG | 14940 | 14936 |
| NEENAc1b_rev | TATACCATGGACTTCCTCTCCGCAACACG | 14941 | |
| NEENAc2_for | TATAGGTACCGAAAGCTGAAAAGGCTAAACAA | 14942 | 2 |
| NEENAc2_rev | TATACCATGGGGGAGCTTGCTTTAGGTGC | 14943 | |
| NEENAc3_for | TATAGGTACCCTGCATCGTTCCCTTCATCT | 14944 | 3 |
| NEENAc3_rev | TATACCATGGTAAATGTGCAGAGGCCAGATTA | 14945 | |
| NEENAc4_for | TATAGGTACCGCATCTTACTTTCTTCAGAGGG | 14946 | 4 |
| NEENAc4_rev | TATACCATGGAATTGATTGAGTTCAATTTTTCC | 14947 | |
| NEENAc5_for | TATAGGTACCCTAAGCGTTCCCGGTTGAG | 14948 | 5 |
| NEENAc5_rev | TATACCATGGCTTTCTCCAACTGCAAATCAAT | 14949 | |
| NEENAc5b_for | TATAGGTACCCTAAGCGTTCCCGGTTGAG | 14950 | 14937 |
| NEENAc5b_rev | TATACCATGGCTGCAAGGAGTGGACATTTT | 14951 | |
| NEENAc6_for | TATAGGTACCGTTAAGCTCAAAGAATCCGTTCT | 14961 | 14958 |
| NEENAc6_rev | TATACCATGGATCGTGGTACCCTAGATGGAGTA | 14962 | |
| NEENAc7_for | TATAGGTACCCTCGAAACCCTAATCTCTTCTTG | 14963 | 14959 |
| NEENAc7_rev | TATACCATGGTACAAGGGACAGTAAATCGACAAG | 14964 | |
| NEENAc8_for | TATAGGTACCCAAGAAGAGGACTCCATTTTCG | 14965 | 14960 |
| NEENAc8_rev | TATACCATGGTTGCTTAAGCCTCCCCAAT | 14966 | |

[0117] Amplification during the PCR was carried out with the following composition (50 microl):

3.00 microl A. thaliana genomic DNA (50 ng/microl genomic DNA, 5 ng/microl vector construct)
10.00 microl 5× Phusion HF Buffer
4.00 microl dNTP (2.5 mM)
2.50 microl for Primer (10 microM)
2.50 microl rev Primer (10 microM)
0.50 microl Phusion HF DNA Polymerase (2 U/microl)

[0118] A touch-down approach was employed for the PCR with the following parameters: 98.0° C. for 30 sec (1 cycle), 98.0° C. for 30 sec, 56.0° C. for 30 sec and 72.0° C. for 60 sec (4 cycles), 4 additional cycles each for 54.0° C., 51.0° C. and 49.0° C. annealing temperature, followed by 20 cycles with 98.0° C. for 30 sec, 46.0° C. for 30 sec and 72.0° C. for 60 sec (4 cycles) and 72.0° C. for 5 min. The amplification products was loaded on a 2% (w/v) agarose gel and separated at 80V. The PCR products were excised from the gel and purified with the Qiagen Gel Extraction Kit (Qiagen, Hilden, Germany). Following a DNA restriction digest with KpnI (10 U/microl) and NcoI (10 U/microl) or EcoRV (10 U/microl) restriction endonuclease, the digested products were again purified with the Qiagen Gel Extraction Kit (Qiagen, Hilden, Germany).

### 1.3 Vector Construction

[0119] 1.3.1 Generation of Vector Constructs with Potential NEENA Molecules

[0120] Using the Multisite Gateway System (Invitrogen, Carlsbad, Calif., USA), the promoter::NEENA::reporter-gene cassettes were assembled into binary constructs for plant transformation. The A. thaliana p-AtNit1 (At3g44310, GenBank X86454; WO03008596, with the prefix p- denoting promoter) promoter was used in the reporter gene construct, and firefly luciferase (Promega, Madison, Wis., USA) was utilized as reporter protein for quantitatively determining the expression enhancing effects of the putative NEENA molecules to be analyzed.

[0121] The pENTR/A vector holding the p-AtNit1 promoter was cloned via site specific recombination (BP-reaction) between the pDONR/A vector and p-AtNit1 amplification products with primers p-AtNit1-for and p-AtNit1-rev (Table 3) on genomic DNA (see above) with site specific recombination sites at either end according to the manufacturers manual (Invitrogen, Carlsbad, Calif., USA). Positive pENTR/A clones underwent sequence analysis to ensure correctness of the p-AtNit1 promoter.

TABLE 3
Primer sequences (p-AtNit1)

| | | SEQ |
|---|---|---|
| | | ID |
| Primer name | Sequence | NO. |
| p-AtNit1-for | ggggacaactttgtatagaaaagttg | 14955 |
| | tcgagaccagatgttttacacttga | |
| p-AtNit1-rev | ggggactgcttttttgtacaaacttg | 14956 |
| | gacactcagagacttgagagaagca | |

[0122] An ENTR/B vector containing the firefly luciferase coding sequence (Promega, Madison, Wis., USA) followed by the t-nos nopalin synthase transcriptional terminator (Genbank V00087) was generated. NEENA candidate PCR fragments (see above) were cloned separately upstream of the firefly luciferase coding sequence using KpnI and NcoI or EcoRV restriction enzymes. The resulting pENTR/B vectors are summarized in table 4, with promoter molecules having the prefix p-, coding sequences having the prefix c-, and terminator molecules having the prefix t-.

TABLE 4
all pENTR/B vectors plus and minus NEENA candidates

| pENTR/B | Composition of the partial expression cassette |
|---|---|
| vector | SEQ ID NO::reporter gene::terminator |
| LJK1 | MCS::c-LUC::t-nos |
| LJH17 | SEQ ID NO1::c-LUC::t-nos |
| LJH18 | SEQ ID NO14936::c-LUC::t-nos |
| LJH20 | SEQ ID NO2::c-LUC::t-nos |
| LJH16 | SEQ ID NO3::c-LUC::t-nos |
| LJH19 | SEQ ID NO4::c-LUC::t-nos |
| LJH21 | SEQ ID NO5::c-LUC::t-nos |
| LJH22 | SEQ ID NO14937::c-LUC::t-nos |
| LJH47 | SEQ ID NO14958::c-LUC::t-nos |
| LJH48 | SEQ ID NO14959::c-LUC::t-nos |
| LJH49 | SEQ ID NO14960::c-LUC::t-nos |

[0123] The pENTR/C vector was constructed by introduction of a multiple cloning site via KpnI and HindIII restriction sites. By performing a site specific recombination (LR-reaction), the created pENTR/A, pENTR/B and pENTR/C were combined with the pSUN destination vector (pSUN derivative) according to the manufacturers (Invitrogen, Carlsbad, Calif., USA) Multisite Gateway manual. The reactions yielded one binary vector with p-AtNit1 promoter, the firefly luciferase coding sequence c-LUC and the t-nos terminator and 10 vectors harboring SEQ ID NO1, NO2, NO3, NO4, NO5, NO14936, NO14937, NO 14958, NO 14958 and NO 14960 immediately upstream of the firefly luciferase coding sequence (Table 5), for which the combination with SEQ ID NO1 is given exemplary (SEQ ID NO14954). Except for varying SEQ ID NO2 to NO5 and NO14936, NO 14937, NO 14958, NO 14958 and NO 14960, the nucleotide sequence is identical in all vectors (Table 5). The resulting plant transformation vectors are summarized in table 5:

TABLE 5
Plant expression vectors for A. thaliana transformation

| plant | | |
|---|---|---|
| expression | Composition of the expression cassette | SEQ |
| vector | Promoter::SEQ ID NO::reporter gene::terminator | ID NO |
| LJK132 | p-AtNit1::-::c-LUC::t-nos | |
| LJH50 | p-AtNit1::SEQ ID NO1::c-LUC::t-nos | 14954 |
| LJH51 | p-AtNit1::SEQ ID NO14936::c-LUC::t-nos | |
| LJH53 | p-AtNit1::SEQ ID NO2::c-LUC::t-nos | |
| LJH64 | p-AtNit1::SEQ ID NO3::c-LUC::t-nos | |
| LJH52 | p-AtNit1::SEQ ID NO4::c-LUC::t-nos | |
| LJH54 | p-AtNit1::SEQ ID NO5::c-LUC::t-nos | |
| LJH55 | p-AtNit1::SEQ ID NO14937::c-LUC::t-nos | |
| LJH61 | p-AtNit1::SEQ ID NO14958::c-LUC::t-nos | |
| LJH62 | p-AtNit1::SEQ ID NO14959::c-LUC::t-nos | |
| LJH65 | p-AtNit1::SEQ ID NO14960::c-LUC::t-nos | |

[0124] The resulting vectors LJK132 and LJH50-55, LJH61-62 and LJH64-65 were subsequently used to generate stable transgenic A. thaliana plants (see 2.3).

### 1.3.2 Renilla Luciferase Control Construct

[0125] Renilla luciferase cDNA was amplified using 10 ng of the plasmid pRL-null from Promega (Madison, Wis., USA) as DNA template and primers R-LUC_for and R-LUC_rev (Table 6) with PCR parameters as described above.

TABLE 6
Primer sequences (c-RLUC)

| Primer name | Sequence | SEQ ID NO |
|---|---|---|
| RLUC_for | aaaaaggtaccatgacttcgaaagtt | 14952 |
| | tatgatc | |
| RLUC_rev | aaattgagctcttattgttcattttt | 14953 |
| | gagaactc | |

[0126] Following a DNA restriction digest with KpnI (10 U/microl) and SacI (10 U/microl) restriction endonuclease, the digested products were again purified with the Qiagen Gel Extraction Kit (Qiagen, Hilden, Germany).

[0127] The fragment was cloned into a ENTR/B vector containing the nopaline synthase constitutive promoter p-nos (Genbank V00087) followed by the t-nos nopalin synthase transcriptional terminator (Genbank V00087) via KpnI and SacI restriction sites, yielding a pENTR/B clone, which underwent sequence analysis to ensure correctness of the Renilla luciferase containing expression cassette.

### Example 2

### Screening for NEENA Candidate Molecules Enhancing Gene Expression in A. thaliana Transiently Transformed Leaf Protoplasts

[0128] This example illustrates that all tested NEENA molecules are capable of enhancing gene expression.

2.1 Isolation and Transient Transformation of A. thaliana Leaf Protoplasts

[0129] Isolation and transient transformation of A. thaliana leaf protoplasts is amended according to established protocols (Damm and Willmitzer, 1988; Damm et al., 1989). Leaves of 4 week old A. thaliana plants are cut in small pieces using a razor blade and transferred to a solution with 1.5% Cellulase R10 (Duchefa, Haarlem, The Netherlands), 0.3% Mazerozyme R10 (Duchefa, Haarlem, The Netherlands), 400 mM Mannitol, 20 mM KCI, 20 mM MES, 10 mM CaCl₂, pH5.7 and incubated over night at room temperature. Due to a variability of transient A. thaliana leaf protoplast transformation, Renilla luciferase (Dual-Luciferase® Reporter Assay System, Promega, Madison, Wis., USA) is used to normalize the firefly luciferase expression capabilities of the constructs above. The transient transformation of the NEENA-less (LJK132) and each of the NEENA-containing vector constructs (LJH50-LJH55, LJH61-62 and LJH64-65) is performed in triplicate with 6 microg plasmid DNA, which is mixed with 25 microg of Renilla luciferase containing construct prior to transformation, using PEG (polyethylene glycol) and 1×10⁴ protoplasts.

### 2.2 Dual Luciferase Reporter Gene Assay of LJK132, LJH50-LJH55, LJH61-62 and LJH64-65

[0130] Transfected A. thaliana protoplasts are collected by centrifugation at 100 g and frozen in liquid nitrogen after removal of supernatant. The assay for detection of firefly and Renilla luciferase activity in the transfected cells is performed according to the manufacturers (Promega, Madison, Wis., USA) Dual-Luciferase Reporter Assay System manual. Luminescence measurements are conducted in a MicroLumat Plus LB96V (Berthold Technologies, Bad Wildbad, Germany) recorded after addition of the luciferase substrates. Instrument readings of both luciferase recordings are normalized by generating a ratio between firefly luciferase and Renilla luciferase. The data from three experiments are averaged for each construct and based on these average expression values, fold change values are calculated to assess the impact of presence of a putative NEENA over reporter gene constructs lacking the respective putative NEENA. In comparison to p-AtNit1 promoter-only NEENA-less reporter gene constructs, the 10 tested NEENA candidates containing constructs showed positive effects (see Table 7). All putative NEENA molecules comprising sequences with SEQ ID NO1, NO2, NO3, NO4, NO5, NO14936, NO14937, NO14958, NO 14959 and NO 14960 conferred a significant fold increase in gene expression based on luciferase reporter gene activity compared to the NEENA-less promoter-only reporter gene construct (LJK132) and hence are functional NEENA molecules.

TABLE 7
Luciferase reporter gene activity in A. thaliana leaves and flowers

| plant | | | | | Fold change |
|---|---|---|---|---|---|
| expression | SEQ ID | | Standard | | compared |
| vector | NO | Tissue | deviation | Median | to LJK132 |
| LJK132 | | Leaf | 3.21E+06 | 1.68E+06 | 1.00 |
| LJH50 | 14954 | Leaf | 6.62E+06 | 8.86E+06 | 5.26 |
| LJH51 | | Leaf | 3.35E+06 | 1.00E+07 | 5.94 |
| LJH53 | | Leaf | 3.22E+06 | 6.62E+06 | 3.93 |
| LJH64 | | Leaf | 4.52E+06 | 1.17E+07 | 6.92 |
| LJH52 | | Leaf | 1.95E+06 | 5.13E+06 | 3.05 |
| LJH54 | | Leaf | 5.60E+06 | 1.10E+07 | 6.50 |
| LJH55 | | Leaf | 4.23E+06 | 1.30E+07 | 7.69 |
| LJK132 | | Flower | 1.82E+06 | 5.73E+05 | 1.00 |
| LJH50 | 14954 | Flower | 1.60E+06 | 2.96E+06 | 5.17 |
| LJH51 | | Flower | 9.71E+05 | 3.05E+06 | 5.32 |
| LJH53 | | Flower | 1.24E+06 | 2.89E+06 | 5.04 |
| LJH64 | | Flower | 3.66E+06 | 1.17E+07 | 20.46 |
| LJH52 | | Flower | 3.06E+05 | 1.05E+06 | 1.83 |
| LJH54 | | Flower | 1.83E+06 | 5.12E+06 | 8.93 |
| LJH55 | | Flower | 2.47E+06 | 5.82E+06 | 10.16 |
| LJH61 | | Leaf | 9.31E+06 | 1.82E+07 | 10.80 |
| LJH62 | | Leaf | 1.46E+07 | 1.36E+07 | 8.10 |
| LJH65 | | Leaf | 4.73E+06 | 1.43E+07 | 8.46 |
| LJH61 | | Flower | 3.41E+06 | 1.06E+07 | 18.50 |
| LJH62 | | Flower | 1.05E+07 | 6.64E+06 | 11.57 |
| LJH65 | | Flower | 2.13E+06 | 7.69E+06 | 13.41 |

2.3 Screening for NEENA Molecules Enhancing Gene Expression in Transgenic A. thaliana Plants
2.3.1 Generation of Stable Transgenic A. thaliana Plants

[0131] Constructs LJH50-55, LJH61-62 and LJH64-65 containing selected NEENA candidate molecules described in example 1 were stably transformed into Arabidopsis thaliana plants along with a NEENA-less control construct. In order to generate transgenic A. thaliana plants, Agrobacterium tumefaciens (strain C58C1 pGV2260) was transformed with the various vector constructs described above. For A. thaliana transformation, the Floral Dip method was employed (Clough and Bent, 1998, Plant Journal 16: 735-743). T1 transgenic plants were selected by germinating and growing seedlings on Kanamycin.

### 2.3.1 Plant Analysis

[0132] Leaf material of adult transgenic A. thaliana plants is sampled, frozen in liquid nitrogen and subjected to Luciferase reporter gene assays (amended protocol according to Ow et al., 1986). After grinding the frozen tissue samples are resuspended in 800 microl of buffer I (0.1 M Phosphate buffer pH7.8, 1 mM DTT (Sigma Aldrich, St. Louis, Mo., USA), 0.05% Tween 20 (Sigma Aldrich, St. Louis, Mo., USA)) followed by centrifugation at 10 000 g for 10 min. 75 microl of the aqueous supernatant are transferred to 96-well plates. After addition of 25 microl of buffer II (80 mM glycine-glycyl (Carl Roth, Karlsruhe, Germany), 40 mM MgSO₄ (Duchefa, Haarlem, The Netherlands), 60 mM ATP (Sigma Aldrich, St. Louis, Mo., USA), pH 7.8) and D-Luciferin to a final concentration of 0.5 mM (Cat No: L-8220, BioSynth, Staad, Switzerland), luminescence is recorded in a MicroLumat Plus LB96V (Berthold Technologies, Bad Wildbad, Germany) yielding the unit relative light unit RLU per minute (RLU/min).

[0133] In order to normalize the luciferase activity between samples, the protein concentration is determined in the aqueous supernatant in parallel to the luciferase activity (adapted from Bradford, 1976, Anal. Biochem. 72, 248). 5 microl of the aqueous cell extract in buffer I are mixed with 250 microl of Bradford reagent (Sigma Aldrich, St. Louis, Mo., USA), incubated for 10 min at room temperature. Absorption is determined at 595 nm in a plate reader (Thermo Electron Corporation, Multiskan Ascent 354). The total protein amounts in the samples are calculated with a previously generated standard concentration curve. Values resulting from a ratio of RLU/min and mg protein/ml sample are averaged for transgenic plants harboring identical constructs and fold change values are calculated to assess the impact of NEENA molecule presence over NEENA-less reporter gene constructs. All 10 constructs show significant induction of luciferase activity compared to the NEENA-less control reporter gene construct.

### Example 3

### Test of NEENA Molecules for Enhancement of Gene Expression in Oilseed Rape Plants

[0134] This example illustrates that NEENA molecules can be used across species to enhance gene expression in all tissues tested compared to a NEENA-less promoter-only approach.

[0135] All NEENA molecules mediating enhancement in gene expression in the transient pre-screening (cp. Example 2, SEQ ID NO1, NO2, NO3, NO4, NO5, NO14936, NO14937, NO14958, NO 14959 and NO 14960) are selected for determining the enhancement on gene expression levels in transgenic oilseed rape plants.

3.1 Vector Construction for B. napus Plant Transformation

[0136] For transformation of oilseed rape plants, reporter gene expression cassettes without and with gene expression control molecules (SEQ ID NO1, NO2, NO3, NO4, NO5, NO14936, NO14937, NO14958, NO 14959 and NO 14960) are combined with a gene expression cassette carrying a selectable marker gene for detecting transgenic plant lines within a pENTR/C vector. By performing a site specific recombination (LR-reaction), as previously described (see above, 1.4), the pENTR/A, pENTR/B and the pENTR/C carrying the selectable marker cassette are combined with the pSUN destination vector according to the manufacturers (Invitrogen, Carlsbad, Calif., USA) Multisite Gateway manual. The reactions yield one binary vector with p-AtNit1 promoter, the firefly luciferase coding sequence c-LUC, the t-nos terminator and the selectable marker cassette as well as 10 vectors harboring SEQ ID NO1, NO2, NO3, NO4, NO5, NO14936, NO14937, NO14958, NO 14959 and NO 14960 immediately upstream of the firefly luciferase coding sequence (Table 8), for which the combination with SEQ ID NO1 is given exemplary (SEQ ID NO14954). Except for varying SEQ ID NO2, NO3, NO4, NO5, NO14936, NO14937, NO14958, NO 14959 and NO 14960, the nucleotide sequence is identical in all vectors (Table 8). The resulting plant transformation vectors are summarized in Table 8:

TABLE 8
Plant expression vectors for B. napus transformation

| plant | | |
|---|---|---|
| expression | Composition of the expression cassette | SEQ ID |
| vector | Promoter::SEQ ID NO:reporter gene::terminator | NO |
| LJK138 | p-AtNit1::-::c-LUC::t-nos | |
| LJH50 | p-AtNit1::SEQ ID NO1::c-LUC::t-nos | 14954 |
| LJH51 | p-AtNit1::SEQ ID NO14936::c-LUC::t-nos | |
| LJH53 | p-AtNit1::SEQ ID NO2::c-LUC::t-nos | |
| LJH64 | p-AtNit1::SEQ ID NO3::c-LUC::t-nos | |
| LJH52 | p-AtNit1::SEQ ID NO4::c-LUC::t-nos | |
| LJH54 | p-AtNit1::SEQ ID NO5::c-LUC::t-nos | |
| LJH55 | p-AtNit1::SEQ ID NO14937::c-LUC::t-nos | |
| LJH61 | p-AtNit1::SEQ ID NO14958::c-LUC::t-nos | |
| LJH62 | p-AtNit1::SEQ ID NO14959::c-LUC::t-nos | |
| LJH65 | p-AtNit1::SEQ ID NO14960::c-LUC::t-nos | |

### 3.2 Generation of Transgenic Rapeseed Plants (Amended Protocol According to Moloney et al., 1992, Plant Cell Reports, 8: 238-242).

[0137] In preparation for the generation of transgenic rapeseed plants, the binary vectors are transformed into Agrobacterium tumefaciens C58C1:pGV2260 (Deblaere et al., 1985, Nucl. Acids. Res. 13: 4777-4788). A 1:50 dilution of an overnight culture of Agrobacteria harboring the respective binary construct is grown in Murashige-Skoog Medium (Murashige and Skoog, 1962, Physiol. Plant 15, 473) supplemented with 3% saccharose (3MS-Medium). For the transformation of rapeseed plants, petioles or hypocotyledons of sterile plants are incubated with a 1:50 Agrobacterium solution for 5-10 minutes followed by a three-day co-incubation in darkness at 25° C. on 3 MS. Medium supplemented with 0.8% bacto-agar. After three days, the explants are transferred to MS-medium containing 500 mg/I Claforan (Cefotaxime-Sodium), 100 nM Imazetapyr, 20 microM Benzylaminopurin (BAP) and 1.6 g/I Glucose in a 16 h light/8 h darkness light regime, which is repeated in weekly periods. Growing shoots are transferred to MS-Medium containing 2% saccharose, 250 mg/I Claforan and 0.8% Bacto-agar. After 3 weeks, the growth hormone 2-Indolbutyl acid is added to the medium to promote root formation. Shoots are transferred to soil following root development, grown for two weeks in a growth chamber and grown to maturity in greenhouse conditions.

### 3.3 Plant Analysis

[0138] Tissue samples are collected from the generated transgenic plants from leaves, flowers and siliques, stored in a freezer at −80° C. subjected to a Luciferase reporter gene assay (amended protocol after Ow et al., 1986). After grinding the frozen tissue samples are resuspended in 800 microl of buffer I (0.1 M Phosphate buffer pH7.8, 1 mM DTT (Sigma Aldrich, St. Louis, Mo., USA), 0.05% Tween 20 (Sigma Aldrich, St. Louis, Mo., USA)) followed by centrifugation at 10 000 g for 10 min. 75 microl of the aqueous supernatant are transferred to 96-well plates. After addition of 25 microl of buffer 11 (80 mM glycine-glycyl (Carl Roth, Karlsruhe, Germany), 40 mM MgSO₄ (Duchefa, Haarlem, The Netherlands), 60 mM ATP (Sigma Aldrich, St. Louis, Mo., USA), pH 7.8) and D-Luciferin to a final concentration of 0.5 mM (Cat No: L-8220, BioSynth, Staad, Switzerland), luminescence is recorded in a MicroLumat Plus LB96V (Berthold Technologies, Bad Wildbad, Germany) yielding the unit relative light unit RLU per minute (RLU/min). In order to normalize the luciferase activity between samples, the protein concentration is determined in the aqueous supernatant in parallel to the luciferase activity (adapted from Bradford, 1976, Anal. Biochem. 72, 248). 5 microl of the aqueous cell extract in buffer I are mixed with 250 microl of Bradford reagent (Sigma Aldrich, St. Louis, Mo., USA), incubated for 10 min at room temperature. Absorption is determined at 595 nm in a plate reader (Thermo Electron Corporation, Multiskan Ascent 354). The total protein amounts in the samples are calculated with a previously generated standard concentration curve. Values resulting from a ratio of RLU/min and mg protein/ml sample are averaged for transgenic plants harboring identical constructs and fold change values are calculated to assess the impact of NEENA molecule presence over NEENA-less reporter gene constructs.

### 3.4 NEENA Sequences Mediate Strong Enhancement of Gene Expression in Oilseed Rape Plants

[0139] For assessing the potential of enhancing gene expression of selected NEENA molecules (SEQ ID NO1, NO2, NO3, NO4, NO5, NO14936, NO14937, NO14958, NO 14959 and NO 14960) in oilseed rape plants, leafs, flowers and siliques harboring seeds of plants having identical developmental stages and which are grown under equal growth conditions are collected. The samples are taken from individual transgenic oilseed rape plant lines harboring either a promoter-only reporter gene construct or Luciferase reporter gene constructs containing a NEENA (SEQ ID NO1, NO2, NO3, NO4, NO5, NO14936, NO14937, NO14958, NO 14959 and NO 14960). 10 seeds are collected from each transgenic event, processed and analyzed for Luciferase activity as described above (Example 3.3).

[0140] In comparison to the constitutive p-AtNit1 promoter-only NEENA-less reporter gene construct, the 10 tested NEENA molecules all mediated strong enhancements in gene expression in leaf tissues. Comparable enhancement of gene expression mediated by NEENAs (SEQ ID NO1, NO2, NO3, NO4, NO5, NO14936, NO14937, NO14958, NO 14959 and NO 14960) is detected in oilseed rape flowers and siliques including seeds.

### Example 4

### Analysis of Constitutive Enhancement of Gene Expression in Soybean Plants

[0141] This example illustrates that NEENA molecules can be used in a wide array of plant species and across species borders from different plant families to enhance gene expression in all tissues compared to a NEENA-less promoter-only approach.

[0142] All NEENA sequence molecules mediating enhancement in gene expression in the pre-screening (cp. Example 2, SEQ ID NO1, NO2, NO3, NO4, NO5, NO14936, NO14937, NO14958, NO 14959 and NO 14960) are selected for determining the enhancement on gene expression levels in transgenic soybean plants. Plant expression vectors LJK132 and LJH50-55, LJH61-62 and LJH64-65 (cp. example 3.1) are used for stable soybean transformation.

### 4.1 Generation of Transgenic Soybean Plants (Amended Protocol According to WO2005/121345; Olhoft et al., 2007).

[0143] Soybean seed germination, propagation, A. rhizogenes and axillary meristem explant preparation, and inoculations are done as previously described (WO2005/121345; Olhoft et al., 2007) with the exception that the constructs LJK132 and LJH50-55, LJH61-62 and LJH64-65 (cp. example 3.1) each contain a mutated AHAS gene driven by the parsley ubiquitin promoter PcUbi4-2, mediating tolerance to imidazolinone herbicides for selection.

### 4.2 NEENA Sequences Mediate Strong Enhancement of Gene Expression in Soybean Plants

[0144] Tissue samples are collected from the generated transgenic plants from leaves, flowers and seeds. The tissue samples were processed and analyzed as described above (cp. example 3.3)

[0145] In comparison to the constitutive p-AtNit1 promoter-only NEENA-less reporter gene construct, the 10 tested NEENA molecules all mediate strong enhancement of gene expression in leaves. Comparable enhancement of gene expression mediated by NEENAs (SEQ ID NO1, NO2, NO3, NO4, NO5, NO14936, NO14937, NO14958, NO 14959 and NO 14960) is detected in soybean flowers and siliques.

### Example 5

### Analysis of NEENA Activity in Monocotyledonous Plants

[0146] This example describes the analysis of NEENA sequences with SEQ ID NO1, NO2, NO3, NO4, NO5, NO14936, NO14937, NO14958, NO 14959 and NO 14960 in monocotyledonous plants.

### 5.1 Vector Construction

[0147] For analyzing NEENA sequences with SEQ ID NO1, NO2, NO3, NO4, NO5, NO14936, NO14937, NO14958, NO 14959 and NO 14960 in monocotyledonous plants, a pUC-based expression vector harboring an expression cassette composed of the NEENA-less, constitutive monocotyledonous promoter p-Ubi from Z. mays is combined with a coding sequence of the beta-Glucuronidase (GUS) gene followed by the nopaline synthase (NOS) transcriptional terminator. The cloning is performed as described in WO/2011/023537 Example 5.1. NEENA PCR fragments are cloned separately upstream of the beta-Glucuronidase coding sequence using AscI restriction sites. The reaction yields one binary vector with the p-Ubi promoter, the beta-Glucuronidase coding sequence c-GUS and the t-nos terminator and 10 vectors harboring SEQ ID NO1, NO2, NO3, NO4, NO5, NO14936, NO14937, NO14958, NO 14959 and NO 14960, immediately upstream of the beta-Glucuronidase coding sequence

[0148] The resulting vectors are used to analyze NEENA molecules in experiments outlined below (Example 5.2).

### 5.2 Analysis of NEENA Molecules Enhancing Gene Expression in Monocotyledonous Plant Tissues

[0149] These experiments are performed by bombardment of monocotyledonous plant tissues or culture cells (Example 5.2.1), by PEG-mediated (or similar methodology) introduction of DNA to plant protoplasts (Example 5.2.2), or by Agrobacterium-mediated transformation (Example 5.2.3). The target tissue for these experiments can be plant tissues (e.g. leaf tissue), cultured plant cells (e.g. maize Black Mexican Sweetcorn (BMS)), or plant embryos for Agrobacterium protocols.

### 5.2.1 Transient Assay Using Microprojectile Bombardment

[0150] The plasmid constructs are isolated using Qiagen plasmid kit (cat#12143). DNA is precipitated onto 0.6 microM gold particles (Bio-Rad cat#165-2262) according to the protocol described by Sanford et al. (1993) (Optimizing the biolistic process for different biological applications. Methods in Enzymology, 217: 483-509) and accelerated onto target tissues (e.g. two week old maize leaves, BMS cultured cells, etc.) using a PDS-1000/He system device (Bio-Rad). All DNA precipitation and bombardment steps are performed under sterile conditions at room temperature. Black Mexican Sweet corn (BMS) suspension cultured cells are propagated in BMS cell culture liquid medium [Murashige and Skoog (MS) salts (4.3 g/L), 3% (w/v) sucrose, myo-inositol (100 mg/L), 3 mg/L 2.4-dichlorophenoxyacetic acid (2,4-D), casein hydrolysate (1 g/L), thiamine (10 mg/L) and L-proline (1.15 g/L), pH 5.8]. Every week 10 mL of a culture of stationary cells are transferred to 40 mL of fresh medium and cultured on a rotary shaker operated at 110 rpm at 27° C. in a 250 mL flask.

[0151] 60 mg of gold particles in a siliconized Eppendorf tube are resuspended in 100% ethanol followed by centrifugation for 30 seconds. The pellet is rinsed once in 100% ethanol and twice in sterile water with centrifugation after each wash. The pellet is finally resuspended in 1 mL sterile 50% glycerol. The gold suspension is then divided into 50 microL aliquots and stored at 4° C. The following reagents are added to one aliquot: 5 microL of 1 microg/microL total DNA, 50 microL 2.5 M CaCl₂, 20 microL 0.1 M spermidine, free base. The DNA solution is vortexed for 1 minute and placed at −80° C. for 3 min followed by centrifugation for 10 seconds. The supernatant is removed. The pellet is carefully resuspended in 1 mL 100% ethanol by flicking the tube followed by centrifugation for 10 seconds. The supernatant is removed and the pellet is carefully resuspended in 50 microL of 100% ethanol and placed at −80° C. until used (30 min to 4 hr prior to bombardment). If gold aggregates are visible in the solution the tubes are sonicated for one second in a waterbath sonicator just prior to use.

[0152] For bombardment, two-week-old maize leaves are cut into pieces approximately 1 cm in length and placed ad-axial side up on osmotic induction medium M-N6-702 [N6 salts (3.96 g/L), 3% (w/v) sucrose, 1.5 mg/L 2,4-dichlorophenoxyacetic acid (2,4-D), casein hydrolysate (100 mg/L), and L-proline (2.9 g/L), MS vitamin stock solution (1 mL/L), 0.2 M mannitol, 0.2 M sorbitol, pH 5.8]. The pieces are incubated for 1-2 hours.

[0153] In the case of BMS cultured cells, one-week-old suspension cells are pelleted at 1000 g in a Beckman/Coulter Avanti J25 centrifuge and the supernatant is discarded. Cells are placed onto round ash-free No 42 Whatman filters as a 1/16 inch thick layer using a spatula. The filter papers holding the plant materials are placed on osmotic induction media at 27° C. in darkness for 1-2 hours prior to bombardment. Just before bombardment the filters are removed from the medium and placed onto on a stack of sterile filter paper to allow the calli surface to partially dry.

[0154] Each plate is shot with 6 microL of gold-DNA solution twice, at 1,800 psi for the leaf materials and at 1,100 psi for the BMS cultured cells. To keep the position of plant materials, a sterilized wire mesh screen is laid on top of the sample. Following bombardment, the filters holding the samples are transferred onto M-N6-702 medium lacking mannitol and sorbitol and incubated for 2 days in darkness at 27° C. prior to transient assays.

[0155] The transient transformation via microprojectile bombardment of other monocotyledonous plants are carried out using, for example, a technique described in Wang et al., 1988 (Transient expression of foreign genes in rice, wheat and soybean cells following particle bombardment. Plant Molecular Biology, 11 (4), 433-439), Christou, 1997 (Rice transformation: bombardment. Plant Mol Biol. 35 (1-2)).

[0156] Expression levels of the expressed genes in the constructs described above (example 5.1) are determined by GUS staining, quantification of luminescence/fluorescence, RT-PCR and protein abundance (detection by specific antibodies) using the protocols in the art. GUS staining is done by incubating the plant materials in GUS solution [100 mM NaHPO₄, 10 mM EDTA, 0.05% Triton X100, 0.025% X-Gluc solution (5-bromo-4-chloro-3-indolyl-beta-D-glucuronic acid dissolved in DMSO), 10% methanol, pH 7.0] at 37° C. for 16-24 hours. Plant tissues are vacuum-infiltrated 2 times for 15 minutes to aid even staining. Analyses of luciferase activities are performed as described above (example 2 and 3.3).

[0157] In comparison to the constitutive p-Ubi promoter-only NEENA-less reporter gene construct, the NEENA molecules all mediate strong enhancement in gene expression in these assays.

### 5.2.2 Transient Assay Using Protoplasts

[0158] Isolation of protoplasts is conducted by following the protocol developed by Sheen (1990) (Metabolic Repression of Transcription in Higher Plants. The Plant Cell 2 (10), 1027-1038). Maize seedlings are kept in the dark at 25° C. for 10 days and illuminated for 20 hours before protoplast preparation. The middle part of the leaves are cut to 0.5 mm strips (about 6 cm in length) and incubated in an enzyme solution containing 1% (w/v) cellulose RS, 0.1% (w/v) macerozyme R10 (both from Yakult Honsha, Nishinomiya, Japan), 0.6 M mannitol, 10 mM Mes (pH 5.7), 1 mM CaCl₂, 1 mM MgCl₂, 10 mM beta-mercaptoethanol, and 0.1% BSA (w/v) for 3 hr at 23° C. followed by gentle shaking at 80 rpm for 10 min to release protoplasts. Protoplasts are collected by centrifugation at 100×g for 2 min, washed once in cold 0.6 M mannitol solution, centrifuged, and resuspended in cold 0.6 M mannitol (2×10⁶/mL).

[0159] A total of 50 microg plasmid DNA in a total volume of 100 microL sterile water is added into 0.5 mL of a suspension of maize protoplasts (1×10⁶ cells/mL) and mixed gently. 0.5 mL PEG solution (40% PEG 4,000, 100 mM CaNO₃, 0.5 mannitol) is added and pre-warmed at 70° C. with gentle shaking followed by addition of 4.5 mL MM solution (0.6 M mannitol, 15 mM MgCl₂, and 0.1% MES). This mixture is incubated for 15 minutes at room temperature. The protoplasts are washed twice by pelleting at 600 rpm for 5 min and resuspending in 1.0 mL of MMB solution [0.6 M mannitol, 4 mM Mes (pH 5.7), and brome mosaic virus (BMV) salts (optional)] and incubated in the dark at 25° C. for 48 hr. After the final wash step, the protoplasts are collected in 3 mL MMB medium, and incubated in the dark at 25° C. for 48 hr.

[0160] The transient transformation of protoplasts of other monocotyledonous plants are carried out using, for example, a technique described in Hodges et al., 1991 (Transformation and regeneration of rice protoplasts. Biotechnology in agriculture No. 6, Rice Biotechnology. International Rice Research Institute, ISBN: 0-85198-712-5) or Lee et al., 1990 (Transient gene expression in wheat (Triticum aestivum) protoplasts. Biotechnology in agriculture and forestry 13—Wheat. Springer Verlag, ISBN-10: 3540518096).

[0161] Expression levels of the expressed genes in the constructs described above (Example 5.1) are determined by GUS staining, quantification of luminescence/fluorescence, RT-PCR or protein abundance (detection by specific antibodies) using the protocols in the art. GUS staining is done by incubating the plant materials in GUS solution [100 mM NaHPO₄, 10 mM EDTA, 0.05% Triton X100, 0.025% X-Gluc solution (5-bromo-4-chloro-3-indolyl-beta-D-glucuronic acid dissolved in DMSO), 10% methanol, pH 7.0] at 37° C. for 16-24 hours. Analyses of luciferase activities are performed as described above (Example 2 and 3.3).

[0162] In comparison to the constitutive p-Ubi promoter-only NEENA-less reporter gene construct, the NEENA molecules mediate strong enhancement in gene expression in these assays.

### 5.2.3 Transformation and Regeneration of Monocotyledonous Crop Plants

[0163] The Agrobacterium-mediated plant transformation using standard transformation and regeneration techniques may also be carried out for the purposes of transforming crop plants (Gelvin and Schilperoort, 1995, Plant Molecular Biology Manual, 2nd Edition, Dordrecht: Kluwer Academic Publ. ISBN 0-7923-2731-4; Glick and Thompson (1993) Methods in Plant Molecular Biology and Biotechnology, Boca Raton: CRC Press, ISBN 0-8493-5164-2). The transformation of maize or other monocotyledonous plants can be carried out using, for example, a technique described in U.S. Pat. No. 5,591,616. The transformation of plants using particle bombardment, polyethylene glycol-mediated DNA uptake or via the silicon carbonate fiber technique is described, for example, by Freeling & Walbot (1993) “The maize handbook” ISBN 3-540-97826-7, Springer Verlag New York).

[0164] Expression levels of the expressed genes in the constructs described above (Example 5.1) are determined by GUS staining, quantification of luminescence or fluorescence, RT-PCR, protein abundance (detection by specific antibodies) using the protocols in the art. GUS staining is done by incubating the plant materials in GUS solution [100 mM NaHPO₄, 10 mM EDTA, 0.05% Triton X100, 0.025% X-Gluc solution (5-bromo-4-chloro-3-indolyl-beta-D-glucuronic acid dissolved in DMSO), 10% methanol, pH 7.0] at 37° C. for 16-24 hours. Plant tissues are vacuum-infiltrated 2 times for 15 minutes to aid even staining. Analyses of luciferase activities are performed as described above (Examples 2 and 3.3).

[0165] In comparison to the constitutive p-Ubi promoter-only NEENA-less reporter gene constructs, the NEENA molecules mediate strong enhancement in gene expression in plants, for example in leaves, flowers and seeds.

### Example 6

### Quantitative Analysis of NEENA Activity in Corn Plants

[0166] This example describes the analysis of NEENA sequences with SEQ ID NO1, NO2, NO3, NO4, NO5, NO14936, NO14937, NO14958, NO 14959 and NO 14960 in corn plants.

### 6.1 Vector Construction

[0167] For analyzing NEENA sequences with SEQ ID NO1, NO2, NO3, NO4, NO5, NO14936, NO14937, NO14958, NO 14959 and NO 14960 in monocotyledonous plants quantitatively, a pUC-based expression vector harboring an expression cassette composed of the NEENA-less, constitutive monocotyledonous promoter p-Ubi from Z. mays is combined with a coding sequence of the firefly luciferase (LUC) gene (Promega, Madison, Wis., USA) followed by the nopaline synthase (NOS) transcriptional terminator. Genomic DNA is extracted from A. thaliana green tissue using the Qiagen DNeasy Plant Mini Kit (Qiagen, Hilden, Germany). Isolation of NEENAs and the vector construction is performed as described in WO/2011/023537 Example 6.1.

[0168] NEENA PCR fragments (see above) were cloned separately upstream of the firefly luciferase coding sequence using AscI restriction sites. The reaction yielded one binary vector with the p-Ubi promoter, the firefly luciferase coding sequence c-LUC and the t-nos terminator and the vectors harboring SEQ ID NO1, NO2, NO3, NO4, NO5, NO14936, NO14937, NO14958, NO 14959 and NO 14960, immediately upstream of the firefly luciferase coding sequence.

[0169] The resulting vectors are used to analyze NEENA molecules in experiments outlined below (Example 6.2).

### 6.2 Generation of Transgenic Maize Plants

[0170] Maize germination, propagation, A. tumefaciens preparation and inoculations are done as previously described (WO2006136596, US20090249514) with the exception that the constructs (cp. example 6.1) each contain a mutated AHAS gene driven by the corn ubiquitin promoter p-Ubi, mediating tolerance to imidazolinone herbicides for selection.

### 6.3 NEENA Sequences Mediate Strong Enhancement of Gene Expression in Corn Plants

[0171] Tissue samples are collected from the generated transgenic plants from leaves and kernels. The tissue samples are processed and analyzed as described above (cp. example 3.3).

[0172] In comparison to the constitutive p-Ubi promoter-only NEENA-less reporter gene construct, the two tested NEENA molecules mediate strong enhancements in gene expression in leaves. Comparable enhancement of gene expression mediated by NEENAs (SEQ ID NO1, NO2, NO3, NO4, NO5, NO14936, NO14937, NO14958, NO 14959 and NO 14960) is detected in maize kernels.

### Example 7

### Quantitative Analysis of NEENA Activity in Rice Plants

[0173] This example describes the analysis of NEENA sequences with SEQ ID NO1, NO2, NO3, NO4, NO5, NO14936, NO14937, NO14958, NO 14959 and NO 14960 in rice plants.

### 7.1 Vector Construction

[0174] For analyzing NEENA sequences with SEQ ID NO1, NO2, NO3, NO4, NO5, NO14936, NO14937, NO14958, NO 14959 and NO 14960 in rice plants quantitatively, pENTR/B vectors LJK1 and LJK4 (compare example 1.3) are combined with a destination vector harboring the constitutive PRO0239 upstream of the recombination site using site specific recombination (LR-reaction) according to the manufacturers (Invitrogen, Carlsbad, Calif., USA) Gateway manual. The reactions yield one binary vector with PRO0239 promoter, the firefly luciferase coding sequence c-LUC and the t-nos terminator as well as 10 vectors harboring SEQ ID NO1, NO2, NO3, NO4, NO5, NO14936, NO14937, NO14958, NO 14959 and NO 14960 immediately upstream of the firefly luciferase coding sequence. Isolation of NEENAs and the vector construction is performed as described in WO/2011/023537 Example 7.1.

[0175] The resulting vectors were used to analyze NEENA molecules in experiments outlined below (Example 7.2).

### 7.2 Generation of Transgenic Rice Plants

[0176] The Agrobacterium containing the respective expression vector is used to transform Oryza sativa plants. Mature dry seeds of the rice japonica cultivar Nipponbare were dehusked. Sterilization is carried out by incubating for one minute in 70% ethanol, followed by 30 minutes in 0.2% HgCl₂, followed by a 6 times 15 minutes wash with sterile distilled water. The sterile seeds are then germinated on a medium containing 2.4-D (callus induction medium). After incubation in the dark for four weeks, embryogenic, scutellum-derived calli are excised and propagated on the same medium. After two weeks, the calli are multiplied or propagated by subculture on the same medium for another 2 weeks. Embryogenic callus pieces are sub-cultured on fresh medium 3 days before co-cultivation (to boost cell division activity).

[0177] Agrobacterium strain LBA4404 containing the respective expression vector is used for co-cultivation. Agrobacterium is inoculated on AB medium with the appropriate antibiotics and cultured for 3 days at 28° C. The bacteria are then collected and suspended in liquid co-cultivation medium to a density (OD₆₀₀) of about 1. The suspension is then transferred to a Petri dish and the calli immersed in the suspension for 15 minutes. The callus tissues are then blotted dry on a filter paper and transferred to solidified, co-cultivation medium and incubated for 3 days in the dark at 25° C. Co-cultivated calli are grown on 2.4-D-containing medium for 4 weeks in the dark at 28° C. in the presence of a selection agent. During this period, rapidly growing resistant callus islands developed. After transfer of this material to a regeneration medium and incubation in the light, the embryogenic potential is released and shoots developed in the next four to five weeks. Shoots are excised from the calli and incubated for 2 to 3 weeks on an auxin-containing medium from which they are transferred to soil. Hardened shoots are grown under high humidity and short days in a greenhouse.

[0178] Approximately 35 independent T0 rice transformants are generated for one construct. The primary transformants are transferred from a tissue culture chamber to a greenhouse. After a quantitative PCR analysis to verify copy number of the T-DNA insert, only single copy transgenic plants that exhibit tolerance to the selection agent are kept for harvest of T1 seed. Seeds are then harvested three to five months after transplanting. The method yielded single locus transformants at a rate of over 50% (Aldemita and Hodges 1996, Chan et al. 1993, Hiei et al. 1994).

### 7.3 NEENA Sequences Mediate Strong Enhancement of Gene Expression in Rice Plants

[0179] Tissue samples are collected from the generated transgenic plants from leaves and kernels. The tissue samples are processed and analyzed as described above (cp. example 3.3)

[0180] In comparison to the constitutive p-PRO239 promoter-only NEENA-less reporter gene construct, the tested NEENA molecules (SEQ ID NO1, NO2, NO3, NO4, NO5, NO14936, NO14937, NO14958, NO 14959 and NO 14960) mediate strong enhancements in gene expression in leaves. Strong enhancement of gene expression mediated by the NEENA (SEQ ID NO1, NO2, NO3, NO4, NO5, NO14936, NO14937, NO14958, NO 14959 and NO 14960) is detected in rice seeds.

### Example 8

### Identification of Nucleic Acid Expression Enhancing Nucleic Acids (NEENA) from Genes with Constitutive Expression in Other Species

### 8.1 Identification of NEENAs in Publicly Available Genomes

[0181] NEENA sequences are identified from publicly available genomic DNA sequences (e.g. http://www.ncbi.nlm.nih.gov/genomes/PLANTS/PlantList.html or http://www.phytozome.net/news.php) of the following organisms: Zea mays, Oryza sativa, Brachypodium distachyon, Glycine max, Medicago truncatula, Sorghum bicolor, Arabidopsis lyrata, Manihot esculenta, Ricinus communis, Populus trichocarpa, Cucumis sativus, Prunus persica, Carica papaya, Citrus sinensis, Citrus clementina, Eucalyptus grandis, vinifera, Mimulus guttatus, Aqullega coerulea, Setaria italica, Selaginella moellendorffii, Physcomitrella patens, Chlamydomonas reinhardtii, Volvox carteri.

### 8.2 Isolation of NEENA Sequences

[0182] Genomic DNA is extracted from green tissue of the respective organisms using the Qiagen DNeasy Plant Mini Kit (Qiagen, Hilden, Germany). Primer design, PCR amplification and purification for NEENA sequences NO 6 to 14935 is performed analogously to the description in example 1.2.

### 8.3 Vector Construction

[0183] Using the Multisite Gateway System (Invitrogen, Carlsbad, Calif., USA), the promoter::NEENA::reporter-gene cassettes for NEENA sequences NO 6 to 14935 are assembled into binary constructs for plant transformation as described in example 1.3.1. The resulting plant transformation vectors are used in the subsequent experiments.

8.4 Analysis of NEENA sequences
8.4.1 Analysis of NEENA molecules enhancing constitutive gene expression in A. thaliana
8.4.1.1 A. thaliana Transient Protoplast Assay

[0184] A Renilla control construct was generated as described in example 1.3.2. The screening in A. thaliana protoplasts is performed as described in example 2 in a dual luciferase assay. All tested NEENA sequences (SEQ ID NO 6 to 14935) cause significant enhancement of luciferase reporter gene expression when coupled with the reporter gene compared to the NEENA-less control in transient A. thaliana protoplast assays.

8.4.1.2 A. thaliana Stable Transformation

[0185] For NEENA sequences NO 6 to 14935 the respective transformation vectors are used to generate transgenic A. thaliana plants analogously to the description in example 2.3.1. Transgenic plants are then analyzed (compare example 2.3.1). All tested NEENA sequences (SEQ ID NO 6 to 14935) cause significant enhancement of luciferase reporter gene expression when coupled with the reporter gene compared to the NEENA-less control in stably transgenic A. thaliana assays of leaves, flowers and siliques.

### 8.4.2 Analysis of NEENA Molecules Enhancing Constitutive Gene Expression in Soybean Plants

[0186] NEENA sequences with Seq ID NO 6 to 14935 are tested in soybean plants (compare example 4). Significant enhancement of gene expression is measured in leaves, flowers and siliques.

### 8.4.3 Analysis of NEENA Molecules Enhancing Constitutive Gene Expression in Monocotyledonous Plants

[0187] NEENA sequences with Seq ID NO 6 to 14935 are tested in monocotyledonous plants (compare example 5).

### 8.4.3.1 Transient Assays for Analysis in Monocotyledonous Plants

[0188] As described in example 5.2 transformation vectors containing NEENA sequences NO 6 to 14935 are used to transiently transfect monocotyledonous plants. In both the microprojectile bombardment (compare example 5.2.1) and the transient protoplast assay (compare example 5.2.2) the NEENA molecules mediate strong enhancement in gene expression in comparison to the constitutive p-Ubi promoter-only NEENA-less reporter gene construct.

### 8.4.3.2 Assays for Analysis in Monocotyledonous Plants

[0189] NEENA sequences with SEQ ID NO 6 to 14935 are tested in stably transgenic monocotyledonous plants (compare example 5.2.3). Significant enhancement of gene expression is measured in leaves, flowers and siliques.

### 8.4.4 Analysis of NEENA Molecules Enhancing Constitutive Gene Expression in Corn Plants

[0190] NEENA sequences with SEQ ID NO 6 to 14935 are tested in corn plants (compare example 6). Significant enhancement of gene expression is measured in leaves, flowers and siliques.

### 8.4.5 Analysis of NEENA Molecules Enhancing Constitutive Gene Expression in Rice Plants

[0191] NEENA sequences with SEQ ID NO 6 to 14935 are tested in rice plants (compare example 7). Significant enhancement of gene expression is measured in leaves, flowers and siliques.

1. A method for production of a high expression constitutive plant promoter comprising functionally linking to a promoter one or more nucleic acid expression enhancing nucleic acids (NEENA) heterologous to said promoter comprising:
i) a nucleic acid molecule having a sequence selected from SEQ ID NOS: 1 to 14937 and 14958 to 14960; or
ii) a nucleic acid molecule having a sequence with an identity of at least 80% to a sequence selected from SEQ ID NOS: 1 to 14937 or 14958 to 14960; or
iii) a fragment of 100 or more consecutive bases of a nucleic acid molecule of i) or ii) which has at least 65% or more expression enhancing activity as the corresponding nucleic acid molecule having a sequence selected from SEQ ID NOS: 1 to 14937 or 14958 to 14960; or
iv) a nucleic acid molecule which is the complement or reverse complement of any of the previously mentioned nucleic acid molecules under i) or ii); or
v) a nucleic acid molecule hybridizing under conditions equivalent to hybridization in 7% sodium dodecyl sulfate (SDS), 0.5 M NaPO₄, 1 mM EDTA at 50° C. with washing in 2×SSC, 0.1% SDS at 50° C. to a nucleic acid molecule comprising at least 50 consecutive nucleotides of a transcription enhancing nucleotide sequence selected from SEQ ID NOS: 1 to 14937 or 14958 to 14960.

2. A method for producing a plant or part thereof with, compared to a respective control plant or part thereof, enhanced constitutive expression of one or more nucleic acid molecule comprising the steps of:
a) introducing into the plant or part thereof one or more NEENA comprising:
i) a nucleic acid molecule having a sequence selected from SEQ ID NOS: 1 to 14937 and 14958 to 14960; or
ii) a nucleic acid molecule having a sequence with an identity of at least 80% to a sequence selected from SEQ ID NOS: 1 to 14937 or 14958 to 14960; or
iii) a fragment of 100 or more consecutive bases of a nucleic acid molecule of i) or ii) which has at least 65% or more expression enhancing activity as the corresponding nucleic acid molecule having a sequence selected from SEQ ID NOS: 1 to 14937 or 14958 to 14960; or
iv) a nucleic acid molecule which is the complement or reverse complement of any of the previously mentioned nucleic acid molecules under i) or ii); or
v) a nucleic acid molecule hybridizing under conditions equivalent to hybridization in 7% sodium dodecyl sulfate (SDS), 0.5 M NaPO₄, 1 mM EDTA at 50° C. with washing in 2×SSC, 0.1% SDS at 50° C. to a nucleic acid molecule comprising at least 50 consecutive nucleotides of a transcription enhancing nucleotide sequence selected from SEQ ID NOS: 1 to 14937 or 14958 to 14960; and
b) functionally linking said one or more NEENA to a constitutive promoter and to a nucleic acid molecule being under the control of said constitutive promoter, wherein the NEENA is heterologous to said nucleic acid molecule.

3. The method of claim 1, further comprising the steps of:
a) introducing the one or more NEENA into a plant or part thereof; and
b) integrating said one or more NEENA into the genome of said plant or part thereof wherein said one or more NEENA is functionally linked to an endogenous constitutively expressed nucleic acid heterologous to said one or more NEENA; and optionally
c) regenerating a plant or part thereof comprising said one or more NEENA from said transformed plant or part thereof.

4. The method of claim 1, further comprising the steps of:
a) providing an expression construct comprising one or more NEENA functionally linked to a constitutive promoter and to one or more nucleic acid molecule the latter being heterologous to said one or more NEENA and which is under the control of said constitutive promoter; and
b) integrating said expression construct comprising said one or more NEENA into the genome of said plant or part thereof; and optionally
c) regenerating a plant or part thereof comprising said one or more expression construct from said transformed plant or part thereof.

5. The method of claim 3, wherein said one or more NEENA is functionally linked to a constitutive promoter close to the transcription start site of said heterologous nucleic acid molecule.

6. The method of claim 5, wherein said one or more NEENA is functionally linked to a constitutive promoter 2500 bp or less away from the transcription start site of said heterologous nucleic acid molecule.

7. The method of claim 1, wherein said one or more NEENA is functionally linked to a constitutive promoter upstream of the translational start site of a nucleic acid molecule the expression of which is under the control of said constitutive promoter.

8. The method of claim 1, wherein said one or more NEENA is functionally linked to a constitutive promoter within the 5′UTR of a nucleic acid molecule the expression of which is under the control of said constitutive promoter.

9. A recombinant expression construct comprising one or more NEENA comprising:
i) a nucleic acid molecule having a sequence selected from SEQ ID NOS: 1 to 14937 and 14958 to 14960; or
ii) a nucleic acid molecule having a sequence with an identity of at least 80% to a sequence selected from SEQ ID NOS: 1 to 14937 or 14958 to 14960; or
iii) a fragment of 100 or more consecutive bases of a nucleic acid molecule of i) or ii) which has at least 65% or more expression enhancing activity as the corresponding nucleic acid molecule having a sequence selected from SEQ ID NOS: 1 to 14937 or 14958 to 14960; or
iv) a nucleic acid molecule which is the complement or reverse complement of any of the previously mentioned nucleic acid molecules under i) or ii); or
v) a nucleic acid molecule hybridizing under conditions equivalent to hybridization in 7% sodium dodecyl sulfate (SDS), 0.5 M NaPO₄, 1 mM EDTA at 50° C. with washing in 2×SSC, 0.1% SDS at 50° C. to a nucleic acid molecule comprising at least 50 consecutive nucleotides of a transcription enhancing nucleotide sequence selected from SEQ ID NOS: 1 to 14937 or 14958 to 14960.

10. The recombinant expression construct of claim 9, functionally linked to one or more constitutive promoters and one or more expressed nucleic acid molecules, the latter being heterologous to said one or more NEENA.

11. A recombinant expression vector comprising one or more recombinant expression constructs of claim 9.

12. A transgenic plant or part thereof:
i) a nucleic acid molecule having a sequence selected from SEQ ID NOS: I to 14937 and 14958 to 14960; or
ii) a nucleic acid molecule having a sequence with an identity of at least 80% to a sequence selected from SEQ ID NOS: 1 to 14937 or 14958 to 14960; or
iii) a fragment of 100 or more consecutive bases of a nucleic acid molecule of i) or ii) which has at least 65% or more expression enhancing activity as the corresponding nucleic acid molecule having a sequence selected from SEQ ID NOS: 1 to 14937 or 14958 to 14960; or
iv) a nucleic acid molecule which is the complement or reverse complement of any of the previously mentioned nucleic acid molecules under i) or ii); or
v) a nucleic acid molecule hybridizing under conditions equivalent to hybridization in 7% sodium dodecyl sulfate (SDS), 0.5 M NaPO₄, 1 mM EDTA at 50° C. with washing in 2×SSC, 0.1% SDS at 50° C. to a nucleic acid molecule comprising at least 50 consecutive nucleotides of a transcription enhancing nucleotide sequence selected from SEQ ID NOS: 1 to 14937 or 14958 to 14960.

13. A transgenic cell or transgenic plant or part thereof comprising the recombinant expression vector of claim 11.

14. The transgenic cell, transgenic plant or part thereof of claim 13, wherein the cell, plant or part thereof is selected from the group consisting of bacteria, fungi, yeasts or plants.

15. A transgenic cell culture, transgenic seed, parts or propagation material derived from a transgenic cell or plant or part thereof of claim 12, comprising said heterologous NEENA.

16. (canceled)

17. (canceled)

18. The method of claim 4, wherein said one or more NEENA is functionally linked to a constitutive promoter close to the transcription start site of said heterologous nucleic acid molecule.

19. The method of claim 18, wherein said one or more NEENA is functionally linked to a constitutive promoter 2500 bp or less away from the transcription start site of said heterologous nucleic acid molecule.

The application's sequence listing, which the Patent Office published only in electronic form, follows.

SEQUENCE LISTING (14966 sequences)

SEQ ID NO: 1 - DNA, 689 bp, Arabidopsis thaliana
  Intron number 4 from transcript AT1G58520.1 (locus AT1G585 20) derived from phytozome v7.0 (chr-ID Chr1; pos 21734549 to 21735201)
tataggtaccggcatcattcagagactgctggtacgtatatttcttggaacagtcatttttaactaaactattacgcaggccaccttcctcttgctttacttgtcagattaaaaccgtcacctagatttattttaaaaaactgttattgctctttgtgaaaatgatttgaagttttgaacattttgccagctttaagtgttacttcttattgcagtattcattttggttgatagctttcgtagttggtgtaaatttcatggttctgaattgttatgtgctgcttggatgttataaagggttatttgatgactagatgcagagattgatgatattacatagcacagtagatataataatgaaatttagttcgtgtatcagctaaaaggggtacagtttagatgcatattctgggaatatgaaaggaccttctagagcaactctgtctgtatcctactgctgggctttcattctactgctttctgatactgtggttatttcagtatcactacatcagtttctcatttattacctgtcagcatgttgtagaaattgggtaaatgatatgtggatggtttgtgcttgtgataaagtatttgaaatttaatgttctatgtcagataaaaagtgtgacgtttagattattccaatttctgtctcagcgtgaagcggagaggttgtccatggtata

SEQ ID NO: 2 - DNA, 207 bp, Arabidopsis thaliana
  Intron number 2 from transcript AT3G11710.1 (locus AT3G117 10) derived from phytozome v7.0 (chr-ID Chr3; pos 3705130 to 3705345 reverse strand)
tataggtaccgaaagctgaaaaggctaaacaagtgagcactcttcttagctttcttatgattcctaacattctctatattctggggatgtcatcatagattattgaatcctcttggtagcagatttgattcagatatccagttttcgtagttattgagatttgattctattgatgcaggcacctaaagcaagctcccccatggtata

SEQ ID NO: 3 - DNA, 835 bp, Arabidopsis thaliana
  Intron number 1 from transcript AT4G15470.1 (locus AT4G154 70) derived from phytozome v7.0 (chr-ID Chr4; pos 8843918 to 8844759)
tataggtaccctgcatcgttcccttcatctgtacgtagatctcgttctttggataagattttcatttcatcttcgtagtttttcgttgatttgatctggtaattaggaattcttatggttaggtcaacctgattctgatttgtgcatttatgtcccttatgtttatgcatttcttttccatttctcttcatggattgagtttcttctcgtaactagatttatatcctttactgtgtttattatacatttgattgtttaggtatatatatggaggatggattgaacaatgttttatatgatgattgacagattgatgcttggtgtgatgatatctagtgtgttggtgttaggattcagaattgactttacttgatctttcactgaaacatagaacaaagaacagaccagaaacctaaggagtaattctggagaatcccttaccctcctgagcccaaaccgaccaaaatcttgacaactcacaaatctgttatatttcctattgatcctttttcttccctctaactatctcgtcatgtaacagccttgttctcttttttctattgatcgtttttcttttgtcaccttagggagaattttcagatagcttgttctctatgagttttgctttgttgacctctcatttgatgttggtttacttgcttcagtacttagttttgaatttgttagtactgagtaccttgattttgtgttgcacagtcgtacatcagctatttattttatgtcatatttgttgacaagatttattgctcatgtgattgattactgggagttcaattttgtagtaatctggcctctgcacatttaccatggtata

SEQ ID NO: 4 - DNA, 320 bp, Arabidopsis thaliana
  Intron number 2 from transcript AT5G04160.1 (locus AT5G041 60) derived from phytozome v7.0 (chr-ID Chr5; pos 1143484 to 1143789 reverse strand)
tataggtaccgcatcttactttcttcagaggggtaagtaatatatcagaatatgaccttgatcttatcctaatagaatttaagattctgctagcagttagatgagcaaatcaggaaacttttgtcaaatcaagaaatctcataaatgattggttaggtagaatgttgtaatatatcactttatcaggttaagattttaattcatagaattagattgttaactaccaaagatattcatctccacaaacactagtgcatctttatgtaacttttttgttcttcctgcagggaaaaattgaactcaatcaattccatggtata

SEQ ID NO: 5 - DNA, 353 bp, Arabidopsis thaliana
  Intron number 1 from transcript AT5G12280.2 (locus AT5G122 80) derived from phytozome v7.0 (chr-ID Chr5; pos 3973195 to 3973501 reverse strand)
tataggtaccctaagcgttcccggttgaggtacgttgccttcttatctctcaccgaaaccttaagtagtcattagcgtcgccagttcctcttctttttcctgtcgatctctttctccgcgttattatagctgccttgttggtggagattgcataagccaataattttaggtcaaatgaaattcggagaatctgattttgatgtttcatatgatttgatattcatggtgttttttcagaatttatctacgaatctgactttaatgtttattatatatatatatatatatattcctgtaaaaaaaaatgtccactccttgcagattgatttgcagttggagaaagccatggtata

SEQ ID NO: 6 - DNA, 4523 bp, Arabidopsis thaliana
  Intron number 9 from transcript AT4G39120.1 (locus AT4G391 20) derived from phytozome v7.0 (chr-ID Chr4; pos 18221078 to 18225600 reverse strand)
tggagtcacttgagtggcattgaaaagattcgctggtatgttctcgcctacttattgtttctacacactcccttgcttgaagacataattatgatcactttcttcatacttgcttgtttgataaataaaaaactgatagttaggttatgattctggttagagcttgttttttttttttttcttgaaataggaaccagagttattttatttttggctttgtgttaaaattgtcaagataacagaattagcaatttgctaaatatagaccattgaatatcatcaatgctcatatcctccaccaaattacagcatactccaaaaactggccacacatataacaactcaccttttctctctttcatgacctttttttctccctcttttcttcaaccacaagctatccaacaaactccctcattccttcttatctttgttcctcctcatccccctctcttctctctctccttcccacccaggagggatggagataagaaagaaaccaaacatattcacggttctcgtcattgatttttcttcaaagccttccatggctctccttctggctattctccttttcctctcaggcccttctgcatctgcggtagctgcagctgctgtgggacctgctactggttttaaaccggcagatgatattctcattgattgtggaagcaaatcgtcatcaaaaacccctgatggaagagtctttaagagtgaccaagaaacaatccaatacatagaagccaaggaagatattcaggtctcagccccgccttcagacaaggtcgcatctcctatctacctaactgcaaggatcttccgtgaggaagccacctacaaattccatttgactcgacctggttggcattgggttcgcctgcatttcttggccttccctaatgacaagttcgatctccaacaagcaaccttttccgttttaacggagaaatatgtgctgcttcataacttcaaaataagtaacaacaacaatgatagtcaagctgctgttcagaaggagtatctcgtcaacatgacagatgctcaattcgccctcaggttcagacctatgaaaagctctgcagcgttcatcaacgctatcgaagtcgtgtcagctccagacgaactgatctctgattctggcactgcccttttccctgtcattgggttctcgggtctgtctgactacgcttaccagtctgtttatagagtcaatgtcggcggtcccttgatcatgcctcagaatgatacattaggaagaacctggatacccgataaggaattcttgaaagatgagaacttggcaaaggacgttaaaacaaccccttcggcaatcaagtacccaccggaagttacacctttgattgctccacagacggtttatgcaacagctgtagaaatggctaattctctcaccatagaccctaattttaacgtctcctggaatttcccctccaacccatcgtttaactaccttatccggcttcatttctgtgatatcgttagcaagtctctcaatgacctgtactttaatgtgtacattaacgggaaaactgccatttctggactggatttgtccactgtcgctgggaatctagctgctccttactacaaagacatcgttgtgaacgcaacacttatgggccctgagctccaagtccagattggtcccatgggagaagatacagggaccaaaaacgcgatcttgaacggtgttgaggttctgaagatgagcaattccgtgaacagccttgatggagagtttggagtggatggtagaaccactggcatggggaagcatggtatggtagcaaccgcggggtttgtgatgatgtttggagctttcattggtctgggagccatggtttacaagtggaagaagaggccacaagattggcagaagagaaatagtttctcctcttggttgctaccaatacatgctggtgatagcactttcatgacaagcaaaggtggttctcagaaatccaacttctacaactcaacacttggtctcggccgctatttctccctttcagagcttcaagaagccacaaagaactttgaagcatcccagattatcggtgttggaggattcggtaacgtctacattggaaccctcgacgatggaaccaaagtcgctgtcaaaagaggtaatccacagtctgaacaaggaatcactgagtttcagacagagatccagatgctttctaagctcagacacagacacttggtctccttgattggttactgtgacgagaactctgagatgatcttagtctatgagttcatgtccaatggtccattcagggaccacttgtatggaaagaaccttgctcctctaacctggaaacaaagactcgagatatgtatcggatctgcacgtgggcttcactacttacacacaggaacagctcaggggattatccaccgtgatgtcaaatccaccaacattcttctcgatgaagctttagttgcaaaagtcgctgactttggtctttctaaagatgtagcttttggacaaaaccatgtcagcacggccgtgaaaggaagtttcgggtacttagacccggagtactttagaagacaacaacttaccgacaaatccgatgtttattcctttggtgtcgttcttctagaagctctgtgcgcaagaccagccatcaatcctcagctaccaagagagcaggttaacttagctgaatgggcgatgcaatggaaacgaaaaggacttcttgaaaagatcattgatcctcatttggctggaacgattaatcctgaatcgatgaagaagtttgctgaagctgcagagaagtgtttagaagactacggtgtcgataggccaacaatgggagatgttctgtggaacttggagtatgctcttcagcttcaagaggcattcactcagggcaaagcagaagagaccgagaacgctaagcctgatgtggtgacacctggctcggtgcctgtgtctgatccatctccgatcactccctcagtcaccaccaacgaagcggctactgttccggttcctgctaaggtggaagagaacagtggcacggccgtggatgaacactctggaacagccatgtttactcagtttgctaaccttaacggaagataaaaacaaactaacagataaataattaaaaaaggacataaagaatgcaccaaaccgaatttgtcgttataaacagtaattgcaatagaaaaaacttgactttttaaggtgatatatttgtttctttgtatgtttttttggtggtggtcggggagatgtgtgtgatatttctatattttggtgtattttataaaatttatatattttttgtatgaagtgtaattttgtgggtggatatgtatatgtatgtatgtgtacttctaaatgctctgctgcatttactttacttatcctccttcattgtagttgttaatattagcttacaaatacaaattcacattgaaacataagtgtgtgtgaatcttacttgaaatttacatcattttgtacacacaggaaacaaaaagttctctttttgtattctaagaaagttggttttacagtctggactctgagcatctgtttcagagtagaccagaaaagatctgtttcagagtaaaaaaatttttatcatctggttttgcaaatgaatctcttctctaagaaagtacctaaacattaactggggaataatgtgttcgttctcccatagtctttggaaaaaaagggtaacctattctcgtactttgttgtctagtgtaaactctagttaaagctgtcacatttgaacctgaattagtaatattaaggaaaaggaactcaatggtttgtgtgttgttatatattggattcaagctttgattcattgaatggaattttagtgtttggtttacgacctctgttagttaataatcatagacaccatttccttctttagatgggttagtttggttctaatcagggaaagccattaatttttccatctaatcattgtagaaaccttgcaatattgtgtatatgtaaacatacacaatcgtaaatgtttggatatcaaactcttcacaagtgtttgtaggagaggaagtataggtgagaaaagattagggtcagtcacagattctgcaaaaagtaagagaaccatgaaagtaaaataaaacataaacccagaaatagaaaccattcccttcaattaagcaaatgagttctctttccttttctcttcttatgtgtatatatagaaatgaatagcttaaattttcccacaaaagccaaagagacccaaattattgttttattttgtttttgttacctcgcttatatctattatcatggaaaacataagtgggttggcttttgatatgggagagctaagaaacaaccttcccaaaaagtaaaatcctgaaaaaggatttcattgattatgattgtttgtttaagttatggaaatccggattactatctaattttggattttgtgaatggttgtaaaataggagaggattatcaaggtactattcaggaaaagcga

SEQ ID NO: 7 - DNA, 791 bp, Arabidopsis thaliana
  Intron number 1 from transcript AT4G08770.1 (locus AT4G087 70) derived from phytozome v7.0 (chr-ID Chr4; pos 5599300 to 5600090 reverse strand)
tccttcgtcttcatttccacgactgctttgttaatgtaagataccattagaatcaatatattcatgtatattttaactcttttggttccctatagtgtagccctaataaagagcgcgagggaatgctttatggatattataaacttgaaattaggatataaaaatgtgatagactttttgttttgttgttcgactcaaatagtttgtttcatggtttattcatttcaaactgtgaaattattttggtagttttgttattgaaattttggctttcttttagttagttaaaaaattgaaaaaaacaggaatgaaagaaatttacaaaaacaatagaaatttacttttacatacaaaatttatgtctttttagttaaattatttttttggaagtttgattatacttattttgactagttttggttgaattatggagactggagaggctatatataaaatggaccaacaacttctcaaagacattaatttgatattattagtacaagtctacatagattgtagtgctttcttatctcgagtttcagattctgtgtcaaagtatgctcgaagatgtttatagtgaactcatattttttggatttcaaatattctgtcttcggattcacgtgaaaagattatgctatcgatagtgtgatacatgtagtagtataacttgtttatatttaaattcaaagaatctaagatcaactgtttacggatgttaagattttctttatgtaaacaatgttgttagttactaaatgtgaagaaaaatattttgttttgaaaaaggg

SEQ ID NO: 8 - DNA, 1509 bp, Arabidopsis thaliana
  Intron number 1 from transcript AT1G27110.1 (locus AT1G271 10) derived from phytozome v7.0 (chr-ID Chr1; pos 9415849 to 9417357 reverse strand)
cgtaagttatctttcttccgtatacataaggttgactaggtagttaatgcatatcttttggttatttcatttgccttctcatttattcttttaaccattggatatacgatactaatagatccatgcagatgaaaaagtaccatgaatgcatcttttagggttagcctaattaattaattagaatgggttaagagacaatagtttttaagggtttgattgattcttccgctgcccacccgcaaaagttgtatttgcggttgctagcgtttaaaattaatcataaacaaacgttttaaacctttctaaaccgttcaaaaccactgaatttaaaagctcatttccacaattatttgcggttgcgaacggtagcaccgtagcgtaagcaatttataaaataatcaatcctatatatattttaaaaatacataaacaccaaaataaaagttaaaatatattataaactatatatatatattaacgttaattctcaaaaccctaattttttctttttatcaaaatcatgccgtcaatctaaactctaaggataataaaatacatgctaagtattataataaaattattaatccggaggatctaagaattcaaaatatatattttttagtttgtcatattttttatttataatttattatattacttgatgctgttttttatgaaccaaatacatgaagtaagaaacatttaactatgaaatatatttattttgaataagtatgtaataattatattttgtataaccaaaaaccaaatctaaatctaaacaaaaaaaaacactctataaaattatctaaaatccaaatttattttaaaactaataatatatttgactaaagttcgaaaccaaaaaaatatatatcaaactattcatatcgtatgaagtttcactttcgatacatcttaaaaccaaactttgatcgaaattcggattgaactatatagtttgtttattggttagcagttagcactattcaactttctaaaaacatgatatttattcaaatatttgtactgtaatgataggaaaattcatatctattaaaaaaccaagaatcaattatggattttgtcattttgatagtggcatttatggattttgccatttttataatagtttgtaaattttattatttttcagacttcaaaaaataattaacatgtgttttattagtttgtttggttttagtcaagtttatgtagttcttatgatttagtatttggtaatatttataaactcataaatacatatatttcaatgtgttaaaaatagcaaaatctgtatattattcaaaaaatggtattttcataagattttttaaaaaacattattcaaacaatgtgaaaattcatcgtccttcgtgcataaattactctctctcttttttggtcaacaaatattagtctgttctgtttcgattagactcacgcgtgaactctgtttcgtaatctccgataaacagaaagaagaaagcagatttgttagctgtggtt

SEQ ID NO: 9 - DNA, 556 bp, Arabidopsis thaliana
  Intron number 2 from transcript AT5G15390.1 (locus AT5G153 90) derived from phytozome v7.0 (chr-ID Chr5; pos 4995989 to 4996544)
ttgtttcctgtgacagctccaaaaggtgcccctttgaggttggcattttctgtttctttgttgattcataggatttgaggtgaaactagggattcttgcattttgaatttagacaatgtgcggtgacctgagatcataagctggtgattgaagtctgtagaacttttgattgcatcataagctaccaagatagatcatgagttggtagttatgtttcttggatcacaggatggggataagtgaggactcttaaatttccgtaaaacattgaatctacgctgattgtgagtcactactattacattttccttctgagtccaagattgatcataagttggctttcctttttcttagttcatacgagatagaatggagaattgttacggttttttgaactatgcagtgatacaagagtcataggtaatatctgaaaagattgatccattagttgttgactgaaatgtaaaaaaggtttgattgcattgtgtgaattcatttaccgtgctatgtgtgtgttaatgtatattatatatgtgtaggtataacggaaatcgcc

SEQ ID NO: 10 - DNA, 426 bp, Arabidopsis thaliana
  Intron number 5 from transcript AT4G10320.1 (locus AT4G103 20) derived from phytozome v7.0 (chr-ID Chr4; pos 6402293 to 6402718 reverse strand)
gacaccccactcatatatagagcagttccaagttggtatgcttcattttcatatgagtttgagctaaggtcttagtagttggatcatttagtgctagttccagtgagacggtctctcttgtccttgccttgaactttggctcttatgattatatctggcagccccttttcggagctgtattaggtatctttgtgtattttttttgcagaataatcaccaaactgtttaggatattttgatttcccatgttttcatttatttattttagatttcatatgtagcatctgacctaaatggcacgtagttatggtcataacttatgaactttattctgtcgtttttcaggtgtggttatgactttaaagtttttttttgtgttttgacctgttaggtttgtgcgtgtggagcagttgaaagaaaagttgt

SEQ ID NO: 11 - DNA, 1026 bp, Arabidopsis thaliana
  Intron number 1 from transcript AT1G76990.4 (locus AT1G769 90) derived from phytozome v7.0 (chr-ID Chr1; pos 28932348 to 28933373)
acaaattttgagcttctttttttgaagttcttgaggtaactaaatctcactctctttatagttttactttgtttgattttgtcaattttgactctttgaattctggggttttccattaaaaaaactcagaaagttctaagatttatctctgaattgagtaagttctattgaaattggcgtatggattcgacagatttttgagcacgatgtatgttttaaatttcgatgtcgacgcaccataaattttatatatatgaaattgaaatcttgataacaacagatttggtctcatcttcttcaagttgttgttgttgatgtggctgctgcttagagtaatgtttgttgctgcaagttggcttattgtctaatccgttatattattattttattttatttatatacagttgtgtttcgatttgtaacattttagattccgtctttgaccaattaaatctttcctccaaataaaatatttattttcttgctttcatgtttttaattttgacagctactactactaagttcgttttaagcatcaattcgtttatgcaaatagagagaatatcatgtcatgtcttaaaaaacaaagttgctcagaaacaatctttttttggttttgattttcaagttagtagtaggaggaggaggagatcttttaggaatctattcctctgttttttttctttggttgagaaggacccagagaaactcttgttttgttttcagagaatctctgtttgtggtctctctttatgaaatctttatctctatcttctttcagattctgcttcttctgtctagttacttagtggccaagattcacttatttgactcggcaggcaaaatctaccgaatatcttatcttcttgcaacttgtttatagacttaaagctgtgtacttactttgttttgttgcttcttcttatcctttgtcttgttctgtctcttggtcgtgatatgaattagttctttcttcttggttaaattgcagaacaagtgaaagagcttaatatccacaagactctt

SEQ ID NO: 12 - DNA, 510 bp, Arabidopsis thaliana
  Intron number 1 from transcript AT1G26330.1 (locus AT1G263 30) derived from phytozome v7.0 (chr-ID Chr1; pos 9107711 to 9108220)
ggataagaagtactggagttcatctagggttggttttctctgctctctatcctccattcgtcagtcgatagctcaattcaactctttctgtgttacttttctaattccttagaaattgagaagaaatatagaatcagattgacttcgattactgtaatttgaattattttggatggggctgatatgcctaacgatgcaatgaatcgcgattaattttgtgtagattggtacatttgcaactatcaggatcgatgatcagtagattctctgtttctgaatatttttgatttaaatatatacgttcagtgatactgcatagggtagagagtagagactagatccttaagctgagggtgtagattgggtttgactgttctcgttacttcaacagtgaacaacactagatctattgaaacaacttatgcatatggtgtctcagaatttctatttactttagcttctttttgttcatcagggaaaagatcgtttcccttatcctgtaggctacaa

SEQ ID NO: 13 - DNA, 2597 bp, Arabidopsis thaliana
  Intron number 1 from transcript AT4G35240.1 (locus AT4G352 40) derived from phytozome v7.0 (chr-ID Chr4; pos 16764358 to 16766954 reverse strand)
ttatcccttcttcttctttttttttttttttttttgtgtagagaaaacacatggatttttgctatataaaacattaaaatggccaactacaattcgaaatcatcacacgcattattttgtttttggttgaaatcttagcgctaaatctaaagatgtataagctttttttatcatttgattcaactcaaacactaacctaaaataggaatactttaatttcttttctttttttactttcagttaccatgtgcgataaaaaagcagacatatcaattaagtgaaacaccaaatttatttgtcttaattttggaaaggataaaggatctagcatatatgcagcaaaaaggcaaatattatgaccaaaaaaaacaagacaaatataaaaaggaaaaaagagtttaataaaaaaaagttaaaagaaaacagaagggacaaaaagagttgcttctgcatcaagttattctgcgtaaataacatttatatatcagttacaaggcttccatgctaagtatcatccttatcggatgtcaaaatatccgaaggctttgtttgatttctctacattatttttgtgatatatatagttcgtcaccacattttttgtcgctacggacctgatttggtttcttgtgacaatgtgcatatatagtcattactaatacagtaatatatatcttctagactgttcgttctagtcggtcgacacaagtttttaaaaaatcgttgttgtgcgaaattgtgaatccggttaatcaaaatatatctgttttgttttgttttgtagaaacatgtctttcgcatgttctttaaaacatatctatgtaaataaatgtgcgtaacatatataacgcaaacaaaattcacgtgtttcttcagatatctgaagatagtaacataacaccttagaacaaagatttcgatgtcgttaaagggttactatatacttgagtgcgctatcaagtagtttctctcctgcaactctcgctacaagcttttattcgtgtgtttacatttaaattgtccacacacctcgtcacgcacttttagccttcttcattttgatttttaggtccataatattttatatataagtagttcaagcagttaaagaaatgttattttagcagtaactatcagaattatgtacaaattctatattagaaaaaaaaaatccctcatcgttgtttcagcccaaaaaaacgttatagagtgaagatccaaatttatttatttttttaaaaaaatcccaaaacacatggttgactcttgcaattttgtttaaattgaccctttaatgctacgataaaaagtatatataccgttttaatttgcggagtaccgatctcaataacaaatagcaataccgaaaacgttaataacgtttatctcttaagattttaaactattttatactattcgtttactgttttttttactctgactagtttttatttgtgctggtttcaccaatcgatatcgattactagatgctaattaaatttctaataagcttgttttgttcagatgataatataaaaaatcaattcaacaaaaaagagtcagtctagtcaatgagagaggaagaaacatgacgacgttagcatcacacctgaagcctgaagtgcctgaaagctaacaaacatcgattttagttacgtctctagtttgaacacaccaaaccaacaactgtagtactattttaaatcaaaacaaattccattacattcctttgagaataatcaataaatcaattactactaattaatagcaagacataagttcaatacgaatctcatcacttaatttcttacgttacccgttaccatcaacatgtcgaatttaaattgtccaaatcaaatactgtcgttacgtaattaaagaacataattaagggaatgacacaaaaatggtcaaaacgagtcaaagttaccgtcaaaccaaaccacaaagccaaagtagaaaagtagtccacttatacttacacgttattattaacataaagatcaaaaattactagtagtactaccgtatctctttttctaagatccatgtctgaatctctctcaaagtactgtcctaaaaaggttaaattttcccaacaaaaaaaatctaccgtgtaagaattttcaggttaattaattttctgaaaaaggagattatggtaaattataaaaaaaaagaaaagaaaaaaacaccgactcaatcctatggaagaaacggacgaaaatctcggtgctggcaagattccttcacagtccttttgctgttttttttttctttctttcttcttcttcatcttcttcagctaatatcattcatttttatctctttttttatcttatagagaaaacaatcacttctttcatttgtatgtaatctctatcaacatcaacccacaccatctttgccccttatgcgcctccatctcttattcctctcacctacctttctttctctttctttacgaaaagtcttttaatttcaattctctacacctgatttcaaatcttgggtctctctctctctctctcttttttttttttctttataatttaatttaagttgattcttttttttttgtttctttttttctttgt

SEQ ID NO: 14 - DNA, 1406 bp, Arabidopsis thaliana
  Intron number 1 from transcript AT1G51810.1 (locus AT1G518 10) derived from phytozome v7.0 (chr-ID Chr1; pos 19230916 to 19232321 reverse strand)
tatactacatcttgttcaagctcaggacccaataggtacgtaacctgtacccatatttgtttatcgtagtgatattgatttaaagttaagtgaataaatgacaaaatacaaagattttttttaggttagttattggcaaaacacaacacattatatattattaaatgcacttctaaaccagatttatttaggaaaattggttttagcgtgcttgcatatagtaattctgaatatataaagatcacatatttatgtggcgtagatagatactccctccaaaaaaaaaaaaaatagataccccctccactttataattgatgatttaaagaaaataatttgttctaaattatatgatgttttcagtttttaatacaaaattaattaacatgtgcagattttttttttttattattggttatattcttagatggtacataattgatgttttagtttagaaaaaaaaaataattgatttttaatttgtacacaatcctaaaacatcaattataaaaaagatatcgatttaataaattagatgtccatatatagaaacaggtacagtaaaaaaaaaatgacatattctgcaacacttaaatgacatgaacaaaaagtcaaaaacttttatcaaaactatatttgacaaatctccaatatattaatagagaaacacttaaaacacacaaattttattttgatttgttattaacgagaatgtcatgctaacatgttgctctcgcaatgattcttcgccaatttcaataattatccaacttttactagattatttacagattttgccattagtcttatatacaaaattctaataaagagtaacaattaagcaatctaatctttccaaaataaatatattacacaaccttaagcaaaataatcaagtaactaatcctttctttataagaaacataaaacaaaggttatgattacttgataaaacataaaagatatgaatttgattcttaaaaacatagaaagacatattatcataaatggtaacattttgtcaatactttctccatcacgttgaagttttattccatgttcaaatatttataggtaaaacatattcttataataaaaaaaactttaattacatgttatggatcataaataataattttacttgaattgttttattccgcacaaattgtgcgagttcttatctagttagatattataagtaaaacaaataacacgttgcagtaaaagaaaaacactcgtccgaaagtgaaagaggtaaaattttcagtcaaaacaaagaaaataaagaaagcggtaacatcgtccaaaatgctcaaaatccactattgttcaatgttcactacttgtcattttcctaatacttattgcgtattctttagtcataggaacctaataatcgcctatta

SEQ ID NO: 15 - DNA, 748 bp, Arabidopsis thaliana
  Intron number 1 from transcript AT5G41460.1 (locus AT5G414 60) derived from phytozome v7.0 (chr-ID Chr5; pos 16590555 to 16591302 reverse strand)
gtgttccactcactaaagaactcggttttcaccaggtcagtaattatcacttttattttatgtttttactataatcttattagtaaagaaatattctcatagattcgtatgaatctagttaaattaagttggttaattaactgtaaaacatgttcagattattaatattactttcttttacaccaaacacaatctgtaaatgaaaattctatgattttctaactaaataacatattttgattgattaatacgaatctttgtgttttgtttcagttggttaattagtagtaagtagttttaactacaactagattttatttgatcattgtatttaatgctttttagttaatgtgtattcaatgagtttatcgagattataaattaaattgttccccgggttttttgataataaaaagttacacgcttttggttaaaaatccattgcattataaaattcaattatgatacaatgccacgtcactggaccacaatgttgccgtacgttatattgttgccggagtaaggtacacgtcgtcacggtgtcaggccgtttctttaaagagttgtcacgcatttaacggcgcgtgcgtctcacgtgacactctccttgtttgttggtgatttgttcattgattacagaaccaatcgtcggtacctaccaataaccggtcggtttggtaactcttctcaaattaaattttgaaccgttccatattaattggtgctgtcttttgtgtatttcagtacg

SEQ ID NO: 16 - DNA, 813 bp, Arabidopsis thaliana
  Intron number 1 from transcript AT5G24310.1 (locus AT5G243 10) derived from phytozome v7.0 (chr-ID Chr5; pos 8273808 to 8274620)
ctagaggctttgtggagtgagaagaagagtctcaggttagtttcttgtattcttctgtgtattctcattatctgtttttttgttctcattcgtcttgtctgcaaaattcagttcacaaaggttgagactttacacgacttggttctctttaaaaccgttttgaggtcataattggtaaacatttgaattgggttttaagagctctgtttatatagtagaagaagttggaacctttcaatgttcttgattaagggttttaggttgaatgtttatagggtttgattttggatgactagtccctttttagattatttacttgaaatggccctttgtctctgtttatatgctatggaacaaaatttgcaattcttgatctcggttggttggaaaatgctaattctttaatcttttatttgtagattttgttaattctttgttgtcttaaaaatagtattgttgaagattcagacaaaaatgtgtttttgtttcagatcaaattgtctggtttctttagagctgtggattctacttcttgtctgtttgttattctttattaagatttagttggcgtgttgttgtttaccttaaacatccacagaatcatatactctttggtttaaattccttaaaatggatttaaaacactctagaccaatattagttgctttagtttcattttgctagcagcttgaaattttcgagtattcttacaaataccatcgctgaagatttgactatttgttttcttcattcttgtttgatcatttcatttccacagtgaaaacagaaagcagcatttgagattccactgtt

SEQ ID NO: 17 - DNA, 981 bp, Arabidopsis thaliana
  Intron number 1 from transcript AT1G65000.1 (locus AT1G650 00) derived from phytozome v7.0 (chr-ID Chr1; pos 24147277 to 24148257)
accagaaaaggttatgtctcctacaaaccctaaatctattcactaatgaagaatctcacatcccaagcagcttgattcgctaatttataatggcaaagcacaaattgttgagatgggttttgaaagccatccactttattgtattaaggttctggatctatagctaatttagttagataccttagattctttgtagccaataattttgaagtgatagatgatcatgatctcagtttaatggctatttgtgggtcaaaggtcatgttttggttgatttgaaactagctcttagccttctttgcagataattagctactgttgtatttgccttgcccatttcaaactctttaggcataatcatgaagctgtttaatgattgtggtcactcttaaacgtcgaatactcttaaccactgaggataaaaaattatctcgacaagttttcaagctgtctagtggcctacactttgttctgctagttgaaaaaatggtttagtcgacggttaatagcataaataaagagtggtgaaaaatacagtttagagatttatcatctgattctatgttgcgtgttttatcttggtaataaactttggactaggaaggaacgtaggtgtctctgttccgttattggctcctttggttatttacttacttcctctgtttgtgattctctctgttccatgcattgtagttacccacatagcatagacttaactatcttttgttgagcttttatcgttatgtgcaacgaatgagtttattttggtgtttatggttgttggttttggcattcatattcttgctggtacctgatatttgttatttcattttaattttaaggtgtttcgaaactgaatatatatttattccaaaccatgtttaatcgacttgagtatgatgcatctgtttgatttctactttttactaagaagtggaattaactagaacttgttttttttaatcaataaatgaaggtact

SEQ ID NO: 18 - DNA, 465 bp, Arabidopsis thaliana
  Intron number 1 from transcript AT1G78210.1 (locus AT1G782 10) derived from phytozome v7.0 (chr-ID Chr1; pos 29423205 to 29423669 reverse strand)
atttcatcgaacatgtgagctactttcttctttttttacttcttcaaccaaatcatattacgacacgtgtctacatgtcttaagaacatatactatacgaaaaagtgatttaaatgttgaaaatctagtaagtgcgaatatagtttagaaatagtaagatttgaacttttaaagattctatctgtttgaagataatgtacttaaattgtcaacttggagtttaaagtaaaatttgtcacattttgagttaatgggttcattagatctatcaacataattgataattccactaacagatcttatatagtaaataaaattcgttcggtagttctttgttgaatactaagacacggtaaaaaacgagtaaacattatattcgtgccaataagaattatatttggtgttctttacaatatatttaacttggtacaatgtgaaactacacaggctttgacaagagataat

SEQ ID NO: 19 - DNA, 865 bp, Arabidopsis thaliana
  Intron number 2 from transcript AT2G29670.1 (locus AT2G296 70) derived from phytozome v7.0 (chr-ID Chr2; pos 12682524 to 12683388 reverse strand)
acaggtaacactttaatcatgtgttttctaattaaattatgttaatcttagtttagcttaagtagatttggttattgagttagggtcgaatcttccttttagattcttttgggttgtgaatttctgaggctacaagttgatgcatagagtcaaaaataggcgcagacttcgatgattttttaattcactagtggggcagattgtggaaattcataattgtcataataatcgcatcagcagaatatacaccaaccaatttcttttcctctttgaggaaaaacgacattacacaaatatctaacagagaataaataaagaaaattataatgtaactctcagtcagtgttagggataagttctagccaatgagctttgagtctttgagggttttagtgatagtggagtttacggttgtgttttaaagactccccaccataacccaacaacaaaagtcgttacatcacaatttgtcttctagattttatctcccacccaaattaattaacccatgtttttgtcattagctttatacagttagttttttgttctagattgtagcattctttagaaaattgggcttaacaagcattatagattttagtgacacgatgaatggtttgatattattcctaaccgatccttatttgttagtatgatggctaaattgataattctttcacatttttgtaaccggtacctaattcatattatatggaaatttaattttcacacgtaacacttttggcgttattcatttcatcattaatacgttccacatgtctttacttatctctattgaataagttctcacgtgatttcatgtgtaacagagcggaagagtatttcaagagagcggtaggagtgg

SEQ ID NO: 20 - DNA, 242 bp, Arabidopsis thaliana
  Intron number 1 from transcript AT2G15000.3 (locus AT2G150 00) derived from phytozome v7.0 (chr-ID Chr2; pos 6481955 to 6482196 reverse strand)
cctagccgtcgcttcaccttctcatcaccttccaggttcgtgaacctaactccttcacagtctctttatcaaatttcaacaaaatccaatcaattcagtgagaattaaaaatcttcgtatctcgattttgaaaattttgagattcgtagcttccttagatctctaattggaaagaatctgatgttgatttgtgaatatcttcttcaggaatctaggagcacttggttgcacacagtcgttct

SEQ ID NO: 21 - DNA, 1303 bp, Arabidopsis thaliana
  Intron number 1 from transcript AT1G21940.1 (locus AT1G219 40) derived from phytozome v7.0 (chr-ID Chr1; pos 7715548 to 7716850 reverse strand)
agtacgagaagagtgtgacgtgcagctgctcgtgggtttgatttttgtcgtcctcacgattgctttcttagcgtaccttcgctgctccgtcaccgggtgagtggtgtgtcttgagtttcttccaccgttactatggacctgtgtcttttagtgagaccatcgacgatgcttacatttatcatctctctttctatctacaatctagttttcgtttttttctttctttgatgggtttgttgttttgaacattatggtttctttgattagaggtttgaatatttggacctgtgatcgttcagtgagaccatcgcggatgctctgtatctgcttttcgtttatttctttggatttgtgttgtgaacattttggtttcttgaataaaaggtttaaacaagattttctgaatattaattgatattgtagttacaacttgcaatatttatcacttcatactgtatttgcatagataaaaatgcgttaaagtttcggatcgcatccctgaatacaataattagttttacaaagaaatcgatgtgtgtgtgaaccgtttatgatatcggattaagactaattacttcatgttcttgatgatagtttcaaattttagctcaaaatgtttaaggaattagctgcaaaatgcagtcatgaactgtttttttatcaattaaatttacataagatcaatccattgttcaacgtgtcgtaatcaggcaactgctttaacttttgtttacccaaagtagtaacattttagaaaaaccgatgaataaaacttagtaaaaaagaccatatttaacccttaacatttttttttgttcaaaatttcacaattatctaacaatataaaatatttctagtctttttataggtagttatatgatcaaatactaaaccatgcagatatttttggtcccaattctgtgtaaccaaaattgtcaatttccggttcagcaacgaacgaaattttgtaaccagtaattcaagaaaccaatttttaacagtgaccaaaagaggtaagtccttcgtccactcaatatcatcagtcatcacctctctccttgaaactttttcaacacgtacggattataaaccatggttagagaaaaagcaaggttaaaaaataaactatggtccatggttaaaattttaaccatggttaggttataaacccttcttctttccctctttaacaaactccaaaacctctcagagacaaattttctcactttttcccggattctgattttttcatcaatcatcgtttcaaaatctccattttctcctgcaagactacgagatcgca

SEQ ID NO: 22 - DNA, 467 bp, Arabidopsis thaliana
  Intron number 1 from transcript AT1G18910.1 (locus AT1G189 10) derived from phytozome v7.0 (chr-ID Chr1; pos 6537229 to 6537695 reverse strand)
aggttagatcttgagctactaaaagtcactaaagaacttaacatggagattaaaaaaaaacaaaaaatcgttttagtaaaacataggatatactctctaattcaccagtttctagcgagtattgtcggaaataatacaaaacggttaacttttgttgttgtagaaattagcaaaaaaaatgcattttaggtactgatgattcatattaggacaataaagagttaaatagatgtaatcttttttgctagtagattagattctggaaattctctgcttgtctttgttgtcaaaattggcaaaacaaaagattaaaccatcttacatagagctaaaaagtcaacgagtgagttcacatagtttataagatcaagaacttgaatcattctgatttagttttcctaatcccttacttaatgtttgtttaactggcaggttatattttcagcgttggacactcgtgtgaagaa

SEQ ID NO: 23 - DNA, 440 bp, Arabidopsis thaliana
  Intron number 1 from transcript AT1G47240.1 (locus AT1G472 40) derived from phytozome v7.0 (chr-ID Chr1; pos 17310332 to 17310771 reverse strand)
ctttgggctggtgttgttattactgcttccgattggtgagtcctttcgatactctattcgttctttagagatgttggattcgtagaattagtagagacttggtttggagaatcttatgattcattctgaaattttaaaactttgcggatcatcttagcggtattgagtttgagtatggatcattcgaactcacaaatcagtagaaacttggtttagagattcatgattcaatctgaagttgagaatttgcttttactttggctgttttcttgtaaaactttgctaagatgatccaaactcacaaatcagtagagaattggtttaacgatttgtgatcgaatctgaaattaagaaacttgcttttttgtattttgaaaacttggctaatgaatttgttgcaaacagttttttatttttgtttctagagaattacggtgtga

SEQ ID NO: 24 - DNA, 1524 bp, Arabidopsis thaliana
  Intron number 2 from transcript AT2G28210.1 (locus AT2G282 10) derived from phytozome v7.0 (chr-ID Chr2; pos 12030418 to 12031941)
gaagaaggtgtgcaacattctataacataagtatatacatgaaatgtttataaaaatttgatatactacttttatcaacaaaagggagtagatacattaaattgatatgatggcatataaaattttaattaaatttgacataaaattttaatcattattaatgtactttatatttatagacaaaataatttaatcaaaaaaataaattttctcataaagcgaaaaccactttaccggttaaatatttataacaaaattttgctctcatttactcttgattataaccctctcaatgtacatatccttacttgagtatgaaatgaaattatataattcaaaagtttttcaaagtccactatttttttagtaccataacaattgtgtattattttcatattcttattaaaagcagttcatattttggttctgttttttaccaactaaaattcatctctataaatataaatttggacctaatcaagatttaagcaataccataatagttgggaccaatatcaatactataacttaatataatacaaactaactttattctaaagataatttagaaacttttaaaaaacatctcatatgagtaaaaaataactcatctcatatgacttgaactaattatcaaaaaaaatctcatatgaattaaactacgaaaaataaaaaatataatatagatacaagaaaagttgttttccgttgcgagtacttagtatacatcaagacgacaagactttataatttaaactttttgcattaaaaatcgttgatgctatttaaaaggttagctgttttttttagtaagtacttagttcacatcaagactttaattgaaacttattacaattatgaatatctagataataaaagaatagttttgctatttttgattatttgtagaaagaatatatattacaaacttaagatgtcgaaaccatacttttaatctatctctgaaccataaaactttgtagatatagaaaacaaaatgttctttcttgtgttgataattgtttgatattggagccatttatacctacaagaaaatcttatagaacaaaaatacattaacatatacacaacacattttgaggcattaacagacccaggccatgttaataacattttatgttattctatggattcgcagatcaagataaattgaaaactgccatttttagtctagtttaggattctcctatttaaatatgaaaaatgatggcataaataattactacaaaaaaaaatccaattttaatagttttaattatagtgttgaatttatatatattatctatttgatctaaatgtttaattgacacattatttcttaatctagttacttaaaagttatgctatttgtcgaggtttaaaaaaaaaattaacttttgataaattaatggcatagaatcttatagtatgcaaattaaaagttactttcaatttttacattccagttaatatatatagagtatatggtaaataataaatggcaggtttgctctcgagctacac

SEQ ID NO: 25 - DNA, 515 bp, Arabidopsis thaliana
  Intron number 1 from transcript AT1G16560.2 (locus AT1G165 60) derived from phytozome v7.0 (chr-ID Chr1; pos 5668430 to 5668944)
tgcgaagaccagactctcagactcagactcgggaggtattggattctatctgatctgctcgattttttctctattttcttgctctctacattatagctgatcgatttctcatcttgttgttgttgtccctgcttgattggtagatctcgagggggtttaagctctgcatttgatttaagttctgagttttcgataatctgatcgaatctggaaatcatagtattagattctacagaaatcaagttcgatccttaaccaagagattctgtagtctttcaaggtcgaattatagaaggatttttattgatatgtgagaatttctttcactggaataaacacttgctttaggattcttaacggaagcatcatatgaagatcttcacatttgtagtttttttttatagtctctgattcatagtttccatttgcagctcctttaagcgatttctttctttgttttttgaggcttgcattgttattatcacgcagtgatttcacttcaactttctgctcag

SEQ ID NO: 26 - DNA, 319 bp, Arabidopsis thaliana
  Intron number 12 from transcript AT1G78970.2 (locus AT1G78 970) derived from phytozome v7.0 (chr-ID Chr1; pos 2970627 9 to 29706597)
gttggaagtaagaactaaaatgtgttttacatttttttttttgcatactcaaaagtaaaaaaaaaaaaaaacaatctacctgttaggagttatatacaaactaaactctaaaaactcttaaattagttatcactacaaaaactagctcttaagagcaaaagacgctgctaaatcttaaaatcataagaatttatttttttctttatttgatgtagatttttattttattattatcaacatccacatacttgatttaacgtcacgcaagttttaaacctttctctaattggtgtttcagctgctcaatcctacagaattc

SEQ ID NO: 27 - DNA, 732 bp, Arabidopsis thaliana
  Intron number 1 from transcript AT5G47690.1 (locus AT5G476 90) derived from phytozome v7.0 (chr-ID Chr5; pos 19317957 to 19318688)
ctgtttctaaagattcattgctcaaactcttaaaggtgtgattccccatctctacttctcattgtctcttctacaatttctccaagtttcgatttttcgtttggagggaacttttttccatctttgtcccctgtttaaattctgccaaattggaaccgaataaagttttcagctttgtagatcctcttccgttctgggtaatgctcattaattgagccagtgttttcttctttcgagctgcgttagggttagtttgtaccatctttttcgtctacgctagattgttcttgcgaaattaggtcatgcataaaactcgggactgttcctaggagaaccaattcagtgtctataattgcttagatttgcgacttttatgatgtctgctgttagaatgtcgagtttttagggttggccctagtatttttctgtccctggtcatgatggaattgaactgcgctatcttcaccagcaatttgactgatgcagtagttaccccaatgttcagtttctacattgactaagatgtttctttatcaaccacctttgtggaaatgtgatttgcttttgattggtttcattggggtgaattggtcgggttagtttactaagatatctctctccttaaacacttttccgtgcaatactgtgactgatttatcaaaaagactttccttaacttgtgtgttgctacatgcaggaagctgctgtttgtctttctgagttggagcagtc

SEQ ID NO: 28 - DNA, 684 bp, Arabidopsis thaliana
  Intron number 1 from transcript AT3G01650.1 (locus AT3G016 50) derived from phytozome v7.0 (chr-ID Chr3; pos 242027 t o 242710)
ttcttcttcgtcgacttctctcacacatacaaaaggtttgggattttttttggtagaatctttttaagttatctatcgaaatcagtttgatctgttttgtttttccctcttctcttctgggttgttggtgaataaatctacttttcatcttaattaggacaaatctctctaattaaaacgcctcagattttgtcttcagttgttttgttttaaaccctaagttacttgtaagttaaatgaaatctacaattcttaatttcttgtttccaaaattgtgaaaaaatccaaacatatatagaatagacacgtaacggctcaaagtcggtaattggaggtaacgtgattgaatcttcttcatcaatcataaatcttctctcttaagaattaagacgccgcctcattacacctgttccataatcatcgtcaatatattcattctgcaaaactattcttcttcttctttcaaagtcgtaattgctctctctcacccctaggttcttaagtcatacccattttcaaggacaccttagaaagtttcgagttttctattaggtaattgcatgttgaatctgttacgttcttcttgtgattccccttttttctggcccaaagaggataagattctaaaaatctgaatctttgtatgcaggtgtattgatcttgaagccttaaagtttgtgtctt

SEQ ID NO: 29 - DNA, 548 bp, Arabidopsis thaliana
  Intron number 4 from transcript AT4G10890.1 (locus AT4G108 90) derived from phytozome v7.0 (chr-ID Chr4; pos 6690461 to 6691008)
gcttccttgatttacatatcgccagaaaaaaggtttttcttcactcttcgcttccaattcttcgtataaaaatccactagattatcttgattttgttggcttattcttcatagtttactcggaattcaatcttcgttctccgaagatctggctcagtttaattggaggaacgagatttttcttgtttgatttcgtggagaaatttatgaactatcgattatttccagtaccgtggttgaattttgacctagttctcgtaattctgaataatttttggtgattgtccctaatctttctcgtttccgagattgctttgaggttatgtggattggcttttaagttctgattgttgattagtggatacacagctccagattcaactgaagttatgatttgattttgtttcgaaaatttgattgattatcgaatataagcttctttaaagcttgttacatttggatttttggggaataaagtatttgtttctgttatgctcatttgtttagtaggtctcagagctaacactagtgaatgtgtaaaaccaggtg

SEQ ID NO: 30 - DNA, 306 bp, Arabidopsis thaliana
  Intron number 2 from transcript AT1G30270.1 (locus AT1G302 70) derived from phytozome v7.0 (chr-ID Chr1; pos 10655643 to 10655948)
tttgaggtttgattctgatactataaagctgaattcaaagttgtgttgcacgttttggttgttgttgttgttctatagatttgtgctataagctgagattcgtttgaagttatggaacatatttgtggtccctggctaatcatatgtatgtaatataagggatttgattattctatgtatttttttggtatctttgtagttacagattctcttcttcttcttcttcttcttcttcttcttcttcttcttcttcttcttcttcttcttcttcttcttcttcttcttcttcttcttcttcttcaggtg

SEQ ID NO: 31 - DNA, 637 bp, Arabidopsis thaliana
  Intron number 5 from transcript AT3G32280.1 (locus AT3G322 80) derived from phytozome v7.0 (chr-ID Chr3; pos 13238848 to 13239484)
tggtatcattgacaaggtcagtgattatttaattacgttgtaaattaaaatattttcttacacaataatgtaaaaactgatccggaggcaacgtgacaaaaacttggaccttggttcaatctagttttaccggaacaaaccggattaaaagaaatttttttatataaaatagttatatttattatacatgattgataaaattaagctaaacataaccttcaaaaataacttgtaatctaacaaatcataaatatcaaatatcataataaattaatactaattgatcatcaactaaaataaaaattgagatatgatatacttttattttattttacatattatttttttataagttatatcaaataaatatttgaaaaataccataataactattgtttaatactttactatcaaagtattcttagtagttcattgtttttaattaaaagtgttatcgattaaaatatatttaattggataactaattaaaaaaaataaaatatttaagcaaaggccacccggttaacgttcatatagagtagacaactagcttggtccacgtttaaaatattttgttcactctcaatctgttatatgattaggatcatccgttgccacccggattcggatcgaatat

SEQ ID NO: 32 - DNA, 2376 bp, Arabidopsis thaliana
  Intron number 2 from transcript AT1G79120.1 (locus AT1G791 20) derived from phytozome v7.0 (chr-ID Chr1; pos 29764351 to 29766726 reverse strand)
ctcaaaaacaaaaggtcagtgttttcattattagcctcttttatttttcttttgacagttctatggtaaaatacacagtgcattataacaaccaagtcctgtctcgttgttttctgctggccccgtttttgtttctacattgaaagccttcattttttaaaattggtttttggggataaacaacaaaactctctttttcatggcgttggatggtaataggctgctgatacatcaatattttgctttgctttgttggataaacgactagtaaacatttggtttctcgtgataaactgcgtagttagttgtctgtttttgttcttagtaaggttccgtgtcttgtttgaacatgttaactaacctatatatagtcgaaacctatcaatttataatccatagaaaacaactaatggcacaaaagaaaatccaaagtcagattcttttattttctctttcttataaactttaacaagtaaatggattcctgtctttgtcatttggcatctcatccaaatgaagggtacacaatttaagcataaagacaagatcttgaagctgattgaagcatcaagatcaattaaacacccatctttgaatttttttttgttctcttttcctattctacctttatgaagccaaatcacataccaaaacgtgaggatcatccactaacatcacgacttataaaccacgaatttgaatcgatacgctgatattgcattcgggttatagaaaactactgacaaagacttataaccacactctgatatttgaattttctccttctaaatactgaaagacacagtttctattgattgatctgggaaacttgtctgtacacagacaaagacattggctttcttttaaaaaccaaagggagccccatttagatactttttggatgatgatgcaaaaataaacaagttgacacataaaagatcaaaactttaggggtatcgttttcatgtatggaggtttttgatttccttgggacaaaattatatggtccattattgtacagtggtcctacagtcccaaccatttttctgtgaattatatgtgtactgttttggacagaagaacacatcatgcaatcccccaatattattttccttcgttgtttggtccaatctgaaacctctctctctctcctctcctctttttcttttgaaaaatcgttttcagcatttccaaaaccccaaatctaattcagttgtcaataaataatcaagtacatttttccagaagtatttgtactgctttctctgtatagtattagatctcaccttaatgcatctttcttgattgatctaattgtccataactaattccatgattatgttataataaatgttgctttgtttgtggtcattacttggtgttgattaaaagaagaaagatgccatctttagcctgaagctcctctcatgcatgtctgttctttttttaactgttagacattgctagtttcaaaaagtaaatcatagacattgtacaaaacttttgatttctccccatttctcttttcttttctgttgatacccacatcagcagcactttagttaccttttcccaacaaaatatctttttattccattgacatgtagtccaatctgattaccctaataactatccacatgaaaaaagagtactttcataaacataaacactaaactatcatatgtgtgtatatataacagatactttatacaaacatattccatcttggatatgatatctgcccattaaccccaaccaaactacataaatgatttgggtagttggctttctttctcttcttttaaaatttgatttctttttaaactttgggatatgtatgggtgcctaatatagacaagaaagaactattgcaaacacctttcttatacacttttctctgttcaagagagaaaaaaaggtatccatgaacagttaatagttgtggggatatcaaagtgaaaacgaaagagagagagtaatcatatagtcatattctataggtattcagatgggtctataaccacgttatcactcttattgaatcaagttccaagttttgttatgacagaataacattatagaatctgacatcaattctgcacaaagtccaattagaggaacatctgtgcaggctcgttgtgatcataatgattcatattgttgtgacttatgagagaaaataaagaaagggaaaatcttttgaggtctaaatcaaattcacatgagctttgcagtgttgtggttcagtgggataagactaattacatatatattcatcttttgaattggatggtactaatgatgagaaataaacaaatgtcttttgtggctttttctgcagtgattttcagaagacttcacaccaagtccactcac

SEQ ID NO: 33 - DNA, 806 bp, Arabidopsis thaliana
  Intron number 2 from transcript AT4G00070.1 (locus AT4G000 70) derived from phytozome v7.0 (chr-ID Chr4; pos 30129 to 30934 reverse strand)
caaaacgaaaaaaaaagctccggaagcgaccaaaggtatttagggttttttgctagtttttgttcagttttttttccgaatagattagggtttcatatcgatttagtttttgttttctaataagggtttactcgaatagaatagggtttttgtatatttttgggtttgacttgagtttatgcttgtttgattctgagtttctcaaggttggatatcgatataagggaacaagatttcactggcttgttcacttcttcttcgttgattcttaaactacctaatttcttagcttcttattttgtcaagcacatagaaaaagtaatctccttttcattctatcgtcagaaattttgtttttatttccgggaaaattcgattttttctttgcttcttgtagttcccctctctcgaaagaaacaagggtaagggaaaagtaacgggacatgaatgaagttattcatagaaaaaggatctgatacccaactcttttggaatgtatgcacattgcgcacttgttaatatattcgcctggctcctctcttgttgaccaaactatccacatttttagtttaaattttcctaatatattataggtttgattctaaaaattatgtacaagaaatgagaggtttttcatatttttatatgctgtgaattaaaccatagctaaattgttgttaatatgatataaatttttattgcagtcgtactaagagcatcttccttcttatttctggatttgaattgggtttatgcttgtttgatcctgagtttctgtatgtttggtattgatatagggtttgagg

SEQ ID NO: 34 - DNA, 1420 bp, Arabidopsis thaliana
  Intron number 2 from transcript AT1G11370.1 (locus AT1G113 70) derived from phytozome v7.0 (chr-ID Chr1; pos 3828580 to 3829999 reverse strand)
gcatcaagactttcgactccgcaacacttggtaagtcattttcctctttatcaataatgtttctgatgatgtgtctaatcataaactggaactaattcagctaccacaataactttacatgttatctcatcatcttttgcatactcattcaactgtttgaaaagacacttgtgaaaatttacttagatgatcatgtgtattgacatgtgattttggtagctagatctgaaccctgagtcgtttgcctcatcatttccttccagctgattatttgtttccatcagtttgtcatcatgattcatgcattatgtcataacatagaatctctcctcgcagaagtcagaaccaatagcttgtctaagtaactgttgaatcctatcctatcattatgcaagaacactcttgttggtcttgtctaacacctttgttgtctatccaagctttgctgtaaccaattgtctttgataaatatcccgaaagctcacctgaacatagtactacttcttgtgttagtgtgaacatgtcactgaacaacccaaaacaaaagtcacctcaacacataaagtcctttccttgaactatgcttgttgatacaacaacctgccattatctcaaatgtttcatgagccttttgttctgattaatgtacaaagattaagaacccttactgctgttctccatacagaacaccctctgtataagtaaacctgctacttacatagccaaccagcaaactcaacatccattatcctttgtcatgatctggttgaaagagaaactaccttacaacctgtttttataactagaaccctctgatgaacatgagactgcagactttccctcaaacttgaaaccttcagagagttttagaattccctgtttaaacagcctgcaagaaacgtattttagaatcacaaaaccttaaaaccatagaatcattactcctaaagcgtccctagacctgagaattccgttccaacaactcatttatctgatgaaaattgttcctttaccaaatcagattgatttttgattctgcctaactttcgtgaatcagaaatcaactcgtcgcccagtgagaactactccaccttacccatcttaagcaccctgtttttcttccgtcccagaatcttcttcttccacctgtcttcagttttcacacttcttcccttttccgttgtcaaaaatcgccgaacctgacacaattttgatcaataatcccggaaattaccggcggttccttttggagacgtttggattctgccactcttgaacctccatgactttgtactctgttgaaacgttttatcaatcttatcgttttatcttaatgatgttgttcattaatcttatcgggtttttttattatacaaagtaattctatattaatgatgttgagatctgtgtgcagctgtag

SEQ ID NO: 35 - DNA, 703 bp, Arabidopsis thaliana
  Intron number 1 from transcript AT1G07930.2 (locus AT1G079 30) derived from phytozome v7.0 (chr-ID Chr1; pos 2458311 to 2459013)
catccttctcccttgtgcgatatcgtttgcgtgaggttagcttttcatacgattcttcgatttgaattcttattcttccgatcgatttggtagattcaatttcgtcccgttgtcgtttgcttcttcttaatcacttctatgcttctttacatgtaactctctgatttgttgataggatcgtttagattctttgattccatggctttgaacttatcgattgaggaaattaacgttctgtagtgcaatcgaactggctttccttttattatttcaaattcagatcatgtaatctgtcgatctagttctttgaattttctgttgtgcgattgattgtttgttagatccatatgtgtaaggttaaattgatctattggtataatacatacgtttctagttatcaaattgatttgtgattgggtaattctggagcagcataaaaaatccattgtttctttccttcttgaatctaagtcgtggaaactctaggattgtttgctgtatatctcttgaaattgcttgtttgattgaatttagctcgcttagctcagatgatagagcaccacaattttgtggtagaaatcggtttgaatccgatagcggcttttaacaatgattgttttttgtgttcatatgtctactgtttttattgattcaatatttgattgttcttttttttgcagatttgtctgaaaagtagctaacc

SEQ ID NO: 36 - DNA, 301 bp, Arabidopsis thaliana
  Intron number 3 from transcript AT4G29740.2 (locus AT4G297 40) derived from phytozome v7.0 (chr-ID Chr4; pos 14568216 to 14568516)
acagaaccacccttcccattattgaccaggtactaaaatccattattcatgatgattatcttcacacaatcagtatcatcaccaattaccatcatcacttgtcatatatgatccaaagtaaatatatcacatgatataaataaatcgttcaaatctttttttttaaagaataaaagaatcattttcaagcattactcatacacatctacgaatcaccgtgaccatatataaccatacgcttattaaataatcatttttgtttgtaggtgattgacacgttaagtagaactctaggtttcgc

SEQ ID NO: 37 - DNA, 692 bp, Arabidopsis thaliana
  Intron number 5 from transcript AT1G10090.1 (locus AT1G100 90) derived from phytozome v7.0 (chr-ID Chr1; pos 3293455 to 3294146 reverse strand)
gcttcattcacagactggtatgtgtttttatttatttttgcaacatgctgacttgattatcagtcacttgtctttttgttatgattttgtcggattaggaataaatttttcagctaacaccactgccgctctgcttggttgaccttagcagaataggaatctcctagaatagaaaaaggaagctgtgatagctctatgttccggaatgtgatttaacacttttcacactttacatgtttcttctttctttataaaatgttcaccataacacttcccctgtgttctgtcataaatgcttcttcatttgccaagggcatcaaagattgatgaaataacagaacagtaactttgttgtaaagatttgattgatagtcatgtatcagttaaagatataggaagttctaaggggattatatgattgatccacattcttggagtactgattttgtttttggctcatttgtaacgcttttatttgtagttcatgttatctgatattgaggttcttttgatattacatcagttttttgctttggttatctgatcagcattttgaatggcaatatctttggtaaacaactagtggatggtgtgtgctcatgataacatatagttgaagtgcagtggtctattttggagaacaattgagttaattagattctaatattaattgtgtcactttctattttaga

SEQ ID NO: 38 - DNA, 2999 bp, Arabidopsis thaliana
  Intron number 1 from transcript AT3G24460.1 (locus AT3G244 60) derived from phytozome v7.0 (chr-ID Chr3; pos 8889892 to 8892890 reverse strand)
ctcgcttcatatattcaagacacgaaaaatcacaggttctttctctttcttttctcttatttgttcttgtcttttttttacgatctctgagattttaaaacatgttcgtgttgcgtgtgctagttatgaattatgaatgtatctcgggaaaacgaaacttagctccgggtgaaaaattagtgatgtaatatttttgcttgttcttcccgtcgccgggaagaccaccggaatattggtcggagccacttgtcaaaattttagttttaacattttccaaagttgtggaacatcatgggacccttagttcatcacttttttctttttcagcctcttttctttctgctaattatctcactttgccaacaagattagccgtgaaaaatcaacataattattgatttcataattcatgtttagttataaatgtgtatgacgaaaaaacacatgaggagcttagctattgacagattttgacctttttgtcaaagtttaaagagtcgctaggaagttatcgttttgagttagtcaaaatttagtgttgtttcctttaaaaacataatttacaattgttttacgttttgtttttgaccctttttttgtcaaagttaagttgttaagaaactaaggttttgcgttagtcatttagtattgtttcttttaaaacatatgtaatttaaacaatttagtatcgctttacgtttgtttttccttcttttgcaatctaactcaatttctgcggctaaactcaactaattttctcttcactgagtcaaaagagaacacacacatacaaaaatttcaacgtctattggctgtccatttgattgtgtggagtcaatgaaaacacactcaatttagaaaacaattaaaaaaacaacaacaaccaatgtatgcatgactctttggtattatggtttactagtcatctagttgtgcaagattggtttaggtgtcggttatttccggtttgttatccaatttaggtaaataaaaacgattttaatcgtcaaagtaagtttttggtatcaagagttgtctttttggcacgaaagatttgaagaggtccatatacatcatggcctacctatagtgtgttaaataatactatatactcattactttagtttagagcgttatgagatatgatacgatagaccaattcttatttctgagaatctaaacattctgatctactacctaggctacaaattccaatacttcacatcttcacatgctacctctatcttagggtcaaatttaccattattctctctatttttcatatttgtatatttgtaattcataatggcaaggccatgaactcattactcccaaatcataattattagtctatatatacgaacgtggaacgtgagaatgatcactagatctacacagttttacttcctatatccctaaattttatggaaaggttttaaagcgagctattgattttctcttgttaactcttttctgaaagacaaaaaaaaacattttaaaccttgtttcatacatattaaaatataaattcagtggattatatttaatacaaataaaaattatttaccaactaaatattaaaaatcataaaaatctagatttaaaaaactcacattaatttatgtaatttaaacattatgtatgcggctgaattactattatacgcacggatctgatccgtttgcatcgccgtttgtgatggttggttactctaacccacgaaatccataattttctaacctctaaagactaaaactatagcccttacttgccatatgtgatatgttctagcctacgggtttatggtcaagttttttttttttttttttttttttttttttttttttttctgttcttgggccttggaagttcaagattagactattatggaaagtaaataaagtatgaaactcaatataagaaaatattgaagatactttagagataaaagaaatttgaatatttataatgtatatgttaatgtcaatattgtagatgacgttttctttataagatcttttgtgaatatagtctttccattatcccactctcttcaattcgtctaagtggaggtatgtgtctccactctattaagtggaccaataaaaccctagaaaagcgcatctaatgttgctgcttaacattacccattcatattcgtaagattcgtctgcccaattgtatccgtaccaacacgtttctttttcaattccaaattttgtgacaaattgcataaactcttttatctttatatgatctgactctttttttgttcgttttctcttttgatctcttaaccttttgtttccttgtcaaataaagtttttttgggtgcttctttgtttatccacgcctctccattatcattagggtaattatagttacaacacaaaaaggctcttgcttttttggattagtatttatgagtagttcctgccaaatcttgactttgagagttttaattcttaagaatcttgactgtcttgctttttaagtttggtatgtttttgtcttttagtctttatcattcatatggttaaggtttaaagttgcaaatcttggattaaaatgagccatctattgtggattctcgttgacacttataaagatttgcttttttagtttaggttaaaaagaagataaaggttacttgcactatacgtattctctgtttatgttcggctgaaacagaaacgaaacgagatgctttctgttgagaaacggattctgtgtggttttttgagaatagactaaagatgtttctcatgtaaaacatgaattttgttcacttcaaaatctaccaattgtaatctccaccgtttctgaattgatttgtatgtgctcttctctttgttttgataacggaatcagattcttatcctttgcttcattcttttgtcttcttgttctgttcttgccgactctgtttttcattttttgaattctcattgtttatttccacaggttttgatctgaaggacgagaaatctctgacaggg

SEQ ID NO: 39 - DNA, 9794 bp, Arabidopsis thaliana
  Intron number 1 from transcript AT2G34110.1 (locus AT2G341 10) derived from phytozome v7.0 (chr-ID Chr2; pos 14392701 to 14402494)
gaactctacttaccaaattttgaactccgaccacggtaactaatggccgttgttgttgttgtcatatactcattaagcctatctttctttctttttggattattaacattccggtccaatcatgacaaaaagaaggattattattgatttttccattttttatagagatcttttgaaattgccatttttactaaaatcttacggatatgccattttctaagatttaaaaacatatggatttcggactttttttgataaaaatacgtagtttacacaaaatactaaactctaaaaacaaccataaccaactaaacccaaacataatgaataaaacgcatgttaaatcttattttggtaacttgaaaaatggcaaaatccacaaactattcaaaaaagggcaaaaatccacaaatgtcatccaaaaaaatggcattttcataattgattctaaaaaaaatgaaatacatgcactatcactaatatataagatattctctttcattcaaataaatacatgtcttagaagttacattaagagagcccttacattaacggcgtgcaagaagacgtaaatagaccaatacaaaaaataataaaatgtggctcaaaagatgcgatgtggactcaaacggcacctcaaccaaaattttaaaaattagggaactctataatgtacctgtctttgttatacttttcatgtgaaatgtagccgccaacgtataaaattcacttacgcaaccggataaaaagcatactgtgctacaccacacatgccttgaggccaagccacgtctcttcggatcctaatgtaacctttttctccccaagtttcgccccaagagtttttagccagccagtacttagttccatcctggctcgttccatacccaacaaacgtaacagcgtggttcgagctggtcccacaaggcccatcatatactcctcccgagtaatgcatgaacccgtccccagtcgcgtccatcgacacagagactggttgcctcgatacagcctcgagcaaggcccgctcgttgttgctagggacggtttggaatccactgatacgtgcagctggtcttgcattggaccggcatcccccatctgatccttggtaagagtagtcattctctgatgcgatgcctcgattttggactacatagttgaaagcgtccgacattatcccaccgtcgcagcctcggtcgtactctctgtcgcagtctagaagctgttgttcggacagagatacaaggttcccgccggcgatcttagccacaccttccactgctgctacagccgaaaatgcccagcaacatcctgtagatatggatatttggtaagttggatgccgatcataatagaaacgagacaaaatataatgaccaaatcatcactgaaccctacttactataaccctataactaacttggacatcaagtttaatattttgtatcctcccaattgttttcgcctttgcattgtatttgattctagatattatacatgctaaattgttattcttacttctatgaaccaaaatgaaacataattaatttaaccatatttgaaaattaattctaaaaataaaattgtaaattaacttgataatcaatgaaagaatattaccgcattggccttggtacttgacaggagtgacagctccttcagctctccagtccttgctctcgactaccatgtcactgacgttccaagtctgagacgatatcgttttggcgaccaccttggatggggaaacttcagttaggccctttagtccggtatgtattgctaggaactcctcgttggtccaatccgcgaattcattgacaccaagcttgtagcttttgttcccttttttgttgaagttctcaatgaacttcaagttcttcttaaacacatcgcgtctcatatttttctcgagctcatcacggtattcacgagaaaatcgagccatccattgctcatgtttatcaaccattgactgctcgcgaaagatgacagtacgagacgtagcttgagagattctgaaacccgtgaaaagaatgattaaaacagtgaccaataccatgattgatgccatttaggttttggaaaatagaggaaataattatgtttttaatatgggcttatgattaatggtgttgacttgtaatgtggtgatgaagtgagaatagaaggaatagtatttatagatttaggattgaaccatgaaatccaattgtatgtaagaaaatgcaacttgacttgaatccatttggggtgatgttaatactttgcattacttgcgccgtgatatttggaagaaaaaacttcactattttttttcctgaactttcttatatgcaatttgtttcgtttgtggtttgcttctttgggttcaatatatgcaattatactgaaatcaaaatcgaaaacctcttgtctagtggttaatcaagaatttaatgatatacaccacgtttggggttacttgatcgtcgattgttttgttgtaataactaaagtaacctttttcagtttttggttggttatgtaataatttaaagttctataacccgtcgaaacacgaattcatgatcttggtccaattttatttcaagaaatctcaccaagtaagctatttaccccatatatttatagttttctttttattattcagagatcacactttatgaattcctttttggttaggatcctcgtagtatgtaaacacttaaggtttagtcaaaaatagcatagtttatgttaaattatgaaagtagtacacttttttcttttggcgtgtactttacatatttttgtaataaattctgttaaaaagttgatttgtttgtcatttccgcaacgaatgactagaaacaaagtgtctaaaacaatacatattatatgtctgcccaatcactgaatggaggagcaatgaagcatgggctcaaatggatgcgtcattgtcatcatacaagtttaatattttggtatatttatgtctctctacttgacttacaagagtcacgtactgctacttgtgagcattataaaattatgatcactgtgtcaaaaacttgtaaagaaatcttcggttaaattcatctttcaacaattaacattggttattgaacaagtgattcttttctaaacttaactgaaagggccaacaaagttgtatgggcttagggccctaccaatctcagggcacgctctgtttgttgctggcatcatttgctttgctttaatacatctttttagtaaaagcacacatgttaatacacagtgagaaacaaagatgcctttgcttgtttgggaatgaaaagcacacatagttatgtagaaatgtcatcatttggtttcattggaaagtgaactgtattcatctgtacagtagttatatgtaaaacgtgtaagaaaaaacatatgatacaactccgagagaaagagaggcgtttgtctttccttagctaagaatatgatcattgaccattcataacctttcatatcaattcactaaaggatcaaactaaacagtaacaaaaaaatcatggtcccaattgcgtagaagaagaaactagctctggcctaaagaatcactatttactccaccaaaccggccagtgtgtttatcagtgagctcgggttgaacaagataccgtgcttcgggtcaccaacactctccacgactctctgcaatagagtggaggtaacagtgagtgtttgttgtgcacataaacttggaaacaagtgaaggaaagagatactgacaacatcatatatcccttgttcagacaattgtttgagatctactgctatttctccatctttcgggaccaagagagtgttgatgtaatatccaggctgcacacaaaaatgatgttcttggatatcgatatatgtctgataaagaagacatcgaaagagtgtggattgtgaagaaccactcacgggattcttgagccgaatattagtatctccatgagttctgttgagagcgtcagcgatagcagtcacaaagcaggaagcggtgaacctgcttgtttctcggtcttggctaccgttcaaaagaagtacctgtgacagagagaagaaatcagattgatttttaccatcattagtatttttgacaagcttcagcataccttacgacatgacctggaagagataatctccccaacaccaagcaaaacctgatgaacagaaagacttgtctataacagttatcacaaatttagtaatccaccatttttgcacaacatatttattgcgggtgctaaccagtgatgggcaaatggaagtgaacagggatcccattgcgtaaacgatacagtccacgcttctcaactgctctaggacagttgggttaactggtgggaagacctgtttaatggacataacaccaaacatttgcaatgtcaaatacaccgtgcaaaacaaagaaatgaagtagagaactaaaacgatagagtttcttaaagggaatcagaatcattagagataacattgaagatatctaggacattctgtatatataaaagcagagtagttaacctcatgaagcagattattgccttcacttgacatgtaaaacactctctttatcttcgatgggagagcggaagtagaacaatgtctctactagaaacatagaaagacaatgtaagaaaataaattctacatatggcaaaattgacatttttaattgatacaagtatatagtaaacttagttctcgtgatcatcaaaaaacaccaatgtaagatattcaaatagaacaccttgtcaactgtctgcgtagtcccagtggtcgggtgagaaatttcgttctgtccgcgtattatagtcccatcctacaaattaaagtcataacttgttagtttgcgaacaaatttgccacctcaatcttgccattaattgtttaaaccaagaagatggccagtgaagcgacagccaagatttatgtatagaaagcgatacttcttcccgcaaataatgatgctttagctgcgatatttgtggacaagaatgggattccataagctagctgcgggaattcaaatagagatcaagcttcatacctgtaattcacatcctagtgttagcctatcattggttgatatcactgggaggaccaaactgtcacaaggaatctctgaaacacgtgaaaacagaaaaattgcagcatctaaagactggaaaaatatccttgctcctgcaaagaagaagttcccaatgctacaagaaggaaacaatcataagtgagttactaaacaggcgaacaaaataatacacagttgaagccgagaaaaagatcttcaataccttccattactgaagcaaaatctctcattaggtcgcctatgaatctgtatcataagaaacatgtcaagtaagaaatgacagaatattaaggtaaagaaaaatttaaacaatcaagaagttggaacttggaactgatcaaatatgaaaccaataaaaacatgtttctctgtatcagttaacattacctcattctgaaagtatatcaagaaagcgcgaattgtttcactgtagggtcttgatacaccatcccacagagaatgattaccttctacaatatcgtacctgtcaaagttccaactcagccaatggtatattacacaatattgtccaccacagaaccttaaatgtgtagcttatagagtagaccacactatgtgcataaagaaaacatagtcattggataaattaccaatctttcttggcctgatgtgcatcaataggtaagcgatggccaagcaaccgcctaacagcaagtgcctctgaagtactctcatcagacagccttaaacacctcgaacgtatatcaccaaccgctggccctcctatagcaacggagatattgagcttagattacttctggtaaaaacttaaagaagctaaaacatatataatctgggtcttgtagcaatgttagtgagttctaaaacttaccgagaacacgaacaatctcagcagtacttccaccatcatcagagacaggaagaacatgagcgactcgtgttgttaacttcttcaactcttcaaccacaccattaaatccagtaccaccttcatagcaacaaatataacgttttccaaaattcagagcaaaagaaaactacctaaaccaatgtaagacaatgataaagctttgcactttgcaacaaacagaattaacaaatgtcaaattctaagtaattggtcaagatctaacacaaatagacgatcttatcgacataaaaatcgtaactttagggagacccacgaaacaaggaagaggaagaaagtggaacctgagaagacgaggagagaaggaggctccacggtggaggaggagagacattcagccatgagagaagtggaattgtagtaatgtggcttcttgctgcggaagagagaatgaagagacaaaggaagagatggtgatttataatggactagacccccaaaatagcaaatctccgccattaccgaactgaaacagagaatgatgaaacatctcaccactacccttttcgtttttgtcgattttccaagcctttggatttttcttttttcgcaatgagagtgcataataaagccataaaagatatttattacgcgttagaaaagaaaataatcacggtactggtggttttgttggttttctacttggtttggtccaataaaccaaaactagtgttaaatcgattttggtgggattgtggttttgcattagtgtttgagctcaaaatacatgtatagaccaaatgtcgatgattccactggaaaggtaccttaagataatctaaaagatcacatgatcgaatggcaaagaagacaaacaataatgataagaaaaagtacactatttggtattaaaccccaagttaatagagtgacataagccttgtgaaaaacgaatgaaacactcaaaaaactacacaaataaatatcattaaagccgatgtaaagtataaactcgatcaaatcacacacattttttgccaaaagatcagagccctaagcactcttcacataaacccaatcaccatctggtaaaagggtctcgacctcaccaaattccgtattcttcgcaattgtctctcgcctcacattcacaaatccttgtgatacgtcatcttcatcgtcatgaagcactttccttagctcgctcattctctgctcgcgcgacatctccatcgcttcttcagagtgatattccccagcttcatcatcctcctcatcgcatgattcttcatcttcttcgtcggaagacgtgtcaacattatataactgctgataaccacctttccacgtcaaacttgaaccctaatcacaaatacaataaccaaatcagcaactgattaaaataacaacatttcatagatgatcattttcctagtttttgtatgagcataggtataaaaatgtgaaaaaaactgctacacaaaaacttacactatctttttcattacgatgatcgtaggaactaggggtataattcgtcgctgatcccaaatcaagctccgacatgttttcggaatatttaaaaactgtagtatccgcttcttcatcttcatcatcaaaatcctcattccatgaatcatcactatcttcggagaaaatgtcaacatcttcttcatcgtcattatcctcttcttcttcttcatcgaaagacaagtagccactctttaacagctgatagtcacagttccacttcaaactcgattcctatatcagaaagattcagtcagagacaataaacaaagtagcaactaattaaatttaccaaaattccgttatacaaaatccatggtgatttacttattctagttaatgagctttgatatgaaaatgggaaaagtgcttcaaacttacactattctcttcatcataatcatcatcatcaataccatcagcaccatcaccataattttcataacaatcatcaccaccttgtgcttgagtgaaactctctgggaattttgaagctgccaagaaaatcaatatgatacttgtcagtcaagaaaccaaaaaagtgctgatgttctagctactttaatttaatggtatttacaataactataatgtaatatatactatatataaaacacataccacgcatagcccagtgttggctcggtttttctttgacctcagcaatgcacatagaccagtgttgaagcggtttttcttttacgtcagaaaggcacatataccagtgttgaatcggtctttctttgacctcagagacaggatattgagaggaatgttcatcaccagatccaccattatctggctgtccggtcaagtcttggttaggctggtcgtcaaatatgtctttggttaactctgtccagagttcaatactctgaaaatatagaaaagaaaaaccaaatcaaagaaaagttgtcatgtaaacggtaagttttgacaatcgaagcctgttttatggaaagatctaactatcatgaatagttctggttttcaaaaggattagaccgtgatcaattaggtttccataaatctaataaaatatctgatggaactgaagctgtctttctatgatctcttggtctttctattttcagatcttatgcaaaacttttttttatactcttcatcgtttaagaaaaaaaaaaatctaaaagaaccttggaaaccttaattctgttttaactactaaatacactaataactaaaatacattatctacatcaattcgtagcatatactttgcgttgatgatgatgatgatgatgatgataaaagaacataggtttagtcttttagccacacaacatagacagaaccataaactcttgaattttagggcataaacatcaaataaagatcaaaccagaagaacaagagtacttaccttctgtatcgattcgtcaaccttggtaaataccaatccgacttcgtccataaacttatcaaaccactggttaccttctacgcctcccataatctttaatttaacctgacctggtaccgtatgaaaacagggaagggtttcaaaaccaaaattcagttatctaactcttaattttagtcaataaaaggaatctccttaatattgtttaagcggcctaaaaagagtcgcggaaaccctaattagaacgatcgagaacgacgattgaatgtctcgaaaattgcacaatcgctaaaagaaaacttacgaatgaaaacgaaaccacgtgcgagaggaagttttagttaagaagatttgcttcggaggaattggagagatagaggaacaatgagcgcaggaaaaaacgagttgggttttaacgaggttttataactttttttcgtttcctaatttctaaaataacacataagactaggacttccgatatacttttgatatcatacaactgcctgtatattatccattttaatttttaagtgataacaatgaaaaatttatagatttgtaaattgtataaaagaaattagtaaacttttggttatttcttcatcttactgatctgaataatttatataacaaacaaagtattcactatatccattggtttagtagtttcatttagggaatgtgtcactaataggcacttttagaaaaacttattccgtttgaggcactttctaatgtttagacacttttccttatttttgaaggataaaaagacaattatatcctttccaaattaaaccattatttgcttaaccggtttgatttgttttgtttgatgtggcatgcaataaaactgactaaacgtgtcaaaatttttttatttgttttcagttttctaaaatctgtcaatcattcgatctaagatt

SEQ ID NO: 40 - DNA, 515 bp, Arabidopsis thaliana; identical to SEQ ID NO: 25
  Intron number 1 from transcript AT1G16560.1 (locus AT1G165 60) derived from phytozome v7.0 (chr-ID Chr1; pos 5668430 to 5668944)

SEQ ID NO: 41 - DNA, 4988 bp, Arabidopsis thaliana
  Intron number 2 from transcript AT1G33950.1 (locus AT1G339 50) derived from phytozome v7.0 (chr-ID Chr1; pos 12333630 to 12338617 reverse strand)
attatttgggtagagattgccctactttcataaaggtcggtactttggatataatgatttttaaaataccaaattttagttatatgattcttaaaaatatatgtatactagaagttgtcacgcgatgcgtggattatatattcgctcaaaataattaattatagcaattttgatgtttacaagatgctttttacaaagacattttagttgattaaaagttatgcactcaattttaaattatttttttgtgaaacagtatgtttttcttccaaaaaaataaacagaaattattcagtatttgtttttgtaaaattgcaaatgcatgtatgaccaattttcttgaaagtcaaaacaatagatgaaccttctttacatttaaaaatttaaaacctatgatttaagataactttcaatgaaaaaccctctaacttgactaaagattttatatgtcggttcaaaaaaaataagtcatataaaatcttataaatatattgaaagacgttaagttatatatataatttatttaaaaattgttaatatatcgctcaaaattaaataaaatttcaatttggatgtttacaaattattatgatgtgttaaaaagacactttagttgattaaaaatgttcaatgcactaaactgatttttttttttttttgtgaaaacagtatattttactatataagaacttaaaatattcaagaatgtatttttttttgttgtgaaaatgaatatgcatgtattatcaattgtcttgaaagtcaaaaaatagagggagatttgtaaaactatcatttttttactacccttttatgttgtccatttttaaaaataccctttctcttgaacaaaatgaccaaattaccctcatctaatagaaacatgtaattggaaactgaacttttcccgccaaatttattggcgccaaaatttttttttcccgccaaaaaagatttcccgccgaacttttttcccgccaaaaaaaaagtttcccgccaaattttttgttccgtaacaaattttttctgagccaaaaaaataattttaaaaatccttgtaaatatttgtttgcggcaaatagatttacaagggattttaaaagggtcttaaaagatttacaagagattttaaaaaggttttaaaagatttaaaagagattttaaaagatttacaagggttttaaaaaatttacaagtaattttaaaaggttttaaaatctcttgtaaatctttcaaaacacttttaaaccctttaagaatctttacagatcttttgtaaatattttaaagtcctttaaaatctgttgtaaatattgtaaaacccttttaaaatcccttgtaaatattttaaaatcattttaaaataattttaaaccgtttaaaaatctttaaaagacctttgtaaatcttttaaatctctttaaaatctcttgtaaatcttttaaaacccttttaaaatctcttgtaaatattttaaaaaccttttaaaatcccttgtaaatcacccttttaaaatctcttgtaaatcttataaaacccctttaaaatctcttgtaaatcttttaaaactctttaaaaatcccttgtaaatctatttcccgccaaaaaaaaaattggcgggaaaaatatttttgaaaacaaaatttggcgggaatttgttttttgaaaatttttggcggaattttttttttgaaaatttttggcgggaaatttattttggaatattttaggcggaaaaatattaatatttcattttgttaatctaaaacaatttccaaataagggtaaaatggtcattaaaaatttaaagagggtagaaacaaaatggataaaacaaaaggatagagttgaaaagggtcatcatgaaaagggtattagaaagaatttttcaaaaatatatgaaccttcttcacgtttaaaaatttaaagcctataatttaaaataagtttcaatggaaaatctaccaacttaactaaagatctaagaatgtcagttttgaagaaaacaaaagtcacataaaatatgataagtgtactaaaaaaacaaactatatataaaatttatctataattattaatagaaaactcgaaagtaattaaaaatattaattttgatgtttacaaattgtgatgtctttaaaaaagataatttagtttttaagagttttcaatgcactatagtttattttccgttttttcgtgaaaaatgtatgtttttttttttttaacttaaaatattattttttgtgaaaatgcaaatacatgtattaccaattgtcttgaaagtcgaaataataaataaaccttcttcacatatgaaaatttaaagcatatgatttaagatgtctctcaatgaaaaattctcttacttgactaaagatctcagaatatcggttcaaagggaaaattaaatcatataaaatttgataaatatagtgaaagacgtcatgtcactacccaatttccaaatgatcaacaatactttaagtaaatgtaagttaaattagaataaattaaatattctttttaagaacttaaacaacaaaaataaattgatatttgatattacataaaaaatttgtcaccttgaagatttttttttactggatttttcctcaaaagttatattaaaacaattaatacgcagcatgtttaataaaacatttgattcatgattttgaattatacaaattaaaatttttcattatggtaatttgctttcaacagtttaagattactgttaaacttttttttatttatcttttattagatatttccatgaatccattacacatgagtttcaatataggttgaatagaaataaatatttttattttttattataataaatgaaatgtcaaacaattgttattattagatttccaaacagataagacggtgaaataaaattctaattgtttttgttttattatttagcataaatatagttttatttatgtttaacttcaaatgatgggaaaaagtagggaaaatatgtctctaagttaaatgttataagcttttataaattgaaaccataatgtttttatataattaatttaatattatataacaattgttattatttatatgtgatgtaatggcaacaataaatgaaaccaaaaacttaggaatcatatatataaaagtaaagtttcactctttccttaatggtccacttggcaatataagtttttttaaaatttatataaataataaataacttatttaacacacagtttaatataaaactgaaatcaaaaaaatatgtatcaactatatttttccactctactttattcaacacacaattaattaaaaattaactaccacaatttatttacaaacctgaaatcataaatatatataaattaattatatttctccacaccattttattcaacacaaaataaattaaaaattaactcccacaatttatttttaaattgtaacttccatcacttctcatcctataaatatatacattctctcattctctcatttcttcatccccttccaccgtatcttaaatattgttttgtttagttttaagtttttttcttgttgttgttatgagtttaaaaaatattattgtaaacacttaattctaaattttaattttagattatgaaccttacactgttattcttttttgtttaaatacatctcgataatcaatttttcattaccatcttataaataatcattctctcatcattttgcactatattcatgtatatatatcttatgttgttatatgggtaaaacacaataaatttaaaagatagaagttgtccttggggtttaaaaaaaaaaacttttatattaaaattcatatgattttataagaaaacaaattagtttgtcacttacaaaataaaatgaattggaactattatgtatgagtttatatcaacaaattattttgtaatttactttatcatacatttattttgtaaaaataagatatgatatgtttattaatatatacatgcataaataacatagaaaaagaaaaactgttaaaatatgagcaaaagtaagatatcaaattttaacatatttttaattttttaatcatataatattgatacaaaattattttaattaattaaggttttaaaaaaaaaaaactaaagatggaaaattttcttataaaattggaggataatttatagtagtgaactattaatgtgcagtcttattggttcctaatttacaaggaattttgatgacttcaattaaatccttgaaaataaagaaatgaaagattttaaacgattgttagagagttttttataatcttgttgattagtttttcataatcttgtaaagtttctcaaacaatctctttattttgataatactttccatgacttttcatgacttcattttgtgaagaaaaatgtaggaaatcataaccaataacacaataatttaaatcattaacaatcattaacaatcaaagatttttttgttttaattgaataacacaaaacttttaatgactttataaaagtatgaatctaataacccaaaatttatgaagagtttagattactttttacaaatcttaaatgaataacacaaaaatttaacatacttttaaaaaatcttgattgaataacaacagattttacatgacaatttaaatcactaaaactcttttgaaatcatacacgaataacaccccctaaaacataatatcatgtcaaaattttaaagatttgattttgtaattagttaagggagttgcaattatgctagaagaaaattcatttcaaaattgtagtttaatatgaagtaatttcaaagtttaatgactatttttctaaatatttaatatatctattaataaattattttagtcaaactacaattaatgataagtacatgtgtcatcaaagtatagtgccaaatgtcgcattagtaggcaaagttaggaaaaaccttctcttattatataagattttgaattacaggaagtg

SEQ ID NO: 42 - DNA, 369 bp, Arabidopsis thaliana
  Intron number 3 from transcript AT2G22190.1 (locus AT2G221 90) derived from phytozome v7.0 (chr-ID Chr2; pos 9435550 to 9435918 reverse strand)
tccaagaaggtagtttttttttcaaaattttgaacatatataagataaatcttatagatgttctaggttagcttggtagataatcatgttgtgttctttttttttttttttggaattttaccatattgtgagagttaattaagtaaatggttatgtttttttttttcatttgtaaaatacacttagttgcctacttaagattttatctttaataaggtgttatttatatattgttatatatctaaatcatctacatatataaacataaatgttgattgtcaatttgtgcagttttgtttttgttttaattgaatatttagtgcagttaacctttgctaaatattctttgtgattgaattattttttcag

SEQ ID NO: 43 - DNA, 3100 bp, Arabidopsis thaliana
  Intron number 1 from transcript AT4G21910.1 (locus AT4G219 10) derived from phytozome v7.0 (chr-ID Chr4; pos 11627543 to 11630642 reverse strand)
gacttgtatgatttacgttaccgtacccatatgaatatgatatgaggagacatgttggtattatatatgaagatttatactaattattattttcatttgttataagcgttatcgtatatttagtgaagtaaatggtggagtaaattataagcattataatttagttggaaattaaggattaaagattttgattttctcgttttgtgtgttgacataacatataaaagtactcatatattattaacctaacctaaatggctaaaagcttagcaaaccacgtttattttgctaaggataacagcctgtaaacgatgctgtatttttctatcttatattcctatatcctaatttgttcttacaatttaatgattacataccatttattcggttcttttgtcttatgaatctttaccattttccttcaattttttaatttttattttggggtcaactactaggcacgattttaattttaattttcctactaggcacgatttcttcaggcgttgaatttactcgtattgatatataaactattaccgccatggtaactatgaatgaagttaactactcgatattcttagggatagaaacttacgtaatgcaactaattgcattaacacacgatcacgataagagtttttactagacgaaatcactatggtgagtttttgtgtgaaaaagttcaacttttggattttgtaagagaataatctttcacttccttagaattccgtgaaacgattcctttttcttgtcagctagtataacttaacgattaattgtaactgtcgttttgcttaataaatgatataattgcattttttgtcgaccaaaataaataattttttgtagtatcgtttgttttgcaagtcattcttttgaatattattgtatgcttatgatgagtagtcaattaaatatttatgattttctctttggattatagtgtaaaactgagctttctaatttttgcccatgtgagcaatttgtttgtttacctaatattaggactttctactgttttctcttactttatactagaatttgtaaagatcttctacgttagatttgttttcttttgtgtgcaacacgttctattgtttaatatgaataatctacaatatgtacttttttcttggatcatcatatcgttctttgttttattgttcatttaagaaaggaaaaaagatataaaaaaatagatacccattttcaataaaactttttcttttttaattatgtgtacaatctctatttataacacactaaagagcttcattttgattatctcaaaaaaaaccacacagatccttaaatctccaaatttcctcctcagtcttatcattatagacaaaacccttttctttgtaaattttttcccaatctatggaagtgcctagtgaaaccacgaatttagccgatctccggcgaccattggtggttccggttgtctcggagcgtaaacctccggcagacgtcggactcggactagagagtgttttaacggagcgtagccttccgtaccggaggcgcgtgtacttaggggcatgcatagagatgaagctacttttccggttggcacttccggcgatacttgtctatttagtcaacagcggaatgggtatttccgctcggatcttcgccggacatctcggtaaaaatgagctcgccgccgcgtccatcggaaacagctgcttcagtctcgtctatggcctcatggtacgttttaatgtcaacgagttatcagacgcggtgatattattaaatattatttcttgatttttgcattcagtatttaatgtgaaaggttcgtagcacgataactagtggagtcaaaaaaaaaaaaaaattgctttaatgtgaaaggttcgtagtaacaatagtccttgtttcgtgtgttaacattaacttattagagctaattaagatggtcacgattatttgcttacgcactacatacagcttgtacgatttattcttttgaaattttcttcatttcccaccaaatatagatatatagtaagttttaaaaatccatttattagtttgatcatttaatgactctgcagcctttcttctttttaaattgtcttcaaccggggccggggatcgaaacaataattttcttaaataagattaaaatttccatctttaatatactggggagtatatttttgcaatgtaatatttatttatgccttaaattttgaatactattctaactaatgaaaacgatgtgggatttttattttgtggttgatggttacgatttggtcatagtagtgaacaattatttgtttaatataaaatgctaagcttgttttgacgaaacagtttccaattgccttatagtattatatcaaatgaaaagagaaagtcaaattacaatcgttaatgtgtaaatcatataggtttgagaatgattatagcttttaatatatatatatatatagataattaaaagaaaattttgtattgacatctaaggtggccaaaaacatttaaagaatgtagtcaactaggtagattgtttataaaaagttagataagttcttccaaaaattggttctatctttgataaataatgcttaagtctcgtatttcttaaaattacctcactaatgttcacatatcgagtatctaaagtatctagtggaaattttgtccacatatagagcttttgaagtaggtttagcagactaatcattcgttgcatgccagtcaaatatgaaatatacacatgataaggatggcacaatgatgtctctgcttactttttcctcatgaaatgtgctcatcgtgtcttgtcagttgtcattagttatttatgctcaaccactcatgcatgtgtttataaacgttaatgtgtttataatattttttaatagatttgatttaagaggaaaactactattcaaaacattttatagtttcattgataagtataactagccaataagttattcccgtaatttagagtatacaaacaaagatattgttgatgtccaacaaaactggtgcccacattatattttcaacaaaaaactttatatgtaactactttttttgctttttcatgtgttttttgtagttaggt

SEQ ID NO: 44 - DNA, 3200 bp, Arabidopsis thaliana
  Intron number 2 from transcript AT1G45229.1 (locus AT1G452 29) derived from phytozome v7.0 (chr-ID Chr1; pos 17155599 to 17158798 reverse strand)
cgagtcactggacgtcaaaggaaaggtacagtgagattctcattctatttgttaaactctagtaccaaacagacgtaatgggaaatagttgtctcatgttaccttgctgaaaattgaaggtaaatgcaataaagaacatgtttgtgccacgatagttctcagctagtatttagatcagacatccaaaaaagtcaacggggcattccgagaatcgaactcgggacctctcgcacccaaagcgagaatcataccactagaccaaatgccctgttgctaagcaatttagtttaaacattgaagatcaccatatttggtcatactgtggtctcttgctctaagttgacttttacttaataatttagttttgataggatattccaagatctatattctatgtgatctctttcagttcagtacaatggtttgcaatgtacgctgtatggaaatagactagaaatatattgatctgcggaaaaatcattagatgtggatagtctttgcatcctacatttttaattcatcatgatctctttttatcttattgttagacttgatcatgctgctactataccaagttcttgattattgactaccttaggcaatacgcaaataattttggtgaagctttaggtagatacacatagtcgaaatgctgaatgtgatgtaacacaaatcaggcaccaattacaaatttacatgcaagaattctgaccagaataaatacatgtgcttttgaagattgtttaaaaaggtttcaatttgctgctcggcctgttcttgattctcaaattcctgcaaaaaaaattgtcattgaaatttacgtgtcatactttccctattgatgtggttcggttttggcgaatttagcggttcaaagctagtttaagtactatctcatgttttcagattgaatctgcggttgaagagatcaaagtcaatggatgtgaaagcaaaattttggtgttagtctcaaaaatcgtcaagaactgaagtcatgatacctttcagttaaaatgataaggatctggtcttttgtttgtttaaatgtttatctgcaactactggcgtctctaatctactcttgctaaaatgcaaggggtctttaatgttcaattgctgaagttccttgattaatttcagagacgttgtcagacatgagtaaaggtacgtgacagttaatttattctttggtttgccttggaacacttgatattgaaagtcttagtgaaatagggtgttgttaaagactttctgtgtgtttgttgatctgaccaatgaaataacaaacacgaaagggtagattgatatttgatagttataacaattttcagcaagattttaaaacaaaagtttctgaagaagtcaacggggcattctgagaattgaactcgggacctctcgcaccttaagcgaaaatcaaaccactagaccaaatgccctgttttatatcttgttttgttgatgcattccatttacactctctcatttgttgaagaggaattgttgcttcttggttggatgtagtcacaatccatttccttttctttctgcagctcactctttgtgaatcctgctgcttccaatatgtgtcggtcctccctagatgaagtttactggttatgaagatttattgattggacttaaaacctcggtatgtttttctagtatgcagaaggcacttaataatgaaagtttgggggagtttttgttaatgatttctcttgctgactaaaagtgaaatatatgttcctcagtttttgaaggactaaggaaaattgatctctaagcaaaatttcaggtagaaattagaacgtatagtttggaagagtagatgtggcattccaattatagatattggaacctctcgaagccaaagcaggaattataccactagatgatgctgtcgtgaatctttttgtttaggggtttatacttgatgaagctggaaccatacatttgcgtaaatctgttattaaatgttattttgttaagtagaaatgaaacgctgtagatctaattctgttagttgactgaatttaagcatttagtgcaaaggtggattgtatgttactattattcaatcctgatgaaatttagaccaatgtactcaaaaatgcagtggggcattccgagaatcgaactcgggacctctcgcacccaaagcgagaatcataccactagaccaaatgccctgttgttttgtatacaattgaagcattatacctgcagtactacaagcataatattgagatctgtttgaatctactgtatgagtttagtgtgattcttcgttgcttttgtaagtcagatttcctgctgaatctaatgcaatatctataaatgaaattcgataggagttaacttcatgccgtaaaatcatgcatcttgcatttctcttgttgtaagctctatgccaaaggttttctgttgtatgtcaagctatctattccttttatcaagtgacagagagatgcataagcataactatccttttctggagagtgttactttcttatctgcccttggttctctaatgcagcatctctctagtgtaatttctgtcacaggaattcttactgacaaaaaacaccttttcctgaggaagtggaagatgcgtttaatgcacccttgaatatgttcctcccatttccttgtcaaaggtagttgtgtttttatttcctctgaaagcatcagtaccttaaacgtacttgtccaggatgataaatggatatctcaggagagactagagcggtgaaaagtatttgatccaattctttagcttgcgttcaggagataaggattagttattgtattatagttgccggaatctgatcagagccacatctgttatttatcaaaataccatctgctttcattgagcagggcctatgttatttgtatccaacaattttcgtttgtaaactggccaagttggcattccgtgaatcaaactcggggttctctcgcactgtcatttatatcttgttaggttaatgcattttatttgggtttcaaccagctccgaaatttttttgtcgacctggtttagtcgctcaaagtgtagtaagtttcctagtgaactgaatttaatttatatgtgatatgttcatggccgaccattggaatgtacctgaggtggctcagtggttaaagaagttcatgtaatgtttttagtactcttgttttgctttgtaggctat

SEQ ID NO: 45 - DNA, 2935 bp, Arabidopsis thaliana
  Intron number 11 from transcript AT5G19150.2 (locus AT5G19 150) derived from phytozome v7.0 (chr-ID Chr5; pos 6423305 to 6426239 reverse strand)
catcttattgtctgtgggaaactttagaagtgtctgttctcttgtgtctatttacctcacaattgttttttctgaataataaaacttgaatgctgtgattaccaagtaaagattacgatagaaacagagatatcgcctgttcttcctcattaccattgtgagatttactatagaaacagaggcaaaaggatcaagagaaggtagatttttgtttcagagacattaacttattaggaagaagacactaataacaccagaagacacacacgtgctgtacaaagaagcataagacataagagagatacaacactacacacattatcaccaaccattgatagcttcaagtactcatagaacagctttttgtttttcctacatatttttttttgtttgtgctgttacagttcgagagctttaagagacatgaaacttcttttgtgtttctctttcattttcaatctgcaagaactgttgctccttccacctgttcccaccaccaaagtttgtgttatataagctttttagatgttgctaaacaaaaatactaaaatatgatttagttttgaagaatcaatcaccttgaaggtagctccccaaatttctccctcattagcaggaactgcagtgatcttgttcttagggttctcgaagctcctaagcccacctaatgccgtcgagtaataacagcctgcaaaacacgcatacaaaaccattgagcgggtgatgccccaaaaatcttgaatttaggagtgaacaaacaaaactgaaaaacgaaccttgagggaaagacgcaagagacttgccacaagcaccttttagtaagtcaacatcatcagcaaatgccacatagccatcagctgttattccccaatacaatggaaccttgccaacttggtcctgcagcaaatcaaacaccgttttttgttaccattagattcaatctacttcacagtttaaaaagtgtttatcagggggttaaaagaacttacagaggctacaaacagagtggaggttgatttatcaaagaccacaaaggcgaaatcgccacttaggtgagcaacaacgtggttagccgggtaaggagctctgtcacggagagtcttataagcctcgatgaccaagagaacctcgtttgcgttttttgcaagcccgtactgctgtttcaagcttcctaggttgtcaagtgagccttggaacaagcagaatatttcatccttagctccaaatgatctgtatcatttcagaaaaacatcttaagacaagcctatatgtatatcaacaaagtccaaattaactgaacttgagcaaaatatagagaatagtattgcaaataattgactgaagttataaatgcgaatagtcagaccgatcagtcagcagcaaatctttaaatagacatgcaattatgaatgtattggtatgcttgatatgggtaaaagctaaagatagagtgttgtgcataaggctattaatggtcgtgggattttattgcagggtttggtggaccaaccaaagttgtctttgtagtttggtcatatccaaaaaccaaaatacatacagtccctatagttgtaaccatatagaaatttgtaaatgtaatatttagccacgatttattgtttgattgagtgatcggtcattgttgtgattgttgaagttatgttttaaaaaatgttggttgggacttaatatggccaacatacggaatcttggtgtttgattggttgtggttatattttataaatttgactgtataattttaatattgattattcttatgctaatattttctttgtgatcggattctaagtgacataagtacatgaccaattcagtaatgagtcatgagaggcttgtgaatcttttggtgactaacacaacttctgagacgtgtccttgtgccaccaccgtcaccgacagagtcaactactaaatttatattttgaggtatcaaagaaattttggatcttcagtccaaagtttgctaggtaacaattaatgtaaattatctctagtttattcacatcatctcactcaaatcttgtttccatgaagattgaaagaaatcctttttaaccaatgagctaactttacttggataaatatttatcatttttaatttccaataagaattatccatacaaatttggatcggtacatttcaataaagctacctatgatgtaccttgtatatgcatatttctaaaaagatatatatgatttgagaaaattttattcggacttactctataaattattgtttgggtccacacaccataacacaaacatacatcaccctaagttaagtggagtgctttgaagaaaagaataccacaattatgtaattcggaatctagtagaaaaattatctacaaaatttagtatctaattagataattttcactaataccctatcttcttaaaacaaattagataagaaaatcggacgaaatcaaatgaaatatggtccatacatgcaaatatgcaattgacttttatttgtcagcgaaatttaaaggctcgacgatgatctcatcaccgtccgatcatagcgaaccgacggtagaaactttgggaccatcgtaaaaggccaagttttaatagatatgaacataagaaaaatcgccggcgagacttacctaggccggagaggactctcgttgtgatggctgtaagcaagctgaacatagtcgccgacttgtacagaaacagcggatggatttttctcgacgaaccggtttactaaagttgatccggttgttttcggcgacggagttctgcttccggcagccactaactcttccggcggcgatactatagctccactgaaaattcccaacattttctctctctcctccggtgataacaatcacttccttaatttcaaaacgaaaagaaaaattaagctaactaaatctctgagctctctttctct

SEQ ID NO: 46 - DNA, 598 bp, Arabidopsis thaliana
  Intron number 1 from transcript AT2G23310.2 (locus AT2G233 10) derived from phytozome v7.0 (chr-ID Chr2; pos 9918024 to 9918621)
cctttcgttcgccgtctccctgagttcaaattctggttcgtctctttgattctgtattattgattttgttagatctgatatagggttttagtagtgaaattgagcatagcgttattggtttgattcactttatcgattgagacttgagaggatgacgaagcttgatgacttacttgttaaggaattcaactattgtagactttgatatagttagattacgtagatctgatctagggttttagtagcgttattggtttgattgcagatgaattcatgactgaatcgttagatcagatgattgataatgatgtttgatgacttacttgttgaggaattcaattattgtggactttgatgtagctagattgattcaattctgcagagaaactacatttttagcaagatttagaaccaaatttagaagagatcgacaagattcactttgtgaagcctttgtatgaattctttttaggtttatcaatctagaatgtgatgaagtctcgatttgatgtcctttggattttttgatgtggaatgttgtgtgtgtgttttttgccatgaaggttatcgatcataagggctttcatcatcggattta

SEQ ID NO: 47 - DNA, 2011 bp, Arabidopsis thaliana
  Intron number 7 from transcript AT3G07610.1 (locus AT3G076 10) derived from phytozome v7.0 (chr-ID Chr3; pos 2429123 to 2431133)
cggttagtacccatatgatttgtcttttctcgttttcatatccatttctttcttctaagtctgtccattcttattgtttttctttgcacatctataatgatttcagaacctatgaaaacattaaaatcagataccatttcctaatcggtcacttagattttttattacatttaggattcgtctcctcttcttttccagatcagttccttaagttattctgtttttcttttggctgagttttgtggactctttcgttgaactcctctttttcgcattttattcgggctacactcctcctttgaagcaaaggaactctccttagatttgttgcatcctcatattctgctttagggccgaaaatcaaagtctctggcctaatgttcttgaacattctaagattgcaatgtccatttgaaagttcttacgctgttcataggacctatggaccaagctttatccattcaatgtgagtccatcaatagctttcttagtccttcataggcctggcattcggtttttggttctgttaagttcgttttttccgggtttggaaattgcccccaaaaagaatcggatgttatttcggtttggtatataataaatgaaatttaataaaaaatattaatcttaggtaaatgttttgacaaaaaacaaaataaaaacttgtacaggttaatgtatttttaggtaaatgtattttttgtgcgcaccccaaagccttcatccattctgcttagtagagcactttgcttaggtggattgtatctcagactttcataggatgatcgtctaaatagtatacggaaaagatgcgacattatggtcagctccgtggatatctgctgttcaagacgcaagaaattgttcgttttgctggcgcgggcgaggactattaaatcaagtttgtttagttgctgccagttgagcttcccaattcggcaatgaccgatcttaaatttgaaaatgctggtttttcagcattttataaatgtttgattgcgggactaatttggctaacattgaacttggtagacaaaatcgtcgaatagttgaaaaatgagattattattgaatgaatacacattgaatgcaaagattacgcatttcatttgtggtaatagttccaaaagaaaaataaagtgtttgtgattgttcgagaagatatgaaacaacagatacaatagagctaatcgtcgatacaactggtgtagccaattatagtcgtctgtcgtatcaataatgacaattaaactgaaatgcctagattttacatgttgctgctaccactagttgccagaactggaaccaaaattaatgaccaacatcaatttcgcagaattgtcagtactagaaccgaaatcctgattgaacatcccgagctgttgttacttcttgatattgttcggaatgatgttattctctcacatcctacacttttcataaccttgtaagcgacaaaacacattgaaatcgattatgagatgatgcagttgattttttttcaaatcatcagtaaacatgaacttgttgatttctacctcaatgactctttccaattaggtcaaaaaaaagttgtcattatagaaaataaataattatttttctctttggttttttgccaaaaaaaagaatttggtcaataaaacaaaaaaaattaggtcaagcatttttttttttttttggtcaatagttaatttagtagattttggttttgtgttattacatcattaccttccgtttttttctcaatacttcttttatgaccatttaatctcttagaaacgaaaataaacataatctctctcctcgctttctaattaaaataatagtttgaaataaaggtcaactgttgctgtaaaataaaataaaaaataacggtccagggtgttatttttatattataattagttttactcacttttatcttaacttttcttctttagtatcttaatatctgtaccctttggttatttcaggtgaatattttgacgcacatatctgaagtgcccaa

SEQ ID NO: 48 - DNA, 3551 bp, Arabidopsis thaliana
  Intron number 1 from transcript AT5G10140.2 (locus AT5G101 40) derived from phytozome v7.0 (chr-ID Chr5; pos 3175639 to 3179189 reverse strand)
tccggcaagctctacagcttctcctccggcgataagtacgccttttccttacctgggttttcatttgttcccccttttatcttctgttttgtgctcttttacttttctgagaaaataaaaataaaaaaacaattaatataccgtttggtttttttccggcggatctcttgttgtttctcggttctgtgtttgtttgtgtttttttctgcgaccatgatagatacatgagataaccaaatttaaggaagaacaatgtcgtgaagaagctttttagcttcttacttttgttcatttctctctctatttcttaaaaaaaaaaattctgcatggatttcattatttccttggaaaaaaattgcatgtcattcacgatttgtttgatacgatctgatgcgtgctcgatgttgttgagtgaagtttcaagccatctttgattgtttcttacctttagagattccttaagtttttgaagagttaattatatatcacaagactaatgattaatgtctcttttcagagtgattaaaattcattggatctctcggatttgtatgcaatgcacttacgggagatctatagagttgctatggggttaatgctgaacaatgtatatataccacattgtgcagctattgactatataagactattgttaatcttctatgaattcctatctttgctgtggacctattacttggtgattatccaaattagtgtttttaattgattcatatttttcatacacagtagttttgaattttggtagcttcaaaaaactcagcctcacaattagtacttaccgcacatatgctacttcagtaacataatctggttatcgattgcgattctttgaatcacaatcgtcgtgtgctatatatataacaccttttgctgtacataaactggtctaattttagactaattaaatttcattgttctcttggatttgtatatgcacgtccgggagatttataaataaaattagtatgaggttaatggtaaaaaggatcaagaagtttggttttaaatgtaagccacattaattgggaaactatgactaaaagatgaattggtaatatatacataatatttttaacgaatttctctcctttttatgggatatgctatttaaagattgtccaaaggtttatagtttcccactcttgcagttacacacatagatttgcctcatatttatgtgattgtatatcaattatcgcccttaatcttatcatcgttgtgttcatttatgactttgttcctattcgttaaaattgacaatccacaacctcaatcttttgttgtgaaaatcgacaatcacacaacctttgtatcttgtgtcttttgtcacacaacctttgtatcttgtgtcttttgtcatggaaattgtcattcacacagccttgtttctttggtgcctctaggaaattgaaaatcccacaacacttgtcttcatgtaagaaataccaacctctttggtacggatctataatgaatcaatataatcctatatataagttgtcaaaattgaatctggtgtagtgtctactacaaccctccaatataataaccaaatggttgtagtagtttggccatgttggtcaagatcgctggccgattctcacttgatgcatactttgttaggatttgttcacccctagttaggtccagccttggaattgtcgagacacctgactagaactcctggtcttaattatgatttaataaagaagaagccttttagaacgtggaacccttagttactcagttactctttttgcatacttaggttgatgcaaagagcttaacttcacaataggactgatatctattaacaaaacaaattaagtgaagttttgtcaaaattgttggatcttctaggtcaatatgtagtttagtttttatctgtcttagtcgcttccttctatggaagatatatttatagatatgtgtgataagtttcctactaatattagttagtgtaacttcaagggcagaaaactctttacttttattgcttgattaatttggggtttaaatataggaaattggaacctcacagtttctataaacgagtaagtaattgaatgtgaaataacaaaatggaagaccggcttcctattcttaggagtcttttgatatttgcaaaaaaaacatatacaatagaaatatgagttttgtctaagactcggtccatgtatttggagtttggcttcctcatacttatggttatctggttaccgccacatcatcattatcatcttatgggtcatcaatactagctctatcgctggaaaaaaccttgtcctcaaggttcattgaaaaatccgaaaagttttctcgtatatgttgatatggtattacttacaaacaaagagctgatgttaccaattttgacacgagattactaatgaactcatgaaagaggcgtttttaaaaaattctttttaaaactgggatacaaaaagaaaagaggtaactaataatttgataccattgttcgtagtcctgatcaaatgttataagggtaaacatgatagaaaatagagggtaaataggttttgttcttataatggttttgataacacgctttgtaaaggatataggtgttttttgatgctaaaagttgtggtatggatcaaaaccaaaatggaagctctgaatctctgatagaggttgcaattagaattatataagttaatttgcaaatgaattggaagcagtcttccactatttgctattgttagggaagtctttcagttaatttcagaaaattaagagaaatatgactttctagactcagtctgtgtacttggaattttacttcggtttacttccatgtcatcacattgtggctcatcaatatatgtgtgtatatacattcatgagtatatatgatttctggaaaaataaaaattgcttgtttgcatttaagattggggctgcgtttacattttatattgcatcaattatttcaacatagattcacaaacataaatgcatagaaacaatctggacagtagaggcttatgtttagggttcttatgtaccttaactagtttgactttaagttaatcaaagccagcgctatcactaaactttatctgtatgcctttgtatgacttttctttgagggaaaatgtcattttcaatctgccgaaatatataataaatacatgttagcccacataattcattggataactaatctttgagcaatttttggtaaatgttttggttcttttcttttcttgagagagaaaaaaaatatcagatattattaaatattgcttacaaagctaagaacaagttaaaacttttttgaaaaagtggaaattcagatgtgctactgcttaaacatgaatattaagattattgtttttctgaaatgttacgaatactagcgtgttatatatatgtaaaaggtaaggtgttctctcaatgtttcatagtttccagtggccttttcaagggttagctagtagttttgatcctaacatatttttattttttttgtcatctctccagcctggtcaagatccttgatcgat

SEQ ID NO: 49 - DNA, 1133 bp, Arabidopsis thaliana
  Intron number 1 from transcript AT1G62540.1 (locus AT1G625 40) derived from phytozome v7.0 (chr-ID Chr1; pos 23152379 to 23153511)
acactatacagaaccaaacgttgctcatattcctggtaaagatcattttctaactacttattttatttttaaaaaaataactttgttttctcacatatatttatgtaacattttttataaaactatggattgtaaaagaactaacaaaatagccatggtgtcagaccacactctctttcttcacttgcaattacttttttacccatttttcgtattttatatatattacatggtatttttcaaaatcaaataaaacacttagaatcatctcatctttctttctcccatcaccacaaccaccacatcttccaccatcacaaccacccgatctctttttcgataaatctaggctctcaaacgttatttatattgatagatcatctctccttcaatttgcagaagatttgtcattttttattcgattttgattctttcttggaatctccgtcgttatgttttctttttaaattgtatgttattttcttttatacgacgatacttttttgaattacacgtgataactagaaatctctctctcccaacatgctactttttcatataacacattatttatttaaatcacatgtaatttcttctaaaaacatgatttaaatgttaaaactttcttaaatctattattttatcttcgtataagcttgctcctggttcaacttttcaaataaaacgatatttgtttatataacatgctatttgtgtaaaatgtacgttataaaatgtcatattttttataaatatcgtgctattttaacatgtttcatgcgatttgctaaaaaacatcaaatatatctacataagtctgcttttggttcaacttgcaaggatagttttgtattttcttatgccgtcatatagttatttatccgtagaaaaactgacaattgttagttacttgattcttttcaattttatagttagtttctaatattacccttataaaaaccagttagtgattgaatcatttgccactgctggattttagattacaattttctagatacatcgtccgatcttgatgaataacttaagacttcaatctaacatataatctaaaactatcagaactatctatatctttaggtataaaatcgtggccaggaaagcagatccatagc

SEQ ID NO: 50 - DNA, 763 bp, Arabidopsis thaliana
  Intron number 2 from transcript AT1G64750.1 (locus AT1G647 50) derived from phytozome v7.0 (chr-ID Chr1; pos 24052883 to 24053645 reverse strand)
agttcgaggaatttgaaattaacgaaggtaaaatttttgttgttattacttgtttcttcttcgatttttgaatcgattcatcatcggttttatagtcttaacgatgaagctacgatgccatagatataagagcgattttcattagcaactgattgatagatacaggcaatgctttatatggttgaattgagaattatttgtatgaattgtatcagattctgattttaatagattttgatttgcaagttagttgattcttcagatttaactagtagttgtattgaaaggattgataaagatggactagtgtatgagttgagtaggtctgatatgaaaacgaatctgtttgatgtcaatttcaggtgtgagataggttgatagatcttttttcatatagttctaacaatgaagctatagtctcatacttactaaatggataaaagagcagtttttttcagcaacttattgatgattaggtttagtcttaatagtcaacgcttcatttactaaagcctaaaggttattgaggatttgggaattatttgagggcattgagtagcctaaaggtttaacagattttgctttgtgattttactaatagttttattgaaagaattgataaagagggtttctgtttgtatgagttgtgtagttggatgtggaatggatgtttttgctgtccttttacggtcaaagtaaatactgatggatctttttatgttgggcagattggttggagaaagaagaagtgaaggaagttagc

SEQ ID NO: 51 - DNA, 662 bp, Arabidopsis thaliana
  Intron number 1 from transcript AT1G31650.1 (locus AT1G316 50) derived from phytozome v7.0 (chr-ID Chr1; pos 11329896 to 11330557 reverse strand)
tagatttttcctataagctcgcttcagaaattgaggtttgtgctcaaatttcttttacaatgtttcttcaaaatctatctcatgtttctcttagtgtagttctaggtcttgttgatctatgtatcagccaaatctttgttaggttctttggtttagggtttcattctttgtagttaaatctgtttaaaagatttcattttgagattagttaaagaactttgagattgttgcctttttaagtagctaaaggtcctctttatactaaaagttttacatcattactaatcctttccttaaaagttgtattagtaaccccattagaaaaaagctgattagtaccaaaaaaaaaaaggcacaagtgagtttcagtttttgttttgccttatcttcattgtacagttgaaaaaaagaattcttccttcttgtctctttgtgtatgattaataatattctaaaatggtgaagcatgattttgtcttcttccattgttcattgttgcatagtggttgttttgttgcatattagctgataatgaagaacaaacctaagtttaaaattttgattttgctgttagcttttttactttatgagttaaaaattattttaattgactttgactgtaaaatctttaatgtgtaattaattttctatgcagggacaag

SEQ ID NO: 52 - DNA, 652 bp, Arabidopsis thaliana
  Intron number 6 from transcript AT5G49880.1 (locus AT5G498 80) derived from phytozome v7.0 (chr-ID Chr5; pos 20283596 to 20284247)
tggttaaacatcttcaggaagaacttaaacgctatgtaagttttaccagttcttagtctacccgagtaatgattttacaaagttgttacataagatgaatcatttattgaaaatgagtatgaaagtggtcaggacattgatcataactctctgttttattcaccaatagaagctgtactcgttcttgattaccatgagaaactttgcattacatacccagaatcaatgatttctattttctgttgattactctcataagcagcaaatcacggagagagattatgcaagtttttaaacacttgaaatttactcaaaacactcgttaaattttttttcttaaaatggtcgtcttatttacttaggctatctaagacaattcataagtaaaagagtttacttttcaagaaaagtgaggtaatatagaatgatgtatttttcatgtaacactagttatgcaagtcaaattttaatttgatcgtaaattcgactcacatacttttcatcatttgaagacatgtactatttgtagattctattttcgacttctatactttccatgtaatatctatttagtttttgtttttcttgtcgattttgattcttgataattgtatcaggaagctgaagtgcgagaagctagaaagttaaaatc

SEQ ID NO: 53 - DNA, 667 bp, Arabidopsis thaliana
  Intron number 1 from transcript AT4G15396.1 (locus AT4G153 96) derived from phytozome v7.0 (chr-ID Chr4; pos 8807748 to 8808414)
cagttaccaacattcgtgaaggagaaagtactcaggttattgatcttatctattggtttggtttttgatcttacctacatatttgacaactacaatgaaatattagtcatcctataatatataaaattaattaacattgaacgcttttaagaaatgattatgataaattttatatcgatgaatttatatagtattataaaaaaaattaaaaatctaaacacatatctattaaataaagagaaataacaaaactgtggatgttcttacttccttataataaatgagcggatgtttttgtatatagttgtatcctacatgtaaaacaaattggataatttttaaagaaatgattaactgtatctcgtaaatattttactagatggaatttatatacataatcaaatttcaaagaacaaagaaaaatcgtaataaattaaacttctctttggataacatttcagcgaaaaaagaagaagcaagttaaggtttgcttcttgagaatatattgttgaagtgttttttatttgaaaattcccacaatttattaagaaaaaaattaacgatttgcacccgaacatatctagtcctcataatcaattcctccgagttttattagtagattaccgtgtctcaatttttgcatttttttcccccaaaaaaaatagac

SEQ ID NO: 54 - DNA, 532 bp, Arabidopsis thaliana
  Intron number 1 from transcript AT4G31480.2 (locus AT4G314 80) derived from phytozome v7.0 (chr-ID Chr4; pos 15263304 to 15263835)
cctcctcctctctccctggatctcgtacctttgaggtttgtctctctgtgttaaacttgcgactcagatttcatagagatcgatcccacttttgccttttcctttgtgaaaatctacaatgttcaattattctctggcgctctttgtttgatctcgttgaatattgatctgattccggtaggaaaccgattttcatgtttgtgcagctgagtgagactgcgaattatgtagatttcattgtttgttcatctaatctggggagatagatcgcattttttttttttttgaattttggttgatccgaagctgttttaactgatttttcgtttttatgttattattttggtcgtagttgtagtacagtgatgtgtattgctggatctgaggatttagatttgtcaatgttttgcatctttgggtctctgattggacattaccgaatattcttctgaaattatgatgttttctcataaaccacggattcgagaatagagatcatgtattcaatgtattgaaatccaagcagagaggt

SEQ ID NO: 55 - DNA, 543 bp, Arabidopsis thaliana
  Intron number 2 from transcript AT1G49890.1 (locus AT1G498 90) derived from phytozome v7.0 (chr-ID Chr1; pos 18472172 to 18472714)
agaaattgaaactggcttctattctgaggggacaggtaagactgtgaatgaactctcttaagtttatgcgatttcttactttaaaagggctaatgtcctaattaagacgttttcttctccttctatttttgaggaatacgacagatattctttggaatttggcttagtgattccttcttgccgtaataagaaaatcaagttttgtgtataactcaattattgttgaatggtaattgtctcgcaacgtgtttagcaaatgaatttggactctaataatttatttatgtatggtaggtagattttctatatctacctctagaagttggtatgcttacttgcttagaaccatcccacaacttaacactttgaatttttgacaatgaatcagcataagaaacatgagattttatttatctttaagtgataaccgtagtaatagtacatcgctacaggagaggcatataagaaagactaaagaaattatgaatgttgttttttgcattagatatactaaacttgctcgctgtatttattaaattgtag

SEQ ID NO: 56 - DNA, 2905 bp, Arabidopsis thaliana
  Intron number 1 from transcript AT3G45990.1 (locus AT3G459 90) derived from phytozome v7.0 (chr-ID Chr3; pos 16901140 to 16904044 reverse strand)
gcaagtgattgtagagaaacatcactacaaaaaaagtttaataattcaacatcaattctaataagtgatttgttaattagtttgtttagtgtcagtttaatcaaattgatacaaatttgtattagtttgcatcacttcagaaaatagatacaaaaatatgtatttacatcaattaagataaccgatgtattcccttatttttattaacatcatttttaaaaatgatacaaaatatagatcaatagaaagtgatgctaagaacttaaattgtatcataaaattaagtgatattattttaaatcacttatgtataaatgagacaaatattgatgatttagaatcagttataatagctgatgttttaattaaatagtttagcatcaatttgataaattgatagaaatatatattgattttgatttggatcattttaagatgttgatacaaacctatatatttacatcaatagataatcgttgtatttattaatttattattagcatcacttacaaaacgatacaaattaaaatatcaattaaataaatgatacaaaattagtatcaataataaaataatgctaattaacttacatataatcaaaataaaaaaacacgtagtccattttatgtcactcaatcttaactgatcttaatcttttttccaaattttatcttaatctatgtgaattgtttttaaaactgttgtattttaaaatagcatgttttgaaagttgcacaaatatttttgttttaaaacaatatacgttaaaaaaaaacaatatatcacaaatctcatccataatttttttgtttgtttgtttattatattcacaaacgtagatatattagattttaacccacggtaaaccgcggggacaatttatcttttttaagttagtatatttttttttttgcaaattgaatctatttataatatatttttattttatagcttacaattgttattaagtaacgtcctgccaaactcgtcccgtaaaaaaatcatttatttatattaatgttgatcttatttatgatatgtttataaatcattgtctaaatatttttgtcgatgcgagacattgaacccacacattgtttgccaattggttaatatatgttcatttttaaaattttgaatcataaaatatgacggaaaaaattaagatttttttaaactctatatattatataatgatgttaaaaaattgtgatatatcaaactttttataagtttaaatattaataatgttttatagattttaaatatataaataataatatttaaaaaattaatatttttgtttataaggtaatgacataataactctaaaagcaaggatttagaagatttaaatctttaattaaatattttctttaataaataattaatgttagtgacatgatattgtaaataagttcaaatacaaaatttatttatttaaacaaaaaacgtttagtaagaataatatttatttaacaaaaaaatttgttttaaaatattgttaacaaatgtctatgctaattttaagggattgatttgaagtttgttgggattaaatttgattgataatgtgattgactatttaaatcaaaaatttaaagtaaaattaattattttggaaatttttttaatgctaatgacattagatcgtaaataagtccaagtacatgatttatttgctaaaatggctgcaaaaatgtatatatagattgttttggaatcaagattgtgttctatattttaaattgctaaaaatctgttttttcttttcttattctctaaattctcatttttaattgtttttcgattatgtataaaaaactgttttgttaaaaatcgaaaattcatttccactaccccaaccaacccacgatctctctgtatctactcaaataaaacttgtagtattcccaaaattattgtatataaaatcagaagttccataaaactcttccttaaaaattctccagaaacatcaattttcacagaattcttaaaaggatgtcaatcatacaactccgatgaatatgagttatacatgtacttctccaacacaaaatcatgttgatccttatatgttcatcttctaaacctttccaagacgacgaagaattgtttttctgttcttatttttattattttgtatttttcattttctcacccatgactctgattttctatttattggttttcatactcagaaaatctccacagtgaagaaacaatgtcaccaaaacaatggaaaggaaaaagcttggacaagaaacaagatgtgtgttcttgaagaaatcatacctagatcttgaattaattaagttcatatcactttttttttgttttttttttgtatgtgtaaaatctctaatgaatttattaactgcgttaaattcatgtttttgtcttttgtaattgacgttctggtataattatttgtaaaaaaaatagaaaagatttagtagatattgaaaacgattttgctatataaaattatttaaaaacaaaacgaaaatatttaagataataattctgttataaattttgtagtttcttttaaccatcgtttattgaaaaatatttaacacaaatattaacatcaattactattaagtgatgtaaataattgaaatcaattctcttaattgacactaatactaacatcacttaaataaatagatgtaaaatttaacatcattttttttcaattgacacatattcatatcagttagaataattgatgtaaatattttatatcttaacatcggtcattaattaactgatgtcaattatttgcatcaacaatatataagtcatttatttaagtgatgtaaaattcttttacatcaattataagtaatacaaatattcaaaataaatgatataaaatggcccttttttgtagtgc

SEQ ID NO: 57 - DNA, 871 bp, Arabidopsis thaliana
  Intron number 1 from transcript AT3G03870.2 (locus AT3G038 70) derived from phytozome v7.0 (chr-ID Chr3; pos 996196 t o 997066)
ataataaggtaatgttcttaattagttaaatgaatttattttatttttctttatgatatatctttgaatgttctcagttaaataatttaatgaaaaattattggttttatgtgagtagtttcgtcttgaggcgaatatatactaacaattgttttacatatttaatcagaaaacgataaatgtaaaaagtttttgtgttttatttccgagatggtgttttgtatattgataaattatatgatatgaaagaaaagggagtgatagatttggataagagactgtatagaatatataatccacctacaaaaaattagtatttgttaagatgaaccaaaatagtgaaaaggggtggtggaatattattttctaatgttaatggttcatgacgattagttcgtaatctgtctgcttgattgtataaaagttatagttttgatgtattctataaattgtatgattaactgattgataacacttttgattcaaactatagaaataagttttgaatattttaatctcaccaaatgataaggtcaagtttacgtgtttaagtgaacaatctttagaattgaagagaactattcttgttttacctttgtacgtacgttttgttttatgattgtttcttgtgctaacgtcaaagcgataagaagaaattttcttcgtttactaaatatagcatatagccatgtaacaaacccattaaagacatatcaaaatcctaattaaaagcattacaataacatacttgataactgtttaaacatgtttgtagtaatatactaacatttgttgatcatcaatacttcaccaatctctacaatttgaatttgttgataaaattttgtttcattgttggtggatgcagagg

SEQ ID NO: 58 - DNA, 716 bp, Arabidopsis thaliana
  Intron number 1 from transcript AT4G12230.1 (locus AT4G122 30) derived from phytozome v7.0 (chr-ID Chr4; pos 7284682 to 7285397)
actttaaatctcaggttcctcttcacaagattcccgtatgtttcttcttcctctctctctctttgacttttgatgaattttcgattctgcattctattcggctactaaattaggtttaatctcgagcttttgaggttttgatttttgtttttttttttgttgattttcgattaatctcatgtgggttttaatcgtttgggtttatgcagaattttttgtgtgagtagttctatcgtaaatgggtttatcctgctgagtttgggttcaaattttatgcttagaattttaatttttgggttcttgtctaaaagcaagaacttggtagtctttagtttagtgatgggtattctccatttttgatctttttaacttctgtagattcttttagtgttgcttttgatttgatctatgagtagcctgtgacacacttagtgatttgtctttgtttatgttcgcatatttagttcttagctctactaatcccaagcaactattgaatggctctatagatgtaatgtttgttcgggttgtgttgcttagagtttggaaaactgtgatttgttaagcatttgtacatgtatgtccactgtttcaagcttcggaatgaaagatttcattttttttgttttttcttggaatgtcatttgctcagagcataaacaatcttataaatatctagctttatgtgcatgctaactgcagattgggacaaagca

SEQ ID NO: 59 - DNA, 1181 bp, Arabidopsis thaliana
  Intron number 14 from transcript AT4G23370.1 (locus AT4G23 370) derived from phytozome v7.0 (chr-ID Chr4; pos 1220806 3 to 12209243 reverse strand)
atcttggatcggaaggtatgactccaccacttgatactctaaagacattctcaagcaccccgaattgttacaaagtcaaaaaggaccaaccattgtttggtcatgtttgggatgacgctatcttttacggaggaccaggaggatgcacattctagttatcgtgttcttaagatctctccgcattaatcaagtatcctcagttttttcactttttaagttgaaaaataaaacttggaccttgttttcgaaagaataacagaaatacaagaatgtcttccaaatttctgtaaccgttacataagcccaagattatgtgaatatcattaatgcaaattatgcaatcatcctctattgataatattctatggaaaggttaaaaacactttactgtaatataatttcattttagaccgctaaaaccattgctaaattatttgtaaataaaaatatgaaagttttaataaaactatgatcaattgaattagattgatttttgggtaatattagtaactaaccatagaatcaaaataaatgaagagaataatagccttgtgccaaacatattagcaaataacattttgttgggtggagtaaatactaaactatctctctattatcttgtttttacaacaacgcccgtgctagttgtaacatagttttaagtgattgtgtacatctcttgtggaaaagtcatgtgttaatttgaaataacatgctatatttgcaaaaacgcatgcaattttcttaaaagaaatttccaaaaaggtttggtagaaaatggaaactacttggtcaaagttattttgttaattctttcaagtcaaaggtctcatgtgatttagtacttaattaactaaatgtgtccataaatttagtttgaatgtgatttagtacctaattagttatattgtgtcaatgaatttagtgtagaaaacatttggtcaagggttattttgttaattcattttaaatcaaatgtcacaagtgatttagtacttcctaaatgatttctacattataaatttataactaaaatccttttgattcattatttgcagaagaaagaataaagacaagagcctgtattttaaagaataatcaatatgacttccttcaaccactttgtgttactgattctgttaacagtcactcttattttatccgctcaagcaactaaggaa

SEQ ID NO: 60 - DNA, 554 bp, Arabidopsis thaliana
  Intron number 2 from transcript AT5G62200.1 (locus AT5G622 00) derived from phytozome v7.0 (chr-ID Chr5; pos 24984780 to 24985333 reverse strand)
gtaaccaggttagatttcttcgctgagtgagattttgatttcttcagaacatttgattttgatttggtaacactttggtttatcgattatgcttagggttccaattgaatgtttcattccaaaatacacatctgttttcgcacatatctgattcttcgtaattgagctttgttacaatggactttctcagattttgagctcatctttggtttcattagatttttagtatgttcaggtccagttctagttagctactgaatatgcataacattgtcactcctatggaagaattctagctaccaaaagtttgcaaatgcttagctctggttgctctggttgatctgaacatttgagttttagagaaatatacacatctttggaatagatgaaagtttcaatggattggttttgattgtaactagtgtctaatctgttcatgcatctatcactaataaactaataaactgtaaggatgttcgcttcggttcgatgttcaatgaaatttcgctgctcaagttttgtttatttgaatcagatatacgcaccaaggcttg

SEQ ID NO: 61 - DNA, 1388 bp, Arabidopsis thaliana
  Intron number 3 from transcript AT5G38030.1 (locus AT5G380 30) derived from phytozome v7.0 (chr-ID Chr5; pos 15172494 to 15173881 reverse strand)
ctgagatctccgtagctgctctctccatctggtaattctagtctattagtattttttttttcaaattaataatgtttataagatttgttgtttgatttgttcagtttctatattttagaaaattctcatcaagaatctctaggatctatttatcagaaagaaaaaaaaaaatctctaggaattagcactagtgtaatttgtcgtgactcatgcgtagttgacttatgttattcgttggttcttgagcagtgaaaccctagctggtagctagtcagtttttgctgcattaatatgataatatctatcaaaataatttgctgcattaattaatattttgattctttgttttattattattcgtttcattttttttttgctacattttatttttagtcatgtagtagttatacatatatatatacactcaacccaaacggaccatattaaaaatcgactgttttgaatgtatctacagcttgttcaacattagttattcatggaagcacatataaactttaaaagtaatattgtatcttagtaacaattaataaatttcaaaaagtaaagattatcgttgaatttatgcctctaatcatgggcgaaaaacctactacggtagaaaagggtcacttgagcttggttcaataatatcattctaaattattaatgtatacaaatgtcaaaagaatttgtagttgtttgcttagttggtacatttttcattgttgactccactatacacctatattaatcatagtaaattctttgtaattaaaatttatatttggtatcccctgaaagtactctgattaatcaatgatcatagccactgcctctaatgtttttaagtttggtttggaaaatgaagaattatgagttgcctagttggtaattttttttataacccaaattccaaactactgcttttctcaacccgaactaattttttttcaaattacaaacctgacctatatgaaaattagccgatttcgacaatatctctaaatggttgctaagtccgtaaaatgtagagtagaagatattgaatacttaggcgttaacggttgctaagtccgcaaaatgtagagtagaagatattgaatagtcttgtgattggggatctattaatgctcttctgaagaaccaagtggaaagcttgaacagtatagagatatgttgaaatcagctaattttcataatggtaaggtttacaatttgaattttgatttggtccgggatgagaaaagcaggaggtcgaagttttgattgaaaaaagccgctggcaaaaagttagtattgaaaaaaaaaacgtttctcctatgattaatcgtatagccattgcctctaattattttgttttggtcttgtaacgatattaaaaatgaagc

SEQ ID NO: 62 - DNA, 613 bp, Arabidopsis thaliana
  Intron number 1 from transcript AT4G14360.2 (locus AT4G143 60) derived from phytozome v7.0 (chr-ID Chr4; pos 8270286 to 8270898 reverse strand)
gtctcttccaaatctagaacctttacttgggttgtgtaagtcccttcttttgatctttctgggtttcgctgttttgtttaaagtttcaattttgagatacgaatcggttgtgctctgtgaggctttgtctatcattattactgtggtagatttgaattcgttgtttataagcttcttttatgatttttaaatcctatcgtttgattgatacaccagtggataatgtatttatgggtcgatcctgttctgtttcattctcacaccagatctgttcttattctgggaaattgtagttgattcctcgtgcaaagattcggaccaaatacttaataacaaacacaccaaattctaacagaacagtgaggaatcaactgttttgtgaattgagtgcttttatatcctaaaaatccagattctttgctagtgttgataattgaatactttagtttctctaagtgagtagtagtagaccacatttctctttttttgtgtgtggttaagattggtatatgtgcgtgtgttctttttgttactattcttacagatactaagcattgtctttttttatatatatatagaacagattcaaatatctgtaactagtgagaaatca

SEQ ID NO: 63 - DNA, 1652 bp, Arabidopsis thaliana
  Intron number 1 from transcript AT4G22540.1 (locus AT4G225 40) derived from phytozome v7.0 (chr-ID Chr4; pos 11864096 to 11865747 reverse strand)
aacaacaaaaaaccgtcggcattgttcatcttaaggtatttacaaaaagtttgatttctgaaattttttgattttggttttagggagaaaaaaaaaaaaattcacctgagattatcagtttttatgatttattgatttctggtcttgttgattcattattaaattttgactatcatggatacagatttgtttctggggaaatgaaacgccttttatcactcatagttagaggaaataaccagtggtttatagatttgtttgttgtgttcttggtgaaaaagataaaccctaaatgtgaaatttactctcttgtttcgtttctatgaatgacctttcatcatcagattcatcacttactttcttcttgaccactttgattttggtctttgtgtaataataatactattaatcttgctggtattttcccagcttttaacttgctgtgaatctctagtgggtcacatcaacaggtgcttgtttgtttttcaaaatttaaaatcttttgtgtgttggttgcaacaatctggcttctttttgtaggtttagggttttgttcagtggtcacattgtttttttttttttctttcaagttggtttcttagtgtattcagttttttaaaaaatatatttttctattggtttcaagatttaatacatttgccaattgtcaaaaaaattggattctcttagttttttttttctttgggagaaaaagccaaagaaggctatagatatgtcaatttttggttgctagaactaagaactttttcagttgcataactaaaacaagtcttttgaattttggacacttttgacaatttgttctttggtgattcttgcctttgcatgtgcttgctttgatttgtcttgttggcaacgtaagtgaatgggtatacgcttttaactttttcattgtcatcttttactttggatttctctttagctaagaagtctagctaactatatctatatctataagtgttttcacacaaatgggcttgtgtgtatagtattattctatggattcaattatataagtttttttttggattttggacaagtttggtgagtagaagaattagttttgttggaaataatggagggggtggggtcttaccaattataaaaaggacttgtgttgacatgcttgacaatgagaaaacgatgtttttacaagcataattctgtgttgaactttcaaaattacatttgcttaatcccaaaatacaccaaagctgatccagacataaactttagatatttttttgttttgcttacagataataaacttttgtctttctcaacctatagatcttacgtgccttatccagtcttaaagttaaatccttcatgggcccagcttgatttgttctagttccaaatctgcatctccaaacttttttccaagttcaggatattcttttgagttcttagggtccatttttgctttttatagcatggaactttagatctttgatccagaatctgatttctggtaagttttctttttctagtttgatgatatttgtggtcacaactttcttttttgcttttgtggttgaaaatgaaaacttgctgttttgattaagtacttgagcttgtaactatgtttttgtttcagcaggtttcttctttcagagaaagcaagtctg

SEQ ID NO: 64 - DNA, 1582 bp, Arabidopsis thaliana
  Intron number 1 from transcript AT2G34790.1 (locus AT2G347 90) derived from phytozome v7.0 (chr-ID Chr2; pos 14675196 to 14676777 reverse strand)
ctggtgctaccatcggagaggtttattacaggtaacgcttacgcatgattatatatatatttccttggtcagatttttgaatagtaaaaacaaattaatttgacgcataattttttatggcgagattattctttaatttttaagtaggatgataattactgattttgtttggttagaacttattcgcaatatttttgactccaaatagtaacggaagttttgacgtcttaggctaagtttttcttttcccattgcctattgtctattgccatttggggaaacctttttttgttttgctaactttattcgtggattccctaaaaacgtcggttaaaggatgacttgctttttctactttcgttactaggcttgggcacgaagcgaatatccggaaaaaattgtactatttgttattcgattcgttttaatcgaatacttgattttattatttgctttgattcgaaactttccggatatccggaatttcgaatatccggaattttttgtgatatttgcggatatccgctttgatacgtataaatattaaaaaaatctgtaaactatataagcatatcagatattcaaaacttttacttaacatgctttcaaaataagttataaataccaaacataacctttgttgttattaccggtcaacaaaaatgttatcaaactaattctaaaaactaaaacccgatagtttttaatgtcattgatcaaaacacaacataaaaaaaaatgatcaaacaaacatcttaacatcaaaacataaggtagcaacaatacacaaactatttatgatatctatatatagatataactatatattctgatatatatcaaaagatacggatcgaagcggatattcgattttaaaaaaaacaatatttgctatttgattcggtttttacgaatactatattttcatatttgctttggtccaaaatcttacggatattcggatttttcgaatcaaatcaaatcgaataccgagtcaaaccggatcgaacgaatattttgccaagccctattcgttacaacgcattgtgaatttgtagttggtaacatttctttcattgctttcagtgtttattttatattattatattttttctatttttatgacttttaatatatttattttccatctatagttattttgtcatctcgaactcaaaacttatttacccaaatgcaaaaacctaatagttatttctttgttcttaaagttaatatatatttaaactaacattcttttttattggtcaaatttagtttattatatataaaatactttcagttattcccccctcattagccaaattttaatacccattagagtgagttataccaatagatttcattcttactatcttctacacctaattgaaaagttaatcataatcaatggcatatgtagaaatattccattcgtcgattcaatcagaaccggtttaaccaaatgccggaaccaaaccaaaataaaatcaaaccgatcacatggttgagctttcgttaatgatccgataattaatcggttgttgtgtctcggttaacaggatccaagagaaaagccaaaccc

SEQ ID NO: 65 - DNA, 389 bp, Arabidopsis thaliana
  Intron number 2 from transcript AT3G22260.3 (locus AT3G222 60) derived from phytozome v7.0 (chr-ID Chr3; pos 7871100 to 7871488)
ttgagcttgccaagtcaagcaaccagattttgttggtaattatctcaactttttgtttgctcaactttaggattttgaatctcagagaattacgtttccagtagtgggtaacgtttcaagaatttgagattgttttgggtttcttttgaatttgggtttattcagtgtgatctttgatctgggtttctgtagttttgtgtgattgaatcgaaagttgtcttcttttgttacagattacaacattttaggttgatataccttttggatttggttgcttaatggtattggattgatactagtttctcaagattatggttttcgttttaaactgatcagaggtagtctctgtcttgcttcctaggttgtatttagtataggatccaaataca

SEQ ID NO: 66 - DNA, 1005 bp, Arabidopsis thaliana
  Intron number 1 from transcript AT3G55350.1 (locus AT3G553 50) derived from phytozome v7.0 (chr-ID Chr3; pos 20518690 to 20519694)
gattctctcgccgtatttgtatctctttttttttcctacctttcttgttggtggtgatttttgcattggcagagtttttgttttttgaatctaattgttgattctgtttcatggaacttgcaattctgaatgttgatttttatttgggttttctaggtgaaaaagtttcagattgaatttagtaatgtagacaagagatgtcctttaatcttactctgtacattggagtattgtttcgatctattgattcgtagttttgggggtttgtgagttcttattcgattctagttgtgtcgtggctaacttaagtgagctatatggatccatggaagtggtttttgtgtagatgaagttgttcttaaggctctaggggctcagtttcgagccatttagactcatctagataactttgagcatgttttttttttcctgttttcgattttggtttaaatgatatgattctttagaaccaatttgggattagcagactttgactagtcttagtttctttttccaatttggcaagttaattttgttttgtaaaagttctcattgctttctgatgatgacattattaactctctttgtgaagagtcagccagatgttttccatgtctctttcagtgatgttctgattatgataagacattttttgcccctcttcccgttgtctctccctgtgtaaatgcgcttgtaggtcgatgataatcaattgataggtcattagctcttctgcttttgcactcttcttttagctttccgagtgttggatttaagctagtccaatgttgtatgagctgatatataatgtgatttaaacagttatggatctgcatggttcttttacactgacttcattacaatgaatgtgtctttgtactaaagagcagtaagcttgatcttggatacattgttgattttgtagttactatgagaatgtcatgttttttcttttcatctcctttttcaggagggtcaacggatccaaagacatttgagtcagtt

SEQ ID NO: 67 - DNA, 1777 bp, Arabidopsis thaliana
  Intron number 1 from transcript AT4G10380.1 (locus AT4G103 80) derived from phytozome v7.0 (chr-ID Chr4; pos 6432514 to 6434290 reverse strand)
tctccctcactcgcaaggttagccatcttcctctttttattttattttactcataattcttagtatatcttatttttttaatatatataattccaaattaccgtaagaaaatcgactacaaattgtatgttaagtggtttgtgctagtaatatcaatatactcattcgtcaccatccggatccataaccgcatattgcatattgtcagtaaacctaacaatagaattacagtcaaaatcattaatattttacatattttaagattaagaaagtgttatcaaaagttttaaaatttctggctaggaaccctacgtaagcctaaaaattacaatagcgttataaccttacaaagtaaatatctcatattttattttaatctaataaaagaaatccaatggctcgttcattagaaaacattggaatccacgttgggaaaataatgaattgggaaaaaaaaaaatgagatcgagacaatattataaatatagatgtactatagggaaactcacaaatcgatcgtaatttatggtttttgtaagctctgaaatacagagaagtagtgaccaaaagataatacttctttattcttgtaaccgatttttattatttatgtatatgataagatattgaaaaagatcataggggtttacgtcacacttggaggaggttttaacacgacatgaactagcagtcgcaaccgagaattaaattggcaaatagaaagagagtgaaattaatgtacaaacaaaataagtctaagaaaaactaagagaaaataatagtataactctcgaattaaggcccactcgatctcaacttaatttattcaatggacaccgactcacctcatatttcaattttatggactatatgtatgttagtttattgatcttgtaacaattagtttattgttcttgtgacaatgagctaatagtcttgactatgataacattaataaaattaacacgcaagttgcgtaaatataatggtttgtttttgttttgacgaaaaataaaacggtcacgcttatttatactaaacgaaaaatagttagatttaatcggttttgttttgcaatgacgaatacaaagtagttaaatattacgtcaatttacttgtattgtttttgtgaaagatctatgttacgtatggtttggttaggtctttgattcatttaattgttgtgagcgttttctttttctgtccatgacggaagcagcgccaccggatgggattcttttagcgcaatccacggctcttgtccttttatcataaccaataatattactctctagagttaatcattaaccaataatataactctagagttaatcattaaccaataatattaaagtagtgttgtaattcttatgattagtgttaattatttacgaattttttccttgatatataacatatgattaatattatgattggttgatgctcgttaacgtggaggaggatatagacagatcacacgctataatactaaccgttgactgtattttactaactagtaactactaatgacaaattttgaaaaattggacagcagaaataatactaattcaatagttttattgcttcgactcagaaccctctagttattaaaaagaaattttttattttcaagaatacaaaaactgtattcttgttagacaagaaacatctctttcttactctctagcctctattcatctagtacttgtttaacattgctatcttgtatgtgtgtaatgcagcttggagccgagttcgtgggaacattcatcttgat

SEQ ID NO: 68 - DNA, 809 bp, Arabidopsis thaliana
  Intron number 1 from transcript AT2G37450.2 (locus AT2G374 50) derived from phytozome v7.0 (chr-ID Chr2; pos 15723887 to 15724695 reverse strand)
gctccgttcgccttctacttcgacaagtattctctacatttccatctttatttcaatttctctcacaaaacataattcaatgtttggtttgcgagtagtttcaagaccatgatagcagattatcattcaggcctaattggtagttgcgtttgcagcattataaacgcaaacggaaaagtaaacgtggtttttacgtctaaaacaatcacagctctatagtttgatataaattgggaatcgagtctacttttattactaaatcttttattctacaaaacgaattattttcagatacataaattaaagataatacaatgttgagtcttttttgtttgtggatggttcttggacgtttaacatatatgttaaaaacaagaattgtaacagttttgccaatatcatgcattaaatctgagtacttaagattttagtgttttctttacaaaatacacgagttcaacatttaatacataaaccgataaaagtagttatgcaacagtaattactattgtagtccagtaataaattaggaaccagttgtgcagagtacgggatctacacaattttggatttcctaataattctcgatgaaaaaaaacaggatagtgagaccgaagatgacagcgttgattttcttcaaaatagcgattcttggtttattagagtaatttttttccttcttcaaattattttctatgagacatcacatctcttcttttattgactgaatctgatttattttccatttcgttcatgtattttgcgtataaatagtccagtgattgctcaaaacttattcaatctcggga

SEQ ID NO: 69 - DNA, 906 bp, Arabidopsis thaliana
  Intron number 2 from transcript AT1G56330.1 (locus AT1G563 30) derived from phytozome v7.0 (chr-ID Chr1; pos 21087162 to 21088067 reverse strand)
ccaaggttaaatctctctttctacattctccttttagtaatccttttggaagatgaatatcgaaaaagcgcggtgttttatcggattcatcgagctatatatttgttccttgttttaactccaagtattcttaaagtttagacttttaatgatttgttgttggcattgctgatagaagcttagatgggagtttctttattagatcataatcctattagaagatgcaaatcgaaaaccaatgcttgaatctttgtataaatgttcacttacccttataggattcatcgaactcttttcttttacttgaaggtgtttgtttagtagctaaaactaaaaccataacatttgttgtttgtttctgttgcaaatattcttaaattttagacctttaatgattgtagatggcacttgtcatgctaatagaagttttgatggaagtttctttttttccatcacaatctaattacgcatgaatttgcttcaagatgatgtttcaatggtacaaattaccaattttatgaagaaagttttagtaatttttaccttagttctagccagttagtggagttatgttttggacctatgaattatgttggggacgaacttcttggtaattttatttctctggtgacattagaatgtatctgatatgattgtaggcattgagccaatgtatatcgtaccagagttgtttatcgtattgacctagagtttatggtgttatcaaactggaatattttcatatcagtgatataaaatatggctatgagtagtgtagagcgaactagaagtatgtttgcgtggatctaattgttttgttagcatgttaggatctagtattgtctttaatcaaatgtattctctttgctgatagaaactctttttttttttgttgtataaaggttg

SEQ ID NO: 70 - DNA, 736 bp, Arabidopsis thaliana
  Intron number 2 from transcript AT1G32750.1 (locus AT1G327 50) derived from phytozome v7.0 (chr-ID Chr1; pos 11855510 to 11856245 reverse strand)
gcaagggttcccacaacgagacttcctcaggtatatatatgttgctttctttatcaaagtttgttgcttttcttttttccggtccagtccattgtcgacatgatttctgaaactggagatgcccctgtctagcttatgattgttctacggttttgaatatttcggattaagtctctttaagtagaaaaggaacagccttgagtgattctgagtattggtttgtaggatcttaattgacaaagagattggaaatattaggttgtggaattttggattactacagtttgtgaaactagagatgtccctgtctagctagtgtttggtgcatttaggctagctcatgaccgatttacggttttgaatattttggatttctttaagtagaaaaggagcagtcttgagtgatcctggacatgttctagggtatagttaagattattttttctaaatttctagagggaattgagtttgtaggatcttagatgacgaagagaatgggaatagtagtttcactagatggaggctactgtagcctgataagatgatggagaggaatccaatgattatgtgaccttggatttagcagtttaacaagagtgttaacatgcaatctttgtgatttctgaatactcgtgatgataatcagttatcacatgcattcccattttacaccaatattttacatgtctgccaagatttgtttggtgaacaccaatattttacatgtctgctgcag

SEQ ID NO: 71 - DNA, 493 bp, Arabidopsis thaliana
  Intron number 1 from transcript AT3G06210.1 (locus AT3G062 10) derived from phytozome v7.0 (chr-ID Chr3; pos 1880121 to 1880613)
atcggagcatccatttgcaggttttgtttcttcttgaaactacgcatataatacgttcaattagtagtgttcaacacattgttgatcacgtagatttgatcattgtatatatgatatgacatgcctcgataggtttgctctaatagtagtcgttctacttggaatgatgtttccatatgtaattggaagcaacttttcagcttaatttgaaatgtcgatattgaactctctataccttcaatccttcaataaatttcttataagtagtaactactttataataattttaaaaaattctgcaaatattaagattgttttataacaaatcttcattttatgtcatacaacagccaaacgtgtggttatgaaactaaattattatccatttatttgcataaaaagaaaagaaaacttcgaatataaaaactttctaaaattagtaataaattttcatttaggtgttggagctccaaaaattggaagaagcacgagg

SEQ ID NO: 72 - DNA, 813 bp, Arabidopsis thaliana
  Intron number 1 from transcript AT5G29000.1 (locus AT5G290 00) derived from phytozome v7.0 (chr-ID Chr5; pos 11024101 to 11024913 reverse strand)
aatcattcatcagggccctgtgttctctgagtcaagtaagattcttttcgacgattccatttactctttgattagggttttatcattctcaatcagggttttagtttaaacatcgaattaagcactggattagctgattttgtgtgatttgatttcaaagttcacagcttttagtttctctgatcctaatttatgatttgaagtttctatcaaaaggtttgatttttatgttgactttgtgatgatgttaaaccccatttagctttggatcctagaattgtctttaggattgtaaagttttagtttttattgaatttgattctgttcatggtagcttcttctttaacacgtctctttggtttcatcaaaagccatatttaactttgcctaagtggacataaatttcattctctgagtactgattccatatcctttatgtaatgtcctttcactatccacatgtagatgcttctccatgtagagtttgtgatctagagcaaaacaaaaacgttagaaatattcttgagagattgtttcttttgactagatagtaagggaattgattcaatggttcatctcctttgcataaagttatattctgtgtattagtgtctcatttctcgttgccattcaacactctgaattaggatactgtgtggtgttttgcaaaactgctcttgtgctatgactctggctaatgatttcggatattcgaccgctatgtcttcatcttattcagctcttcatactagtgtagaagacagataccacaagttgcctaactctttttgggtttcatcaggtcaggaactg

SEQ ID NO: 73 - DNA, 372 bp, Arabidopsis thaliana
  Intron number 7 from transcript AT1G04950.3 (locus AT1G049 50) derived from phytozome v7.0 (chr-ID Chr1; pos 1405223 to 1405594 reverse strand)
ttctacagaatcctcacatacacatagaaccttatgtaagttttctctggattatcttttgccactatctaaaaaattgtagaatcatgtagctccattttctttaggcttctgatttgggtttcttcaagttctatattagacatattctatataatgggtatcaaatggttagtggtagtgtttgtccgaggtctgcaagctcgagtgcttaagtactctcagtctgcttgaaataacaacaagttttgcctttgatctgtattgagattatgtaaaccagccttgggataatgagttggttgtttgagcaatgtttcataaccatgaagctgagtgaactttttcttttggtgccagctgcaccagttg

SEQ ID NO: 74 - DNA, 588 bp, Arabidopsis thaliana
  Intron number 1 from transcript AT4G16120.1 (locus AT4G161 20) derived from phytozome v7.0 (chr-ID Chr4; pos 9118012 to 9118599 reverse strand)
tcccaaagctactcaaaaaggtttaaatttgattttggtttacttgatttatggcttaataatcttttgactgatcttggtttgctatatttaggagttttggtatgttaaggatgaagtatctagtgtagatccctataattaaggaggaatttcagattagtagagatagtcaaatgctagcaacaattgcattgtttaagtcccatgtgctcactcgttgataaaagtcttatgtatgttacttgttagcttccttttacacctaatgtttgaattagtcaaatgtgagagtctttgcaacacattctttgtgattgatctggattcaatcataagagccttaagatcttctgcagaagtaatcgaatagctagtatatgagtcgatccactttcatcacatttctaaatatgaatctgttgataaaagaaatgacttgacaagatagagttaattctttctaattgatcttaggaatctatgttgtgttgtggcgtgtaaagcataagtaactttgaaggtttttacaggtggagtccgtgcttgcttattttctgtgttttttctctgttttgtcaggtacaa

SEQ ID NO: 75 - DNA, 5177 bp, Arabidopsis thaliana
  Intron number 1 from transcript AT3G52700.1 (locus AT3G527 00) derived from phytozome v7.0 (chr-ID Chr3; pos 19533200 to 19538376 reverse strand)
aaaaaaaaaaaaaaaatagatcgttcgtattttaacttaaaatttacaagacatcaatcctaattaatctacacataaatgattaattgtcttcgagctgaaatggacattataactatgtacattttgaatcaactttaaaaacaacatcttaatatatctctgattttttttgacgtaaatagattcaataaagatatagtagtatgagagaattttacaatgatagttttatattggaaaaaagaaacaagtgtactactatattaattgtttgaacttggaagattgaaggagggaaaaaaatctaaagatggatttgtttgtttccgcgttagttagaaataattgttacgaggaaaaaaaggagaagcagtgttaagacaaattaattgtcattgtctttcctgccaactccaaacaaacaataattttcgtaacaaaaataaatactaaaagtaagacgtatagcattattagtatatattatcaaaattgatggacctctctttttgcagcaaagataaaaatatctcccgagtagaatactatatatctatatctatatatacatttttgcagccattttaataaataaatcttggacttggacttatttacgactcaatgccactgaatttatgcagaaattttaaatcaaatatttacctaacaaaaatattgcctaaaatctctctatattaactccaccattatttcaaacgaaatcattcctaaaatttctcttaagtatttattaatttttggttttaatttgctgtaaaaaaaatcgatttcaataatacaaaatcttttaaggtaggattttctttccatatttatttaatatttcattttttacagcatttaatatttcgtttataaataacaaatgaattatttaacattcaagagaatttcttctaatctatcctttaattatattgacattactgatttttaaatatatatatgaatagagattcaaatcttctatatgtgtttatcatcttctaaggaagttaaacaattgttttctgagtctaaactaaaatttaagaaacaaaataaataaataaaatccttttaattattttttacgctaaactatattacactatgatttttagttttgaatcattcattttcagtgtaatataaaaatctatctcatattttccgtgttataaaaataatcaatctcatattttcagttagtaaaatgtacatgtattaagataatattattgtttcaaataatgttacaaaactacccaatttaggctattaaatgacgtgaaatacaggtagtccaaaaactcaagtacatatcaattacaaattatgattaaactaaatagttatttataacattatctgcatttaaaatattgaattacattttgtagacttattttgttttagtaagaattacaaaaaatgtcattacataaaaggcaaaaaagtattaatttttgaaatatattattgaaatattttaactttataaacattaataatatttaaacttataaaaagtaatatttcatgaaagttatatggtgggacgggtttggatcgatattaatacatatttataatatcatcaactaaaagtaataacacggtttaaatcttattttaatattttatcagcattagtttttttattgtacttatataaaattattaactttaatacaaaaaagatcgtaaaagctaacattattgcctatactaataaaaacaatttgcccgtcgtaccacatattaaattcaaaaaatacaaaataataggttatataataatgttaatcaattaagtatattacattttgattttttctaaaaattatagccccgcggtgtactgcgggttaaaatctagtatatatatattatactattctttacctaatactcacaatattgttttatagtcttccaaaacatgtatgtattagttacaagtactattaacacatgacaagcttcttcaggaaatgaacaaaaacttacaagtctgaattctcataaggtttttacgaggccccattatggaggtcccaacaataaagagacttcataacaaaatgccaattcaaagaaatgactagttgttcccattcgtttatgttataataaaaccaaagatggctatgaatgacctgtcgtttcttgaaaatgaaataactactcaatatacaaatgaaattacatataatatgacaaatgacactagcaaatagcgatcacttttacataactcgccacttcaagtcaaagaaagaatttaaagtattcatggctccaactattcactttcattgttttagactttagtttttgagaattctagcactaataaaacagtctttgtcaaaatttaaatggtgacaacaaaatcaacaatatggaacattggctcaggtgtctaacacattattgactgatcatcacaagtatcttttacattctactattcctttctaagcaaaaaaaaaacacatgtacacaaagaaataacaatacctatgtacaacccaaaacaaggaaaataataaaaaggacaaaaagcgaaactaattcaaatatcaaaagtcttaaaaagaagaaaaaacgcaccaaaagctatataataaaacggtgaaagtggttgagacgtaagaaatcaatccaaaagcgtccgcgtttttctatctgtgccgtgttcctaactccgttaaaccactcgccatgtcatcacaacgacttttcaaatatacacacgcttctgggccccatatagccaactaaccaatcacgatccttgttttttctcgggactggaccccaccactcacagtaaaacgccgtacgtcacgccacgtcaaacttcaaccaacaaatccggtcttctccctgaagtaaaccgagtcatcccacctaaaccaggcagaaccggttcaccgccgtcaattgatctcctcgaaccggtactattcctctgcggcgaggatttcccgacgtctcccggcggaagccgtcctctaatatccgtcgatcttctcaccgaaactctcggcggagagactacgacatccctccgaggcgcgtgagctccactcgcagataagtctttgcaaccgccaccggttctgaaaatagctctgaagctagcgaaaaaaccaggcttcttaaccggaaccggtttatccttaaacgaattggttcgaccggatttttgtctctgcattcgtcggctacgatcacgtttagatctaacccttccgatacaagaaaccttgggagaacatggctccgataacgtaggatccgatttcaatctcgacccgatccgtttcggaatcatcaaagtcctcgcgattctgcaatttctccgtttcttcgcttcgttgaaacacgtcttctgcggtttcggtaatctgatgatcgacgcttttgatttgagtgagattcgatgagagctcgaattagggtttgtattgggattcgaaattggagcagaagagtttcctttttgtgattctttgcgttcgaagaaggcgttgtcgtttagccattcgagctgagcttcttttgataaagagtaagattccggtggaaaatcgacggcggagatggatacgggtcggatcttcgagttatgaggtgagtcttcgttatcgtcggccagagtttcacatgagattttccggtcagacccaccggtacatgctgaagcaacgacttgaggcatttaaatcaaaacaaaagacgatagagagagataagttttgatcgaagtgatttaaggagaagagaagataaatatacgaaatcggatatttatatttgctgattttatttagttttgtttatttaattcatatttcagttgacttttgttctttaaacccggagagttttattgtaactaaaatattaattactacaagtagaatttataagctaaaaattaaatttatgtgattattgattcaccgtcatattcaaaaacaagctgataagaatttgaagctttcactcttgtgaactcgttgagcatctcaagcttctctttggactcaatgggatttgtcgagaaagttgccttcttcaagagtcttgcgttgtttagaatgtatgttgtttagaatgcgttgctcaaaagatttctttatggcctgaaacaatcgcctagacagtggaacattaggtttgatgagtttatgaaaggaattggttttgtgggaagttcttatgatagttgtgtttatctgaagaagttcgatgatggcacctatgtttatcttctgttatatgttgatgatatgctcatagcttcagtgaataagaagcatattcaggaactgaagaatttgctgagtagtgagtttgaaatgaaagatttaggagatgctagaaagatcttaggtatggaaattacacgagatcgtgctgctgggtgttattatacgttctaaataggaaacagctgcagtttcacataactcgatcttctcttttatatccaatacaaatatattttgtatatatatttaatgcattaattattataatagttattttttccaatttcaaaaataaattaaaagaataaatatttttaagatgtgaactattcataatattactagttagttttttaagaatttaatttttttaattactaaatatttttaatcaatagttagttttttctattatcaataaaaaatattaacttttaatttgattttatatttattaaaaattttcattttgaatttaaaaattaccgtgcaaaatttagactaaaaagttatatactcaattgtttttcatattactttcttatgaaacttatatatgtgtattaggtttaattgtaatgatttaatttttaatgaaaataaggagttaatatttttaattgataatacagaaaattattttacttaattgtttctaataagatttttctggttttaatttaaatttttatatcttaaattttttaattttttttacattcttaattgagttttgaaattgaaaaagctaactattataagaatcaatgtattaaatatatttaaagttaatataaaatttgttttttgattatacaacacaatgcaatccatatacatcaggtagctgaatgtcctttattttaggtggcatgtgtgacc

SEQ ID NO: 76 - DNA, 1194 bp, Arabidopsis thaliana
  Intron number 1 from transcript AT3G06180.1 (locus AT3G061 80) derived from phytozome v7.0 (chr-ID Chr3; pos 1872350 to 1873543)
ggttggggtcctaaacgaggccggcgtcataaaaagtaagtcaaaccctttccttctcaatccattttcatttggttgttcaattttgcctgaaatgaacttgcttttagccaattctcttgactctttagataccattagccatgaatgtgtaattatggattggtagctttggttctttcttttgattgatgacagtgtgattacttctctatgagtcattgtttgtgatgaatgaattgtgagtttctgggtaaaagagttgtctttttatattggtcatggttgtgttgatcagatctgctgcaagtttgaatctttaagtgtgaaatgatagggaatcagaggatatgatgtttggtgttgtaatgttcattcggtgttctgcatcttatgttagcggtattactggagttttcagttgtagtagattcgaatttaagggaaatagtactggcaagtcagatgtgaagaaatgtgggaatttagttaatagagtatgattcttctgccttagattgttctaattagaattcaggttccttttaagatcgaaactgtagtgaaggcattgccttgtctcatattgtttgaaatggtggtttcactgtattaaaacctaagaatacagttagcagcctctgtctagttgataaccaacctcttttcgtcgagaatctacatttcatgtatataactttgagattccactttcatatactggaacttggaccttgttttcaatggtcatttctggctcccttgacttcaaccttgagtattattatacagcctagcaccaacaatatctaaaaattggagatttactcgataacaatacatgcttttataaagcacaatacatggtgttgtcaacaaccttgagtagatgaatgccttctttttattgctttgtgtgtaacttgtaatattatctactcatctactgactaaggtcgttggttggttactctcagtagattttgtgatttgttttgtcatatgtgttcttatcagacttgttctctttctttgtttgactcacatctctctttcaatccataatcaaatcaaagtatttttggttgacattgtgttctgaagtcattttgttcttctctttgcatactgattcagtttacgccgttatcttctgcagatcgcaagcgaacttggctctgaagggaggggtcg

SEQ ID NO: 77 - DNA, 7454 bp, Arabidopsis thaliana
  Intron number 1 from transcript AT1G58602.2 (locus AT1G586 02) derived from phytozome v7.0 (chr-ID Chr1; pos 21746465 to 21753918)
cgagtggagtccttggcgcgatcaagattcaaaaggttagtcatttttattattttttatttatttatttttatttattaattttattcttagcaaatgtttttgtttcctatgaagaatatttaaatttatctcttaaactattgagtattgactataaaaacttttcaatatatttctaaaatcttgtaaaatgaacagcattcctaataagagtattataattgaaaatgaacagcaactagaggcattttcgaaacgaggtaacgtaaaaagagtatttctaatatattaacataagtaggtctttaacatgcttagggatagccgttcaagttcggattgggtatttcagatttttgggtttttggatttagaagtatataacatgttcgggtatttgtaaattttggattttgatcgggcttgggttggaatttaagggttcagattcggattatccgaagttcccaaaaatcaatttttttacaacaaaatctattcaaactactcgaaaatacacataaatatctgaaattcttgaacattttttattcaaaatactcaaaagtagattaaataccaaaaatattttaaatatcttaaaatccgtatactggatttgattattagattactacaaatataaataataattatacattattacaatatatttaaattgtggatatgttcaatacctgttcggataccggtttggatccgctttgaattcgaatttttgggtttagaaatattgaaccagttcgggtaatttgaaattttggattcgtatttggatcggtttttttggaccggattcggattggatgctcggattcggatattatgcctaagtcctaaacatgctcctttatgttatctctctcgaaaacaaaagagacaaccctaacatactaagatctgcctctccagttcacgaccctccttgccgtgactggagaggactcccctctatttttctctcgccgatctactttctagtcaggacctctgtgcaagatttcgaagaaaaaaaacatcatcaatcacaaatcctctgcttaagcattcctcgctggtggtggtggcgagaattctcttcgaagaggttcctttcccgacgctctaagcttcatcctctttgaggcggtacactacttgagggcggttgtcctagccctctctgaatcctacgtggatctcattctttggattcacagttgggtggtggttgttcttctaaaaagaactgcagtgtggtgaggtcgtatgactctagacggttagtaacggtggtggagctccttctgttgatcatgcggttatttccctgaaaagaagaagttgctccgaggacggcaacacggtctctcaaaggagcgttctgtcaaaattttgggtgaggcaagacaagatcccttcgtattggtcacgacagagacgccattttgatggtgtgagtttgttggttcctgttaagtttttcggcgtgggaaggttggagtctaatagtgtgattagcttctccgttagtgttatggcaaaggttttctcagggtggtgtgtttctacgttttcagcagtcactcggttctctctaagtagggagtcggcggatctaagcccaaatcccacaagtgcgcacgccagatataaccagtgtttgtaggcagcgttaggagtgacgatcgcgttaacgatgaccgtttcagcaggtagaggtgtctatcaacacaatacaggtaagagcagaggctttctctggcaaacgacaatacgttgtcgtttcggctaatggagcaaagaggaaaatgaaacagatgggcctcgcacaaaccaagcccaagaagcagaggcaacggtcatctgtttcaagtaaacagagtctagaatcttcctcaagtaatgacaaaagtggagctggcaataaggagacaacgacctcttgtacggcaaagcagttcaacgtaaagctcgagaatcgtttctcaacccttgattcagaagactcaacttgatgtatgacatctgtccaatgtctctagggttttagctaagtctccacctttgtatttaagtattctcaaactcaagttgtaagctttaagcaaactatcaatgaaaacctaaaaagattgattttgtcttcatggtatcagagctcatggagaatagatccatggaactctactcactcccttctctaaacatctcaaattgtgtcaccgttactctcacttcaaagaactacatcctctggaaatctcagtttgaatcgtttcttgacggccaagggcttctagggtttgtcattggctccatccctgctccgaacacaacaagtgtggtctccgacatcgatggttctacctcctcttctccaaaccaagaatacttcacatggttcaaaacagacagtgtagtgaagtcctggctgcttggttctttctcagaagactttctcagcgtcgccgtcgactgtaaaacgtctcatgaggtatggctctctgttgctagacactgtaataagatctcttcctctaggttgtttgagcttcagagacgtcttcagaatattagtaaaaaggataagtctatggatgtctatcttaaggatctcaaacaaatctgtgaacaactagcatccgtaggaagttctgtaacagagaaaatgaagatctttgctgccttaaatgggttaggccgtgagtatgaaccaatcaaaaccactattgagaactccattgatactcaacccggtccaacccttgaagatgttattcccaagctcactggctatgacgacagactgcaaggttatcttgaggaaacatctatctctccacatgttgcgttcaacatcacaacctccagcaactctccttcctctgattactatcacaactcttacaaccgaggcagagggagatccaacaaaggcagaggtgctttcagcactcgtggcagaggattccaccagcaaatctcttcatcagttagttctggcaactctcagtcaggtagcaatagtattattgtctgtcagatctgtggaaagatgggtcatccagctctgaaatgttggcatcgcttcaacaacagctatcagcatgaggatcttccacttgccttagctgcaatgagaatcacagatgttacagatcagaatggtaatgaatggctccctgattcagctgctactgctcatgtcacaaatagcccgtgttctctgcaacagtctcagccttatcacggttcagatgcagtgatggtagctgacggtaactttcttcccatcactcacactggttccacaaatttggcttctccatcaggtattgtacctttaactgatgtgcttgtttgtcccagtgtaacgaaatctttgttgtctgtgtcaaaactcactagagactacccatgtactgttgagtttgactttgatagtgtgagtatcaatgataaggaaaccaagaagcttctcataatgggaagcacacgtgatggtctttactgtctggagagtgataataagttcaaggcgttttactctactcggcagaactcagcaagtgatgcagtctggcataggcgtcttggacacccccatcaacaagttctccagcagctagtcaagactaaatccatctctatcaacaagactacaaagtttctctgtgaagcttgtcagcttggaaaaagctcaagacttccctttatttcttcctcttttactgcaaacagacctttagagagggttcattgtgatttgtggggaccctctcctgttatctctgtacaaggtttaagatattatgcagttttcattgatcattactctcgtttcagttggatatatcctttaaagttgaaatcagatttctactcaacctttattgcctttcacaagcttgttgaaaatcaacttggtcaaaagattacagtttttcagtgtgatgggggggggggggagagtttataagtcaaaagttcttacaacatctccaagatcatgggattcaacaacatatctcatgccctcatactcctcagcagaatgggttagcagaaagaaaacacagacatttggttgagttgggattatctatgctgtttcagagtaaagtgccattaaggttttgggttgaatccttctttactgcgaattttctgattaatctccttcccacataaatattggagggatcagtttcaccttatgagaagctttacaagaaggtacctgattatacagctctaagatcttttggatgtgcctgttttcctactcttcgagattatactgagaataagtttgatcctagatcacttaaatgtgtgtttcttggatataatgaaaagtataaaggttacaggtgcttatatccaccaacagggagagtttacattagcagacatgttgtttttgatgaaaatgtttatcccttttcctcaacctatcaagatcatcacccgcagcaaatgactcctcttcttacagcttggctgcaaagctttcaggcacctcctcaggttcaacgttctgcttctccttcaccattgttcacaaatcatgattttcctccattgtctcaaagaagacagctatcaagttctcctcaacaagtcaatcctacatcggttatcagcagctctcaacaacctcaagatgaatcacttgctgatgtaaatgggagttctgagcgtacgacagactctgattctgcttctattggcgacagctctcaattatcttcagcaagtggtgcttcttcggtctctgctcctccagttcaggtaccagacaacaatactcatccaatggttacaagggccaaagcaggaatctccaaacccaattcgagatatgcttttctctcccacaaagtctcttatccagaacctgcaacagtgaaagaagctttaaaatatccaggctggaatggagccatgaaagaagagattggaaattgctcagaaacaaatacttggtctctcattccctacactcctaatatgaatgtgtgagggagcaaatgggtttttaggacaaaattgaatgttgatggtacactaaacaaattgaaagctcacatagtggcaaaaggctttcttcaagaagagggaattgactatcttgaaacctatagtcctgtggtccgcactccaacagtcaggttagttcttcatctcgccactgctttgaattgggaactcaaacagaggacgtcaaaaacgccttcttacatggtgatctaaaggaaactgtgtacatggctcaacctgctggttttgtggatcctcttaaacctgatcatgtttgtctgcttcacaaagctctctatggactgaagcaagctccaagagcatggtttgacaaattcagtaattttcttatggaatttggctttatctgcagcaagtctgatccatctctctttgtctatgctcacaacaacaacctcattctcttgttgctttatgttgatgacatggtgattactggtaacagctctcagaccttaacaagacttctctcaacattgaacaaagaattttgaatgactgatatggggcagcttcattattttctgggtatacaagtccaacaacatcaacacggcttgttcatgtctcagcagaagtatgcagaggatcttctggttgcagcttcgatggcagactgcactcccttgcccacacctctcccggttcaacttgacagaatatcgaatcaagaagagttgttctctgatcccacttacttcaggaacatcgcaggcaagcttcaatatctcactctgacgagacctgacatacagtttgctgtcaacttcgtgtgccaaaagatgcaccagccaaccatgtatgatttcaatctcctgaagcgtattctaagatacatcaaaggtacaataacgatgggagtttcttacactcgtgaatcaccaactgtgttgcacacttacagtgacagtgatgctgatgaacactcacaaacggatctcctaacctatagcgacagtgattggggtaattgcaaggttacaagaagatcagtgggtggactttgtgcctttatgggaacaaacttgatatcttggtcctcaaagaagcaaccaactgtgtcaagaagctccactgaagctgaatacaggtccttaactgatgcggcttcagaaattttgtggctcagttcagttttccgggagcttggcattccacttccaaacactcctgagctatactgtgacaacctttctgttgtctatcttactgcaaaccctgcctttcacgcgagaacaaacactttgatatcgactatcattttgtcaaagaaagagtcgctctcaaagctcttgtggtgaagcacattcccggtcatgacaacattgctgatatcttcactaagtctctgctgtatgaagccttctctcgcctaaggagcaaactcggtgtatctcttccacctacaccaagtttgagggggagtatcaacacaatacaggtaagagcagaggctttctctggcaaacgacaatacgttgtcgtttcggctaatggagcaaagaggaaaatgaaacagatgggcctcgcacaaaccaagcccaagaagcagaagtggaggcaacggtcatctgtttcaagtaaacagagtctagaatcttcctcaagtaatgacaaaagtggagctggcaataaggagacaacgacctcttgtacggcaaagcagttcaacgtaaagctcgagaatcgtttctcaacccttgattcagaagactcaacttgatgtatgacatctgtccaatgtctctagggttttagctaagtctccacctttgtatttaagtattctcaaactcaagttgtaagctttaagcaaactatcaatgaaaacctaaaaggattgattttgtcttcagtgttgagccatcaagataaccggccaagtaatacccatctaacaaggcatatatgaacttgtcgtttccacatcaagaagttggtacttgtgagttttgtcacatttgacatgttgacattgagaagtgatgatgcgttggagacagcaattgcatatagaacttaaccgtaaccctctacgcttcggtttgattctttggttatggttttcattcccaagtttaataagtatataatcaaatattttttggtaatttaatgtatagatacaaaattttgttgaaaatgagtttttccgagacatcgcgggtttatcctaataacaacaataataatagtaaactcttcgtattatattttcttgatgtatataatactttgtggtttgtttcaacactagattagtccaaaattatgtaaacaatgtcaatactctgtttctccttatagaaactttctttttttactgtttgtatattttgttgtccacagaaattcggggactactactactcaagactaaataa

SEQ ID NO: 78 - DNA, 1319 bp, Arabidopsis thaliana
  Intron number 3 from transcript AT3G10600.1 (locus AT3G106 00) derived from phytozome v7.0 (chr-ID Chr3; pos 3315325 to 3316643)
gacatctactccagtcaacgcttccgcttttcttggtaactttttgtccttactctcaaacatatttattttcattctattaaaattaacatctttgatcaaatataataagttaaatattatttatttttaaggttatgttggaattttcctttcgtaaagatcggttttatgttttttctctgttttattttcatcaagtgataaagagacagtttgatagtggggacatccattttgggtttttgtttgtttgtttgtttccatgatctttttggatttcattgtattgttgatcttacttttcacgtgattttacatacatatactcgtagggaaggagaaatcaagaaaattgaattttgttgtttactatttaaaacataaaatttctccaactgatcttgtttgggattgtggtttgtagctgtgtgactgtgtgatctatattaatgtaggccatagtcttttgttcttatatgatttttggtgttgggtcttaatttagagcatcgtatacgataaaaatctcgtggtcgtgttcaccaaatggcttcaatcttttcaacggttttgtttgggacatattgttgagtctctttggtccttttttgttttttagtttatgtattcaagcattttctctttttcaagctctcaaatttccaactctttatatgcaacgtttacgtataacatcttagttaagatattggtgagtaagattttggaatcgttttttatactatagttttaccaaaatgcatgagtcgtggaagcgaatctagacccacagttttgttttcaattgcatattccttcttataagcattggtttcttatatatttattccaaatttaaagtgctgttctaaaagttttggatactatattctgtaaaccaaaaactaaaaaaataaataaataaaagaatttgtacacatactctaagcctcaaataaaacaactgtagtttaccaaattttgcatccactaatgtaactagactttgatttataatatttttgaacaaagaccaagagagatcttgaacgtggaacaaaagctcaaaatctttcacaaaaaggtgtcttattccacaagtgaactaatggaacagattcttgcaatatcttcattttatttatataatcgacctttaaacatcttggaatatatctacgttattagacactaatctgattgattaaattaactaaagaataaggatcttgtcatatccctctgcttaactctttaatcttgtctatactttttgttcaggaatcttcacggcggttctcgccctcttcaccgac

SEQ ID NO: 79 - DNA, 261 bp, Arabidopsis thaliana
  Intron number 10 from transcript AT1G17960.1 (locus AT1G17 960) derived from phytozome v7.0 (chr-ID Chr1; pos 6181291 to 6181551 reverse strand)
aaagtgacagaagcctccgtaaaaaggtaaattcttatgattacaagctttccaaatgtttaggtctttgagcatattatacaagtgagattatttaaggccataaatttttatctcgtaaaggctagttgtctaaatttcattataaaataaagtcgttttttcttggtagatatgaatgtatatatagaaattgcaaagaaaatgcatagttatatgtgttcacgagtgtgatgattttgttgtgtttgtaggtggcag

SEQ ID NO: 80 - DNA, 1844 bp, Arabidopsis thaliana
  Intron number 1 from transcript AT4G22950.1 (locus AT4G229 50) derived from phytozome v7.0 (chr-ID Chr4; pos 12025412 to 12027255 reverse strand)
agttctctagctctaggtatgtcccttttttgtttatttacttgtgaaaaaacgatttgcactgatcaatttttggatccgattcgactagaggggctaatcgggtccaattttcaccgtaataagtagattcattggattttttggttatatgattatcaagatctgataagagagttatataatggtgattttgttttcatataaaagtagatcggagtaagaaattagactacttttataggactgacactaatgatactttttgtagttgtagtcatcagatttttatggcactacaacctatgaaacgtgtgtgtatatcaagtatatgtatacttgttatgagccatccatttttcgctgtagatgagttgatctttctgactttctctatttactgagatattttgaaatgcaaacaacttttattttgagatacttgatgtttatccgtttgtaagaaagatgagtttgacaccagtgctactgctaggctatgtgtatgtaacaatatctatgacttaattttgagtatataaagtgtccttatattgttcaaattaggactgtacatactatcaacatgtttataaatttagaaaatagtcattttcaggattaacaataaatttccttatttggatatatatgtccacatgtatctcgccctgctgtaatacaaatgcatatacagtgtgtgtgtcagtagaaatatatcatatatgatgatgacagatatatctacataatgctagggatgagacgaagcattgtagtaaataatgctagttttgatcatggtttgcattatacatatcaataaatatatttgcacatgtttaaatcagacatgatgagttcatgatataacacattctcattcatgcgagtttacaaaattacagatgcttcttttgtatatgtgtatgtggatgtatatatatgggaaactttatatgtatgcatgaatatgtaaaatttagcaacaaattaagaggtactattttgcttaattttaacacacaccgtgatttaattgagcattaactgtagagaagtcatcgcatgtgtgtagatcagaattattttaattctttctacgttttctcttattttattctttgggatataatttatgctgaataaatatagatttgattataaaggattaagcacttaacaattaactatgaaatgtcttttgagcaaactcaagagaggttaatcacaattaactaggtattcttaaccacataatccttgttgttatcgcactgcttaatgatactctaaaggtttagcttattaatttcaatatttcgatttgagcgtgtccatgtgcatctatatatacttgtctctttatatgtatattggcgtagccatgtaaaatattgatgcatgatttgaatcataaatcttaaatacaatatatttgatattttctgcattttgaagtaaagaggaacactcttttgttttcatataacctattattttgtttagaaaataaacatgtatatattatatatggtcctcgaaacatgagatcatatcctaacttttgggaacaatgcaactaagccatatctgcatgattctctgtgattctcttcgttcacagttcagtttcaatatttaacggtcataaatcatgatgatatatattctaaatgtcaataaataaatggaatttatttatttagtcacataagtatatacttttcacacatatatgcatatatagcttcaattggttttgactccacattttcgtttcttttattttcatttgattcatttcagtatagcagcaacaattgaacgctatcagagacgaa

SEQ ID NO: 81 - DNA, 213 bp, Arabidopsis thaliana
  Intron number 5 from transcript AT1G61210.1 (locus AT1G612 10) derived from phytozome v7.0 (chr-ID Chr1; pos 22566043 to 22566255)
agacttccacccgcttgagttcctcctagccacaggttagtctgtgattctttgtttttcaggcattataggggtaacttggtgtcgttttcgattggtagattaactactgacatttccttaatcacagttttatattgaattcttgtgatttcacactctccctattcatattcaggttctgctgacaggactgtaaagttctgggatttg

SEQ ID NO: 82 - DNA, 540 bp, Arabidopsis thaliana
  Intron number 1 from transcript AT3G29130.1 (locus AT3G291 30) derived from phytozome v7.0 (chr-ID Chr3; pos 11103301 to 11103840 reverse strand)
agtccgacattaccgaatcaagtctcatccacaaggtctgctgattctgtaattttaacgttttctaattcgtttgatctgtactcaatattaccatttgcctctttgtgatcttgattcagttgtttcaaattacgtttgctttagatctcttgaagaaattctcgaaaaggtgatttcgttttggtagttgaggattttgaatctctaactctaatgctttctgggtaatgtagaatgttcaattttaggttgatatgtatgagaaagttcgagtctttgagtacgaggtttttttatgttagttctgtctgatttaagacattactttcgcttttatgttctttgtcatatattttgaatctctgactctaatgctttctggctaatgtggaatgttcaagtttaggttgatatgtatgagaaagttcgagtctttgagtacgagttttggttctgtctgatttaagacattactttggctgttatgttctttgtcatttaggttgaagaaccccattagagcaggttcataagaag

SEQ ID NO: 83 - DNA, 406 bp, Arabidopsis thaliana
  Intron number 1 from transcript AT1G15320.2 (locus AT1G153 20) derived from phytozome v7.0 (chr-ID Chr1; pos 5273612 to 5274017 reverse strand)
gaagttgcgcgactgtgagtatctttctttcgtctttcattttcttcgctgcattactctgcctcaatgagcttgatcgttcgagatttggtcgacttctgtttggagattctgtgtgttctatgattcgatatcttggatttagagttttcttttccatttattataaggagaacttcggattaatccttcctcagttacgcttgattagtagttcggtttctttctgagattgcggatgtgaattgatgcaaaacattacctctttttgatgattttcataatggatagggatgcattttaggatttgagtgtgcaatgagattacaagagttggttcttgtgaaaatcagcttagttttcttatggttaattgggtttgtcttcctgcaacgtagtgaagaga

SEQ ID NO: 84 - DNA, 167 bp, Arabidopsis thaliana
  Intron number 14 from transcript AT5G06580.1 (locus AT5G06 580) derived from phytozome v7.0 (chr-ID Chr5; pos 2012434 to 2012600 reverse strand)
attacagtatgttgctttccttcgatacactttggttgtagatgaactttccaactacaatcagaaacctcaaatatatgccatagatctttttgttgtttacttttttgatttaaaattttaaggtcgaacatcaaagaatcatctgtaaatatttcttctacagg

SEQ ID NO: 85 - DNA, 652 bp, Arabidopsis thaliana
  Intron number 1 from transcript AT5G58730.1 (locus AT5G587 30) derived from phytozome v7.0 (chr-ID Chr5; pos 23723794 to 23724445 reverse strand)
cttcaggtttgttttttggtctcgtattagcttactgaattgcatgctgtgagagatttgcaaatctaatagacagtagtaagaacttttagagccgatgatagtgatatgcaaatgtctttaacataatcctagcaaaagaactctgttacatcttgcagcttactttcaatacagccaaacctatatcttgcgggtgaactagaatctgtatttgatgttgataggtttccaatctgaaaatgtgtcaaatcttcacagttgttgtttgagattctgtcgagtcacagctgctgagagagtcttttcttgttttacttcattgttaatctaggagcagtttcattcaacatagggtagatgcaggaaaaagtgttgtttaagcattcaccgaacaatgtggttaagcaattagagaattcaaaagtatggatctcttgatgtatttgcgagtgtttctgtgtatctcttgtagttgtatctgttgaaatgagggcgttattggataataattgaaccattggctagtgcaagtgaacattaagcaaattagaagatttatagcgtttgtgtttgcactgcacaaggattcatccctttcatcggttatttctatgtgacatatgtctttgtgatttgcagaaagtcaagg

SEQ ID NO: 86 - DNA, 2758 bp, Arabidopsis thaliana
  Intron number 4 from transcript AT2G19360.1 (locus AT2G193 60) derived from phytozome v7.0 (chr-ID Chr2; pos 8379682 to 8382439)
tcggctggaagttataggccctgtttgtttgatcatttggaatttgcatccaaatgatccatccaaataacccatttgaatgattcatcttaatgatgtttgtttgatcatctgctaattcatctaaatgcatcatttagatggagctttgtttgtttgatcatttggatgaatcattcactttctcatatatatataaatgactaaaataccctctgttaagtaacaagtcaattgctacattcttatattaatcaaagtaaagtttgaaaaagagagtttggttttgtgcttcaaatcttgtcgtcgttgatcatttcccatttcaaacttcaatttcagattactaaacctgtaaagaagagcaataacctgaatcatcaccaattctccaataagagcaaacatgcatattggctagtacttacctaacgattcaaccatgacacattctcaaaagtgattcaatcatgacacaaactagaatcagaaaccaaagtatggtcttatgcatattaccaaaccacaacactaaagcaaacaacatcaagagacactagaattgcagctgctcaagaatacaacaactagattgagagagagactattcaacaatgagctaaaaccagaaacatagtccattcagctgtcattatgtcaagctattcaattgaatcaagtctaatccaaactaatgaacactatgttcaacgaattacttgtcagctgtcactactagtcacaaaatttaaaacgtgtgtaatcaaccaacttatgtagtgacgtgaccattcagctgtcactattagtcacaaaatttaaaaccaagacagaaacagacaatagcataagacagagacagtcaatagcataagacagagagatggaacctgttaatatgggagtcttgttcctttggccatctctgtagtgatggaatctcgtatattctccattactctgtcaccagtaggcacatatggaacatgcccatcatcagacattcttatgctcccatttggatagtaaccaagaccggttctgttgtgagtcagcttcttaaaaccttcatactgcttcttacaagtagtaaacttgatcccaaattttctccatgtatgtctttccccataaacctcataaaatctatctataatagtctgtctcccagcatcattgacattctgattcctaatatttcctttaagcttctcctcaattcttagttcaaggtagaaacgagtttgctcatcattccacgcaagattcttagttgatcatgtgtttttgtacaaaatcagtctaaattacagaaaatattacagtaaatctaagtttagaggagaatatactcacatcggtaccattgatagttgtcatctgtagcacacaatgaaaacaaacgttttgtagttgtgtttgaacaagatcaaagataccaaacaaataaaacaaagatcagagataacaaagcaaacaatacacaacttatgataacaaagcaaagcaaataaaacgtgtacaaagatcagagataacaaagcaaagcaaagaaaaactatttgatattgaacaatcatgagatattattcttgactatttctacagtatttgaactcaaaccttagacgaactcatgctactactacagaaagccaaatgcaaccactaattaatactatttaatatcgaaagcaatatatttacagaggacgtactcgagaaaccaaagctttcttacttggagacaaaacttgctgaaacaaggactgaagagaaaaaatcttttataagatgaaattctcccttataaataagcagttataagctataaacacaaaaacaattccactttggatgcaattgaacacgtcaaggaggcagctgaggtttgtaactatggatggtcaatctaaagagggctaaagtgcagatgctaaagtggcagcaccaaatggttatgttgctcctaatgtagagacaacaaagcctcttaagagcaaatcgaagactcaaaagcaacacaaagcaagcaaagcaacacaaagcaatataaggaacacaagccgtaaactaaagctaatcgaagaatcaaaagcaacacaaagcaaagtaaagcaaacccacaattaaacaatgtaaccatggtggatcaaacccaagaacaagtgattgcaacaaggatacaaagagaaacaacgtgagagacatggagcgagagagaggaagcgagagagagagagagagagagagagagagagagagagagagagagagagagagagagagagagagagagagagagagagagagagagagagagagagagagagagagagagagagagagagagagagagagagagagagagagagagagagagagagagagagagagagagaaacacaaacctgctacactggcgaagaatcggcgacggcgatttgtgaagaatcggcgacggcgagatcaccggcgaagaatcagcatcattgacggctatgaatctcaattttgagtgttttgtgtcgaggagagggtgaagaagagatgtgattttgggtgtaattccatatattagattagggtattatttttgttataattttggctgaatcagcttcagcagaatgaacaaatcaaactcagtcagattttttttattttttggatgaatttagaaaaaagcattcaactgaatcattcgaatgatctattaaaacatgaaaaacaaacaacaattttcatcttcattgag

SEQ ID NO: 87 - DNA, 1738 bp, Arabidopsis thaliana
  Intron number 1 from transcript AT4G39180.1 (locus AT4G391 80) derived from phytozome v7.0 (chr-ID Chr4; pos 18246674 to 18248411 reverse strand)
atcaccagcgagaaccaaggtttgtgctttcctaattttctttttctgtaataaagattttttcttatgtttatttttttatttttatttttttgtgttttgatactaaatctacataaagaaaaatgtatataaaaactaaccggattttggatccagattcggtcgttagagattccaaatattcaacttgtttccatatcatttttatatagatttggtatcgaaattttttattcggatttttaaaagtttttttggattttttcttttattttgtttgatactaaatttacaaaaaattatatgaaactaaccggattttggatccagcttcggtcgttagtgatccaaatatttaacttgttttcatatcatccttatatagatttggtatcaaagttttttattcggatttttaaaagttttttggtttttttattttttattttgtttgatactaaatttacaaaaagatatatgaaactaaccggattttggatccagcttcggttgttagcgattccaaacattcaacttgttttcaaatcatctttatgtagattttagtaaccaagttttttattcagaatttttaaagtttttttaatttttttcttttattttgtttgatactaaatttatataaagataacaccatttatatgtgtatactaaatttatatataaatatataaacatactaaatttataagatgttttataacacttactgcgttgtgatcttcaaataatcattttggaagaatattgatcggttactaatacaaatgctccatgataatttatgttcaccagattatataaaagaaaagtatccatgatgatatgttcaccataatacaaatgctctttagtttttcgaaaaccttacaacacaaaaaaactaattttggaagtatattgatggtgattggtgagtaatataaaaagaaaagtatccatgatgatatgtttctacaaactatttaggaatatacttattattattttccatatatagaagggaatatatatactttttagattttctttttttgtaaaccattatgacaccagttttttgttgttctcgaaatatataattgtaacaataaatctgttttatttactcaattcgcatattaataagaccagatttagatagaaatatagaaggaaagaaaaaatcctcaattattatttacaaaaatggtttctccaatataagattagagctaaaaatatgtagacaaaaagaaaaacgctaaattgtatgaaagaaatcaagaaaaggtaaaaccttgtcaatgctctctctggatttgttgtctaagattttaggcgttgtaaatttggaaccgttcttaatttggggtgtgagatagaaagttatatagatctctctttcttcttctccccttagtgttcatttttttaatccacaggtaaagaataaaagtctcttcttctatctcacctaaaccctttgaatctcacgcttattgaatctcgagtctttagggtttcagtctctagtcacaaaaagttttggtttatgttaattctcataagctttaaaggattgtttctcgtaatttgtttggggttggaatgtaacgtcttcgatgaaatgtttcttttgtgttttgtttaatattattgtttgattgtcagacaaggaacaagaacagagttttcatttgttgctttgtgtgattaaataggactttaaatc

SEQ ID NO: 88 - DNA, 403 bp, Arabidopsis thaliana
  Intron number 2 from transcript AT3G19515.2 (locus AT3G195 15) derived from phytozome v7.0 (chr-ID Chr3; pos 6770333 to 6770735 reverse strand)
tgaatcttacggtatgtacatagtctttttcacataggctaattatctacaaggacatggtagatttagttgcgcttgtgtatccacaagggaacttcagtgctcaaacttagtttcacttaggatagataagctggattctctttcaaacagcagaatcaaaagaagtttttttttaaaaaaatctgtgtgtgttgttcttaactgtttgttttggagtgacacatgactttgaaaggagactggaatcggggccaattttttcttatttccaagaggatacagcctgattctgcacaattctcagtttcttggttgtgtgatattgttctttccttgaaaacttatcatgttcttcttatttgtaggtacgagttcaagccatccgcaagcttccactgtt

SEQ ID NO: 89 - DNA, 362 bp, Arabidopsis thaliana
  Intron number 5 from transcript AT5G45190.2 (locus AT5G451 90) derived from phytozome v7.0 (chr-ID Chr5; pos 18279643 to 18280004 reverse strand)
acagaagggtgagtttattgttttgcacctgaacaagttgaatgcttaaaaaaaaatgactctattctgtgttgtttgaaccactatgctgtagtctggctagtatttaaggtattgaaatgtattggttttatatatagtggatccatctccttgccatttttcatggtatttatagagagctcattattgtagtttcatttatagtttcgctaccactttgatttagatttttcttttttacttattctatgcagaattagtgaattgtgattgttgttatttcttctagagcggaaaaaaatactcggatctttactgagctctctcttcatgttgtttctgcagaccattgcaactgt

SEQ ID NO: 90 - DNA, 4316 bp, Arabidopsis thaliana
  Intron number 1 from transcript AT1G52940.1 (locus AT1G529 40) derived from phytozome v7.0 (chr-ID Chr1; pos 19716418 to 19720733)
ttcctcctccggccggttataacgctcctgaacaagtaattttcaatttttctttataaaatcattttttacttattatttgtagaataattggattgtatgccctaaatttaactagagatttgagatgtacactataattttttaaattttgtgatatatctaattattatttttaaatgacatttttgctcataattaattaaaaaaattaaaaatgtatataaaataatttgattaattaatatttacaaatattattaaaaatctaaaacactattatatactcaaaaaattatattttgttttgagaaaattttaaataatgataaactaaaactaacaattacgaaataaattattaattacctgaacttgggttaatttagtaaatcttttggataatgattcactacggttatatataattcaaatttattttattaatctttttcattaacaaatgttttgagagacatgtatataattacactattttgatttttaaattaattacgaatataaactcaataattaaaatttatttattgtaatataattattaatttaaacgttatcacaaaaatatgtttgtttttaaaaaaaacaaattgacagtaaaaaagaatctagaatgtaaaaaccaattaaccatcggttgttttaatataagttaatgtagataaaaatttagtacaaaaataaaatataaatccacagtttaacaaatcaaattttctcaacaaatcaatgttaaattgattaaagtcaatagttataaaaaatcgactatgtaaacatcaatcaactaaaatataagttaactgtttcaaaatatgtcgatataaaataaattaagtcgacaaaaattaaatatactaggattggacccacactaatttagttttctgtatttatgtaatgtgtatttgtacgtattttgtttttaataacggacgtattttaaaattaccgcaatgtaatatattttgatgtattttaattaaaaaagttgtgattttgatttaggacgtctatagtttaaaatcctatagatgatagaaaagtacatactgatattatgtaaaatgtgtattatagtttcatatacttaaaatttaatcaaaatacagatgtaatgttttatataaatggacaaagttgtgtagataatgaatgtttatatagtttagttagctaatgcaattaaattttaattgtataatattgattcttagtttttatgtttgactcttttatatacaaaattccaaaataagatctcacagaatagatgcacctaaatgggtttatttgattattcttttgaaaataatttaaaagaaaaacaattcattttgagttaatacatttcggaaaggaaaaaaaattatcatttatctacttttaactttatttttgtttatatattaaaaatgttattaattattttaataattaaaaagattagtcaaatttcgaaatatttatatagctttggaataattagccattttgtaaaataaatcctggagttggaacttacttacaatggctgccactcgcttttaattattggttctcttttggtaataaattgattaacaaacaaaaatattccaaatatattttaatctcatatatcacgcagttatttctaaaatttgaaccagatttcgaaaactatttaaaacaaaatatatttgacaaaccaaaatacaattgcaatcccttaaaatgagcaaaacgcacctaaatacatttcttatcagttcactaaatcttatttctcctatatttgaactagattttgataactatttaaaacaaaaatttgtttgacaaactaaaatataattgcaatcccgtaaaatatttatttaaattagcggtgtaccgcggattttttttaacgggacgggtttggcggaacgggtttggaaggatattacttaataacaattgtaaactaaaaaatagaaatattttatagataaacataatttgcagacttttatatatactaattttaaaaagaaaaattgtctccgcggtgtaccgcgggttataatctagtctaatttataatgattgttccataatatgaaaatttacagaatattttttaaaatagtatattttaataactatttattaataagattttaaagatttagatttgatttgttatttttgttatcggattttttgactgaatatgtgggattaaatgtttgggtcaaagtttattgaaactggatctactttgcaccgacccgtttattttatttttttttaactattatgggtaatttaaataatatgggtaattttaactaccgtaataatgcttatgaaaactctagttttgtatttctagtttaatttaaagttgttgaaagaaagtatagataattgattattttcttttaactactaactaatccaatcttgctggtatatattgaggtaatagcaaataactatggtatatctttcttattttgagcaaatcaggttatatatttaaagtatccacattctaaacaaaaatattatggttaagttgcacatcatgattgtgaatattaaattatataacgtaattcgattttggtatttcagtgttattttaatagagcaaaatttaaaagcctgaatttacttttatcacgtaatatatttatgttatttttagtgaacaacaaaataagtaaaagccaaaatttgattaaacaaacatttatataatttcttgaaaaagaaataaataacagtacctctagacaacataaaatattagcaacgtacgagaatttgtttatggaacttggaatgtctcaagaggtttcttgcttgtttgttttgatcattatcaaatagatatgaaactattgtctcgatgatcgttcacggttttgttgttagacgattgagtcaagacatacgcaacacatccctatatacaaaaatatttaaaatatcatcatattataggtttcagatataatagtattataataatacacaagccaatgctttagcattagatcgacaaaaaaaaaactaaaacgtttgttgttggtgataaaagagtaacttgagaatcgtagaatttcaatcgttagatttattttaaaccaaagaatttattattttctaaattatgggaaatataaatgcacagatttaatggaattattaataaatgtaaaatattctatagaataacccataactatggtagcatataaatcggttacaatattgttttttgttaccacaaaaattggaatttaattgtttttatcgttttggaaaagctaccataaacttcggataatatattggttgccataaacatttggtttttactttttcctagataatatcaatttgttaaacaaaaaataactaagttaccttataaatcggatttgttatggtcaatactgtttgggtacttaaaatcgaaaatgaaattaaattatccgattgaaattattcgggtcaatttatttttaattttgattttaatgactcatttccgttttgtacttctcttttaataatatagagatattgacagttcaaaaaattgaccttattaataagtcaacatataataaattaaatctaccatgaataaacatgtcaacaacaaaaaattataaatcattcaacaaaataaataagtcaatagttcaacaaatcgattatattataaatcaactagtcaaaacataaatcgcctgttttaaaatgagttgactaaaatgaaaaagtcaacagtactgaaaaataaatcgataatttaaaaagatcgacttaataattaatataaaacaaaataaaattttaccaaaaaataataagaaaaataattgtttttaattttaattatataattttgaattacttaatgtttagtaaattacaaatcttactaatattatcaagaagaatagttttatttttatctgtttaaattgtagataatgaatactctaaaaattgtaaataagtttttattttattttattattaataaataattacgaatgaaaaatagttaaatcgagtgtagttttcaacgataaaataatgcttaaataaaaggtgataatggtaaatttttaatataaaaagagtaattttcaaattacgataaaaaaaattgagtgtagttttcaaattcattatagaatttggtaaacttataaaaatctctcattatttatttctttcgccacttgggacttatgagctttcactcttgctcttttctcaggttcacataacgcaaggagatcaca

SEQ ID NO: 91 - DNA, 594 bp, Arabidopsis thaliana
  Intron number 1 from transcript AT2G34680.1 (locus AT2G346 80) derived from phytozome v7.0 (chr-ID Chr2; pos 14628301 to 14628894 reverse strand)
ttttgattttactggttacttcattgttcagtgcagtaagtatttattttccttgtcctgtcttactattggtttatttccttaaatgaagaaactttattttccccgaatttcttcattgctaaaaactctcactttctgcaatttcgtctgcttgtttcactcacaagaatttcacatttttttcaaaaataaacactgcttaatgcggattggttgttcacaaaaggaccaaaaaatcgtagaaggtaaccgacagtgttagctgaaagaagccagaaactctgtttgtctgtgttcttgaatttagacaatctactaaagtccgtactttttttattagtaaatcctgttatgaccggacccaataaagtagagtaattgttacatgcgcgttccattccaaacaatgtgcgtgggccacttggtcatttgattctgtatttttacttcggagaaatttggatacaacaaataaagtagagagattgtgtataatgaataaagtttccttttttttgttaatgatttgatcatgcgtctcttctgatttgagtttcttttgtatctgcataagtttggattgatttcact

SEQ ID NO: 92 - DNA, 748 bp, Arabidopsis thaliana
  Intron number 3 from transcript AT3G53990.1 (locus AT3G539 90) derived from phytozome v7.0 (chr-ID Chr3; pos 19989730 to 19990477 reverse strand)
ggaagcagaggactcagtgctcttcaaaggtaatttcttgctctctttttcttttttatgtaataaattccattttatattcttgccaaaatgccattattgcttagtgtttactgtttagtattgctgtatatgaaattataaaatgtgagatacaatagggccattgatataatttggtgttggaacaaatccatgattaaaaaacgctcgttacctaatttaaggcaatgtttaataccaatggctttgattttgaatccgtggtttaatttattaaaccatctcgctttactttgaacaattttggttgacaaattatttttgtctttttggtctatctaattaaacatatatacttttgaggaatatggtaaattcaaaattttgatgacaattacttctcaacgaaatggataaggtctagttgaaaatgacaatggtaggttttagatttagctttagctatggattaggttttaggtttagctttaactttgaattttgtctttatttcataattaagaaaaaaacaaacatttaagattgtggttacacctttgtttttagcacacttgtctttttttttttttttgaataaacacttgtctttgatttattcttgatatttttaacgtaacaattatcattggtaatcttttagtgatgaattcttctaaactttaatcttttggtctaagtgaaatatctagtgactaataattgaaaataatgaaacaggataata

SEQ ID NO: 93 - DNA, 1319 bp, Arabidopsis thaliana
  Intron number 1 from transcript AT5G16230.1 (locus AT5G162 30) derived from phytozome v7.0 (chr-ID Chr5; pos 5303487 to 5304805)
cttcgagtttcttgtgttaccacaaaccctgctaggtaacgatttattattcgctttctttttaattatgttagatcttcgatttcatttctatagtttttttttttttttttggtagtagagatgtatatgaatttgcgttttcgttgtcttctatttatcatgtgattatgcgggatctaaatcgttaatccgtcgttttcttaacacatatagattatttaaatctatttcgctcgcagttactttaaaagttttttactggctattagtttaacgatttatgtcatttttttatttgcaagattttgttgattcacgagtcttaatgtttattaacatgatgagcattcattagtgctatgtccaatgagactataatactactttcttaaagacattggattccatgtatcttcgttaatcccattattcatattcgtatcatgatataaactttttttttggtccacctgaaaacttttctatattgcagaatcactacactttttttatgtacactttatgagtgtgtatgcataagttggtgattggtttcacacggatcatgacattagctaggtgaccttaagatcctatatagagagataagtttggttgattcccttatacagatattatttgagtaaactttaatcattttatgcttgaacttaaaatcgtttaatttgtttctttttctttttgtttttctgtttttgggttcatactgagacataaaatcgtttatttaagtaaactttttcttgtcagacaaagtacgattctacttttaaaaggctgggttgtttttcacaattttatttttaccccaccatgcaaaattattgaacaaacgtacgttgttgtttttttgtttgtatttggtaaaatattgtacatacgttagttgacatattaaaatcaatatacacatcaacaacatccaaaattccaatctggttatggtgacacaacgtcttcaaataaaaacgatgggactaatagaccaatcaatatcatcacaattttatatatataaaatgaatacatttcataattctttaaataaaactatagaaatacaacggagttgtttttttaagggagtttatgttaaaattacatgttgtgaaagaatacgtatatataaccaccacatttatagagtttactgtaattgtactattattaaccctttttatagttttgtactataaaaagatatcgcaaatcttttttaacacgtatccatgactaatatctgtttggtattaaaatttgttcacctcttttttttgtaggaagaaaaacgaaac

SEQ ID NO: 94 - DNA, 473 bp, Arabidopsis thaliana
  Intron number 1 from transcript AT2G06530.1 (locus AT2G065 30) derived from phytozome v7.0 (chr-ID Chr2; pos 2589808 to 2590280 reverse strand)
gaattcaatcttcggaaagcgaaaaactcccgcaggttcttatcctcctttctctcgatttcgtctcttgtcggatctgtgttgcttattgagtttgtaattagtgaaatattcgatgatcgcaagttttgatcttgtaatttttatacttgatttgaaattagatcaatttaggtttgattctgaggaatatgatctcttcgttgattatgagttcattaggttacatgttgttcaattgtttttgtaggttatatgtggttttgaatcatgtatagctcagtgtaagtaaaatggtttggagttataaagcttttgattgatttgatgattatgagttcatttgttttcatgtgcatagatcattaggttacatgtagtgcaattgtttgtgtagcttaagtgtggttttgaatcatgtatagagtaaaatgattttgtcggttgcagaacttctgcgggagaacaagcgg

SEQ ID NO: 95 - DNA, 2610 bp, Arabidopsis thaliana
  Intron number 3 from transcript AT4G39420.1 (locus AT4G394 20) derived from phytozome v7.0 (chr-ID Chr4; pos 18340068 to 18342677)
aattgaatctccttgtggatcaggagttggttctggtgagcctggttttgtagataattgcagttctagttgcaatagtttcccttttatctttgatgcaaagtctgttgcttggggtagttgtggggatacttacaatcggcacaaagatcctttgtttagggaattgttgtttgtatctggaaatcatggtgttacggtccacgctttttgctgtacaaaagatttaagtgacaaagccaaaggcaaaccaaatggtgagctgaggcatggggagtgggttgagtggggaccttctaggcttagtcagaaatcagaaccggaaagagtctcttcttctgatggctcaaagcagtggatgcaatcttttttgattgatttggaaactactgtaattgatggtacaagacagtcgaggttccctgagaagtcagcgtttccgggttctgcagaggttgtttcattcagcatattaaatactgatttacctttctcgaatcttcttttccaagacaactccatacttccgaaggataatatgcctgaggatggtaatgtaaatgacaataattttctcgtagcatctgatccaactgctttggatgaaaaatctcgagctgatatgcccgtaaacaatgtcagtgtaaacagtttgtacaggtgcatcaaagttttctccagcgatgctcattctctgattggatttgttatggagttatcggattgtgcatctacgcctagaaggaatgaaaacgaaagaagcaagggtaagagaaatatctttgttgccaagctgtttagctgggggatagaatgggtctcccttgtgaagtttggtgagtcaagtattggacctacaaatgagtgggcagatttccggctatccgataactttgttatctgcctcagtgtttctggtttgatctttctatatgatgtgaattctggggattttatttctcatggggatatcttacagacatgcggtcgtggattgcattcttcatcagataggcaagaagcaactgcagaagcagatcagctaagtgactttcaaaatcgtgctccatccatgtctaagacttgtattgttggttccacggacagaagaaagtttagaaagcttattgtagcttctcatacaccactcatagctgcagttgacgaaaatggtttggtatatgtattatgtgtcaatgactttgtttccaaggaataccacatggccgcggaacctattcctgatttacttcatcttgggcttggaagtctggttgggtggaaaatcggcggcatggacattggccagaaaaaagtgcaccaccctagttcctctgggtctcgaggtgaagatgctttttccaggcgtgatcttagcttttctgcttcggaaatctcgatgtctgacccatgtttggaaagacaacagaacaattttgatcgaagagctggttactctggttcatggttgagtggtttttctgcacagcctaaaacaaatgggctgaaacttgaaaaatttcgaagagactcgcatgtcacgcggaagatgtttctatccgccgaaaaattaggattggatgataacatatgtttttctccatatggattcactcatttctctagaaagtatacaaataaggatgatcgaagctgtaagatttttcattatagtctgcagacgcatatgactgcgagagatgatagttatttgaattacgatgtcaacaagaattctattcaaggtgcagaggagaatttcataggagaatcagttggttgctctttccaaggatttctttttttggtgacttgtgatggtctttcggtttttctcccttctatctcaataacctcaaattacccaactattgaggccattgaatatctgcagccattccagaccactgtcatgggataccggggaagagacgatttggcagcaggggaatcacgttttccttggcaagttgaggtcatagatagagttatcttgtttgaaggccctgaagttgcagatcatttatgcttggaaaatggtacgaaacagtactcatgttggttaatgacgtttttgcatccgtaaagcttttaatttatagagtttaaccttccacagtttgtttatagattgatatttatctcttaaccaacgtggcttgtcatgccgaaagagttttaagtacaagtagttgataattagtaactagtttaccaaaactatgtcatacgggtttgtttgataagtcaatacatgtggaaactagcataaaactgaacttaactgtaactgaatgcatggaatacctaattatatgatgaaatcatgctgggccgtgcattttactttcaaaattcatcagctgtttgtgagcatgagtaaacacttgtttgcagtagttcagtgaatttgttatctctcatttcttcacaattacgttatgatttctgtgtatttgcttgttgtaacaaaataacctcacatattgagacttgaagatgtttatagattcgctgacacttaaattttgttcaataagcttatggtatgttaaatgaatcactgctgtcataggttgggacctcaaaattgttcgtttgcgtcgactg

SEQ ID NO: 96 - DNA, 1628 bp, Arabidopsis thaliana
  Intron number 1 from transcript AT2G42610.2 (locus AT2G426 10) derived from phytozome v7.0 (chr-ID Chr2; pos 17748504 to 17750131)
cttcttcctcctcctcttccttcagcttctcttaagagattctccatcgtcgtgaaagactttgtggtaatatatgtttccaatatgtgactttgcataatttacatataaagcaagcatatctgcatcatttatatataacatatagattttgattgatataatatatattatactatgtatcaaaaaccctaattggagatacaattaggcttttgatttctgtgaatgatcagctaaatttttttcttgatattgggttcggaattaagggaccggtttgtgattagatcttaggtttcagtggaagtagatgtgttttggaatgatttcttttaaatcattttagctcttcgaatgcaagttgattttagttttgaaataatataaaggaagatgtgttttctagtttctagcatgtaaaatcaattcttgaatagatgattcattaaatctctaacattaaagtaaactaaaaacagatttattcaaaaccttaatttgaaaatgcatcagactttctaagctatgtatatgtgaaattatagactattcaagtttatcctagtgaacaactcattcaagatttggaaaacgtacatttgattctcaaaagttgaatcctttctttatcaaccatgtatgtatagttgaatattggtatatatgggccgtgtgtacacattgtaccactgttatttatataaatagtacgtagttcaatgaagtaatgattggctcttggaaggcttctctttaaagatttttgtagattttgttccccattggtgatcaagggaggagttgattgaaccttttacccccatttttataacctaaagaaatattgagattccatgattgttatcaaaggctaagaaggttatctcagaatagaaattacctcacacataatactttaacgtttttaattcatactttttaaactattgcaatgtgggtcttagtagaatgatctcaatatgaacaattcaaccaaatctttatcatatacaatcatattaattaggatctcagattttagagcttggattgtgacatgtaattttagcttttataaaggctgtttactgcatgatcattgggaatagttatgcattggcattttctgagattatacaattagattttgtggaaattaagtttgtctctttgaattcaactaattaaatcatttttattttctttgatctcaattataatttcagtcttaagtttatatataatttgctcaaatcatctttatgcgtctcctttaggatctttgtcaccactaactttggaaaagcttgaaagttggttttgtcccccgcatagctttgtagattttgttcgattatacaaatgtgacatatgccacaagaaacataatttaagaatatatttttgatgaattccatagaagtatgggttaaaattaagtctctcggacatgcatgcatgcatctcgcatagttatggcttaaacttgaatttatatacgttatcctatttgcatctgtgaatctaggtaagcgcatattacatgtatttctggcaatgaattagtgaactaatcttgatacaatagaacttggcaggatcagtaagtctcaaagagggatcaa

SEQ ID NO: 97 - DNA, 2322 bp, Arabidopsis thaliana
  Intron number 3 from transcript AT1G26300.1 (locus AT1G263 00) derived from phytozome v7.0 (chr-ID Chr1; pos 9096626 to 9098947 reverse strand)
tttctccgtaagtctttaccatctcttctataaatttatgattttatagaatagcattattttatctcttctatatatttatttgattcttattcttaatcagttaccatgtcttaatacaccgatagcatttctttgctaaactttctcctaatcatattattgctaataaaaaaactaattggattttaggatttggtgttattttgttagatgatagtgtatggttgtaaaagaagattttgttgttactcttacaatctccatcgcactatgtgataagcaagcataactcttatttcattcgtgtttaagtaggatttgcaggaagaaaaagtgcaaacatagatagataccagcatataggcacagatccaggccaatcattctctttaccatttccatctgagctcatgagccctcgtttgattcttcatcttttcttttcctgttttatcttcaccaactgctacaaacttctttctcttgtccgaattctctgcctttttcgtcttttcgttgtctacttccttcttcttctctgtgatctcaatcttggtatctccttccatctttatatttatgttcacctccaatactctcttgctctttctcattgaaacatcgaacaactcctctctttctcgtctttgttcataaagtcgacgcagcttgagtgcgagattgtagatcccgtccttgaattccccttccaaatttctttcgatttccatttctagctcatcgcggatcctctcttcgtctttagacaataagagtctcctctccgcctacaataatacttataaacaatgagtagctgcttttctttccatgatgaaggtataatgtacatatttttcttacattttgtcggctatagtctttgtggtccatggctccacacttctcgccttgcgcatatatttctttcccactagattaacaaatggggttataaaacaatatcgttttgacattgacatatgtcttgatggagttccttgtgggactcagttatacaatagttggtggtccaaataaggttataaaaagttcttaattgtatggttttatgtgaccgttaacaaaagatccttggaaacatttacgctccaaatatatctaattgcggattcagaaactttgttgtggttgattaaactgaaactgatgtcctttttatatgttggtgagaatagtgctttacttgtaaggctgctatggattgcttaaaagtaggatctttacgatctgtgactgagatatttagaagaagattgacatgtttgtttccaaagaaaaacaaaattgattggatgttgtctctaattaatttattgtaagtatacataatattttttatataattagatattatgtccaattaatatacataaaataatgagtattgtttttttatattgtaaatatacataatattaatattaattgccaaaaagcaagtgtcaaaaatttaattatttgtaaaccatattgaacctagaacatctcttaggggtttggatattgtatccaattaatttacacaaaaattttaaaattaacacttatcaaaaaaacaaaaaaatttaagaaaaaaaacaagtgttaaaaatttaattatgtgtaaaccatattgaacctaagacacctcttaggagcttggatgttgtgtgtccaattaattcacacaaaaattaaaacttaaaagtgttaaaaatttaattatgtgaaaatcatattgaactttctcttaagggattggatagtgtgttcaattaatttacaaaaacttagaaacttaacacttataagtaaaaaacattttggttgcaaactaaattatttgattcttattcttaatcagttaccatgtcttaatacaccgatagcatttctttgctaaattttctcctaatcatattattgctaagaaaaaaaactaattggattttaggatttaatgttattttgtagatgatagtgtatggttgtaaaagaagattttgttgttactcttacaatctccatcgcactatgtgataagcaagcgtaactcacactagtgagttaggatcgtaattaaggaattgagtaatgtgtggacaaagggatttgataaagaagcctggtaatgcatttaggagatcgtgagatgaaagaatgccattagcttagacttatatctataatgatggtttcaacagtccttcatgtagaggatagcaatttgttgatccttgcatctcatcgatatgatatgttatcttggtagttggcttgttctgaggcattcttttgtaatgactttattcagat

SEQ ID NO: 98 - DNA, 618 bp, Arabidopsis thaliana
  Intron number 1 from transcript AT4G14360.1 (locus AT4G143 60) derived from phytozome v7.0 (chr-ID Chr4; pos 8270281 to 8270898 reverse strand)
gtctcttccaaatctagaacctttacttgggttgtgtaagtcccttcttttgatctttctgggtttcgctgttttgtttaaagtttcaattttgagatacgaatcggttgtgctctgtgaggctttgtctatcattattactgtggtagatttgaattcgttgtttataagcttcttttatgatttttaaatcctatcgtttgattgatacaccagtggataatgtatttatgggtcgatcctgttctgtttcattctcacaccagatctgttcttattctgggaaattgtagttgattcctcgtgcaaagattcggaccaaatacttaataacaaacacaccaaattctaacagaacagtgaggaatcaactgttttgtgaattgagtgcttttatatcctaaaaatccagattctttgctagtgttgataattgaatactttagtttctctaagtgagtagtagtagaccacatttctctttttttgtgtgtggttaagattggtatatgtgcgtgtgttctttttgttactattcttacagatactaagcattgtctttttttatatatatatagaacagattcaaatatctgtaactagtgagaaatcatcaat

SEQ ID NO: 99 - DNA, 413 bp, Arabidopsis thaliana
  Intron number 3 from transcript AT4G25230.2 (locus AT4G252 30) derived from phytozome v7.0 (chr-ID Chr4; pos 12925302 to 12925714)
tggtggagcgacttgccaattatatcatatacaaggtagctgttcttactttgattgaaaactagactctgacatacaataacctacattctgtgttttgtatgagatattcttggtagtgttcattatttaaaataactgtgtcaggtaaacaaatggtatattattatagtgacagagtaatgggaaacagaaaaatagtttttgaagcctcagaggtctttacttagacagttgattctgccacattttcccttcatttcctcttgcactttgtttctatgtgtagtgttttctggatttgagttatttgcagacatatgtatgtattgtgggtgttaatagtttatttcccgcttctaatcctcctgtccctagggtacgtttctaccactggtgattcccccaacaat

SEQ ID NO: 100 - DNA, 1517 bp, Arabidopsis thaliana
  Intron number 8 from transcript AT3G07610.3 (locus AT3G076 10) derived from phytozome v7.0 (chr-ID Chr3; pos 2429618 to 2431134)
tcataggcctggcattcggtttttggttctgttaagttcgttttttccgggtttggaaattgcccccaaaaagaatcggatgttatttcggtttggtatataataaatgaaatttaataaaaaatattaatcttaggtaaatgttttgacaaaaaacaaaataaaaacttgtacaggttaatgtatttttaggtaaatgtattttttgtgcgcaccccaaagccttcatccattctgcttagtagagcactttgcttaggtggattgtatctcagactttcataggatgatcgtctaaatagtatacggaaaagatgcgacattatggtcagctccgtggatatctgctgttcaagacgcaagaaattgttcgttttgctggcgcgggcgaggactattaaatcaagtttgtttagttgctgccagttgagcttcccaattcggcaatgaccgatcttaaatttgaaaatgctggtttttcagcattttataaatgtttgattgcgggactaatttggctaacattgaacttggtagacaaaatcgtcgaatagttgaaaaatgagattattattgaatgaatacacattgaatgcaaagattacgcatttcatttgtggtaatagttccaaaagaaaaataaagtgtttgtgattgttcgagaagatatgaaacaacagatacaatagagctaatcgtcgatacaactggtgtagccaattatagtcgtctgtcgtatcaataatgacaattaaactgaaatgcctagattttacatgttgctgctaccactagttgccagaactggaaccaaaattaatgaccaacatcaatttcgcagaattgtcagtactagaaccgaaatcctgattgaacatcccgagctgttgttacttcttgatattgttcggaatgatgttattctctcacatcctacacttttcataaccttgtaagcgacaaaacacattgaaatcgattatgagatgatgcagttgattttttttcaaatcatcagtaaacatgaacttgttgatttctacctcaatgactctttccaattaggtcaaaaaaaagttgtcattatagaaaataaataattatttttctctttggttttttgccaaaaaaaagaatttggtcaataaaacaaaaaaaattaggtcaagcatttttttttttttttggtcaatagttaatttagtagattttggttttgtgttattacatcattaccttccgtttttttctcaatacttcttttatgaccatttaatctcttagaaacgaaaataaacataatctctctcctcgctttctaattaaaataatagtttgaaataaaggtcaactgttgctgtaaaataaaataaaaaataacggtccagggtgttatttttatattataattagttttactcacttttatcttaacttttcttctttagtatcttaatatctgtaccctttggttatttcaggtgaatattttgacgcacatatctgaagtgcccaat

SEQ ID NO: 101 - DNA, 529 bp, Arabidopsis thaliana
  Intron number 1 from transcript AT5G54750.2 (locus AT5G547 50) derived from phytozome v7.0 (chr-ID Chr5; pos 22241551 to 22242079)
tgtcttttgcttctgggttttgcttcttatttttggtaagattgaatttttctttcaccccatttattatttcgtgcttttagatcgttgattgatctgtatcctgcagtgatcattctttaatttacgaaattgttttttgtgtgtgtgtgtgtgtgtgtgtgtgtgtgattgataatgttgttggggactttaggtgccatttttgtcgattttgtggtttaatttacctattgtatattgtgattgaatcgattgggagggtattgagaggtggttgtttcaatctaacaaaatcaagtgcaaatccattttatagccacttatcttctgctagtagatctacttgagttttaagagatgtgtcttctttaataccattgtggttccttttttaatttcatggcttaagtgaatgttttttggcttctttggttgctatagcttatctctgatttgattaagtagaatcctttgtactgaagtgactttttttgtatggatctaatgtagaatatagtcattggag

SEQ ID NO: 102 - DNA, 693 bp, Arabidopsis thaliana
  Intron number 1 from transcript AT1G02500.1 (locus AT1G025 00) derived from phytozome v7.0 (chr-ID Chr1; pos 518344 t o 519036)
tgatcgccgaatctcataatctcccatcgaagcaggtattgttcttcgtattcgcttctcgtttctctctcgatgtattgttcatttttgttttccagttgattttcaagtctgacgtgcgtattttttccgatttgacgatggaagtagatttaagggactattgactgtatctatggtttttaattagatttcagctactctttaaccattttgttattggatcagcagcgatttcgttatagattctcaaaaatattctcagatgtgtgggatttgagtagagtttatgttgcgttggcatgatttgaatagtatgcaagatttttgagattttgaattcgttcatgtgtgtatgtgtgattgtagcttgatatgatttaacctgttagttaaatgtgcatagacaataagtaacatacgaagcgagtcactaagcataagagtcaacttgttttgctgaaaagatatcacttatgattttcgaatcattttagcttttttgtcacttgagcttaatgattcttctgaaattcgattctttgtttggtttatgtcacattctttagaattgagaatctaagaaaagcttacaggatatggtgaaactattcttttaagatagcatgatgcttcttttatgattctacagtggctaagtcattttttttttgttctattctttgtagcaga

SEQ ID NO: 103 - DNA, 777 bp, Arabidopsis thaliana
  Intron number 1 from transcript AT5G54760.2 (locus AT5G547 60) derived from phytozome v7.0 (chr-ID Chr5; pos 22243952 to 22244728)
atcagatcttcaaaaccccaaaatttgcaaatcaggtaataactttctccgtatgtatctcttcgatcaccgattgtctgtttctttgtttgcttttctcgatccgttattgaatttttgagttcgtcgttaaattttgattacatcaatttttcttttcgattcgattcagagagattgaattgcaaattatgtgccagatcttcgtgttctgtatctgattccggatcttggttattagttttttttttgttgttggaatgaattcaacaacgatgattttgatttggtcaattgattttttaatgctatagttttaaccttataggaatgtaattgaactggatcagctttacttgaattgtttggatctagattattcagacaacatctttttaactaaattgaaacatatttgtgtttgtgttcttgatgatcatgtgaatttggtagcataattttcttgttgagatgatttctgagatgggtttttgtagtttaattttcttactcgatgaaccatctcgtgcaccttgcaaaatcttttgttctatatctcattgttcgatatcaaactaatgaggttaacgttttttggtgagacgaccagttatgtaacatgttgttaactatcttcatgtttgaatcgattttgattggatgttttcatgttctatcatattctgcggttttgaatcttctgaattctaacgtgaggttatccttcttgtgcagatctcagcttcccggttagtactaccctcaaatcaactaagt

SEQ ID NO: 104 - DNA, 618 bp, Arabidopsis thaliana
  Intron number 1 from transcript AT3G11402.2 (locus AT3G114 02) derived from phytozome v7.0 (chr-ID Chr3; pos 3575555 to 3576172)
ctacaaacttggttggttgggaactagtactttttgttcgttgaattgcttaacgtcaaaagaaaaattgatggtgttgtcaacatgatgagtttttttttaatgtgttattggaattttttttttttaataatgtttttcagagatttgtgtagttattatttagatccagagagtttttcagagattattggattttaatgtgttattggattttttgtttttaatgatgtgcaacaaagagagttttttcttggacatatataattaacattcaatggacattaacgtctgggtagtgtagtcggttatcacgctagtctcacacactagaggtccccggttcgaacccgggctcagacatttttttctccttcatatttacgtttctgccacgtcatcatccgctacacggacgctaggttctgattcactttttctttcgtcttgggaaaaaagcaaacacaaaacctgagaacaaaaacatccgcagaatcgatatccccagaatcactactctacaaattcgaatccaaagttcaaaccctattcttcgattttcgtagagcagattattgtttccctttaggtgtctccatagtttctgaagagagaagg

SEQ ID NO: 105 - DNA, 1792 bp, Arabidopsis thaliana
  Intron number 3 from transcript AT1G45201.1 (locus AT1G452 01) derived from phytozome v7.0 (chr-ID Chr1; pos 17125020 to 17126811)
gacttggtgggtaactacgacttttacaacggtaaattaaaatgctacgagttattcttcttaagaaattttatttatttcccatttcagggagtagggcattctctgtggttttggtccttttgggttaatttaactccttttggtatatgaataatttaagcctaataaaggccgattaaatcataatcatgaagctataaatagatatatatgtaagatgtacgtaggacatcaaacatactcgtaatagaaaaaaagaggtaaagtgacattttctatatattaaaaaaaagagaaaagaaaaaaagagagttaaaagtatttaccaaattatataaatgcctttcattttctcgtttttgataatacgacagaaacagttctacgagatcatgatgctataaatgtaaaatagttctttctatatcataattaaatgccaactaagcaagggatccctacttattttaaatgtgtcgtctgacggataatataatagaagggtatttaatgaatatataagtagaaataacgagtacaagtaaaccttttttttataaaaaatgtagggatcattaaatttattaatttataaaggttagttaagaaaacgaatttgatgaatttgtttctgtattaatattttttctgatattatcaaaaacttactatctaatatataaatcactaatatattaaaattcaaaagtaatcctatatgaaatatgaactagataatatttttggaactcagttaaagtttaggtaataattaacatcaaagagttaatgtgcactcatttaatcaaaattaatcaacattaacaaatttaaatataatatatatatatataacttacatatatatttctaccggatttaaattcgagttttaataaaccggtgataatagtgaaaattactaggctacatggtccggtaaaatattaagttaaatacatatttctaatgtcgtatttcaaaaaagatcggtttaaaaaaaaaaaatcataatattacaaagagatatattttcttgtaaaaccttacttattcatagaatacacgtcaaaaaccttaagataacatattaatttaaatctatgcatgtttatgatctatgtaagtttggtgcacttgtaggcaaattttaaaactatattggatatttggacaatatcttggttctaccttttgtttaaccatttataatcatgtattaaatgttcgtaagagaacaaatatgatactataaactggtgacccaaaatcaaaagtcacgtgttttgtccgggttttagcagctaagattcttaaagtcaaatgctgcatgatacgtagatcgattttttcttttgtctttttgataaaaattgtcgaagaacattttttttgttaggttaggactaggagattgatttactaaaaatacatattctcttttctatttaaagttaaaacataaatctttacttaagcgatgaaacataacaataatatatatgttacataaacgtgcagaagaaatatagattaacatcaagcaagatctctttttgtcaagcaagagatttagttcatccaattctcgattccaaaagtcttgtctttctcaacaaataacttataattataagagagtactttataccatttctaattatcatatcctacaacatcaaatttgcaaaatatcaaatttatataaatttaaaattctgtagattctaattagtttttatttatgtggtcagctttccaagaaagtaaattgacgcaagccttcgtg

SEQ ID NO: 106 - DNA, 1238 bp, Arabidopsis thaliana
  Intron number 3 from transcript AT4G14640.1 (locus AT4G146 40) derived from phytozome v7.0 (chr-ID Chr4; pos 8398628 to 8399865)
gatacatctctgccagtgaggtccgtgactcttactctcttttttttctctctttattactaatttgatatatgtgtcaatgtgtatatttagttagatatatgcttgacttattgagaacttaaaagggaacttatgcggaaaatcctctttaagaacttataaaaacaaattagttcgatgcactggattgcgttttgtacaacgttctccaataataccatgtacggtctaactgtgtttttatttggttataaatgattagagctataattatttagatttttgtatctactagaaatccttatctaaattttggttattgtcaaatttagtttaggtacatgaaccaatttcataaatgtcttctttgcttaagtggtacatgctctatatctctaaagtgtcgtcaaatacaggctaagcacaataattatgagcatagtatttttatgtaaccacttggaccaattaattctgcattaactagaaaaaacgagaaatccagctaaaacacactttcacatatgtagaatcaatgacaaatatcagacaacaaagccagacgatcttccaatttaaagagatccatagttgtctcatttatgttctaaaacattttttaacaagacatggccatttatttatttgattttatattttcgaaagtctgttttccatcgtgagggcttagagctagctggcattgtgaatctttagagaataacgaagaggaacaaaagaaattttaatacaaagtagttagatagagtaaaatgcgtttgattttattggtttatttgacaggagggcacatgtttcacctagtttaattaaatatatatacctttctttacatcctcaaaagttacattaatgcagacacctttttgcatgcaacacaattcaatttattaatttggggttttctatatcgattggtcaaaacttaggctaaaaccagctgtattttgcttacaacttaaaaaaaaaaaaactaaacaattgtatgaatttggtttattcatatttttcgtaccgaaattagaaattgttcaagttaggccgtttgacctactatattgtattgcatattcaaatggataataaacaattattattctctgtacagggtcagacccgtctgattaacatgcacaacttaatttacaataattagactaacaattacgttaattatttattaatttgaaaagctttgttattgcagttgagtc

SEQ ID NO: 107 - DNA, 949 bp, Arabidopsis thaliana
  Intron number 1 from transcript AT1G64140.1 (locus AT1G641 40) derived from phytozome v7.0 (chr-ID Chr1; pos 23806010 to 23806958 reverse strand)
gccgtgaaaatctcgtaatcagattcaaaattgaggtaaattcattcttcgtttttgtttttcttcagttgaatttgcatgtttgtttttgatgagaaattcagagaaatttgacttctttttaattcgagacaaaaaaaatatgtctctgagatcgatgtctgggaaattgaataattctgttattctcgttgctttctttccttgttctgtttcatttatttctgaaattttgtgtcggtttaatctagaaagactcaagtttttgatttgaagtactctggtttggtctcttttgttttgatttctctctcttttattctaagcttctcatggaatcatatcgatgaagctagtgaataatccatcatttgtggtgtatctctttgacaaaaaattcttcatttctcaatctgtttttttagatctcttgttttgtttcatgttgtggttgactaacgaataaaaaggttgtgctttttaatcttggtttatggtgtttgtcctaaactatgtgtgttctggagatgttaagtgttctgtagatttgaggtgttaaatgatctgtgttctgtagatttggtaacccaattgaatttttcactgctctattgcggtttactgccactcacttgtttattatctgttatatgaagcaggatggttagctgctaccgtaatccttgcgtgaagattgagaagaactaattttggtttgtgagcaactttcgaatcagctctgttagatttgatttgaacttttatttgaagatggatcggtgtgacacctcaggatttgtaagcggcggtggagatgcttataaggtcttctaactcttattagagctgtggctttattctcttaacccggaagttgttgttgtcctcttggcttcgcgtctttgcttttggtgttcttgacgaaagttttcatttttaagttgtgacc

SEQ ID NO: 108 - DNA, 1053 bp, Arabidopsis thaliana
  Intron number 1 from transcript AT5G41590.1 (locus AT5G415 90) derived from phytozome v7.0 (chr-ID Chr5; pos 16632574 to 16633626 reverse strand)
catcgtaccaaggtaaatatatgtacaaagtatttagaataaacttatttgaatatgttttagaatatggatcattatattcattgtacacatcatccttcaaaattacaatatcacatttattttagattattaagaatcaaacctctactaaatctgtctcacagttgtacttatgaatctgttttgttagcgttgtagttgtaaattagttgtgtagatattagttctaggttgtagttataaaacatccaaatacttgattgatacaaaacaataaatggagcaacaacaaaatgatttataagagttgtgaatttttggtggaatttaccaaaatgatatagaaatactttaaaaattgaaagaagttttcgtcgtccttacggatcactctagcgaagtatcggatcgatttgcttacaaccattagaattgtgatagtttgtaaatagtacttaaggtcggcgatatgttgataataatgaacaatgaatgttgagtattaatttcgctgatagacatgttagccgattttgtagaagacgttttgtttttagccgattgaagatatgtatgaacgaagatattacgaatactatagtatatatattattaagattgagtaggaccaactacactaccgtgacaccgtccacaataggtcacgtcaaaagttcataaatattctgcatgtggacaattgtattggcaagaatttcgtgtaacccgttacattctttgggaatagatttacaaaatttcattcagcataaaagttttgactataaaagtataatcataatttcataacgacgtctagaatctccgagtattatatgtttgacttttagtttcaccaaaatctagctatgcctaatttcgtttaaattgatcaattttgacgtgactacgtacatatggatctagatatttttactcaatgcaattttatagacaagtactagtttgagtttaaaatgttgtgtatattaaaaacgattttcctttgtattgtccagaaaattacgctagtagatagttggggaatct

SEQ ID NO: 109 - DNA, 471 bp, Arabidopsis thaliana
  Intron number 1 from transcript AT1G55680.1 (locus AT1G556 80) derived from phytozome v7.0 (chr-ID Chr1; pos 20807295 to 20807765 reverse strand)
gaatccgttttcaattgcacgagttgcttcgccaggtgaatctatcgatcctaggttttctccgcctctgattttttcttgttcctgagtttttggaatcgaattttacgattggtagggtttgtgttcttgaggaggcttgtgaagtatttattatttggtttcgtttctcccatcttcgattatgtcggtagttttggtttctggaaatggactttgatatttgtgtacatagattgcaggtttgatccttgtttctgagcgatttgcttgttggagattgttataatctcatggagtcgtaatctattaggtgttttcatgcttgattgttcactaaatcacatttttatgttttaagtatgttggtgttattggattctactatattgtagcttctgtggtccctggctttcgtagtttttagtaataaaggtgctttttgatatatgtaggtttatcaacttaaga

SEQ ID NO: 110 - DNA, 2582 bp, Arabidopsis thaliana
  Intron number 6 from transcript AT1G36180.1 (locus AT1G361 80) derived from phytozome v7.0 (chr-ID Chr1; pos 13547741 to 13550322)
gccgtgattgtagcgtccagagaagacaccaaaaggtatgttactggtttaaaattgatcatatctctttttattactcaacaatcacgaaaacaagaaccatttattgctaatttgctatagagtctctccataagccaaagacttcgaaaactaacaaatggtcaacaatactgccgtagtgagattcagcttgtcctcaagctgagatgaaccaatctatgtcaataaaaaaaaaacagatttcttcatttgcaaccggttctttaacctctctttgtaatggcatccttttagtcctccggtgcacaatcctctgtgaatgcacattcgctacacaacatatccatctacttgcattatagtcacaattatgaattaatagtaatcttaggtgtacctttgtggattatttacgctcattttttaagggttttgtaaaaaaaaactttcaaagtcgtccattttgcaactttatccttcatgtccaaaaaatggaaaataatcatataaagtctaaaataatacgcaatatagctattttttgttattgtcaaattttaaaattttgataaataatatatcaagtcgaagccgatgaggagttcaactatatctttaaattttcaaagaaaaatgtatgtgatcgtgaaaacgtttacaatatatatgcagttgcaaaaataactatatctacatatacatttttgcagccattttgtgaaattcatcatggagttgtgacttaatttctactcaatgccattagcattaaattatttaatttcctatttattattttttcctttaaattcatgatttttaaaatcaatcacattatcaattatcaatcaaatttaatctaaacaataaacttcacctcaatccctaaaaattagcttaaacatatttcgacatctaaattctaaatcaacttcagtccaagcttctcatcaatcccttaaatatattgaaaaaataatattcccgagaattaagtcttcgatatcttcctaatcatactaaccttatttacaaggaatgccattggcattaaatcttaatattttaaaaaataatttaagatatcaatcaaacgaaatcattcctaaaattttcggttttaatttgctgtaaaaaaaatcggtttcaataatacattatgatcattagttttgattctttagaataattcattacagtgtaataaaaagaatcaatctcatattttcaattagtaaaatgtacatgtattaagttaatattattgtttgaaataatgttaacaaaactacccaatctaggctattaaatgaagtgaaatacagttagtccaaaaatccaagtacatatcaatcacaaattatgattaaactaaatatttatttataacattatctatattttttaaaaaatgaactacattttgtagagttattttgtttaagtaagaattacaaaaaatgccattacctaaaaggcaaaaaaaaaattaatttttgaaaaataattattgaaatatttaaactttataaaacattattaatatttaaacttataaaaagtaatatttactagaattatatggtaggacgggtttggatcgatattaatacaaatttataatatcatcaacccaaagtaataataccgtttaaatattattttaatattttatcagcattatttttaacagtatttatataaaattattaactttaattctaaaaacaaattgtaaaatataatattattgtctatactaataaaaacatgtatgtcgtaacacattttaaatcttaaaatagagtaattgtacactaaattatatatgtgtatatatatatatgtatatttataaatatatagaaatggtttatatattaaaaaaatacaataataataggttatataataatgttaatcaattaggcatattacattttttatagcccgcgggttaaaatctagtaacgtattattttaaattttctaaccttttgtatttttttggatgtgtgaagagtaaaattgcaagtgcgatttcaaagtatttttttgcgcaaaactctttttttttaagttcaaatttaatgctatttttctcctgaaaacgattccccaaaaccagattttcccatacgttctatgttgatttttttgtctaagagagaagaaaagtgagtgagagattacatcgaagaacacaaagagctacgaacaattcgtttcagctttctatattaattagcaatggcagacgaacaattgagtttccgacacactggaaaatccagcaaacgaccagagacgaagaagacgaagaacatcgatttccccaaatataaactcaattgcgtccaattgaaccattcttcccaattcaatccacaaatcctatcgccattgcttcgatcctaacgcaccatgttcgatattgaaatacaccttgtctaattatacttatacagtttcaattttacagtccaattttattgaatgagtgcgttgcttttttttttttttatggtttgttgaatcacacagatcatagaggaaggtccaatcaccgtagctccgca

SEQ ID NO: 111 - DNA, 3059 bp, Arabidopsis thaliana
  Intron number 1 from transcript AT5G35770.1 (locus AT5G357 70) derived from phytozome v7.0 (chr-ID Chr5; pos 13937556 to 13940614 reverse strand)
tcgccgcagctccggctcttgccaacgtttttcgggtcagttctaacgttctttgaataccttcttttagttttgtaacggtcgagacacatcaattatctcgtgtctctctatatatatatgtacttcaggtagtaaagtaatattttcgttacactatctgaattcgtttattagcttatatttgaacttgaaaatagtgagacatagatcttatgcagacaaaacaaagtcaaagtagtcgtgggtctataataacttaagtggagggacacaatcttggtctagtcaaatgtactgcttgtttcaagtgtcttgtactttagttgtttctaagcttagatttgattctgccgttctaattctttttggtataacgaattcttactctttagatcataattaagtgatgatgttacttcaattcgattgaatgtgatattagtttgtaaggttgggattctgaagagacaaaaaaaaaaaaaaactgacctttggaaaggtaaccgccctttctgtgtttctatgatgggtccaagtccaacttttatgtctaacaagacgacattaatttgatgtctctttcacatatcatatagtttggggactttgtttttcttttatgtatttagaaactttttgtcttccatttttacccaataagtttatttctttttcattgttctctcgtctacttttgataccttttaatgtctatttttggatcctctaaggagaccatacaaccccatctcgtttgtgtaatctttgtacaacatttgggcatagtaactctaatattaatattatattatgaattggatcccttagggcacaaaatcaaggttttattttattttattggctttaaatcttcctttcttggcatgtagaaagcccttttttaagatcaagaaatccactttttgactcaaaagttcttacaataataatcaaattaaacactttcttgtctccaaatattggttgatagacattaggcacagtctttagtccaatgcccaatagatttaatattttttagaattataattataacggtatttatctgctaattgttttaaaattataataatagaaagtgacctctcacgacagactcataaaactagaaaatgtcgttgcacatttaacaacatctaaaaagagaatgaaaagaaacctaagtaaggtcctgtctttttgccttgccaatgttagtcctatattaccacattaggttattttctacatacatgaaaactctattcatcaacagatatatgatccatgtattatatcaggcattcatattattctttttaataatcctatgttatatatgaaaatagctgttttttcttttgttcataaaaaaacaaataatacatatatatattatgctgaagatttttctcatatatagtaacgaggaatagtatataagtacatatgtacattttttgcgtcctgcttttgttatttttttctctgccaatattatgatccactgagtaatgcatgcagagcttctgacaacttctcattctcttattttatctcacttctctatgtatacatgataattctaaatcattattaaatcccataatattttctaattaattgaattttcaaatttgccctaaaattttaagaaactgcagtgtagttacagcataacacttttgtcagagaattaaggctataagtctagagttttcattgttgttttttactttgaaattgatcatggaattatcttttttcctgactcgattcatcttttccattgaagtgggtttttatcttttttttttctttccttaatttttttcagtcaaaagagacgacattatgggcatacatatgccgaaaagcacatggaacccaatgttaagggtctcttagagcacgtgcagtggtgtctatagattatatactatgttcttacatttgatatatcacacattaaaatacaaaagtgatattctgaatctggtcatcttagaactcaggaatatttgaactactttctttcccttcttatttgaagtatatcatattgatgtgattggtaatttgcataataataaataggatttgccattccatcatatgttatttgttgtactaatctattttatgttacatttcgtgccctagtgcctagattattctttttttataatgattatctgactaatagacattaaacctttggtttgacaagatatcttttcttttcgtatagaattcgaaatatttgattttaggttgtactatagagctagagtacgaagtcaaatacattactttgcgtttaatgaggaataaagatgtacaataaataacaatataaacgtaaatgtagagaatgtaggtccacggattgttggagagggatgagagagacagagaaacatctactatatataagtgtaatatttgtgtatttatgggaagctctacttttaacaagaccaaaggcttaaaagctatcctttcttggaaatgaaagagagaagggcacgcttgttggcaaagtcggaatctcatgttcagcttaactcatttaaagtcttctcatctgtcctaataaattaacatatcatctgttttgtattattgtcacattgatttgttttttgttcttttgacatgggactagggcttcctctcattattccttttacactagggcttctgttgttatatctctatctatagcttccagagattgattagtcccgtcaattgaacatatgtcataaaatagatttttataaaaatgagttgtgtgtttcgatgagtaagacaaatattacgcagagcttgtgtctgagtctgtcgttgtctttccatcttcctagtccctatatatagagtctttcatgcttcgttgcaggcctacttatcttctttctatgtctttttttactctctcccttatttatacatttattaattaagctactaattataatatttgttaaaacttataataatttttcttaatcgcaggtttgcaccacgtggcacgctgtctctcgctccga

SEQ ID NO: 112 - DNA, 3294 bp, Arabidopsis thaliana
  Intron number 1 from transcript AT1G78580.1 (locus AT1G785 80) derived from phytozome v7.0 (chr-ID Chr1; pos 29557495 to 29560788 reverse strand)
cgttcgccgatcatagtcgatcccgccgcttccaggttagtcgtttattctcgtctgccttcgatctcctaatctcatcgtgttccgttagattcgctgattttgattcgtttaagctgtttctcctgggattcggttttgtttttgttcttattttcaatcgcgatgatcgtctattgatttttccccctgattgctgatctgtttttgaaacggttccagattcaaattatcatatctatatatatcgattttgtttgatctctgattcatatcaatatatctagtaattgattagatgattggattcgattttgctctgtttgaataagtttccggaatttaagtagaatttgatatgcaagtgattgtatttggatcctagaacttgatcttatgggatcataatccatataaaaagtagactaatgctaatttacgttagattagagtgacacatcttgtttcctgtttaaggcgtttactaatcttatttggtttacttactgatgacttatgagtgatgaccaccacatacataaatttaaaattataggatgctttctgtttcaatatccaaaaagtatagtaatgatggtgtgtgttggttgagttataacatcatcaactattgattggataataatctcgtattttttagcactaaaagactcatttgcatgtaaacttttccatagaacaaatcacaatcttttttagtgataaatattgttacatctttttcaaaagggatatttttactcaatatagaagatctttggtagggtcctagtgattgtggattccgtgcctacttgaatgaggtcactgcagtcttcacgggaaaaagcattttcattcttatgcaatctctcgtttatctatctagtttggttgaaacagtgccacttggttacattttagtcttagatgttattagaacagatgcaaggtgtaagagattcttgttgcatagtcatgggagttttcttgtgtgtgtttttgtttacttcactcacatgtttcttggggtttcttaacttatatagttagactttcaactataaatttgtaaactacaggacataggcgtaaagcaaaagtgagagagcaaatcgtataactttatttttgcataaatatatgatgcccttagatttgctgtcttattaggtggaccaccggtttcttatactttacttttccttgttttttttttttttaattatcgacacatacaattggacgcattatgtgttgtccacgcacacacactaatactactgtgtataaacactaagtcgtcttcttcttcttctaccataaaaaaaggaacatcgtgtcctcatgcttgttgttagcttgggaaatcatgcgacagtttttgtttttaatctattttcaaagtcaatatatgaacagtaaggtttataacaaaaataattgcatccccgacaagaaagacgttgaatgatcgatcttttgaagccatttcttacttactgtacattgttttctaatgtgcatatcattcaaaagtttgacatttgttatctctgcaagagagtgtgttgtagaaagtcagttgtcgaatttacccccctttttcaaaagtcacattcaggtcactgcttggaaaagaaacactttttttctttctgactcgggtatccgattctcttttcttctgttgttactaaacaagagttaatttgcttgacagtagtcttataatctttgggaaaaaggttagttaaattgtattttatctggtgtctttgtgcaacattatagaagacactaacttaagcatcctcctttatgcataatttgatttgaccccttacttgttagtggttgaaagctataacgaatatcaaattggagtttaattaatcttattttcacacgtgtttttgacattgtggctaccaacaacatctctgtccataccaagtgcttgtttaacgtttacatgagacttcagtttgtttgttttttggctagttaggggtaaaaattccattcttcttttttattggtctgtaaaaaaaattccatttcaagtaagaagaaagggagatgtttctacgttgtattccccatagtcaaatctaacgtcagcttcggccgagtgagaggggtcaatttcattcagcttaaatccaacttttttttctatgtctcataaataaatttctctttggttacaaaaaaaagtaaaaaagtttggtcaggaagagaggagcgaggacccaccgattacgtcatctcgtctaagaagtaatcagaaaaaaaaaaacctaatttttaaaataaaaacatcttctcgtgattgcgaagtttgtttgtgtgtgctgtgtggtgaagggtgatctctctctccgccccgaatctccgggcgatgcgatttttatcactgttggtttaataatctacttcacggtggtgtgttttaaaataactgaaatagttccggtcgaaatttgtaggttttcgagattttttttttttttggttggaaaaataaaaagtctctgttttcagaccgaatcttttgatgtatcacttgcatggctgtgaaggctctgtgtagcctgtaaagcttacacgaggattttgttgctccccttaatttccctctaatatctctccttctctctctctctacgataataatgtcttctctgcaccgtttcctttcgccttctttctgtccgtttccaaatttctttcgtttcttctttttggctctatttacttgccatctctctcgatgataacgacatgaaacccacctcaaacaaaaccacattcacttattattagcctttgtttttttttgagtggccgtgaaggtgtgtgattctggtgccctttcttcctttttgtttccctgcttaaggtattcctgatttttttccgtttcttgggatttattctgtgccattttttttgtttctgtttccaaattcttggctagttaattacgacctcaggatcatgtggatcctgttctttttgttatcctcttcatcagtgtttgacactatcttgtgttttttccctctttttcaataaccttagatgcttattccttggcctgatgggacacaagtgatatcagtgtatggtgatagacaacgacattttcatattcttccttttttttttttcttctttaatgttatttatgtttttttacttgacacttggtttcttgatatgtcctgatttgctttgacaacaaaaaatgcaggttaccgttgatagagtggtgttttggttctgttt

SEQ ID NO: 113 - DNA, 421 bp, Arabidopsis thaliana
  Intron number 1 from transcript AT1G26330.2 (locus AT1G263 30) derived from phytozome v7.0 (chr-ID Chr1; pos 9107711 to 9108131)
ggataagaagtactggagttcatctagggttggttttctctgctctctatcctccattcgtcagtcgatagctcaattcaactctttctgtgttacttttctaattccttagaaattgagaagaaatatagaatcagattgacttcgattactgtaatttgaattattttggatggggctgatatgcctaacgatgcaatgaatcgcgattaattttgtgtagattggtacatttgcaactatcaggatcgatgatcagtagattctctgtttctgaatatttttgatttaaatatatacgttcagtgatactgcatagggtagagagtagagactagatccttaagctgagggtgtagattgggtttgactgttctcgttacttcaacagtgaacaacactagatctattgaaacaactt

SEQ ID NO: 114 - DNA, 2595 bp, Arabidopsis thaliana
  Intron number 1 from transcript AT4G35240.2 (locus AT4G352 40) derived from phytozome v7.0 (chr-ID Chr4; pos 16764358 to 16766952 reverse strand)
atcccttcttcttctttttttttttttttttttgtgtagagaaaacacatggatttttgctatataaaacattaaaatggccaactacaattcgaaatcatcacacgcattattttgtttttggttgaaatcttagcgctaaatctaaagatgtataagctttttttatcatttgattcaactcaaacactaacctaaaataggaatactttaatttcttttctttttttactttcagttaccatgtgcgataaaaaagcagacatatcaattaagtgaaacaccaaatttatttgtcttaattttggaaaggataaaggatctagcatatatgcagcaaaaaggcaaatattatgaccaaaaaaaacaagacaaatataaaaaggaaaaaagagtttaataaaaaaaagttaaaagaaaacagaagggacaaaaagagttgcttctgcatcaagttattctgcgtaaataacatttatatatcagttacaaggcttccatgctaagtatcatccttatcggatgtcaaaatatccgaaggctttgtttgatttctctacattatttttgtgatatatatagttcgtcaccacattttttgtcgctacggacctgatttggtttcttgtgacaatgtgcatatatagtcattactaatacagtaatatatatcttctagactgttcgttctagtcggtcgacacaagtttttaaaaaatcgttgttgtgcgaaattgtgaatccggttaatcaaaatatatctgttttgttttgttttgtagaaacatgtctttcgcatgttctttaaaacatatctatgtaaataaatgtgcgtaacatatataacgcaaacaaaattcacgtgtttcttcagatatctgaagatagtaacataacaccttagaacaaagatttcgatgtcgttaaagggttactatatacttgagtgcgctatcaagtagtttctctcctgcaactctcgctacaagcttttattcgtgtgtttacatttaaattgtccacacacctcgtcacgcacttttagccttcttcattttgatttttaggtccataatattttatatataagtagttcaagcagttaaagaaatgttattttagcagtaactatcagaattatgtacaaattctatattagaaaaaaaaaatccctcatcgttgtttcagcccaaaaaaacgttatagagtgaagatccaaatttatttatttttttaaaaaaatcccaaaacacatggttgactcttgcaattttgtttaaattgaccctttaatgctacgataaaaagtatatataccgttttaatttgcggagtaccgatctcaataacaaatagcaataccgaaaacgttaataacgtttatctcttaagattttaaactattttatactattcgtttactgttttttttactctgactagtttttatttgtgctggtttcaccaatcgatatcgattactagatgctaattaaatttctaataagcttgttttgttcagatgataatataaaaaatcaattcaacaaaaaagagtcagtctagtcaatgagagaggaagaaacatgacgacgttagcatcacacctgaagcctgaagtgcctgaaagctaacaaacatcgattttagttacgtctctagtttgaacacaccaaaccaacaactgtagtactattttaaatcaaaacaaattccattacattcctttgagaataatcaataaatcaattactactaattaatagcaagacataagttcaatacgaatctcatcacttaatttcttacgttacccgttaccatcaacatgtcgaatttaaattgtccaaatcaaatactgtcgttacgtaattaaagaacataattaagggaatgacacaaaaatggtcaaaacgagtcaaagttaccgtcaaaccaaaccacaaagccaaagtagaaaagtagtccacttatacttacacgttattattaacataaagatcaaaaattactagtagtactaccgtatctctttttctaagatccatgtctgaatctctctcaaagtactgtcctaaaaaggttaaattttcccaacaaaaaaaatctaccgtgtaagaattttcaggttaattaattttctgaaaaaggagattatggtaaattataaaaaaaaagaaaagaaaaaaacaccgactcaatcctatggaagaaacggacgaaaatctcggtgctggcaagattccttcacagtccttttgctgttttttttttctttctttcttcttcttcatcttcttcagctaatatcattcatttttatctctttttttatcttatagagaaaacaatcacttctttcatttgtatgtaatctctatcaacatcaacccacaccatctttgccccttatgcgcctccatctcttattcctctcacctacctttctttctctttctttacgaaaagtcttttaatttcaattctctacacctgatttcaaatcttgggtctctctctctctctctcttttttttttttctttataatttaatttaagttgattcttttttttttgtttctttttttctttgt

SEQ ID NO: 115 - DNA, 1209 bp, Arabidopsis thaliana
  Intron number 9 from transcript AT5G06839.3 (locus AT5G068 39) derived from phytozome v7.0 (chr-ID Chr5; pos 2123020 to 2124228)
ggtggtttccgtccatcggagatcattaaggtacatctcgtcttttcttatagccatatacatatatttaggtttttcgagagatatttacttattctattcgagccacatcccacacaataattagtcatgatgatattgtaaactaatcaaatatggattaataaatctaaattttggaattttacttgaagactaatcattttaaattttatcttagaacctaaaatattccaggatacaatcattaataccatcaattttgtggattacttgcagaacatatactaataatgactgaaattgtgacattgttattatttatatcgtacatatatgtccacagaatatagtacttccaactttattttattatttagatttttttttttaatttagtctttgattctcgtaaaagaggtacgatatagtaataatagataagacagacaagagatagactatatagtgatattgttggacgaggtatatatatacataacattgcatggggtgactctagatgtataaaaccaacatatatacgtgaatgtctttatattacgacaataataaaggtacacgtaaaattattttgaaaacaaattaagaatgcatgcaattgtgtgtgatggtgaagtatctctagaaataggtaggttttggcataatgcaaaagaaagtgcctgtctgttttttcgatttatgggatccataggagagagagatagacataaaccaccatggaattcaacagagacgaccataataaacaaaccaaaaataaataattgtttaacatttttagcacgctcgtcaattggatgattatcattttttttcttttctaaaatggttacgtaaagccattttaattaaacctactttttattctaaacaatatgagtacctacgatagccgattaataatacaaattaatatatggatggtgtgcatatctgacaagacctttggcaatgtctcaatcttatatcctttttagtgaaaataaaaaggaaagaagagattttgggtgtagctagtaactcgtgcagagtacatacactacacactttaatgcattcaacgttctttatgcatccattaagaccattgttaattaatcctcgatatctcaacttgtgtgtattaattagaaacgcatgcatgcaggtgattgtgaaccagatagaaccattgacggagca

SEQ ID NO: 116 - DNA, 602 bp, Arabidopsis thaliana
  Intron number 1 from transcript AT5G65670.2 (locus AT5G656 70) derived from phytozome v7.0 (chr-ID Chr5; pos 26253857 to 26254458)
catttttcatccaggatttgttttttccgtttgaggtaattatgtcttctctgttcttcttatacatagtttcaaatccggtaatttttagcttgttgttgtttgtgtgtgtagttagtagttattagatctattagctattgagtttctttgctgatttcctcactatttctatggcgaattttggtttgtttgagctgttggcttaaaccttgctaggtttagtgatttgtagatagaattctgtggaaattcaaatctgagatcagctcgaaaaatgtaactcaacggtgtagtttcttcatctgaccttaagttgacttctatttatttttagctttccatttttttctcagattgagctttattttgctctaaattttggttgtgagtttttcatagatgcaatctacttttgaaaccctaattgatacggtttcgagtttcttcgaattttgattgaaattgagttcttgattttttctggtaatttagggttttgtttgaggatttgtttatggttatgtgaatttaatgtggaggactttgtgctgtgtaaatcatcaggtaaagcagctttgcagttaaagaaaccttgagta

SEQ ID NO: 117 - DNA, 1626 bp, Arabidopsis thaliana
  Intron number 1 from transcript AT2G42610.1 (locus AT2G426 10) derived from phytozome v7.0 (chr-ID Chr2; pos 17748504 to 17750129)
cttcttcctcctcctcttccttcagcttctcttaagagattctccatcgtcgtgaaagactttgtggtaatatatgtttccaatatgtgactttgcataatttacatataaagcaagcatatctgcatcatttatatataacatatagattttgattgatataatatatattatactatgtatcaaaaaccctaattggagatacaattaggcttttgatttctgtgaatgatcagctaaatttttttcttgatattgggttcggaattaagggaccggtttgtgattagatcttaggtttcagtggaagtagatgtgttttggaatgatttcttttaaatcattttagctcttcgaatgcaagttgattttagttttgaaataatataaaggaagatgtgttttctagtttctagcatgtaaaatcaattcttgaatagatgattcattaaatctctaacattaaagtaaactaaaaacagatttattcaaaaccttaatttgaaaatgcatcagactttctaagctatgtatatgtgaaattatagactattcaagtttatcctagtgaacaactcattcaagatttggaaaacgtacatttgattctcaaaagttgaatcctttctttatcaaccatgtatgtatagttgaatattggtatatatgggccgtgtgtacacattgtaccactgttatttatataaatagtacgtagttcaatgaagtaatgattggctcttggaaggcttctctttaaagatttttgtagattttgttccccattggtgatcaagggaggagttgattgaaccttttacccccatttttataacctaaagaaatattgagattccatgattgttatcaaaggctaagaaggttatctcagaatagaaattacctcacacataatactttaacgtttttaattcatactttttaaactattgcaatgtgggtcttagtagaatgatctcaatatgaacaattcaaccaaatctttatcatatacaatcatattaattaggatctcagattttagagcttggattgtgacatgtaattttagcttttataaaggctgtttactgcatgatcattgggaatagttatgcattggcattttctgagattatacaattagattttgtggaaattaagtttgtctctttgaattcaactaattaaatcatttttattttctttgatctcaattataatttcagtcttaagtttatatataatttgctcaaatcatctttatgcgtctcctttaggatctttgtcaccactaactttggaaaagcttgaaagttggttttgtcccccgcatagctttgtagattttgttcgattatacaaatgtgacatatgccacaagaaacataatttaagaatatatttttgatgaattccatagaagtatgggttaaaattaagtctctcggacatgcatgcatgcatctcgcatagttatggcttaaacttgaatttatatacgttatcctatttgcatctgtgaatctaggtaagcgcatattacatgtatttctggcaatgaattagtgaactaatcttgatacaatagaacttggcaggatcagtaagtctcaaagagggatc

SEQ ID NO: 118 - DNA, 746 bp, Arabidopsis thaliana
  Intron number 1 from transcript AT5G46410.2 (locus AT5G464 10) derived from phytozome v7.0 (chr-ID Chr5; pos 18825205 to 18825950)
acgaaacagctctcttcttctctcctctctctcaggtccgtcttcttcccccaaatttgatcgcttccttcctcttcttctttgtcttcacctggaaatttcgtttttttcttattacattttttgttttttgttttcttctgtgttgtttgactttcgatttctgattctgtggttgtttatgctttgattttgttggatttgttagaaaaactttccatttcatctgggttttgaaaaagtttcctttttttttttttttggatttgtgctggttttgtgacttttgttctcagcttcgtttatttgtggtgagtttatgtttgaattttgattctatcgaaatttcgtttttgtgtgctaatttgttttatttctctctaatttcgcataacgatgacttgattttttgttagtgtatctttgatttggagttggaattttacttttggtagagaaatgtaagtttgaatagagagaactatttgtgaattataattaggttttttatgtgttaaggttctgggtttagctatttctgataggttgacttgtggtttgtttgtcttctcgattttgtctccatgatccgagattccatgtccatgctgtgtagattctgatctcctttttggattttggattttggattttgggtttgaagtattaaaatgattgatcgtgatgggctctgtttttttttttttgcagcatcttctgctggtttggtctttcactaaagtctc

SEQ ID NO: 119 - DNA, 766 bp, Arabidopsis thaliana
  Intron number 1 from transcript AT1G03900.1 (locus AT1G039 00) derived from phytozome v7.0 (chr-ID Chr1; pos 991712 t o 992477)
ttgatatccatcctgccgttaatcacagattgaaggtaaactgatctgttcataagctagcttttggaattaagataggatcaatgcggaatctgataatttggagaaatctgattgaagctttcagatctattttggaaaaacaactatcgaatccaatgtggaattgattgattcagatacgttttgtagtatcattctcattgcaaagttcttatcttgctagtaggctatagctaaaagttgcttggtcttggtgtttgtatcagtgatgagaatattttggatgcattatctgctgagattgattagctattcgttatttggattttctaatttcctttatttgtagtgttatttggtggaagatctttgtagtttgtatgctctgtgtagatattaggatgagtaaatagtaccagccttaatttttctcgatcttgtgttgtgttcatcatctctaatcttaaattgatgctgctatatgtcttgattttgctcttttagtcttcacagatggttcataatcacaagttttgttttagcatccactcgtagttgcagaacatactcatttgattttgtttactcaatatctttctctgggaaccgtaactgtagaatcaatatttcaattctgattgaactccatcatttatccggaaaaggaaaattcttggcatttggacttggtagaacctgaaaagattgttgttttgatgggttttaaggaaggtgaaaccataagaatcaacgtgaagccgaa

SEQ ID NO: 120 - DNA, 437 bp, Arabidopsis thaliana
  Intron number 1 from transcript AT1G66960.1 (locus AT1G669 60) derived from phytozome v7.0 (chr-ID Chr1; pos 24989027 to 24989463 reverse strand)
caagtaagttttcttccatcagtaagatttatatatcgaacatgaaaataataattaaatgtatagaccatattgtttttttcgagtcagaaattgtaatttggtaggttccattaaagtctatcaccatttttagtttatcaaaatcaaaaaaaaaattctgaatattttcatcaaaataaaagttatcacaaaagaaaagcgaatgttacttaaccaggctgtttaaaaaataaaggatttaagaagtttaattagtatgcactatgacaaaatgctataagactaaaataactttactaggataaattttaatctttcttattatagaaatagattaaagttcaaactcatcaacttaatcgtattggtccttttccgtctgggtgatcatgtccacagtttctaaaagaggcaaaatttgagcaagtgattcc

SEQ ID NO: 121 - DNA, 915 bp, Arabidopsis thaliana
  Intron number 1 from transcript AT5G52200.1 (locus AT5G522 00) derived from phytozome v7.0 (chr-ID Chr5; pos 21203802 to 21204716 reverse strand)
accgaaccaaagaggtaaataaattttattgttttgattgttttctcttagtttgaatctttgatgattgtcacgaaagatctatctttgattttagttttggtctttgtagaaccaaacataggctagggtttcttacagtgtctttcgggatatgttatgggtgaatgattgaggaaagtgataagcttttgatatcaattggttatttaggttaaaccctttctgattgaaaccattactcagcaaatttgagaaatttaggaggtttttgctttatagattttaggatactttagctcaatgatcatgagagaggtagatactgattcctgcttcttcgtatttaaaggtttgtgattttgagtggtcagttataccattgtgttcttttgtttggaaagttagcagattggattgattttgatggatttctttgaagtatgtttctccttttcaaatttttactttcgcttgtgtctttagtttctattagatttgagaatgcttgctgcatcagaacggtaccttttcaatgtgttcaaataagatcaattgtgaagtcaatgggctgtgttatgtcatttttgtggagggatgtatattcatagatatgaagttctaagccttatatggcggtctttttatgaaggaatcgtaaaacagatatattttctactacacccattgaaaaaggaaatggaagagggaggtcttattgtgttaatgttcatggattttcatattccagcagaattgtttaactgtaagattctgtgaactttattgtctttagtttaaggcttagacatcgtcattcttttgtaaagagaggtgatcttttgtataatctagtatagtttctcatggaattgtcactaagtatgtttgttattatggcagggggcgtgttca

SEQ ID NO: 122 - DNA, 950 bp, Arabidopsis thaliana
  Intron number 2 from transcript AT1G48610.1 (locus AT1G486 10) derived from phytozome v7.0 (chr-ID Chr1; pos 17971395 to 17972344 reverse strand)
aagtagctgcacagcctgtgcgcaggactaggaaggtatgtttctctttaatttcattatctttattcacaaaatgtcaaaagaaatttagaaatggtctgataccaattatatgattgttcttgactgtttgttctgtatagtgtggaaataattcagggtaatgtcttatttgactctggtctcaaatgtggtctacttttaggattgcagtatctgaaattccccgtatttttagaaaaatgtgtatcttatctggattttggtgtattttgggaaaatgtcttatttaatattgttcttcttgactgtttcttctgcatatagtagataaagttcagagtaatgtctttatttgtctcaaatgtggtctattgtgagtgtgaagtatctgatattattcgtaatttctttgaaaagatgtgcatcttatctggattttggtgtatttcattaaatctttttttgtataatgtggaagtgaaagtgattggtctatttggtaagaagttatcatgtaatttgagtccaaataaatttcacaagtgtttagttcatgttagacataacaatgcttaatgtataattttaacaaaaggtatataccaattatacggttgttcttgactgtttgttctgcatatatagtggaaaaagtttagagttgtatgttatttgtctctggtggtctcaaatctggttaattttaggttctgcagaatttgaaatgattcgtaatattttgaaaagatgtgtatagtatctggatttggtgtatttcttgaaatctatttggttagtcattatcatttcatttgagtcaatatctacaagagttcatgtaagacataaccatgcttatacaactgtgtgtatacttatgtcaaagtcgggttttctatgcatgaacaaaagagcacttcagtggcaccggtagctgcaaacgtcgg

SEQ ID NO: 123 - DNA, 1278 bp, Arabidopsis thaliana
  Intron number 2 from transcript AT2G16485.1 (locus AT2G164 85) derived from phytozome v7.0 (chr-ID Chr2; pos 7141905 to 7143182 reverse strand)
gaactgtggtaagttttttctgttattctctcagtaggtgtctgcttaaattaaatcagtgaactatagtttggaaaaacatgatacatcatctgctaagcacatattttctttcactagtgtatgtagtggtgaatattgtttactataggtatttagagtgtcttttaactgtacttccctagaaaatcatgacagcatatgtttttttatctgacttccggattatgacatttataacaattctttgtaatttaagcttcttctttcttcttttgtttgagttcctggcttgcagtttgtctttttaagtatttgctctcaaattattagtttgaacctttagttgaaagttatgtcaaaggcatttttctattgcttttcacatcatctttgattttcgtgttgttccttattgattcttactttagtctcaggcctgttgtaccactgtccaatgctacacaggcagtgacagatgttggattgtttgtgaaatggataagtctgattatcatcaaggctatgctcacccttttttgtgtacagtcatgactctttgagattccacaagaacttgtcaatggtagcttttagttgattctccgttgttcagtgtaaataccaaatagcagcagtgggatctgctatgtcgtttatttaaataaactataaaagtaaatacactggcattgatacttttaaatactttggtagttttctttccttgactatgggttggcgtggtgacatcatccagttttatcataccagaaatctacaccatttaaacttggtaacataacatattgatattaatgagaaagattaatttttcacgatcttctaggcaccaattaatggttatctctaagctattttcatgctgcaccgaattgtaaatgattcttgcatttatagcaaatggatcagattttttttggtacagatgttgttcaattccacaaactattgagatgcaggagcccaaaaaacactgtacagtctcttagtatagtactgtccctcatattttagaatacatgttttaaacttttaaaatagtacactgtttgagggattatttcccctaatttctttaaactagaattaattggcattctgcttcggttatgctgtatttttaagtttctctctgtgcatggtcatacttttgtttggttacctctctctgtgtatgtatgtattccgtgagctttcatcatttccatgtctttctaatagaacctaacataatgcttcatttttatgagtagg

SEQ ID NO: 124 - DNA, 556 bp, Arabidopsis thaliana
  Intron number 7 from transcript AT4G10890.1 (locus AT4G108 90) derived from phytozome v7.0 (chr-ID Chr4; pos 6691558 to 6692113)
gggcactgactccagactcaacaacaaaaggtttgatgcttgcttgatatgtttatgtagttggctattggagatagtgaaagcagaatgtcaaaccatttcataaatagacctttggcactttgcttaattcaaaattgatgcttcagattgttaggtgttcgttaatatcacactgatggatgaaccatgctatgtatatcagctctgtattcagtatattgatatcgttttcatcatgtacggcatgtacctgcttgttcagttagattgacactttaattttaaggatcttctggaactcgtagaagcttgtattaataattccattaggatggagaatttttttttttccccatgcacgaacaaacttcatgttagggatatagtaatctttttatgtgttttggatttggtttaatcatgcagaatgtagaatgtatgaatgcgagatagaaatgcagaatgtacatctatacttactatttttgtgcatgctatgactaacagcatgtatgcaggtactgtatctcttggctcagttgataaagaaagc

SEQ ID NO: 125 - DNA, 841 bp, Arabidopsis thaliana
  Intron number 1 from transcript AT4G31480.1 (locus AT4G314 80) derived from phytozome v7.0 (chr-ID Chr4; pos 15263304 to 15264144)
cctcctcctctctccctggatctcgtacctttgaggtttgtctctctgtgttaaacttgcgactcagatttcatagagatcgatcccacttttgccttttcctttgtgaaaatctacaatgttcaattattctctggcgctctttgtttgatctcgttgaatattgatctgattccggtaggaaaccgattttcatgtttgtgcagctgagtgagactgcgaattatgtagatttcattgtttgttcatctaatctggggagatagatcgcattttttttttttttgaattttggttgatccgaagctgttttaactgatttttcgtttttatgttattattttggtcgtagttgtagtacagtgatgtgtattgctggatctgaggatttagatttgtcaatgttttgcatctttgggtctctgattggacattaccgaatattcttctgaaattatgatgttttctcataaaccacggattcgagaatagagatcatgtattcaatgtattgaaatccaagcagagaggtatggattatcgccgatgatactgttgaacttcttgtatagaacttactctagcactgatgaggacactagtaaggtgcttatattcagtaattcgaacttgaaatcgccagaaatattaaaagttttgatatcttgtttttacttgtgatctatacttcattatgtctttaatcaattgtaacaattttgctctattcatcttctatttcttatattaacaaaggaacacttgttcgtgaatggtttttccttttcatttgagctcacagatttttttctctttcactttttgtgcagcaccggagaag

SEQ ID NO: 126 - DNA, 771 bp, Arabidopsis thaliana
  Intron number 1 from transcript AT1G64142.1 (locus AT1G641 42) derived from phytozome v7.0 (chr-ID Chr1; pos 23806188 to 23806958 reverse strand)
gccgtgaaaatctcgtaatcagattcaaaattgaggtaaattcattcttcgtttttgtttttcttcagttgaatttgcatgtttgtttttgatgagaaattcagagaaatttgacttctttttaattcgagacaaaaaaaatatgtctctgagatcgatgtctgggaaattgaataattctgttattctcgttgctttctttccttgttctgtttcatttatttctgaaattttgtgtcggtttaatctagaaagactcaagtttttgatttgaagtactctggtttggtctcttttgttttgatttctctctcttttattctaagcttctcatggaatcatatcgatgaagctagtgaataatccatcatttgtggtgtatctctttgacaaaaaattcttcatttctcaatctgtttttttagatctcttgttttgtttcatgttgtggttgactaacgaataaaaaggttgtgctttttaatcttggtttatggtgtttgtcctaaactatgtgtgttctggagatgttaagtgttctgtagatttgaggtgttaaatgatctgtgttctgtagatttggtaacccaattgaatttttcactgctctattgcggtttactgccactcacttgtttattatctgttatatgaagcaggatggttagctgctaccgtaatccttgcgtgaagattgagaagaactaattttggtttgtgagcaactttcgaatcagctctgttagatttgatttgaacttttatttgaag

SEQ ID NO: 127 - DNA, 1108 bp, Arabidopsis thaliana
  Intron number 1 from transcript AT3G28360.1 (locus AT3G283 60) derived from phytozome v7.0 (chr-ID Chr3; pos 10615011 to 10616118 reverse strand)
caacccatttccaaggtcctttctctctatctctcttcttttctctttgttttggtttatattctctctaagtaggatcataatactaatttaagtatataagattatatacaataatacaatatatatatatatatatttaaattatagtattttaaaaattaaatattacatgaattgttttatataattttatattctttgagttgtaaagagtaaagcaaattaagcaatgctattttttcatttaatgttatttaaattgattttgtaggttaaggggataaacaaaaagttttgtttcattaaaatttaaattcaaagaatttagtttaatttccataggatattatattctataactaaaaaagttggtaagcaagagttcgagactgaaagtgagagccatgctaatctctaaaatgatgactaaaatacatatatttttgctatttaatacgttcatagccaatttaaataaaaatatttctcacattcccataaattagttactaccaaacattcaaagaagaagcagatagactggattatgaagggcgggtcaaaaaggcaattgaacattggcttactgggtgtagttagattattttagccaaataaactagcaataatccaacaattatgatagaattaactaaattacaatatttaaatgagtagacttttttttttccaatgagtagactgtagacataacaagtggtttctcatgtaatgatgacagagagttgtacaaattccagccaagaaatttaccttaaaatggaaaatcaaaactagacatgaccaagtagaccaagcatggtgggattcttaattaaaacgatcggcttatgactttttcaaaaaataaaaaactatcgtcttacatatatgtccatatgtgtatgttaaatagggatagcaataagagaaatgtgaaaacccaaatattttattacataatcttaaacttcttactataactcaacgtgtagtaagattacgattactatattgccccacatatcaattacattacttaaatatataggaaagagtactaatatagtatcttccttctttttttcacgttgtaactaacaga

SEQ ID NO: 128 - DNA, 1565 bp, Arabidopsis thaliana
  Intron number 2 from transcript AT5G05840.1 (locus AT5G058 40) derived from phytozome v7.0 (chr-ID Chr5; pos 1757866 to 1759430 reverse strand)
gtggtcctcctagaccattgcgccgtttcctccaggtaattcatttttctttttatttccttttccgttgtttattagtcaaatccattcaatcatataatatttgaggggaaatcaatagaaagccaaattttagtttttttttttatttgcaaaatctaaggatggtaaacaacaaaaccctaaaacattatatcaagaagttaatttatgacgaaattgggagaaacgagaatatttgaagaatggtctttctttttgttaatgtagtagagaggcatagctcctttttttacgttcatctttttggtttactttgttcattatgtttttgcgaaattataggggttttttttttgttcaaggcaatataggttgttttatacaaagaattatagggtttttgtgaaatgtttgtaaataatattatttggaaaaataatgtggatatttttcttgtggttatgctacatttctagtttctacttgattcatgaaaagacaaagatcctttatgtctcataaagcatatgcaacgactgatcattatggcactgtgtgattgagcttttccacttggagttcaataattcattcttcttctattcctgatttttatgattcttagtagttgacgttttcttttccttgattgttggcaaaaagatttttctttttttgtcaatcagcaaaaagatctttcaatcatcaaacttcctcttgctttttattcttcattgcttcgtttgtttttctttaccacgtttacttccaaaagagaattttctagctaaacctaccttcaactttgtcaaacgatagaattggtcatcgtacaatattgttcgttgaatagtttggattttgatttggaaaatttgataacgaataaatgctagtactaattaaaaattactagagtgaagaacgtttctaatgtacattacgcgagaaccatatacccatattaatatattatcatataatttaatttaagataaaaccattgattttttccaatgtaaacttatgacttttgagatttgatgtggtcttaaataaagtgtgacgtgtcccatgtacttgcgctcttgttttctcatttcaaagtggagaaaatgcttacaagttaccaaggttgttggaacttgaaagttggaaccatctatggtccaccactaacaacaacaaccaaaaatatatacttataactagtatacattagttggttcccaaatagatatatttgttaacaaagatattgctacttgattttctccaaatagtatttttgttataacaaagtagacttttgttcccattaccaagtgtatagttatttacaacctaataagatcttcttttattgtcaccaaaccaatagcatttgtttgttttgggaaatttgtaataatgatgaattaagttacttgtcgttgacttgtttcaagtatctttgtgtttagtacttgtctgaatggaatcattacaaaggtttcagaccttaatcgttgaaacaaaatgaaacagggtcttgatccaaaatcaacggctaatctatttgc

SEQ ID NO: 129 - DNA, 1076 bp, Arabidopsis thaliana
  Intron number 1 from transcript AT5G64880.1 (locus AT5G648 80) derived from phytozome v7.0 (chr-ID Chr5; pos 25932600 to 25933675)
tttccgtcaattcaagtctcgtacagtctcatcaggtaactctaatactatctgtctctttcaatttcgtcgacgaatcatggatttagtcgtacctgctctacgttgacttactgttcctaaactgagatctcttgtggttggaattgatttttgaatgctgaattagataattagtagactgagacgatttcagctagatcgatgttcgttcagtttcttcattgtggcttctgggaacgggaaacaaaagtaatggggaatttccaggggttttgtggaacttaaggggtttagattgcaattaagaattaatgggagaaagtggcagccataattagctggaaagtagccacttttgattgttagagttagctaaaagttgaaatgatgggtttttttcaatgttctgggttctgaaattaggaaatagtgaaaagttatctaaacatagcaaaagtaatcatcctaagtatggtttctgaatcatatcgttattgttaatactctttgttctaggtttttgacagtaaggccataaccatcagggtttagatgtgtgatgatctctcaatctatgtttagatattcttgaattctttgaaatgtctctttctaaatttggttggtagtttagctttctttaggtaacgaaccgaggatggtctttcctttgttttaaagctatttgcttgcttagttttcacaagagatatgtcttgttttgtctttaagcaacaatattagattcctcactagcctttctttcagagatgtctagtgctacatgactcagagattcttggattcttaaaaaaagaacctataaatctaagttgcgtttcagacatttagattatgatccggaaaatggttagaaccaaacagttctcttcaagtttgtgtggtttatctgttgactggaatcatcgtgaagtgcattgatgttgcatctgttgtgatttgtgaatatgcttaaccactgacttgtttcttagattcatcctttggtaatgaactcatcggtttttgtaatcacaggttggaagctctcaaagcataaaaggagagataac

SEQ ID NO: 130 - DNA, 1987 bp, Arabidopsis thaliana
  Intron number 15 from transcript AT2G41620.1 (locus AT2G41 620) derived from phytozome v7.0 (chr-ID Chr2; pos 1734799 8 to 17349984 reverse strand)
ttcaattcctgcgaaatttccaggtaatcgatgtctgtccttctagggttttgttaccatggctaaatcgtgattctgcagtttttatccttggttatctgaccgtaatagctacttactttggatcttattagaatctgaaatctgagaaaataatctaatagatagatcctctaggttccaagttttcttagtttatgaaaaataatttctgcatgggccgtataagcccatatcctatatttccttattgccaagatttatatcttttatagcaagttcgtaatattctcgtaatattctcttaatattctcttagggcaacagtacttgtatgtatatatttcatgatgaatgaaaataacagagttttcacaactaaacgagttcgtgaagcattggtatttctaccgccttggcttggtttatgtacaccgagtatgttcagctccatcctatacagattttgggacatgtgcctagggttgaggtttcatatatagaaagaactgaacaaactcggtgtacatagaccaaaccaaggcggtatcaactactaataccctatcaggagaatccagactctccatatcacaccaatataaatttctcttagtgctcttcttactagatccttcaccatactctcggtgaagtactttgagtgcatttttgcttataaagttgtttctggtataaatcataataataaaataaaaactaatttcgcacaaaaattcacttgcgtacttgattaacaaaaccttctatatattattagtgtttgagcaaattgttagggctagaaatatttttttatgtagactaatcattgattgacaaaaaaaaaattaaaaatttagactaatcatttatagtttacctaaacctactttacgccggcttatggttgaattctacgtggatttaagcataagtttacaatagccatagtaattcggtaagtacatgcttttgggtccttatcatctctattggtgtggtcatatctgaataagcagagctactacggatcacgaatctcttcttctcgtatgttttatgtttaagtgaggttcgatctagaatctcatcaattaatatcaataaaagtacacccatgatcaatgagaactcatgtaacaataatctctgttcgtaggttcttggggataaattagtcatcggaatagcataccagagatcgacgatctcattaatcattatgtataagtacaaacttcgtaaaactatccaatgctacaaataacaatacaagatagtacagtggtaccacctaattattgatataattctatgacttctgaacttgaatatgtatgtatgtatggttagtcatatatttataaatctaggaattttattttcttaaggttaatcttctttaacaaagtttaaatctaaaatttaacattgcatcgcagtatatatactagctgtaatataatcttgttcaacattaacataaccaatatattgaattaaaaagccaagacttatttatgcctagtagaagtaaaaagtcatttttttgttcgggtaaagtgatgaaccaactcagaaggctttcaaaagcaatttcctaatggaatatctagcaaattagcaagtgttacaccacttttctatttcttcttgtttaaaactgtaaccactatcttgcgtcatcttgacactactacttctcactgttttgatttaactatttacaataaggataaatataaatagatatagaagtaatgtttaagttttaccatttcatcatcacatccaatataaactcatcattaagcaatcatttacatttacttcatcttgcctctgatttttcctttttgtttcaaatttcatgtgtctgatgtcttcttactctgtctccgactaaccaaacaacatacttttgtgattacataaacacatatcaacagaagaagaaaaccaaacacaaaaaccctaaacaaga

SEQ ID NO: 131 - DNA, 395 bp, Arabidopsis thaliana
  Intron number 18 from transcript AT1G10130.1 (locus AT1G10 130) derived from phytozome v7.0 (chr-ID Chr1; pos 3317408 to 3317802)
attgcaaccattattgggaaaaccaattcaaaaaggtgtgactctagtaaaactaaactattctattatgttgaccgtcattttacatgccattggataatgtaattcttttgttcctatagttttctgaaaactatgaaattgagaaaatactagacctggaatttgtagtagccaatgcgatacacactttttatctatgttgatctctgagaagaagctcataacttcctgagtaaatctatataatgttttcctttcgcactagatagctattttaagagctccactgcaccagtataattagaagttaatattgacctgggaacatcatatttcaaagaatataatagtaatttagtatgagtaactgattgctatcttcatcaaggttt

SEQ ID NO: 132 - DNA, 541 bp, Arabidopsis thaliana
  Intron number 1 from transcript AT5G08170.1 (locus AT5G081 70) derived from phytozome v7.0 (chr-ID Chr5; pos 2630440 to 2630980 reverse strand)
ctcaaacttggatcggttggcctgtaattctctatctctcttcctcttttctttttttttcatgttttattcattaacctgagataaagtaaaaattgacggcgattctggagaactcaatctcgctgttcaaaaatcaaacttcgatttcgattttgtcctttttttttttttatatggatcctgctcgtagtttatcattgttcgaattgctgttttctgtttatttgatgatttctctgcttcctggttcgtttttgtagagtttccgataaattttgtatagcttctgtatgtcaagttagcatctagatgtgacatgagatgagatcttttacattgcaatctatcatggttacagattctgcaaccaaatcagaatttaaagcattttcagttaggttgtttgtttcgatttgtttcatcactgaatacatgaatcaaacctcaaaccacttttgtgattttgaaatctggattataattctgtcataatatggctgcaggaacggcaagataactggcggcacaacgctttacc

SEQ ID NO: 133 - DNA, 230 bp, Arabidopsis thaliana
  Intron number 1 from transcript AT1G36640.1 (locus AT1G366 40) derived from phytozome v7.0 (chr-ID Chr1; pos 13853266 to 13853495 reverse strand)
aatctccaagccaaagtaagtatttttttgatacgatttgggttttgtagtagttcaaaatttgaaacgcaaaccaagtattcttcaattttgttcatacgttgatcttttggttttggttctatgtttcacaatttaacagttgttttatttctcttcttcaaattgattagctaatagttgttttgtttttagggaacaaaataggaaaagaagtttgggatcaaaca

SEQ ID NO: 134 - DNA, 926 bp, Arabidopsis thaliana
  Intron number 1 from transcript AT2G37450.1 (locus AT2G374 50) derived from phytozome v7.0 (chr-ID Chr2; pos 15723770 to 15724695 reverse strand)
gctccgttcgccttctacttcgacaagtattctctacatttccatctttatttcaatttctctcacaaaacataattcaatgtttggtttgcgagtagtttcaagaccatgatagcagattatcattcaggcctaattggtagttgcgtttgcagcattataaacgcaaacggaaaagtaaacgtggtttttacgtctaaaacaatcacagctctatagtttgatataaattgggaatcgagtctacttttattactaaatcttttattctacaaaacgaattattttcagatacataaattaaagataatacaatgttgagtcttttttgtttgtggatggttcttggacgtttaacatatatgttaaaaacaagaattgtaacagttttgccaatatcatgcattaaatctgagtacttaagattttagtgttttctttacaaaatacacgagttcaacatttaatacataaaccgataaaagtagttatgcaacagtaattactattgtagtccagtaataaattaggaaccagttgtgcagagtacgggatctacacaattttggatttcctaataattctcgatgaaaaaaaacaggatagtgagaccgaagatgacagcgttgattttcttcaaaatagcgattcttggtttattagagtaatttttttccttcttcaaattattttctatgagacatcacatctcttcttttattgactgaatctgatttattttccatttcgttcatgtattttgcgtataaatagtccagtgattgctcaaaacttattcaatctcgggatgaaatacacgacagctacatttgcaattgccttgtacaacactttacctgcagtcacgttcatcctcgccttaatattcaggctcgaaagcgtgaagtttcaaagtatcaggagtg

SEQ ID NO: 135 - DNA, 755 bp, Arabidopsis thaliana
  Intron number 1 from transcript AT5G54760.3 (locus AT5G547 60) derived from phytozome v7.0 (chr-ID Chr5; pos 22243967 to 22244721)
ccccaaaatttgcaaatcaggtaataactttctccgtatgtatctcttcgatcaccgattgtctgtttctttgtttgcttttctcgatccgttattgaatttttgagttcgtcgttaaattttgattacatcaatttttcttttcgattcgattcagagagattgaattgcaaattatgtgccagatcttcgtgttctgtatctgattccggatcttggttattagttttttttttgttgttggaatgaattcaacaacgatgattttgatttggtcaattgattttttaatgctatagttttaaccttataggaatgtaattgaactggatcagctttacttgaattgtttggatctagattattcagacaacatctttttaactaaattgaaacatatttgtgtttgtgttcttgatgatcatgtgaatttggtagcataattttcttgttgagatgatttctgagatgggtttttgtagtttaattttcttactcgatgaaccatctcgtgcaccttgcaaaatcttttgttctatatctcattgttcgatatcaaactaatgaggttaacgttttttggtgagacgaccagttatgtaacatgttgttaactatcttcatgtttgaatcgattttgattggatgttttcatgttctatcatattctgcggttttgaatcttctgaattctaacgtgaggttatccttcttgtgcagatctcagcttcccggttagtactaccctcaaatca

SEQ ID NO: 136 - DNA, 2383 bp, Arabidopsis thaliana
  Intron number 1 from transcript AT5G45200.1 (locus AT5G452 00) derived from phytozome v7.0 (chr-ID Chr5; pos 18287500 to 18289882 reverse strand)
acctcgaagacaggcaagagggtggaggaaaataggtatttatctctctttatgaaaactttacgttcatagtataatacaatcattctttgccattaaaaccaaaaaaacttgactttttattttgtcatttttctttgtaaagtctgtgagtaataattttaatccgatgatctcatatgaacatgtagtactccattaatatccgaacggataaatttgaaacgcaagtatttgtttttagatatgcacttctaccatgtgatttaattaattttattttaattagaaatacataacgagtttctaatttcacgtcttgttttcacataattacatatgcacttcgtttagagtgtggatattattaacatttggaaattaacaatttaattaaacttttgatataattatacgttttctaaaatttgtaaacgtaatcttaaaactatttacgatttgcatagataaaataattataaaaatattcattttcctttatttatgtttcgatttatttgtttaacataattctaaacgtcgcataatacaattaaatttcgaagaacataatgtcaagtttataacagttattctaattttcgtagaacatagtgttaagtgtagaaaacacattccacttttgggagagtgtagagtaaaccatagaatacttgcatgtctgatattctaatattggtggtatacacaaaatataaaatgagaatctaactcgtgtcgtaacgccgggttaatgatatatatattttgtttaaaatgtgtagttatcaaaatagaaaaatatatacaaagagtttaaatatgaaaacctaacaaaactggaaaataaggcagctgttaaaacagagcatggcacgagttagggaacaaagtatatatgatctagtccgtggtagttctgcaagtatggtccgaccatgagcaatctttaatttggagaaaaactaaatagttggacgagaggatcaaatttaacgaaatacaaacttttaaatttatatgcttgttaagttaaatttccttctcatttggatttaaatccattttgattttatttataacatgattgaaccactatctaaacattttagttgacatgaacgttaaataaactttttgtttcatatgtaattgagtaataaatgtctacttaaaaaaaattttgaatcaaaatatatgcaaaaaagtggattttcagtaatctatatattatatgatgattcaaagaaattataaaaacaaatcaaacaaaaattatatgagaaccattattttaaatctttacaaaatcctttaaatgtctttattattacttgtggaatatcatatggacattttgaattttataataattgtgaaattcttttagttgtgtttggttgtatgtgtttggttttattactttattagtttaatgttccaaaaataccacttaagttttcgtttttcaaatataccacaaaactaaaattaaaacttttaaccttcaaaactaaaacttaaaccctaaaataatcaacccaaacctaaaaagttaaaattttggacctttaaaaattaatttatgtgtttgtgatatttttggaaaaccaaaacttttggtattattttaatagtttgtttggtaaaaatatcttgaaagtgttatattttgaggaatatagatacacaaaagttgtcatggtcctaaattttatgagaaattctgcaaaatacaacactttcaagttttgtttccaaatatacaaatagaaggttttgattttcataaaataacacaaacacaaaaattagttttcaagggttcataatttaaaattttaagttacgtttgggttaactttttcttaacattatggtattgggaatatggtttagtgtttatgttaataatttagtttcgaaggttaaaaatttaattttagttttgtggtatttttggaaaacaaaaactcaagtttgatatttttgagaattgcccaaattttattgaccatccaggttaggtgatatgtaaaagagttagagtatcacatgtccacatatattactaactcattgaaaatgcattgtgtaaattatggttaataacattggtacgtaaaattttctgcataattcaagctagttattacatgtattattagttttctgtataattcaagctagttattacatgtattattagttttctgtataattcaagctagttattacatctattaagcattattacatgtattctttcttttgtttcgttattaaataaatctaagaaaaattgactgactattattatttgtctctctctctctcttatttggaagcgacgagggtgcggaggttgaacaaatcgtggagc

SEQ ID NO: 137 - DNA, 4197 bp, Arabidopsis thaliana
  Intron number 3 from transcript AT1G70510.1 (locus AT1G705 10) derived from phytozome v7.0 (chr-ID Chr1; pos 26577460 to 26581656)
gtgcactggtccagcgtctgctacagctctttcaggtcagcactaaagtgatatctatctcttgttcgagtgtacttttgatttcttgtttcctagctagtgtttttattgatctttgagcactatcctcggtttgtgtgtcctttaaaatccttgcgcaaatttctccttacagttacagatcttgcggattagaaaatctatcctcagataacttttcctttctgtgcttcaatgatcagtttcttggaattgatggaaaaattggaaatcttctactgttttttttttccttaaagaaaacgagaatcgataagttgttgtagctgaaactaggaggagcttagtagatccggtttagacaacccaaggcaataaaagtcagaaaaaaacaaggaaactctaaaaccctagttttgttagaaaacaatgattgattcagccacatcttttatatttggtagaagtcattcatgctttagatagatccatgaccttcacacatctttgtgacatttattttctatcattagctatggtttaagctgtggggcggatattaggggaaagccggtgggtaggattttctctgttagtgatatttattttcctagtgattttggtatggtatacttttcttttgttacttttatatatacttgtattattatcttctcctctgtcagaagaaaatatgggtctatgaaagcaaaaacttttgcgctagagattctgattttgacgtttcagtgtcgtactggaagttttttaattgcttatttccagtgaaaattcaatcatagagaaaaaacctagtcataacttccactaataaatgccactgatttttcttgagtttgtccttggcttcatgtttagatctctagtagtatcgcttgttttcatcttcattaagagactgatgggtaaaacaaaactttactagttcttgattactccaacttctcttggtgaatgaaccaaagtttatactacttttccatagaaagtgtcagacttaagttttatccatgtcactttagtttttactattagagagataaaaatttattgtgtataatgagtataacataagattgatttgttttcttagtgtatgtgaaaattaatgacactagcccttatttttgaatacattgtatttgcacctaagggtcttacatttgaagtccactgtgttcaaattacatgtacaaaatcattggtgtgattaattttcacgaacctatctgacttagtaaaccaaagaagtgtcttgatcaggtcaaatagttggattttgtgtttctttagctcgaaaaagctaaaccaaatctctgttggatttcagttaatctgagctcatgcgcatgtaagtccataaaaatgcttgatggccaagaggcttgtatattctgcatgtcgtggttaatgtgtctgttattcttgtattcttgttggaattttatgtgaataaataaatgattgaaatgcattaagacacttacacaatgtaagtgaggtttactaatttgccgaggtattaaactaaacttaatggtaccttcttttccaccatttgttttcttaattaagcagaatagaactttgtaagtattttacaagcagcccaaataaggaatagtaggtttcttaaaagaatgtaattttagttgtctttgtgttgtttttgtagcttatattggttaaacctttccaacagggcaaaaattagtttcttgttaatctacactaatctacttagccacgttcatgttgtcagaatacgtgtgtatattttttataagtaaagtatttcactatcttagggattttaaagtaatcattttacttcttcatctccacctgataagaactagctggaaaaaaattggaactacaatatagtggaattcagctttaatagtcttctttttcttatatgttgatatcaaatgctgcttcggttgtactttgttagcattgtttaattccgaaaagttgttaatacttatcagcgtacttaattaattggagtttacatagggaataatcttgtccaaaaggttgaaaaacagatcacttgcagcttgaatttatctttattggacgaatgtttagttttttaatggttttgaagtaccacttacctttttagcgtaatctcatgtatgattttgaaggaatatatattaccttatgaacatcttttccttggtcaatacctttttctgtttcttaagtcccgagaaaggactttcttttcaactgaatatcttaaactaatagtataactcataatatgtagttttcagagtcatgtgcttttggtttcttttcgtgctaatatgctttaggaataaaccaaatcctctttagtcaactgatgtttgtcatagcaattgtgtttacttatttttttcgttctcgctttagtgtgcaattgacccttttcgtgattaagatggtcaatcttggccatggtttttgttccatcctcatattttcttctaatcatttggtgttcggatggtgtattgatacaatgagatccatgtgcgattttgtatccatatgtggaatttaggactattgtttaagattattcactacagtctacaactagtatttttgtgttgtaaaatgcattcaccctaggtccctatgcattcaccctagatatatctttggctgtgaatgatattctattcattcaatgttcgtaggaaactcgaaaagcatgttcttttgaacaaaatactctgtcatggcacattagttacttcaccagttctagacatgataatactgataatctgtttggttatatcaccttcgttgatagaatggtccttttgacacgcacaaaaaaacacacccaaatgcttgaattagaaatcttttagccctttttaatttctaaatagaagaagttggagacagaagcatgaggtggtcaagtgtcacatggactcccgtggattacgttggtggatccctttatgacccaatcgcaacactctctttttaagatttgatttgattttaaagaaaaagaaagagaagaaaataggggagagacatgggttttgatttatgtacaatgcaatcatcttacgactaatgtttctccacatctttttctactgttgcttagtggttgtcatttcctctctgcgtttgttcccttaatgggccatgcaatttccacgtgtttaactttttttgggagatgtacaagtctatctactttttttttatcagtgcatgttgtctctttcgcattgtcttgatgttatataggaaccaaattcggctaataggtaaagaacaaaccgagttactattgcacataccatcctcaactagcaaagttttcatggatagggtgtgaactatattttgtgtgatttgtctaaggatcagctcattagtggtgtagcaaactacaacctaaactctttagggagactttgaaacgatgtctttctgtaatcactaagttgagaatactaagtgaaatttctattaatgcaaataatttgaccattaatcatgtttaaactcccttaattaggctcccttttagtcgcagtaacataggggtcagtatggtatggtcataaatggggcattatgagaaagttcataaatgttggggaagcgttttttccgggggtcactcaaacaagtgtcagaaaggtgatacgtgtcgtgactcaggtggctagtggtaagtcccaaaggagcacgtcagtggcaatggaagctaaactattcagtgactgcgaaagtttttgactgatcatttttgtgcccgggtcttgtaaaacctcgatattatctcgctatccttgtttttccccttttacccctttctttcacccttttttttttttttttttcctttctttcacccttgttctcttctctatgcttttttggctcttttcttcttttagctgctttagccacttagtcatttagccgagcctactagtatcttagtgttagctatgtttgttagtgttggcatagtggtagaatttgctttctacattgtcaaatatgctaccataaatagcaccaccatacattctcctagtacattttatcggtatggcacgtatttggctaatacgtgggagctaatcattattgaatcttctgtatgacattattctcatgtatgagcag

SEQ ID NO: 138 - DNA, 519 bp, Arabidopsis thaliana
  Intron number 1 from transcript AT2G47170.1 (locus AT2G471 70) derived from phytozome v7.0 (chr-ID Chr2; pos 19366745 to 19367263)
ttagatctcgtgccgtcgtgcgacgttgttttccggtacgtttattcctgttgattccttctctgtctctctcgattcactgctacttctgtttggattcctttcgcgcgatctctggatccgtgcgttattcattggctcgtcgttttcagatctgttgcgtttcttctgttttctgttatgagtggatgcgttttcttgtgattcgcttgtttgtaatgctggatctgtatctgcgtcgtgggaattcaaagtgatagtagttgatattttttccagatcaggcatgttctcgtataatcaggtctaatggttgatgattctgcggaattatagatctaagatcttgattgatttagatttgaggatatgaatgagattcgtaggtccacaaaggtcttgttatctctgctgctagatagatgattatccaattgcgtttcgtagttatttttatggattcaaggaattgcgtgtaattgagagttttactctgttttgtgaacaggcttgatcaaa

SEQ ID NO: 139 - DNA, 772 bp, Arabidopsis thaliana
  Intron number 1 from transcript AT5G54760.1 (locus AT5G547 60) derived from phytozome v7.0 (chr-ID Chr5; pos 22243952 to 22244723)
tcatcagatcttcaaaaccccaaaatttgcaaatcaggtaataactttctccgtatgtatctcttcgatcaccgattgtctgtttctttgtttgcttttctcgatccgttattgaatttttgagttcgtcgttaaattttgattacatcaatttttcttttcgattcgattcagagagattgaattgcaaattatgtgccagatcttcgtgttctgtatctgattccggatcttggttattagttttttttttgttgttggaatgaattcaacaacgatgattttgatttggtcaattgattttttaatgctatagttttaaccttataggaatgtaattgaactggatcagctttacttgaattgtttggatctagattattcagacaacatctttttaactaaattgaaacatatttgtgtttgtgttcttgatgatcatgtgaatttggtagcataattttcttgttgagatgatttctgagatgggtttttgtagtttaattttcttactcgatgaaccatctcgtgcaccttgcaaaatcttttgttctatatctcattgttcgatatcaaactaatgaggttaacgttttttggtgagacgaccagttatgtaacatgttgttaactatcttcatgtttgaatcgattttgattggatgttttcatgttctatcatattctgcggttttgaatcttctgaattctaacgtgaggttatccttcttgtgcagatctcagcttcccggttagtactaccctcaaatca

SEQ ID NO: 140 - DNA, 619 bp, Arabidopsis thaliana
  Intron number 1 from transcript AT1G56070.1 (locus AT1G560 70) derived from phytozome v7.0 (chr-ID Chr1; pos 20971077 to 20971695 reverse strand)
ctttctctcgttctcatctttctctctaaggttagtcccttgtgtagatcctctcttcatcgattcaatttcatcttccttggtttgatttaggaattttgtcacgatttggtgtttagatgatggagtcttgctgttgatctatgtttatagcactttgtttccatggttctgttgtttcttaccgtttgttgtgcatcgatctggttttggtagatccctcgtagataataatctgaatatgtcaaagttttcttacaagtctgttgtgttttcagttttgattgatattgttatccatgtagtagtcgatcatccaaaaactggttcagtgtgattctccgatcatcgccgctgattttatatttatcatcatgtatagatttgcaggttttattttgttcgttgtgtgtttttgttctttgttaaatttaacctctatgcatttgatgtacatgtttttgtgttggtctcagtttctcttattctgtataagctaagctaaagtctccatggttagtgtctgtttagtattaaaatatttcaatttgctaattctttatgtttttgtgatgatattgcagagattttgtaggtgacaatcaaaagtttgacaaaa

SEQ ID NO: 141 - DNA, 332 bp, Arabidopsis thaliana
  Intron number 1 from transcript AT4G02890.4 (locus AT4G028 90) derived from phytozome v7.0 (chr-ID Chr4; pos 1279665 to 1279996 reverse strand)
aaatcgttctttcaaatctctcaatcgggatcaaggtaaatttctgggttcttattcagtttcttcgattattttccattcgatcgcaatttcgtccctgttctttgagtttgattcggttaatctttgatcggagataaatatctgagtttcatcgctagatctcatctatattctgaactagggttcgtagatttcacagatttgtatatttaggcgtcgattctttgaatttgatccgatatgtgatttatattcagatctggtggtagcttttttaatcggatttgagattatccaagcgattaatctcagttttttgtgaattacag

SEQ ID NO: 142 - DNA, 3961 bp, Zea mays
  Intron number 1 from transcript GRMZM2G140590_T08 (locus G RMZM2G140590) derived from phytozome v7.0 (chr-ID 8; pos 1 15015594 to 115019554)
gggggcggccaaggagggcggtgcgcgcaaggacggtacgtcggatcttcgcgtcacccgggtcgaatcaggtggcgttccttggaatttggaaagagctggatcttggatgcgtttgtggtaggaaatgacccttaatttcttgtgaagtggcccgctgatgcgtgcaaagccgggatttgggtgggtagtgttacagaatgagcgaagctagctgttgtggccgtattttaactgtttatgttattggatttagatatgatagagctgaagttaatctctcctatttcgtttatcaaacggcatttagcatttgtggaattagtatttatgttggggtatatgatgaagtgatgttagcttaccttgttcgaggagtttaatatgtggaagagaggacgactatcagagttctatgcacctttcttcatgaaggggagagctttgtgcatcctttgttcataaagtagctgggataatatcccttaaactaaaaaaggaccataaccatcgccttggaagtcatagagtagtagagcttaggctcataaaaaatatgttctttcacagataagaactgacaaatatttgttgagtaaatttcattgaaccaccacatagatgatacaagtgggtacccaatgctattttagttcatctctccccaccaaaattagttattacatgtcatgctgttttagttcacttcagaaagttttgatcaccccagtgaacccagcaagtggaccttgcatccctaaccccagatccttgtcttaactgggaagactgaagccaaatttatttcaagtcagctcgtttcttgttttgtaaaacacgcacgaacatactctgtggacaatggggtgggtgggtatgttatatgtttatcttctattaatgtaaatacacaattctcctgtgtattcacagaaaaagaaaagaaaaccagactcatgtcttgccaagcgaaactaccactggttttggcccccttccacaaactaccactattctcctcctacattatcctgagcagtgagcatctgagccaactcggcagtgtcacatagtgcaaaacagagtaaaacaaagtagtggtaaaatgtgacaatgacaagtgggcccaggtgctgaggatactgtaggaggcatagctttatgagaagcgcccaaagtagtgtggttctgtgaaatggccttcagaagttatgtgacagttaggacagaaatgtggtagttttgggaaatttactctgatttgtttgatgatgattattgagcacatatctgcctgccatatcccctagattttgccctgcactctataatcatgtgatattgattagcatcagtagcttcggttttatcttttctttgtttgttatgtatttcaccagtagatttaagtatccctttatttatttatttttcttgaaagcgcaggagaactgcgcgataatatattaaagaagaggggcagatacaagaacaaactgggggcccctacggcggccaataacaggcatacagaaacccatccatgactaaaaaactaacaagaactaccacaatgctagctaactagcagggaggcccagaatgggggcggtgagcaaagacaactttgcacaagccatcttccaaaggtcaacctccaacccaactcttctaattgcgtcagcaatactggggctcttactgtcaaatacacagccattgcgctgcttccataaggtccaaactcccagaatgactagagaattgaggccatcccttgcaattccagagtccttagtgcataacgttctccaccattcaaggaaggcactatcctcagattggggggcaagaagctgaaggttcacttgaagaagcagtttgaaccaaaattctcgagcaaaaacacatccaatcaacatatggtccaaggtttcttgatcctggtcacataatggacatctctccggatggtccatgcctcttttctgcagcctataattatatgctgtccaaaccttcctgtgtgcgaccaaccacataaaaaacttggtttttggaggagcccaagttttccatattctatgaaaaggctcaaactcagaagatcccataaagaaacccctatatgcttcctttgaggagaactttccgtttgaagctaggcggaaaaaaaatgcttgtcttcaacttgaggtcttagaacaattgagtcaattaaatcccacaagatgagaaattcattgataattccaacagaaagagctccctgaatgtcagaaatccagctctgattagagatagcatccaccactgttctcttgttaacccttctcttaggaaaagtatccctttatttatcacttaattcttccagtttaaaaaatcagctgtattaggattttaggtagtcaaatttctttaacttagcccatcaatacatgcacagttacataagttgacaacacatgattgattttattagattttttgtagaccaaggcatttagccctgcttattttgaaagcatcacataagttttgctggggataccagtttacaagaactgcggagcccagttaaaactcacctccactaaaagccaacaccaggccctacccaaccagagaaacactaacaaaacaggtaggttgctacaacgaaaaacaaaaaggaggaaaccacagcaagagagaaattctgaatagcaaaatgaaaagaaggaacagctaagccacagatgctttgcctttagcctcctttttcttcatgtcttttggcaaccagacgctcctagttgtttgacaccatctttccgtctaggcacatttcactatcttgaaagtccatcctttatcttcaacaggaattcctccatcttgtctctgtcttccttcttcgtcgtcatctgccactggtttagaaaaccaagacattgaagccacttgtttaggagatttaagcatttttttggagaaaactagaccatttcttgttttccacaacacccaatccacaccaactactatcacccacaaggacttgttcctatctccaccatctttgttcaggcacagctcctggaatttatcaacgatggtggtattttcggccagcccaagctgtcctgacccagcaccaggccaccatcgctataaggcatctgaacagcagatggtccacttgatttttactagatagcatataacttccactatttcgaatgatatatcactacaaaaatcacaagtaaaagtgtcacattggagactgtcactttcttaaatgacttacatttggaatcagaaggagtactatgtttttagattaaagtccatatcagtgggaatgggatggtcaaactttgctctgagagactagatattcacattttaatcacgtgaaaaaacaaaatatatacactgttgcattatttggtgggcttagacactattgtacatcagtgggatatggaatgtgcatattagaattgttatagtttgttagttgcgtagttaatacatgtatgttttcagttatatatattagacctttataagaaacacaactctgtatatttgcaagtatggaacgtggccgacaatattattttacaccaggaggtgccttagcagcacaggtggcgccttagtctggttcctgttctagtaaggctgcatacaatgcattcttctttgtgtccatcaagtttgtgccttggaggagaatttggagatcctcggcaaccctggggtgtaaattttttttgtgtcttgctgtcaaaaagtggtctggatggctaatcaaaattgtacaaacaatattgtacaaacatagtttaacgcatcctgctgctagcttattgtgtgatcaagctgaagagaccatcctgcatattttagtttcttgtattttcgctcggcaggtctggaccttggtattacagaagcttggacttgt

SEQ ID NO: 143 - DNA, 3748 bp, Zea mays
  Intron number 1 from transcript GRMZM2G004653_T01 (locus G RMZM2G004653) derived from phytozome v7.0 (chr-ID 3; pos 1 74336976 to 174340723 reverse strand)
gagctatcctcgccgcctgcgtgctctatcttctggtcagtttgcattccaaagaaagtactatcgattacaaattataaaacatgagcttatttggttatatgcttggtatacgctatatatagatacacgataattatatttaaaaataaaaaatatcttataatctaagataaaaaaatcaaatcttattttaagttaaaatgagatgagtatttgttttctcacatcttggttgttgccttcttggcatttcttttcatcttttgcatccggccggcgacgattaaggcaagccgtgatggtgctgatctaggagctaataggagagaaactgtctcttgccatgcaaatctttttcccatgccgggacgatggtgctgatctaagagctgataggagagaaattgtctcctgccatgcaatcttttttccgtgatataatcctaggagagaaattggcgtgggtgagagggggcaaatagatctgttgttgttcaaaaaagaagacacgtgacatgagagggtgcgccggagagaattgaatggcaggaacgactaagatgtcatacagtaatcgtaagagttccgtgcgacccaccgccgtacaccattgatttcaagatattgagacatatatccaagggtttctaacaaattgagagttattttttaattctttcgtttttaatagtatacatttctttttcttttttacactatatagatatagccatatatataggcgcgcggtatagtaataccaatatcgtgtgtatatgagtatttgttagaaactgatatttcatccaagttttttttaataaaaatagccctgaaatgaggtaacatcaacgttgccgtcttcgcagttggtaacctcacgcacattaaagaggctcccgttattgggctgtcaacagtagaacagctatcctattctatctttattttaaattttattctataaatagtatcatctctacagtgtaaatcctttattttatacggtctgctacgctacggacagctttaaagtgtgaacattgcctatatcgtgggaccactaaaaatagcatacacacgatactttcaatgttattttatgagttgtagatgttcaaaagaataaagatgtttagtcaccagcaagttagattagattagacttgaaacttaactgaagtcacaagtcaagatattcaaacacatatagatagccattgttcctatcatgtcaagtatatctttgttctggacttgttgtaggcaatgtagggactagggttccaaatctaatacaacatacatatttttgtaacacttatttattgaacatgtcgaccaatatcctacaccgtgtaatatagtgggtctaattgtcatcgtgaaaaacttaccattttatcacataggatgtcagatgcatgcaccacttattccatcctgtttggattctacggctaatttcgtcatcaatattctcatttctatatagcatagattataaacgtcgaaatgcatccttccctagacactacttgactttataaaattacatcttctttataagtattagtgttgaggtcacatatcatatatttggttttagttttatagagtctaaaaactttggactcttatagcaactccactagttcccgaaagaatagcttcttaaatgattgtttacgaaattgataaatatggtttggaagtaaaaaatccttttatctccaacagttctctctatacgtaggcactaattcaatttttaaatccatttgtgggcccaaagattttattactttcagtggtactgcgccggcagagaccaaaaatattataaatcgatgaatacaagatttatgaggactcttcgatatagttatatgacgactcttcgatgtttttaatatgcatttttttggtgaagcacataataattttgacttattctgcattatccactcgagtcaccactcagagcatattataaatcgatgaatgcaagatcagagcctgcaaaactgaaaaccatacctgagagtagggctggaaaattagctcgaggctcgtgagccggctcgagctcggtgcggctcggctcggctcggagcggctcgcgagcctcgaacgagctgagccgagcctcttcttcgagctcgtttttgcaccgagccgagccagctcgcgagccggctcgcgagccttgcaaaaatgatcaatttatggaataataatgaatattagataattttatggataatagatcatttttagtctttgatgatgaatatataatgttaattcaccaaataatgcaacgataagtaccagaatatggctcgcgagccgagccgagccggctcgcgagccaaggtcgagccgagccgagcctctttcgccagctcgtgaaatggacgagccgagccgagccgagctcgttcagtcaccgagccgcaccgagccgagctcggctcggctcgtttccagccctacctgagagatcataccaattacaatgagacacccttagactgctagggtatttagacacacttcaaacgtttctcctcctactgattctcatatacgaaaggaagtttgttagtttcacctccacatgtagttgataactcgatcaactcccaaggaagtcagaaacatagatttactttcacctccacatgtgactacaaccctgttgcctgctacaaaatgacattgatgttgctttcgatgcagatttcctatatttcccagaatgcctacttatgtcaacaggaagacatgtttcataattcagaccaaaaactatatagccagctcggctggaagacatctttcaaaattcagacaaaaaattatacagccggctcgactataagacatctttcaaaatttagaccaaaattacacaggtagctcaacctgaagatatagtggaacaataagcattgaactttattcaccattcacaaagaagaagaccctccaaactgcagtagcgtcgagcggatgttctcacggcaactgctactacagggagaactcacggcgacagggagggagaactagcggcagtggggaggtagggccctagcaacgaggggagggggaggggaaaatggccttgccggcgtcgaggagagagccctagcggcagggccagctatgtcctatgtggtggctgggactgctctcgtggcgagacgaacaagaaacctaattcgcacctattttttatgcatctagaatacgcggggatagcaaaatttggcgccatattgattttcgggaggtatcaggagttggaatactctagctaaatgtattgacaaaataagataggatagaaacttgataaatttattaagttcatttcaggagctattggagagcagatttactactatttctctaaatcatcaatttaagaagttctttcgagaactattggagttgctcttaggactggtttggtgataagtgaattaaaggggatccataagggaggaattcccttgctacttaaaattgaatagcaagaagataagagatgtcacttgttctcatgtcggaatttgtactttcacgcccacgaactaggaaattcctactctaggatcacatcctgaatatggtactcatagtcatatcctcataggcaagcaattgcaaccatgtttggcaattcaccttgacactcttctacaatgtacttcaatgattacagagcttggga

SEQ ID NO: 144 - DNA, 8263 bp, Zea mays
  Intron number 12 from transcript GRMZM2G302553_T01 (locus GRMZM2G302553) derived from phytozome v7.0 (chr-ID 7; pos 36251332 to 36259594)
aactcaagcatatcaggcaagctgtcggtttcttggtatgtgacttctattttagttccagtctttactatcttggacagcttacctgcacattttgttcggacctatgcttagagattgtcccagtcgcataagacatggttagctagtgtgaacccagaaattgttaacccaggtagcaagctatagtgttgacttagtcatggttggtgtgtccagattattgaaggtgtcacttttttacatcatacctgaatagagggaagtgagtatcatagctttcgcgaaagggcctctagcgtaatggttaaggcttccgagtagcacattcaggtcctggttcgatccccttgggggcgaatttcgggcttggttaaaaaaaatcccctcgctgtgccccgccgctctcggggatcgatatcctgcgcgccaccctccggctgggccgttgtagagtgggcagttgatcggcctgttagtgatgggggctagggttcgggggttttctcggccgggaccatgtttcggtctcttcttaatataataccgagagggcggtctttccctccctggccgagtatcatagattcatagctttctagagtggatcttttttaattggagaaaaacaaaaggtgtcatggttctgtgatggatgcttttcgtggtcatgtctgtaggcattgtttgtgtgtagctgttagcagcagagcatcacacctggcctgctgaccattgtgtcacatccggttttaggggcaaaaccgaatgcatagcatatgtgtggcaggatccattttccacacatatgttgatgtcacaagtgtaatatatcaaaagacaatgcaataaaggcgtaaaaagggagtagagtaactttattacatcattcggacaatagtgtcttaaaaagtatcatcatcaaagtacagcgaaataaacatggacactcttccacaggaaggtgactagcgcatcgttagacttagtactcgtcaacatcatctgcaatgtcttcttcatcaccctctatcaaaaattagcaagaggtgagctcacttatggtcggggctcaacaagtgggagaagtaatacaagtttaacaaggtaggctatggataagcggtaagcattttagttggtcaatattttattaacaacgcttgacttactaattgtaagtgtatcccaaaattcccaattaaacataagtacaaaattatataaaaacacttaagtgaaaccacttaagcaaacaatttataaatcattggatcacagtttattttccatctttaagttcaattatcatgtgagggtctagtttgctcttaaccgtgagcacggctgacatatcagttttacactctgcagaggtggttcaactttacccacaagccgtgtatcccctctagcctgggttgatcgtacccgtaaacacttcctaggtgaatggctagggatccactatatgagactttcacaaaatatccttagtacaaagccacccgctaaggtttccacatcagtattgatggctttctaggtgaggtaacttagccaagactaccaccccatgttaacatgagctgccaccaaaccactgccttcccctcttgcccatctttcaggtagggttgctaagcactaagtctatagagctaattatcaaagccagtgccattatagcactcgtggttgcactgttattctgggtggtgactcaatgttccatttaatacgaaatgatcttgtttaaccatcaggttaacattataatacaaattttcatttccggaacaatagtatcgttaatgagtgacatcatatttatcaagttgagcgatagcacaaattgctaagcatagtgtttatcccagggtaatcaaggaatagggttggtaattctaggaaaatcctatttaggccaatcccatcaaattatgcaaatatctgaaaagtaaacattattatatgcatcacttgggtacaaatagaaatgcagagtgagaattcacctgcccttgctcgaacgtgtcttgcaggtcgtcttcgaacgtgtttggttcgtctatcacacagtcagcttctaatatcgattgacatatcgtatatacaaaagaaaacatacaccattacatgggtaacattcaccattacatgaacaatcacataccgcacaaactatacttataaatggtagctaaatcataattattttattaatccactaaaatctctaatttcaattattactagtgaaagttgcgactacaaaagtattttacttaacgtagcttagatgaaatgacttaaccaattctaccgaaataaattatcaagtaattatttccattatgactaatgatattcttttagttttatcctttcttttctaaatggaaatgatacgtatcgttacaatgttatttataaatcacataacattaatattctaagaactaatgtaaactactaattttggactttagtaacataatcatggttatttcgacataaatagatattttactaattcttagtgaataagtgatgtgtatgaacacatatatcatgactagcagaaatctatattttaacctgacaaaaaagatgtggcctagtacctctttcaatttcttatattagtaaaactatacttaaacaagtactgaatattgttttatgcgctaaaatgagaaattaatcgcaaacgtttctggtattaaatcacaaagtcaatgaatcgtgacattatttattttcgaaatataaaatatccatatccaaaatattgttccagggctggttcacaactaaacgtatacatcagggagtagcaagaaataaacatgggtctagttttaatggtttatgaactgaataatatttgaactaattatacacaattccaggggctaaacgcaaaatgattgtcttctaccttgggctgaccgcgcacaggggagactcggcgagggggaagcggactctggcgaggctagactgggacggggtggcacgacacggcgaggctcgaccacagacagggtagcgcggcacgacttcggtgagcaggggctcggcgcggacggcgacgagatccggtgagcagagcgcagggagagaggagaggggaagctaggcgagttcggtagggaggggcagggctcgaccgatcctatttatagagcgagagggggaaggggagagggctccgagggaggaggaggggcaccggcggctccatcaatcgaccaataatggcgaacgtttctccaataatggagagaggaagtgggggtgggagtggaagagggaagggctcagtagtttcaggcgctggggaagttgaggggacgccgaggcgtctcgaccggtgggggtgcggcgtgggcgagcgcgcacagggcacagcgacgacgcgactggaggtacaagaaagacctgacgggtggggcccgcgtggcggtgagtgagagggggatgcctctaggttgcataataatgtgcaaaagtcaaatgtgtatcctatcagatgctctgatgaggttctgctcgaagtccaaaccttgatgccatgtgaaatttcaacctttcattgtcgttatttggggctccctttatccttacacaagttgtctaggcaacagttccaaccaattgttgataagatagctgatcagctccctaattggaaggccgacttgatgacaagggctggaagaagagtgcaagtttagcatgttcttacaagcatgactgtgtaattacctatggcagtggagtttggatgctattgataaaattagaaggggttttctatggagaggccgcaaagaagctagaggtggccattgtcttgtttcctggggaaaagtctgccgcctcctggagcttggagggcttgatatttctagttttcctaattatgttgggcgcttcgaattagatggctttggctacaaaagactgatcactcccgcccctagtctggtcttcaaatacaagttccaaaaaaggctagagctttcttttctgatgtagtgaccactgaagtaggggatggaaccaataccaaatttggaaggataaatggctgcatggagaaagaattgcagatctgttcctaaggttgtttagcgcaattccaaatcggtttgtcaattgtaggacagttcaggaggcaattgttagcaccaaatggatttctgatatcaaaggagctttgtcagttggtgttttgacagattaccttcagctttgggatttgatttctgccatcgagctgcaacctgaggttgaggataagcatattttcagtattgctccaaatggtgcgtactcagccaaatctacttatgaaggtttgttcccaggatctgtgggccttgccaaaatgtcgttttttcatatggttggttgcccagaagaggtgttggacaactgataggttggcaaaacgaggcctaaatcactcggagaagtgtcttttatgtgaccaaggggaagaaactttggaccaccttcttgtccatcttttgaaaagcaagccgggtccaaatgttgtgaaccctggcggcctgagcatggagggcaacgatagtgtcgacgtcgagcccggaggcatgtggagccttaggggccaccgggggtggcgtattgccacgatcgagtaggaggcgctgagcagtggccagcagagtggtcaaggcggcgcccatggcacgcttctgttcccaggcgagggcatgaccacatgcgatggaggggagggagcccagatgacgttggcgataggcggacgagaggctgcgaagccggcagcggctgtcggatgcgcggcggctgcagggagaggccggtcggggagaaggcgttaggctcagctgctgtgtccacagcagcgagggtacttgtgctcgtcggataaccggggaggtcgaggtcgctgtagttgctagtcaggaggaggccggtggtgcgtgcactggacgcggcggcggcgacactgtttggtgtgaggaggtccgcatcgcgcacgcgccagcagtggcagtcgcgacagtggggtcaaggagggcagtcgtgccagcctggagagagctggccgacggggctcggcggatccatgtccggctggagaagagggggagagggggtggccggcaggggaaggggagaggtctgtcggcggggagcagggaggccagcggcgggctggggctgctggtcggcggcggttgagagagggagggtgggagaaggaaggggaagtggaacctagctctataccatgtgggaaaccctaaccctaacaaaggtcgggacttgtatatatagacaagagttcttgggcctggctcattaccaatggcatgccggtaattacaaggggctaaccccaaatcctaaccgtggctctaacaatttgcacaacaatatgccttatcccttcctgttaaattgtgtgttcctatattatccatgtatgtgtggatgggctagcaccattgttggtacaccagcccattagagttagggttccctgggtctatatatgtaaccatcttctatgcaatacacaagtgttccattctcatatatggtatcggactaggcttcctccttgccttctccctagccgtcatctgctccagaggcaggggcctccacgtgattccgcgccgccgtcctcgggaggtttgtccttcactctcgagggcggcccccactcctctgcctccagcctcgccttttcctaacccatagctggacataagctgaagtcgcggctgtcgtgcgagcatgtgtccaggcgcgagtcatgggccgtcaccgcgcaagcaggcatgcgcgcatgagccgtcgtggccagtaccctctccgctcgtcgtggctagccccgtcatcatggtatgcctccccatccccaacgttggcgcctcgcttaccggtgcgggtgccctccacggtgtgtgcttcctcggctcaatgggcgagccagctactgcgccgccgagcgggcgtgcaggcaggccacaattgcctctcgggcgtgcaggctgaccgccactgcctcgtgggcgcgtgtgcacgcggcgccgtcgtgcactctcgtggccacgtctttgtcttctccaccgcaggcgacgcgctgctcaagctcaaggccttcgcctccagtggcgagttctgcgtcactacactctttgcctgggcaccctcgacgtcaggcaagcgcgctagcagtcgcccctagtgctggccacctcctccctgcctatgttgacgcccagcagtgcctcactcttcttcaagcttctcatgtcatcagtctcgccccctgccaagcccagcgtaccccctgcacggctggacccccctacccacccccttctttgtcgccgccacaactggatccatcgttgtcgcggccttcccggtcgaatccaccgcctctttggccgaatctgccatctttgtggctagattcatcgctgtcgcggccttcatggccggatccgccactgccccctctgtctctccaccatctcccctagctggaggctggcacgacctctctagccggcgcagccaccctgaccggtgcagacgcgcgcgctgtcgacagcctccttagcagggttcctcgaccggacgagagaagaagcaaggtctacagggttgttggtgtccttttgttccgtcgccccgcctaccctacttttgacgctcgaatgtcgacccccccccctcgaagaacgaggttgctgctgtgtctcttagccacaacagcgccgcttgtgatctagctacctttgtcggatccggtgccctcctaggcggtggaaccacccgtgcctgctcttcttcgttcaaattgctcacggtccaagcccggcattgttcaccaccctctaggatgtgccaccctctctctttggcctatcgtctagctaggcattgcgctatcgtctactcgccacaatgacttcggaccagccctcccccactcgtcagctacgaccatgaccacctcgacttaggctacctcgacatctaggggctatcatttatatggagtgcacaccggtctcagatgtagggagtgcacactggagcagatgacggctagggagaaggcaaggaggaagcctacatctaggggctatgcaataaaacagaatcaggactgttgagactgtctccagcaatgtcctctatattcatcatctatatctgtcctttacagtctcatctaaaagactccctcatctatatcttctccatctccagcaacgccccctaaatttcatcctctatattgcactccctacattttccttcgaaaccgtatttatttacaaaattctgagacatttaaatactgcaaattattttttattcatattaataaatatgttgtacagctgcactcgatcacacagtgtggcacaattgcattttttctatttgttggatgctcgtccggtgactttcgcatcgcggtgctgctttttctcactggccgagctcgtccgtgctgctgctcctccccgacgccgcaggcgagctcctccgttctgctgctcctcgcctactgtcgcgctcgtcctcctagccgactgttgcatggtcgtcatcctcgtcagtggccccacgcgctcgtgctcctccgcggcagtccgccgcacaagctcgtcctcgtccctggtgattcgctgcgcgggctgcttctcgtcttcggcgatcgacacgtgtgctcctcctcatccctggcgattcaattcactaggcgggctgcttctcgtcttcggcgacggccggtgtcgggtggtgttgcccgtgctcgttggccggatagcggacgcacagccatccgccacaaatagcgtgtgcaaggaccatcctctattttaccggaacctttatagtttattgttggacgcgatacaggatgtttggttctctaaatttggcgtacaggacggtatagcgttctttgttggagagagtaacacctaacatgtaataacctttatttctcccacaggtttgagaaaaagtagtcggtccttaattaattccacttgttaaatttgatacatgcattcattgcagctgatggttatattttgtctccttaaaaaatatgcaatttgaattctcattatgacaatactgatatatgaattctcaatacaacaatactgatgcatttatcttgtctaggtcatattcaaaaagttcaggatttcat

SEQ ID NO: 145 - DNA, 3573 bp, Zea mays
  Intron number 2 from transcript GRMZM2G141222_T03 (locus G RMZM2G141222) derived from phytozome v7.0 (chr-ID 4; pos 1 82632872 to 182636444 reverse strand)
ttggcaaatccgtcgctaaggaggacaattgaccggtaagtgctgaacgccttctcttccctgttactgtttgacctgttggttcttagataccagggacatttggagaatgtttgtgttttttctgtaaactagctttctttcttttattaagaattccatttgtcaagaagaaatttggttggagctaggggtcttagggtctgtttggttcatctgtagattcctgaaaatctgattctagctatgagctgtgctgcgagctgataattataaaaactatatttggtttgattgaaactactgttaagtatagattctataagagcatgacaacttataacatggatgtcaggaatctgaaaaatctgactatctgaggtagaaggtgattctgaattaaaccagaggaatctataggttttcaggaattttttctgttgttgtacctgtttggttgaaattccagatgtttggttgaattaaaccagaatgttctgtgtttgcttcgatgcatgactaaatttctgttggtatagtgttgaactttcagtacaagaaagttgattgctgcaagtgtttatatttgccaaacttgggtagattccaaagcatggattgcagttttataattatgtgaactatgcgagcatgtggagtacaaaagggattcatggtccagatagccatgggccggtatcatcaatggagatgcatcttgatcggttcaaccatactactgggctgattactctagagtaatgtttgggaggggatcttacattgggaagggaatattacatttgtataataaatggatatgatatttaagtaattgtttacagtgaagtaattactaagtaatgttcccaacagtgttatactgtaacattggagtatgccttgatcaatgtgtgatttcttttgaaggtcgtgatcatttcattggatgatcaaaacatgatatggtttttggtcaacgaggattttgattttatccatttggactattgtcgtccaataaatatttttacaatattttttcggtgaacatattatttctttgaaaattccagcgaaagttttggaagttctctcgtctttgagtagcctgttgatttcagaataaatctttacaagaagattgattgcaatagattctacttttgtatcaaacttagcaggtgtcaatactatactattatttcctatgagttatgtttactttcttccctgtttgtttctggacttcagtttgaatgaaagggagtaattttaccacacacatttcatcatatggtattctatatattcaatgtagtaaactagtaatttgtcgatttttattaggctttctagccttgtaaatgctgcctgctttttttttgtaacagatgaaacacttggcttttactccgtttatttctaattagcttaatcaactattttattgctgcatatattgtttgtcattcttgtggtcttttggttcttaatcttataatctgtaagtgttaatactactgctacagtttggcttaatatttgagtgtaatgttggtgaatgacgtggttaatgtatgattgcttttggttttttgtgaacctaccgatgtatgtggactcttggacaaacacttagaagccatgcccgatgacttccaacaaacccatagggattcacatgagattgaatggatggtgttgatggatattagaaatatgctatagtcgatgagtaagggtataacattgttctctctttctgagattcacgtttcagatgataacatggttggtgtgatataatttctcacctttgaaacagtgataatgtaaaatttgttagtaatttttacatacgaacaatagcgagttctttaccttttacattttcagtagtatttaaatgattgcaactaaaaatatgtcgatttatttttatggttagtattattttaaagatttgaaacgtatttgaacaactatcctattcaaacaaggtctaccgaaccgtagcaacaagtttgccactcatgctcagaagtttagtttattttttcctcaaaaggttctttcttgttgaggctgtgaggcttgttccaacatttcttattccaaattctgagtagtactatatgtggtcgctccttgtaaattactggaaccaaacaattattttataaattctcaagtatagcattatgcaagctaaattggttgctttctcatcttgtctatgttgtttgcgtcacaggcttaggtgaaccaccttgagttacgagctacagttttagtacaggatttcaagccgttcggttgctggtcatggtgttggctgttggtacagtatttggtgagagcttgatgtcacagcagcagtagaagcggtgctgtaaaacctggcagccgaacagcgtgaaaggaaggtttgtatttcaaaggatctataacaatcaaattctgcggttttgattatgtccgttctatcgttgagctgatattgtagttcagttctttcttgtgcttggagtattattacatacatgtatgacaatatgagttaataaacttggagcgctttgaattatgctatccgatgtagcatcataagagtcattataccttgaattagggtctgtttggatcaatagtgctaaactttagcaatacacttaaactttatcacttggagatccaaaatatgagtgctaaaaggtgctaaaaactgaagtgctaaactttagcactcaatagcagttgagctcttcaagatgtgctaaactttagtactctgttaaaattaagcacatgagatccaaacagtctcttagtagatggctgtagctttaatggatgcatatatgtatttactagataagaaattgcacatatcacttgttttgtacgagggcaacaccgattctagatttttccccgatttttttattttttagctgtcccagattttaatcagtgtagcttccaattagccatccagcttccgtcacccggtgggaaaagaggatgacatgtgcaggttacagacttccttcgcttaggtcttctccaccccgccctgctgcttgccgctgcggtccagacggccccgcgcgcgggggatcgcctcctgtgatgacttttgctccgcgaataaaatatctatacggtgggttcttctttcgtcagtgcttataaggccattctcatttctcaatgggacttttatattcattaaatgcgataacacataatcacacctggttatattgcagtgtgatattgcactgcaattaataggggacacacacacacattagggttttataaaaactgagttggttctaaacatactagtttatgctccaatttatataaactagagtctcaatttcttaaaatcaagaaactattctcacttagttaaaggcactttatgaaaattaatgttgttccaaacaccattaaccagtttgtttttttataaatcagtttctagaaattggagatagaaactagattattaaaaactaggttgcttccaaacaagtttatagaaggtggtagagttcc

SEQ ID NO: 146 - DNA, 11304 bp, Zea mays
  Intron number 1 from transcript GRMZM2G032315_T03 (locus G RMZM2G032315) derived from phytozome v7.0 (chr-ID 6; pos 4 595187 to 4606490)
ggcttcagcctgttcgactgaggagaccccctcacccagccattagcaaatttcacttgtgctgtcaaagactatcttgtcttatgttatgtctctaggcttttgttacaactacccaagttttgagtttttgagatgtggctatggcatgaactcaaaccatcttatgagggtgaaacctgtttctaatttctatattgttgctgttcattaaaaaaagaaaaaaggctaccaaaaggtgagccccaggtaccacggttggctatgacatgagaatatatgatgtgcttaaggccaccaaaccaacagaccctatatgcggctacacaaccatcatctatgacctaatcacctaaccactaacaccacaactcatttttaaggttgaactcgcgtgtgccagaggctgttgaagggcaccggcacctcccctataccaaatggcaccttcataaacagcttcttgaataacagcaggaacaaatggccttctctcctcaaagacaacatttcggtgcttccaaattttccaagtaaccaaaataattatggaattgagacctttttgatgctccttaggaactgccctaacagtgcttctccaccaacttaggccctgttcgttttgtgctcatccacagggattgagggggattaaatcccctacaagtcaaaatcctctccaatcccttccaatccccctcaatccctatggttttgggatcaaacgaacatggccttaggaatatgtcattgtgccaccgcatattaatgaataaatgagtccatacttctctagcaaaaacacatgtgactaggcagtgttgaatggtttctttagtctgatcacaaagaggacaagatgcatgataaatttacaggtgtaaagaaggcctcatacccaaatttgctagagcatgatccatatctatttagacaccaaatatgttggcgtgtgatcttgcagttccagattgtcaacaagattccaaagctgtagatactccattaatacttgtacaatcaacacccctctaatatcagaaacccatctccggtctcgtagctcttgcgttaccatcctttgcctcttatcccttttgggaattaagagaaaaagattaggggtccattcgccgatagtcttgagatgcaacaggctgcaggagctactcctgatatgcaaaggccatcacggtattggaacctccatcaccaagatgaacagataacggatcccttggcgcagaccacggtgatggaaaatacactcttcaggctcactattaatcatgactctcgcagaggtggacaacagttagctagctgactaagttgcaccatttccggccaaaaccaagatgttgtgatgagaggcaaaaccaacagatagtctaaacaaaaatcaaacttttggatcagagaaataaatctatataactttgtaatttgatgaattaaatgcatcataactttttagttaatttataattataagatattttagttaatttctgctaatgtacccggtgaaaaatatatatgatgtacttgatagtcgcctagagggggggtgaatagggcgaaactgaaatttacaaatataaacacaactacaagccgggttagcgttagaaatataaacgagtccgcgagagagggcgcaaaacaaatcccaagcgagtaatcaagtgagacacggagatttgttttaccgaggttcggttcttacaaacctactccccgttgaggaggccacaaaggccgggtctctttcaacccttccctctctcaaacggtccctcgaaccgagtgagcttcttttctcaaatcaaagtcgggaacaaaacttccccgcaagggccatcacacaattggtgcctcttgccttgattacaatgaaactttgatcacaagaacaagtaagaaagaaaagaagcaatccaagtgcaagagctcaaatgaacacggcaaatcactctcactagtcgctagggctttgtgtggaattggagaggatttgatctctttggtgtgtctagaattgaatgctagagctcttgtagtagttgggaagtggaaaacttggatgcaatgaatagtggggtggttggggtatttatagccccaaccaccaaacttgaccgttggctggaggcgtctgctcgatggcgcaccggacagtccggtgcacaccggacagtccggtgcccctgccacgtcatcactgccgttggattctagccgttggagcttctgacttctgggtcctcctgggtgtccggtgcacaccggacatgtactgtttgatgtccggtgcaccggtatgggtatgtctgacgtctgcgcgcgctgcgcgcgcattaaatgcaccgcagggagccgttggcgccgaaaagagccgttgctccgctggtacaccggacagtccggtgcacaccggacagtccggtgaattttagcggagcggctgccgcacgaacccgaggctggcgagttccggagaccgcgcttccttggagcatcggacatgtccggtgcacaccggacagtccggtgaattatagcgcgccggcttccgagaattcccgagggcgaagagttggagttggagtcctctggacgcactggacactgtccggtgcacaccggacagtccggtgccttcagccagaggtgccttcggttgcctcgttgctcctttgttgaatcctatacttggtctttatattggctaaatgtgaaccttttacacctgtataatctatacacttgggcaaacaagttagtccaaagatttgtgttgggcaattcaaccaccaaaattatttaggaactaggtgtaagcctaattccctttcaatctccccctttttggtgattgatgccaacacaaaccaaagcaaatatagaagtgcataattgaactagtttgcataatgtaagtgtaaaggttgcttggaattgagccaataaaactacttacaagatatgcatggaatgtttctttctatatttagcattttggaccacgtttgcaccacatgttttgtttttgcaaatcctcttgtaaatccatttcaaagatcttttgcaaatagtcaaagataaatgaataagagtttgcaaagcattttcaagatttgaaattttctcccctcgtttcaaatgcttttcctttgacttaacaaaactccccctaaatgagatactcctcttagtgttcaagagggttttgatataccatttttgaaatactactttctcccccttttgaacatagtaggataccatttgataaatactcttggaaagcactaagtttttgaaattggtggtggtgcggtccttttgctttgggctcctttctccccctttttggcatgaatcgccaaaaacggaatcatttagagcccgcaaaggctatcttcccctttggtcataaataaatgagtttagattataccaaagatgaagtcccttttgcttggtgctcatgttttctccccctagaatggagagtagcttggagcgacggcgatggatgagttacggagtggaagcctttttgtcttcgccaaagactccaattccctttcaatatacctaagacttggtttgaaatagacttgaaaacacattagtcatagcatatgaaggggtatgatcaaggtatataaatgagttgtgtgtgcaattaaaagaagttcctagaatcaagaatattgagctcatgcctaagtttgttaaaagattgttcatcaagaggcttggtaaagatatcggctaattgatctttagtattaatgtaagaaatctcgatatctcccttttgttggtgatcccttagaaagtgataccgaatggctatgtgcttagtgcgactatgctcgacgggattatccgccattttgattgcactctcattatcacatagcaatgggactttggttaatttgtaaccgtagtcccgcagggtttgcctcatccaaagcaattgcgcgcaacaatgacctgcggcaatatactcggcctcggcggtggaaagagcgaccgaattttgcttctttgaagcccaagacaccaaggatcttcccaagaactggcaagtccccgatgtgctcttcctattgattttgcaccccacccaatcggcatccgaataaccaattaaatcaaatgtggatcccctaggataccaaagcccaaacttaggagtataagctaaatatctcaagattcgttttacggccgtaaggtgagcttccttagggtcggcttggaatcttgcacacatgcatacggaaagcataatatccggtcgagatgcacataaatagagtaatgaacctatcatcgaccggtataccttttgatccacggacttacctcccgtgtcgaggtcgagatgcccatttgttcccatgggtgtcttgatgggtttggcatccttcatcccaaacttggttagaatgtcttgagtgtactttgtttggctgatgaaggtgccttcttggagttgcttcacttggaatcctagaaaatacttcaactcccccatcatagacatctcgaacttctgtgtcatgatcctactaaactcttcacatgtagactcgttagtagacccaaatataatatcatcaacataaatttggcatacaaacaagtcattttcaagagttttagtaaagagtgtaggatcggctttaccgactttgaatccatttgcaataagaaaatctctaaggcattcataccatgctcttggggcttgcttgagcccataaagcgccttagagagcttatagacatgattaggatacttactgtcttcaaagccgggaggttgctcaacatagacctcttccttgattggtccattgaggaaggcacttttcacgtccatttgataaagcttaaagccatggtaagtagcataggctaataatatgcgaattgactcaagcctagctacgggtgcataggtttcaccgaaatccaaaccttcgacttgggagtatcccttggccacaagtcgagctttgttccttgtcaccacaccatgctcgtcttgcttgttgcggaagacccatttggttcctacaacattttgattaggacgtggaactaaatgccatacctcatttctcgtgaagttgttgagctcctcttgcatcgccactacccaatccgaattttggagtgcttcctctatcctgtgtggctcaatagaggaaacaaaagagtaatgttcgcaaaaatgtgcaacccgagatcgagtagttacccccttatgaatgtcgccgaggatggtgtcgacggggtgatctcgttggattgcttggtggactcttgggtgtggcggccttggttcttcctcatcctccttttcatctcccccttgatcattgccattatcttgaggtggctcatcttcttgattttgctcttcatcaacttgagcctcatcctcattttgagttggtggagatgcttgcatggaggaggatggttgatcttgtgcacttggaggctcttcggattccttaggacacacatccccaatggacatgttccttagcgctatgcatggagcctgttcttcacctatctcatcaagatcaacttgctctacttgagagccgttagtttcatcaaacacaacgtcacatgagacttcaactagtccagtggacttgttaaagaccctatatgcccttgtgtttgagtcataaccaagtaaaaagccttctacagtcttaggagcaaatttagattttctacctcttttaacaagtataaagcatttgctaccaaagactctaaaatatgaaatgttgggctttttaccgattaggagttcatatgatgtcttcttgaggattcggtgtagatataatcggttgatggcgtagcaagcggtgttgactgcctccgcccaaaaccgatccgaagtcttgtattcatcaagcatggttcttgccatgtccaatagagttcgattctttctctctactacaccattttgttgtggcgtgtagggagaggagaactcatgcttgatgccctcctcctcaaggaagccttcaatttgtgagttcttgaactccgtcccgttgtcgcttcttattttcttgatccttaagccgaactcattttgagcccgtctcaagaatccctttaaggtctcttgggtttgagatttttcctgtaaaaagaatacccaagtgaagcgagaataatcatccactattacaagacaatacttactcccgccgatgcttatgtaagcaatcgggccgaatagatccatgtggagtagctcaagcggcctgtcggtcgtcatgatgttcttgtgtggatgatgaactccaacttgcttccccgcctggcatgcgctacaaatcctgtctttctcaaaatgaacatttgttaatcctaaaatgtgctctccctttagaagcttatgaaggttcttcatcccaacatgggctagtcggcggtgccagagccaacccatgttagtcttagcaattaagcatgtgtcgagctcagctctaacaaaatctactaagtatagctgaccctctaacatacccttaaatgctattgaatcatcacttcttctaaagacagtgacacctacatcagtaaaaagacagttgtagcccatttgacataattgggaaacagaaagcaagttgtaatccaaagaatctacaagaaaaacattggaaatagaatggtcaggagatatagcaattttaccaagtcctttgaccaaaccttgatttccatccccgaatgtgatagctcgttggggatcttggtttttctcatatgaggagaacatccttttctccccggtcatgtggtttgtgcacccgctgtcgagtatccaacttgagcccccggatgcataaacctacaaaacaattttagttcttgactttaggtacccaaacggttttgggtcctttggcattagacacaagaactttgggtacccaaacacaagtcttggaacccttgtgtttgcccccaacaaacttggcaactactttgccggatttgttagtaagcacataagaagcatcaaaagttttaaatgaaatagcatgatcatttgatgcaataggagttttctttctaggcaacttggcacgggttggttgcctagagctagatgtctcacccttatacataaaagcatgattagggccagagtgagacttcctagaatgaattctcctaattttgcccttgggataaccggcagggtacaaaatgtagccctcgttatcctgaggcatgggagccttgcccttaacaaagttagacaagttcttaggaggggcattaagtttgacattgtctcccctttggaagccaatgccatccttgatgccagggcgtctcccattataaagcatgctacgagcaaatttaaatttctcattttctaagttgtgctcggcaattttagcatctagtttagctatatgatcattttgttgcttaattaaaatcatgtgatcatgaatagcatcaatatcaacatttctacatctagtacaaatagtgacatgttcaatggtagatgtagatggtttgcaagaattaagttcaacaatcttagcacgaagtatatcattcttatctctaagatcggcaattgtaactttgcaaacatcaaaatctttggccttagcaatcaaattttcattctctaatctaaggctagcaagagaaatgtttaattcttcaatcctagcaagcaaatcatcattattatctctaggagtgggaattgaaacattacaaacatgagaatcaaccttagcatttaaactagcattttcatttctaaggttgtcaattgtctcacggcaagtgcttagctcactagacaatttttcacatttttcaacttgtagagcgtaagcatttttaaccttaacatgtttcttgttttccttaataaggaggtcctcttgcgaatccaagaggtcatccttttcatgaatagcactaaccaattcattcaatttttccttttgagctatgttaaggttggcaaaaagggaacgcaaattgtcttcctcatcactagcattgtcatcactagaggattcatatttagtggaggatttagatttaaccttctttttgccgtcctttgccatgaggcacttgtggccgacgttggggaagagaagccccttggtgacggcgatgttggcggcgtcctcgttgtcggagtagtcgcttgagctctcgtcggagtcccactcgcgacaaacatgggcatcgccgcccttcttcttgtaatacctcttcttctcctttcttctccccttcttgtcgtcgcctcggtcactgtcactagatataggacatttagcaataaaatgaccgggcttaccacacttgtagcaaaccttcttggagcgggacttgtaatccttccccctcctttgcttgaggatttggcggaagctcttgatgacgagcgccatttcctcattgtcgagcttggaggcgtctatgggttgtcgacttggtgtagactcctccttcttctcctccgttgccttgaatgcaacgggttgagcttcggatgtggtggcatcatcaagctcgttgatcttcctcgagccttcgatcatgcactcaaaacttacaaaattcccgataacttcctcgggggtcattttagtgtatctaggattaccacgaattaattgaacttgagtagggttaaggaaaataagtgatcttagaataaccttaaccacctcgtggtcatcccactttacgctcccgaggttgcgcgcttggttcaccaaggtcttgagccgattgtacatgtgttgtggttcctcccctttgcgaagccggaaccgaccgagctccccctcaatcgtttcccgcttggtgatcttggtgagctcatcaccttcatgcgcggtcttgagtaaatcccaaatctcttttgcgttcttcaacccttgaactttgttatactcctctctacttaaagaggctaggagtattgttgttgcttgagagttgaagtgctcgatttgggccacctcatcctcatcatagttctcatcccctacggatggtacctgcgcgccaaactcaacaacatcccatatgcttttgtggagcgaggttagatgaaatcgcattaaatcgctccacctagcgtaatcttcaccatcaaaagttggtggtttgcctaatgggacggaaagtaaaggtgtatgtttggaaatgcgagggtagcgtagggggatcttactatacttcttgcgctcttggcgcttagaagtgacggagggcgcatcggagtcggaggtcgatgttgatgaagtgtcggtctcgtagtagaccaccttcctcatccttttgtgcttgtcgcctttccgatgcggcttgtgggaagaagacttttccttcttctctttgtggtgagaagaggaagactttttctcctttcgtttggaggagtccttcttcttctctttcctcttggtgcgggactcttccgatgaagtgctcccgtggcttgtagtgggcttttcgccggtctccatctccttcttggcgtgatctcccgacatcacttcgagcggttaggctctaatgaagcaccgggctctgataccaattgatagtcgcctagagggggggtgaatagggcgaaactgaaatttacaaatataaacacaactacaagccgggttagcgttagaaatataaacgagtccgcgagagagggcgcaaaacaaatcccaagcgagtaatcaagtgagacacggagatttgttttaccgaggttcggttcttacaaacctactccccgttgaggaggccacaaaggccgggtctctttcaacccttccctctctcaaacggtccctcggaccgagtgagcttcttttctcaaatcaaagtcgggaacaaaacttccccgcaagggccatcacacaattggtgcctcttgccttgattacaatgaaactttgatcacaagaacaagtaagaaagaaaagaagcaatccaagtgcaagagctcaaatgaacacgacaaatcactctcactagtcgctagggctttgtgtggaattggagaggatttgatctctttggtgtgtctagaattgaatgctagagctcttgtagtagttgggaagtggaaaacttggatgcaatgaatagtggggtggttggggtatttatagccccaaccaccaaacttgaccgttggctggaggcgtctgctcgatggcgcaccggacagtccggtgcacaccggacagtccggtgcccctgccacgtcatcactgccgttggattctagccgttggagcttctgacttctgggtcctcctgggtgtccggtgcacaccggacatgtactgtttgatgtccggtgcaccggtatgggtatgtctgacgtctgcgcgcgctgcgcgcgcattaaatgcaccgcagggagccgttggcgccgaaaagagccgttgctccgctggtacaccggacagtccggtgcacaccggacagtccggtgaattttagcggagcggctgccgcacgaacccgaggctggcgagttccggagaccgcgcttccttggagcaccggacatgtccggtgcacaccggacagtccggtgaattatagcgcgccggcttccgagaattcccgagggcgaagagttggagttggagtcctctgggcgcaccggacactgtccggtgcacaccggacagtccggtgccttcagccagaggtgccttcggttgcctcgttgctcctttgttgaatcctatacttggtctttatattggctaaatgtgaaccttttacacctgtataatctatacacttgggcaaacaagttagtccaaagatttgtgttgggcaattcaaccaccaaaattatttaggaactaggtgtaagcctaattccctttcagtactaaatatacatggtattacatattttttattcttgactatcctagatttaaatcctggatccacaacctttaatgacagttcgactactcgacaatacgtttgtcagcgtaccccctacctccgctaagttcattatggtgaaatcagaaatatccatggcccatgaacggcgaagtttgtaaacatagccgtggcataaaacagtggtgttgctacacataacataagccctctcacacttcatttacaagagccgtcgacaaaacttctagaagctacacctagaccgcaaaaaaaaaaaaaaaa

SEQ ID NO: 147 - DNA, 3650 bp, Zea mays
  Intron number 1 from transcript GRMZM2G531804_T01 (locus G RMZM2G531804) derived from phytozome v7.0 (chr-ID 6; pos 2 6718744 to 26722393 reverse strand)
cctgcacctggcttcaagcctccgatccgcccaaggtcagttgcggtgcggcatcctgccttccatttcggccattactctcagcttcgctcgagctcctatcctcgccctgcaatcgcggcggatccggcgttccccactccgtgtgggtctaggtccggtgcgcgcgccgctgcctagatgctagcttttgcacggcgggtcgctgggctccgacttctcgtctcctgctgtttccgacgccattgtgacccccctggattggatggaggctgcaaatcccccgcctccgacgatccgaccggtggcaccctgttattacctgattcatcagtcattcgattcggatgctgcatgcatgatgctggtgtttcgattggagtataagcctgtgcatttgataattgattttgttattggtctatcagccaaggttgcacgtctgtttttttggtcgaatcccacgactacttttttactgctagtggagattcttttttacttcacatgaggcgtagggtagacgagtccaaatgagttgttgagcaggtactacttgggtcttgggaattccatatgctaggggtaggacgagtcaacatcgggagttgctttcagctactgttcctagctcggttttttctggggacggaaaataatgctaaataaaaaaataatctgaaaaacgacacatctccccctagatattttgaactgttaatctggcactttgttctcgcaggcatcataaatgatgaatatgggggcacattgtatgatggattccttggagtgctaaatgctactccggggttgtcccaaatcatttatagcttggcaggagtagcaacaggcatctattcttcactgtcagggtaaattaccttcggcagtctccactttatataccacatgcttcttcaagcacagtgagcatttcctaattcctattataccgcttaacaataatctcgaaggagaagtgcaatttctttgtcttccttcgtaccagacaacccttcatatagttatatgtaattgaatgtcgtcaagttttgtataagctggaagtttatttttctgttttctcatagtttgggaagaaagagatgcctgcttgtcaatggtagtgaatcatgcccgatttaggtcaatttatggttggatttatctcacctacaaatatgctttctatccttacactattagttagctttgttactcttgtggcccgaacctgtcagtttaagtatttcaatatttttgcctaagcctatagtgtgatgatgagaagtactacaacaataagctggagcttgaatggtccagtgtgaaagtaagttttcaactgaaatccttgaaatacattagacttgtgatctttttacaagcttaatgtaaaacgcattaagaaaactgtatatgcttagcagaaagtgattgattggtgtagaagttcttttcagttgacgttaaagcttaatggagatcaccgctcaggatgctaaatgaagtagaaaatagtgcccagaaataagtagtaggaaaaaaaactattctgttttaggataaacttctgagtggtagcaatatattttattttcggagtttggatttattccaacacagtgagtagtctgggttaactgtggcttcagagctgtgtttgctatcacttttctgactgtgatagtgtgatatgatctttttgagtaaaagtttgattttatcaactttctgattccgacttccaccacggttgattagtagatcatacacagacatttcgtgctatctgtaaaatctgatctggaacttctttgcctattgaaattttgtagttcttcttcattgaagaaccgagaaagttatatcattgtatatatgcattcacactactatatgagtatatttttgttgtgccttttgctacaactttgctgtggttttcgattttcatctctaccgcaactttgcttgggactcaaatgttatattgtgttgctatgacgccagatctgtaaatgttacctataataataaatcttacatatacctagaggtggtaatggatcatgatctaaatgcttcttcacaaaatggtaaggttctaaataatttttagtttaaaaatgaatagaaatagagtttgatcctaatctgatccgatacttaaatcttatagtgtaaaatttagagcccattatcacccctacatataccatgtacaactccattgtttttctcgaatgacacattcatagttttaggtgttttgataggcaaatagccctcaaataaataaccagaaactcgcacacacaagacaaacacagtgggtttggtgactggactgacttagccttttctgattctctctctctctctctctctctttctctaggcagctgtgagctacattttaagatttgatagccttctaattaatgcagaatattacacgcttaatcagcctattactgctaatctgctattccttcatgctaaaattaagctaaagataagtctatgaacctagacactagtgtgcacctagacacacaattactctcgacatgtttaactatggttgcatggaatggattgactaatagtcattagtcaatggttttaatggctcatgtagtgattgtggctaattcaatgggtgtaaatcataattggtttatgaggagagatttttttaaaattttagcgtatatatgtaatactgataaaattaatgatctagcagacctaccatgggtgttaggacaagttttttagattttgacactggcagcaatcctccatctctgaccaaatttaattatttcttttgctccatatatatacataatgctttagtttttttttatcgtgattggactttattagttgcatgcttatttctctgacatcacctccaacaagaaatcaatagtgacaatgttgtcttgaggatgcaaaacatgtaaagaccaaaactggctgccaaaatgacatccatttcaaatggggagtagtaattacttagctattgtttgtttcctaagatctgcatttaaattggtgaacatattgtttatcttaatacttgccacacattgttttgatcttattttctcacatagtcacatacatataaacagccataactcataatagctctagaattcctgcaagactgatcttcagtgttcatgacaactttatggcttatgttctgatgtagttcgttacaaatagaaagaatcacacttcagaatgccacaaattttctgatagccatgaatattgcgtgtctgatattgtttttgtacatgaagggagcatgcttctttaagtacatggtatggtactccctccgttctaaattcaaagtcactttgacttttttggtacatagattttgctatgttatgtctagatacatagcaaaatttatgtaccaaaaaaaagagtcaaagtgacttataatttggaacaaagggagtagcctagaacgaccttgcttttcctttcctgcttctcatatcacaaatcaaatggatcatacaaaattttggctggccatttaatcgagctttggttgcaaagattatttcatattttgaagacattgctgccgattttcagaattcagtgga

SEQ ID NO: 148 - DNA, 11041 bp, Zea mays
  Intron number 1 from transcript GRMZM5G808737_T04 (locus G RMZM5G808737) derived from phytozome v7.0 (chr-ID 7; pos 4 6785959 to 46796999 reverse strand)
ccacgggcgttacattctcctgccgtatttttgcggtaattgcgccgctcttcccttccctttgctctgtattaggattcttgatttatgtgtgggtttccaccgcgctaccgcagtcgatgccgtacctcagatgcagacgaggtagagcatcacattaatgaggtgctaggattatcataagctctattctagggttcttgatttgggcgtgggttctgatttcaccccggggaaatactttgcaaagatgacggacacgtgtggaattagtattgcgtagccatcgatacaacgatttccttgcaactgaaattgatgaatactagtactaaaagtgattgaggcagctcctaaaataccgaacttgtacgccttagaaagttactgaaattgcagctttggttgctcatccgaaaagggcctgaaccatatgcatatcaggtatgggaagtttagccttaacacaagtctaattctcccacaaaagatggtgatgcaactacgtaagacatatatgatcaaattgatcatgccatcaagctcatctccttcgtcaatcatgagcatccagcaaaggtagtgtgccctccatgcattgtatactcctatagtcttagtttcttgcatgttatcgttagtaatgtagtgatttgtattaatcaatttttgttgaggacgggcttctgaagtccatgctgcctttttatgaatgtttgtatcaataggaacatcagagttatgaagacttctcgtatgatgccttagggaccagtttagaattgaatccgtgtatcagataataacatgcccaatttattttgtcatacgtagcaatgatatcaagggtagcttttttgtgcatttgtttactctagtatgctagttttgtattaattccttagtcgaaaacaagctagcatattaggtgcccttccattcaaaatgaaatatgtactaatctacttactggttgtatttattatttcatagattgtgaccaccagttctcgttggagaagattgaaaacattacatatttggtatttgaacttttaagaatggcaccattagtcactttcattaaaactgtcattggtcttcgattagaaaatgtcaaagcctgaaggtttcatcttctgcagcaactccagcttgttccatttctccttcgccagcgtctgccaatggtttagaagaccaatagttttgcaagcaactcgtttaggagatttcagtttttttttgttgaaaaaatagattgtttctcgtgttccacagagcccaacccgctccatctattacgaaccatatgaacatgttcttgttccctccttcgctgttctagcagttctcctgaaatttttaatggatgttgggatcttcgacaagcccaaactatttctcacccaacaccgcccaagtcataacagctgtaggacatctaaacaaaagattgcccacagtttcttcttttccacagaatctgcaccctttggacccatcccaatttctcctcagttgttccactattgtacattatcatcttttgcaatgcaaagattttcatctcttgcatttttggttacttgcttctgattgctataggttatcaaaaataaggcaacacaagttattaaaccataagcttctcccttcaattaatcctttttcgaaggttaattcaagagagaagacaaagggtgcaaacacatgtttattaacaagggtgaaatataaacaacaaagagtaaaacatgctactcatcttcgtgtttctgcccttatagtttttgtttcttgcaatataacgaataattacaaacgtaccttcggctccacaagaatgatagctcgaaggtacttcaaaggataagctaaacgaaactctgagctctcgaaaggtgaatttatgcatgacattgttcctctatttataggggaaagatacaacttcgtatgaagttacaagtatacccataacgtttacgcatatgatttttaaatataacaagggcaatgtcatccttcctcctttcttgctgatcaagacttttggttcttctcctcctctgcttcgtagatcaaggccttcggcaacgaagccgtcagcttcgtcccatgcctttgcagcatcaatgtttacgcggagctccgcagcttttcttcttcagtatgcaagttgcacctgccgaaggtttgcttcattgtctatccgtgttgtacctgaaatacattttctcaatccgaaggtaaggtattttgagggccttcggctaagtaggccctcaaaatgcatgatgctcaaatagctcacttacgtaatagttcattctatttcctttcttttttgtgcaatcgacagcttgtgttgaacagttcaagtaaccatatatatgattttcatatgtattgctatgactcctttggtacgctcatgtctggttgtccctgaaaaccatgaataatgaaaacatgtaccggtccaaccaccaaggctcatgaaaaccataactatcattttttatgccatattatttcaaaacagacattcgataccgtcggatactcaaggtaatgatgctcggtaaaaaaactcgacctatgggggttagacaacccccgagcattatattaagaaaaacaccttctcatggaggtcgagaaaacccttgaataactgccctacccatacatagcggcaccatagcccatgagagaacgaccgtgaccaggaccgggccttagacctatgctttggcgttggatagacgaagggatttgtttaaccacgtcctgaaatttgctcccacgtggagtcgaactcaggaactgaggagtgctactcagatcacctaaccaactcagctagaggacctttcggaataatgatgcttggtagctagtgttaattgtatcatgaaaattcagttcctattatcgggatgaactcaaagtattgatgttttgcagcactctttctgaagaatgttgaggataggcttggccaagtggacaagcaacaaccatatgaaaacgttatccatattattaagttgcatgaaacaaccaatctaactcaaaagcttaagttgatggagaggtggataattcacttgtattctaactcccctcacgttgaggcacttttaggcctcagatgtggaataggagcatgcaacaattattttatttaattgtgttaactaggattcaaactcgaggctgttagagtatatggggcccatgaggcccatgtatgaatatggtatagccaccctctagggttggcccaataagcaacttcactctctccaacatggtatcggagctaggtttctctcctctcctcccagcagccgccggcgtcccctgccgcgcgcccagggagagcaacggccgaccgccgtccgacgcctcgcggccgcgcctcccccggcagcgcgcgcgaccggcgcctgcgcttccctcgactcgcgcccgcgcctccacgggccgcgcgcgcgaccggcgcccgcgccgccgcctctcccctcccggtagcgcgagcccggcacgcctcccggcggctccactcgcgggcgcagggaccacccagccgccagaccgactgagcagtctggtcgctccgcgccagcgcctccgaccgccaggaagccgtcgcacgcgcgtcgcgccgccgtgccctccatggccagcgaccctcctcctccccctcctattcccaagtatttcctcccctcgccgcagctcttagtgctcgcgccgccgctgctccgccccgcgccggcgtcgcgcacactccctcggccgccccgttccctccacaccccctccccgctgccgccggcatcctaccctgcgggtgcgcaggcgccggtggccggggcgtgggggactagtgttgccgctacctcccctacgctcgcccgtgtgttgggtgcgtggggggcagggactcacgctgctggtgggggcggtaccctcaccgccgcaagcgccgtcgctgcccttgctgctgtggcggacgatgttcccgcaggggttgagggtccgggggaccatccccctccgccggtcgtcgatctgcctcctgtcgtctatccgccgcctcctccacatcctacaccggtctcctagcaggggtacaccgtcgctgccctcgccgctgcccgtgcggagcacgcggcgcgacaggcccgcatgcgggaggcggccctcatgtgggagcgcgagcgcgaggccaccgatgctatcgctgctcagattgccgcggcggagcagctgctcgcttcacctgcagcccacgacggcggggccacctcctctgataccgcgggcgtcgtgtacggcatcccgcccgcgccggtcgttggagccgggcaccgcaccaccttcaccaccacggtgccctggcacgacccggccgacccgctcgtggcttagctctaccttcaggctgggagtgtccagaatattcgcctgatggtccccgtcgtcctagagctggagtcgccgtcctacgctcgctggcggtacctgctccttctcacccttcgtcgctacgccctggacgaccacgtcctccgcgacctcgccggcgtggcgccgaccgccgcgtgggtgcgcctcgacagcatcgtgctcgcctggatcgtggggacgatctccgtcgacctccacagcctcctccggaaccttcctcacgctcgggctgcctggctggccatcgagggccagttcctgggcaacgccgaggcccaggctctccgcctcgacgcgaccttccgcaccttcgtccagggggacctcagcgtcggtgagtactgccgcaagatgaagaccatggcggactcacttggcgatctaggctgccccgtggaggaccgtgccctcgtcctcaacgtcctccgcggcctcagcgatcgctacacccacctccggtcgttgatcatgcgccagcgccccttccccaccttcctccaggtccgcgacgaccttgccctggaggagatcactctgggtgctcaggctgcatcgatctccggcccgggatcctcgtcttcctcgactgcgctggcggctaccaccccgacccgtccacccgggccggtcgggggcagcgggggccgaggtggtagaggcgggggcggtgggaccccagcagggtgcgccttggcccaccttccaccacccgtggtcagggcgcatctccatgtggccgttccaggggccaggttctgagactcgtcccccggcggccatgttcgccggtgcgcatccagggttctccttcgcctctccgtcgccctggacctcgacacctgccgcttcttcgtggtccacgccgccggctgctccaccgtccggactggttggttgggacgcggccgccttggctgccttccaaactcccactgactccgccgacgggtcccgagtggatcgcggacaccggtgctacctaccacatcactcccgaccctggtatactcacctcagttcgccctccttcctctcttccttcgtccatcatggtggcgaatggctcgtgtcttccggtcacatctgtgggtaccgccggcactcccagctcttttcgcattcctgatgttcttgtagcttcttctttggtccacaatcttctctctattcgtcgttttaccgctgataattcttgttctatcgagtttgactcttctggtcttactgtgaaggactcggcaactcggcgccccctcctcagatgtgacagcaccggccccctctacacccttcggcttccgcacgccacctcttcttcgtcttcgtcgcctgacaaagctgctgtttttgctgccactacaccttctactacctggcatcgtcgccttggtcaccccggacgcgatgccttgatacagcttactcgtagtgccactatcccatgtactagatcacatgatgagcatctttgtcatgcgtgccagttaggccgccatgttcgtcttcctttttcttcttctttctcgcatgctactcatgcatttgatcttgtacactgcgatttgtggacttcacctattaccagtatgtcaggctacaaatactatcttgtggtgcttgatgatttttctcattatgtgtggacttttcctttgcgtgccaagtctgaggctttccccgccctccgccacttcttcgcctgggtgaccactcagttcggcctcaccattaaggccgttcagtgtgacaatggtcgggagttcgataactccacctcccgtgacttctttctctcccacgggatgcagttgcggatgtcttgcccgtatacctccctcccagaacggcaaggctgagcgcatgatccgcatgaccaacgacaccatccgcactcttcttctccagacgcaccttccggcacgcttctgggccgagggcctccacacctctacctacctcctcaaccgtctcccttccactgcgtgcccggctcccactcctcaccaggcactcttcggtacccctccgcgctatgaccaccttcgtgtcttcgggtgtgcttgctacccgaacaccgctgccactgctcctcataagctagcaccccgttccaccctctgtgtgtttctcgggtactccccggaccacaagggctaccgctgctttgacctctcctctcgtcgggtcctcatctctcgccatgtggtgtttgatgagtccgtgtttccctactccaccaccaccacaccaccctccttcgaccgtgaccttgacctcttcactctctttcctactgatgcggtggtcgagccacctatacttcctctctctgcaggtactcgctcgccgcctgtcggtcctactcccggcccagtgccttgcccgggtccggtggtgtcgcctacagtggtgtcgcctctccgcggggccccgtctccgactgccctcgggtcgagcgggccttcaccgcctacggggccgtcgctaccagcccctccggcccgcttcgcacagccggtgcgtgtctactagcgccagcccccagtgcccatgtcgccggccgcgggaccgccgccgccggcccctccggcacgcttcgcccagccggtgcgcgtctaccagcgccggctaccgccgtcggggttcgcaccgccgccgccgtccccaccggtaacctctcctccggcggcgccgccggtggcccagtcctcgccagggacacctacacctccgccgcggccacccgcggcacgtgtcgagacgccggcgtaccacccgccgctccttcaccgcaactcacggcacgtccacccgatggtgacgtggcacgcggctggtaccctgccgcctcgggtcctggcggccacgcccggggactcgcaggtttctccggtaccctcctccgtccgcaccgccctgctggacccccactggcgtcgggcgatggaggaggagtacgcggcactcgtcgccaaccagacgtgggatctggttccctgtccgcccggcgccaacgtcgtcaccggcaagtggatctggacgcacaagcggcgggccgatggtaccctagagcggtacaaggctcgctgggttcttcggggcttcactcagcgccccggagtcgactacgatgagaccttcagcccggttgtgaagccggccaccgtccgcacggtactctcattggcccttgctcgctcctggccagtccaccagctcgacgtcaagaacgccttcctgcacgacaccctccccgagaccgtctactgctgtcagccggcggggttcgtggactcctctcgccctgacatggtctgccggctcaacaggtccctctacggtctcaagcaggccccccgggcgtggcactccagactggctacgttcttggtgacactgggcttcgtggaggctaagtcagacacgtctctgttcgaccaccatcatggagcagagactgcctacttgcttctctacgtggatgacatcgtcctcaccgcctccagtctgtcacttcttcgccgcctcatcgacgcgcttcagcgggagtttctggtcaaggatctgggtgtgcttcaccatttcctgggggtcactgctgagcctcgcccctcaggactccttcaccagcgacagtacactcttgacattctggagcgcgccaagatgattgactgcaagccctgctccaccccagtcgacacgcaggcgaagctctctgaggccgagggtgacccagtcgaggaccccactgggtacaggagtcttgccggtgcccttcagtacctcacctttaccaggccggacatctcctacgctgtgcagcaggtctgtctccatatgcacgacccccgggagccccacctcgcggctcttaagcgcctcctccgctacctccggggcaccatcgactacgggcttctgcttcaccggtccaccgcctccgagctggtcgtgtacaccgacgctgactgggccgggtgcccggacactcggcgctccacctccggctaagccgtcttcttaggcggcaacctggtgtcctggtcgtcgaagcgccaaccggtcgtctcccgctcgagcgccgaggcggagtaccgtgccgtggccaacggcgtggcggaggctgcgtggctctgaaagctcctcgctgagctccacagtcccctctccaggagcacgttggtctactgcgacaacgtcagcgtcgtctacctctccaccaacccggtgcagcaccagcggaccaagcatgtggagatcgatcttcacttcgttcgagatcgcgtcgccgtcggcgatgttcgggtactccacgtgccgaccacctcccagtttgccgacatcttcaccaagggacttccgtcctcgaccttcgccgagtttcgctcgagcctcaacatcagtagtggctagttgagtctgaggggggatcctatgctgtgacggaagttcggactgcggggggggggggggggggaggtgttagagtatatggggcccatgaggcccatgtatgaatatggtatagccaccctctagggttggcccaataagcaacttcactctctccaacagaggcctctggttctgctaacatattaagttgcatgtaccaacgagttcaacccaaaagattaaactgatgaagagatgtgggcaattcacttgtattttaacactcttctcaaatcgaggttctctcacgcttcagacgtggaataggagcgagcaataattattttatttaattgtgctaaccagtatttgaactcaagacctctggttttggtaccatattaagttacacgcatcgaccagttcaatgcaaaatattaagttgatggagagaggttcacttgtattctaacactcgtcacgtcgaggctctcttaggcagccccggtcctatgattttgagggccccgggcgaactgatcgtggtgggccctctagactataaaaaaattctatattatgcagcagagcatattaatatttcgtaaataaaagatgatgtgtattgaaattattttaaaaaatatataagaagctaggtaatatacatcgatacagattagcgcttcgcagtttgaaaaataagaacgacgatcgctgaataacctaaattctgattgctcgaccgtgcgtgtctggaggctagcgcagtggttcccagctccctggaattctggagggttggattggcgagatggcgaacgacgatcgcgtggagcgtgtggtctcatagacgctcggggacgtgagcgtgacgactgacaactgggcagtgggcaacggtgccacgtggtccgtgtgcgcccgggcgtccgtgtgcccagccctcctaccttgttggctacctatactattttaatactagcatataacccgtgctaacgctacgttcctgggaagaggagaggggtggacgatgacggtggtggcgcgaggagagggattgatggcggtggggacgcgaggaggggagggctaaaggatgatcaaataatattgtttattagatttgagtgagcaaaaaagatgatgttattcaacgatctgaaccgttgattttgatggtatgttaaatatgggtgcaatttgttttatggacttcgtaaatattataggtgtgtaggttatttggttagatgtgttttgtaaagtgtaaactggtgtattatatggtgttatagatactaaatattggtcccctaatagttttgggccccggccgtcgcctccgtcgcataggctcagggccggccctgctcttagtcctcgggcgtgaaataggagcagcatgtcagggaggcactgttcacccgattactgtagagcgtgaacaataccgagattagatcagattagattagttggtttgttaggcaaaaagataatgattagatcatattagttagggaagagataaggattagatcaaatttggttgataaggattggatcagattagttagagaagagataaagattagatcagatttgtttagttggaaagagataagtcagttgtctctataaaaggaacactattgtatcagttaagggtaaggaagaattagaagtacgccttcttcttgcctggccgtgggtagaggctctcgtccgacgttcctacaactacaactccctctccaattcctcaatcccattgtagtccataacagagcaataattattttatttaattgtgttaaccaggattcgagacctctagatctggtatcatattaaattgtatgcaccaactagttcaaccaaaaaacgtaagatgatggagagagttgagcaattcacttattctaacacatatatgatatatgagccatcccactattatgattgtttatatgggtttgtgtagtgaccccaagagtagctcaggactgcagttgaaagctgatgtatgggctcatgtatctaacactatctgttctgttcagacaatatatgtttcagtacctgtcatttatattcatgttactgatagaaccatgatatatactgggtagatccctggctaaccaaacaa

SEQ ID NO: 149 - DNA, 8463 bp, Zea mays
  Intron number 2 from transcript GRMZM2G478212_T01 (locus G RMZM2G478212) derived from phytozome v7.0 (chr-ID 1; pos 1 05462432 to 105470894 reverse strand)
agcggcttcaggagtcaagatttttgcaatcacttgtatgtattattctcgaccttatttttttgtcattgtttctcttcataagaatttgatttgtctctacctacctaggtcctgttaagttccaacgtttaaactttagctaccttgaaatcaaataggtcagctaagaactagataaacttcagctacagcccaaatttcattatctcattatctccttatccttagctaatactctctccgttctagtatataaggtgtaaccacctctcgttcaaagaccaaaaatacatttaattctctttataccactgtacgtgtgtatagagagagcgccttatattctgggacaagaacaaagagtggttatctcttatattctgggacggagagagtaacaactaatggcaattaataccaggtgattcacctatatacccatgatttttaatggtggtgtcaaattaaaagggcactcatgtaccacatggtctgccgacactgttcctagacacatacaacaccttgtcggagtttggttccgacaacgcactacaggatataccaagtagtgcttttgggaggacggcgaagccgattgcaactcgatggttcgtgcagggcacgacgtaatgtagaggattatacaagttcgggtcgctgaaccgcatagcatcctacgtcatgtgtgcttgcgagattgtattgcttggtggttgggattatagagagttctagagctaatagatgactctgcataccgagttctgttgtcttttcgtaggggtgattcttccgctttatgacaacgggagaacagagttacacgtgccatgtcccatgtcccacgtctgttgccggtccaaaactaactctgacttatatggaagtcagtgagtcctcaggagtagggctggacgaaatgcttgtggctcgttggctcgctcggttcatggtcagctcggctcggctcggatcggctcgtttgaattttttcacgagctgagctgacatcctagctcggttcgttaacgagccagctcagttcgttaacgagccaactcgcgagctaaacgagctaccatattccagcaaaacaaaaatatatgcatatcatttacagaataattggtgaacatgttatatatatgtgaggtgtctatgacctatgaattaaactaatgattaatgaactatgtctatgtgttaatttggtgtatgcaaatataattatgagttaaactgatgaacatgtatgtgaattgtgaattaatgagtgatgaattgtgctaatttgttgttatattgacgtggtttgtgaaactataagtataattactattttctattgttaaattagttttaaattaactaaaaaataattattatgtacattttattttttttttcctgctctggctcgcgagctaaacgagccagctcgagctcgtaaacaagccgagccgagctgactctgtagctcgttagcttaacgagccagcctggcttgttagcttaacgagccagctcgaactcgaacgagccgagccgagctggctcgttatccacccctactcaggagcatgtcgcaccctctgcatgcacgagatccagtccacgcgccttgatgcccatgtaaccgcagtcccacatgcgtctggtcgcgctcgattggtagcttgtgaagctcagctgtatggcccaccgatgcctcttcgtcagcccatggatcgtaaccgggtcgtgactacttaggggatatccatccccccacacctgatagtgggattgtcctggtgaatagagtgcccatctggtccaacgtgcatgttcccttaaccgtcgaatcatagaaccaggtccaactctatcctaaaaacgaccagagagcaatcatgagcattggtttggtccgatgacccccatcgaatcatagaactctgtccgactgttactttggtcacgtggctatggttagacgtcaggctggtattgttccagttcaatgcttctgcctgttagggtccaacaccaattctaggcatcacttaggccatgtttgtttgagcttcttgccatcttttcagtatgaaaagccaaaagcggaaacaaacaactaacgttttggtttagcttctggaagctagaagctcagaaaagatgagtttatatggaaagttgagaagcctgcttttatgggatttttgtagcttcatgaggttaggaagctaataacatcaccgtaaagctatcattggcttctcaggatcaaaaggacagcaacaactttttagaaaaccttaaaagctgtagctcaaacaaacatggccttagccttttttcttataacctttgcacgtgtgctaactagatcgtgtctcaaacactagtttatgagttagattgttgtcaatggtgtctaaggtggaacatcacaacttcactaggtctattgcatatgcataagttcatttctcctagcggtacataagtaaccttcttgaaccttgagtttctctctttatagtacgactatttatcctaaatcatatcacgcactctgttgcatcttaatcgataaaacaaaatgtcttagcttatgctattgatatgtgctctttcatttttctttacttcttcatttttgagcacttgttcatcttcatggccatcatcatccttttcatggtagcccaccttgctcaatctttgacttgaacatatttcattcacaacacttaagagtaaaggttagtatgctggttgtctctgttaccaaaaccatacatggagctttcatgcatggaatgtgtccacactaaacgacgaccttcttgatctactcttctaggactcggttttgctcaccttctagcttgatgcgcttgcagcttcgacatacctgctcaatcagcgcccatgctatcctcgtgccaacacacccttcgagctttagcttgatgccccactagagtataaccacctccgtcttttcacttggtctttgttatcaacaccaccacaattgcaccacaaaaaatatagtgttgtgatccactcgttgcatctttcttcagctatctgctcaatcagcgcaactacaaatgttatagtctggtgataaagcctgttctaatctcttgtcgtgtctacgtcaacgagacatgctttccatttttgcaggatgccctgtcgctgctagaagttgctcatgagcgacaattgttcctgcctaatgtggtccacatccctactagacctcgttagtctcgacgtcgtgcacaaacaacaccaacgactccccaatgtgcgattgtcatctgcttgaaggtttatcgttgataccatgaacaccatgctgctccaacaacccctaatggtgaatatgactccaatgacaccagctacgacacttcacaccatgacgtcgtcagcactattgtccacctctgcgccattgcgaacaatgcctaaacgcttgtgccacgaccacctcatgccaatgtcatcattgagggttgttcaagaataaactcaatcctgatggcacacttgagtgccgcaaagcacgatgggttactcatgggttctttgaatggactagcgtcgacttctcttagatgtttttgccggtggttgaaacagcaaccattcagagagtgctacatttcgcaacaactcgaatggtggtaatacatcaactggatgtcaagaacacgttcttgcatggtgaccttgctaaatgtgtctactgccaccaaccagcaggctcatcgacccatcaccccggatcatgtctgtctgctcatcaagtgcctctatgtgctaaagcaggcacctggggcttggtttcagcgcttcgggaactacctttcactgcaacaagctccgacatctccttgttcatttagaaatatgctagggggctatctgacatggaagtgaacctctgaaatagattgaagatgtgcatccttggctatgcggtaatttaaagggcacggaacaggcaaaactcacgcatgctttggcttaaattcggagatgccaacactaaatttttccaccggaaagctggctccaggaggcgaaaaaatttcattcaacggttgtggaccggtaatgggtgggtcttctctcacaatgaaaaagcacaagagctacaaaatttcttccataatgctttaaagcggccaacccctagatctatcgaccttaactgggacaatatctctgaccagcagtttgatctatcaagccttgatgcaccgttcttcgaggtggaaattaaaagaagtattgatcttctaccaggagataaggctccggggccggacggcttcactggtgtcttccttaaatcttgttggaccattataaggcatgatatcatggctgcagtgaatgctttctataataatcgatgcttcaacctccagctaatcaattcagcaaacatcattctaatccccaaaaaggaaggtgcggaggcagttggggacttcagacctataagcctcatccattctttcattaagattatcaccaaaaccctggctcttcgtctggcaccgagaatgaatgagttagtttcaccttgccaaagtgccttcattcaaaaaaggagcattcatgaaaacttccttgcagttagaagcactgttagacgcttccagcgtatcaattcgcccacgctattcctcaagctatacattgaaaaagcatttgattccgtccattgggattatttgattgccttactccgcaatttgggattccctgtgaggtggactgattggatcgcttctatcctctccacctaaacatcaagagtgctcgttaacggggtccctaaccctcctattcatcatgagagaggtctcaggcaaggcgatcctctctcccctcttctgttcatcttggcgatcgacccattgcaaaaaaattctaaagatcgctgtggacaatggagcattgaacaagttggggaacagttcgcccagcattaggctctcgctatatgctgatgatgcagcattgtttgttaagccgaaaaagaggatattgagacaattgtcaggttgctcaccttatttggcgaggcatctggtttgatgaccaattttcagaagtccatgatcgtcccaatccgttgccaggggctaccccttgatgacattcttagttgctttccagccagaagagcaaccttcccgatccggtacctgggcctccctctcaccccaactagactcgggaaggggcacttccagttattggtggacaaagtattgaacagactgagtagctgaaatgggagaaacttctcagtggcagggcgcttaactctggtgaaaacagtgcttacctcacaaccaatttatttattaaccgcccttaatgctcccaaggcaacgattagtctactagactccaaaagaagacaattcctttgggctggttctgaacgactgacgggcggaaagtgcaaagtcaattggaaacgggtggcgaggccaaaagcccttgggggcttgggagttcttgatttgggcgcttttgcgcgtgccttgcgcacgcgatggctctggcataattgcacctcatcacggaatatctgggacaatttagagattccttgctctgatgctgatagactgctttttgcggcatcaacgaatattgagattggtgatggctctaaaatctccttctggggcagcgcttgggtgagggggcaaaggccaaaggacttggcgcctcgtctcttttccatatcaagaaataagaggaaatctttagcggaggcggtcacaaacaatgcctggatcatggatcttgcgctgttcgataggccgattacttcccaccacattcatgagttctgcattctttggtctgaagtccaaaagatccagctttacccagaacatgatgatgccatcacctggaatttcactgcagatcgcctctacacagtcaaatcggcatatcaggcccaatttttgggctctgttcgcacaaactatgacctcatcatctggaagaattgggcgcctccaaaatgcaagttcttcagctggttagcaattcaaaatcgcatttggacagcagatcgtttagccgccaggaattggccccatgaaccgactcgcgtcttgtgtcgtgctgccctagaatcggggcttcacctttttatggaatgtcgtttcaccaaaagaatttgggaggaagttgctgtttgggtagctgttgagggcctgaaaccgtctagctgggggcgacccccctcgctgtggcattggtgggaaaaattagcttttttgccgggatgcaataggaaaggcatcagatcattattgatccttgtaaactgggagatttggcgagaaagaaatgcgagaatctttgatcgcagattctcgagctgccaacaaatcattgccaaaatcaagagtgaggcggcagcctggaatttggcaggggccaagcacctagctacccctttaatagctatttagtgggatctgtttttattttctgttaaggttggacctttgcctagtacttcggttactgtattgacttaaacctcttctattcttcttatcaatatatcttggcagacctcctgccttttatccaaaaaaaaacaaatatgctaaatggtgtatctcgtcaactttgaaaacaacatcgttactgcatcaacatcatccttgatgtgtgatgtcgtccacaagtttcatcaggtatttgccataaaagaccttggcgccctacacttcttccttgacgtacaggtttgtcgcgatgctggcaagtttcttcctcaatcaggcacaatgcacttggagattcttgagtgcgtcgggatggccaaatgcaagccaacatctactccagtggtggcaaagccaaaatcatctgctgtcgatcggcagccaatggcagctgactcattctaccacagcatcaccggtgcacttcaatacttgacgctcacacaacatggcatcccatatacagtgaaccacatgcatgctccacacgatttgcactcgaatctcatcaagcatatcttgcgatacctccgcagctccatcaacaacagtgtcgtgatctctgcggctccgtcaactgaactgaaggtgtactctgacgccagtcgatggtttccatgtctagcgctgaggcgtgtggagtgctgctggctccggaacctacttcgagaactccatgtcattgtcaacaaggccgcgatatctattgcgatgatgtctcagtgatgtatctaattgtaaaccctatgcatcatcgacgaacaaagcatgtcgagctagatatacacttcgtgcgagagaagatggccatcggttagttcaaggtgctgcagattccaaatcggcaacaatttggagacataatggtcaaagggttgccaacgtttgttcaacgattttaaagacggtttgcgcgttcggatgaccgaagctccaacttaggggggggggggggggggggtgggggggggcgacaacctattctaaataatagcatgttttggcttttctagatatatagtttttgttacgtatctagatatgatgtatatctaagtgcatataaaaatctatgtatgtagaaatatcataaagtcttataattttgaatggagggagtagatagataaggatcagctgattcggttagtttgttgtatagtgtataggttagtggccactaggtgaacccctagtcttcagccgatcctattctttaggatatcagttagggacgcacggcttcagtgctccagcacctgtatttgagcattctctccagcattttactcatctcacctcctgtttcaaattacactctataaaaaatgtaaaactgtgtttggcatgatcatatgcatgatctgctagccacagccgtacaaacttaaattatgactgtttgactcatacttataaatgaattagttcaattgcaaaaggtagatgaggttctcctaatttctgtacacttgcagaactacaatcaatcagaaatatgcatcctgctcttagatactgcagcatggtaccagtaagcattgtatgcactgcctgtcatgttgcagtactgtatggtttcaggctctagtttaggaacctgcagcccaagtaaacaaaattttgaaaattgtgaagtaccttaacaatccttttcattgctatatatgccttcgggatcttctgtgttatctttagctagttatcagatataattgcccatgaaacgaatgctacagaaggaattagataattaattccaagactcgttgatttagtttatccttgcagtctaatttttcatttcaaaaaataaatctgttataactcctttatactgttttgatttttccccttttcagttggcggctggtttgctacccttgcggtcgcagga

SEQ ID NO: 150 - DNA, 16076 bp, Zea mays
  Intron number 1 from transcript GRMZM2G315767_T01 (locus G RMZM2G315767) derived from phytozome v7.0 (chr-ID 10; pos 64844089 to 64860164 reverse strand)
cggagctcttcttctcgccgctgctctacgtgcaggtctgcgtcttgcattcttgctaaatactctctatttttgtattttaaaaattaaccagcggtcaacaaatatttaaaaacggatgtagtatatgaatatgatttgtggcctctctcacacatccgttctcactttcttgcaaccctacataggaaatgtacgaagaacatattgacatactacattactactgtcatcgcttttatgactgtgacgctattacaactccacgcataggaaatgtgttcacacgttacaaaggagtacaaaaatagaggggaaaaaaggaaaaacacaagaatatgagatgggatcatgggatgagttagtgagaaattataggattccaaaacacgggaatagatattttgatccgtctgttaatggaaaaattagtacaaaaacttgagatagcatagcaagagagcgactgagtgagcaaaatttccttcatgtagaaaagatctattcatttttgagaaattataatttacttaataaaatattacttccgttctcgaatatttgtcacactctaatacatttttaaactaaactgcgacaaataaaaaagaacggagtgagtagtctatttgacttgaaatttgatattccaccacttcccaaaactcatagggtgaagtattggaaataattttagctcctataatttcctatgtttatatgcgaaatgtgttttggacttcaccccatgtaaagtagttttttcatggggtgaagtgttggaaatgattttatgtatcaacataatatatttttactctgtaacttataaaacgtatatattgctaataatcgtatacaaatatattttgcataaaattatattagcttaattgatctttgcctaaattaatctccaaggattaaaatggggcatactctgatttccttgcctttgaaaagaaacttagctagttagtgtttggttccaaatctagttgggattgaggggctgcatgctagagagcggttccatccgcgagattttggagtgccagatggttcaatgtttgagcataatttttcttttttaagtcattatgtcctatatagaaccaatccaaacaatagcaaactaagagcgagtttaaacactatgatatatacgaatccctttttttgaattcattctttatagattcttttgagaaccttttgatccgagcatgggtctcaaaagttttcaatgcaatcaaagacgtcgaagcacgcggaggatgccgcatttgagcggatcataatgtcgatacctattcaaacaacggggggacgttggtgcgtatagatgcgttagccagcactagtacatcttcttcagttctctcacggtaggtgtgcactgctgctgtagaggacaccaccacccccatttaaacttcaggcacgagcgctggaactactagaactagtgaagtgatgaagcgaaagccatactgttgtgtcccttgtcctttcgagagtactgctgtggagctttggtcggctccgatccggttccaatttcagctttatctttaccatatcttatcttaaaataaattaagagctcacgaaactattaaggtcttgttcgtttctaccggattagtggatcggaacgattcctaaccgaattgcttctctaatttatataaacttggattaagtggaacgattccgagtataatccgacacaaacgaaccagacctaacttttgcttcactggttccgactctacgcaaagcaggaagaagccagatccgtttgaggcagtctagtgagctcatgagaaaatagcactaccgtacgtaagcctttgtactagaaaaatgtaattctagatttaattagacgcaaactaccatttcagtattatatataatatatatttttttataaaaattggtccatcttaagatatcctgacctagaccaaagttgaaattgcattcgttctactcactccatcaacaaatgtttgtcgctatgtgtcggggaccataattaggggtaccctcaagacgcctaattctcagctggtaacccccatcagcataaagctgcagaggcctgatgggtgcgattaagtcagggatcagtccatacgagtgactcgatcacgcttcacccgagcctagcctcggactcgggcagccgacctcgagggacttccgtctcgcccgaggccccccttttaacggcggacacatctccggctcgcccgaggccttggcttcgctaagaagcaaccctgactaaatcgccgcaccgactgaccgagttgcaggggcatttaacgcaaaggtggcctgacacctctatcctgacgcgcgccccccggcagagccgaagttaccgccgtcactccgctgctccactgaccggtctgacagaaggacagcgccgcctgcgccactccgactgcagtgccactcgatagagtgagtctgacaggcagtcaggcctcgccaggggcgccaaagagaactccgctccgcccgaccccagggctcggactcgggctaagacccggaagacggcgaactccgctccgctcgaccccagggctcggactcgggctaagacccggaagacggcgaactccgctccgcccgaccccagggctcggactcgggctaagacccggaagacggcgaactccgctccgcccgaccccagggctcggactcgggctaagacccggaagacggcgaactccgctccgcccgaccccagggctcggactcaggctaagacccggaagacggcgaactccgctccgcccgaccccagggctcggactcgggctcggccccggaagacgacgaactccgcctcgcccgaccctagggctcggactccgccctggcctctgccgaacgacttccgcctcgcccgacccaggggctcggactcggcctcggcaacggaagacagattcgaccccagcttcggaggagcccccacgtcgcccggcctcgggcgcgggcccgccacgtcaacagggagcgccatcaccactctaccccgagccgactcgggccgcagagaacaagactggtgtcccatctgaccagctccgccagataggcaatgatggcgcctcccaagctccatgacggcggcggctctccgctctcttacggaagcaggtggacgtcagcaagggctcgaccgctccgacagctgtctttccgccaagttccgttgctcctccgacagccacgacatcacgccagcagggtgccaagatctctccggctgccacattggcatgtacttagggcgttagctctccctccgctagacacgtagcactctgctacaccccttattgtacacctggatcctctccttacgactataaaagggaggaccagggccttcttagagaaggttggccgcgtgggaccgaggacgggacaggcgctctcttggggccgctcgcttccctcacccgcgtggacgcttgtaaccccctactgcaagcgcacccgacctgggcgcgggacgaacacgaaggccgcgggacttccacctctctcacgcccgtctccggccacctcgcctctccccccttcgcgctcgcccacgcgctcgacccatctgggctggggcacgcagcacactcactcgtcggcttagggaccccccggtctcgaaacgccgacagttggcgcgccaggtaggggcctgctgcgtgctgacgaacagcttcccgtcaagctccagatgggcagtctccagcaacctctccggcccgggacggtgctccgtctcgggagtcttgagttcatgtccttcgacggcagctacgacatgatactccttccaccgccgtgcgacaacgacaatggcggccgacaacccgcccgccggcggcggaaccgacgacatctcccccgcatggtggaagaacaaccttcgagctcgctccgtcctctcccccgccaacggaggaggaggcggggcaaccaaggccaagcgggaggccgcgcttcgtcggccgtcgagcgaatcgacgcccccgacgccccgacggaaggcacgccgggcgtcgacctcgcgttcgagacgaaggcaagcgccgtccccccgcgacacgccgatcccgagcgagaagacgacgccagcgcgctcgcggagagcttgcaggacgtcgcccttgtacctgagatgacggcgcaaccagtccccgatgtgactacgtcgctccgcgtcgaccaaaaggtactgactaactcccatcttacgtcatttcgactcggcctcaacccgcctagcaaccttgctttgacgggcgctctcattgaggcaagtgcaaccccactggggtttcatatgcggtcgccttgggaccggttgacggacgtctcgacctacgggccctctgggtccgaggaagatgacgatcccagcatctgttgggatttctctggactcggcaaccccagtgccatgcgggacttcatgaccgcatgtaactactgcctctccgactgtcccgacggaagccgcagccttgacaacgagggctgcggcccaagccgcgaatgtttccacatcgagctaggggatccctccgaaggcaaccatctcggtatgccggaggacggtgatcttcctaggccggcgcctcgcgccgacatcctgcgggagctagctgtggtccccgttccggtggggggttacgacccacaactcgagcaagtccgcgaggcgcaggccaggctcgacgagggaacaggagcgcttgagccgatccgtcgggacgtcggacgggtatgggcgggccaacccccggccggagaaatacgtcacccgccccaaggtctccagcaccgcgtcgccaacgatgtcagggtcaggccgccacccgcatccagcggggtcggtcagaacctggcagccgcagcgatgctcctccgcacgatgccggaaccatcaactaccgagggtcggcggatccagggagagctcaagaatctcctggaaggcgctgcggcccgacgggccgagagcactgcctcccgaaggcagggatacccctcggaacctcatgccgcgacttcccgattcatgcgggaagcctcggtctacaccgggcgcacgcgcaacaccgcgcctgcggccccgggtcacctcggcaacgagcaccatcgacgcgaccgtcgggcccacctcgacgaaagggtgcgccgaggctaccaccccaggcgtggggggcgctacgacagtggggaggatcggagtccctcgcccgaaccacccggtccgcaggccttcagtcgggccatccgacgggcgccgttcccgacccggttctgacccccgactactatcacgaagtactcgggggaaacgagaccggaactgtggctcgcggactaccgcctggcctgccaactgggtggaacggacgacgacaacctcatcatccgaaacctccccctgttcctctccgacactgctcgcgcctggttggagcatctgcctccggggcagatctccagctgggacgacttggtccgagccttcgccggcaatttccagggcacatacgtgcgccccgggaattcctgggaccttcgaagctgccggcagcagccgggagagttgctccgggactacatccggcgattctcgaagcagcgcaccgagctgcccaacatcaccgactcggatgtcatcggcgcgttcctcgccggcaccacctgccgcgacctggtgagtaagttgggtcgcaagacccccaccagggcgagcgagctgatggacatcgccaccaagttcgcctctggccaggaggcggtcgaggctatcttccgaaaggacaagcagccccagggccgcccatcggaagaggctcccgaggcatctactccgcgcggcgccaagaagaagggcaagaagaagtcgcaatcgaaacgcgacgccgccgacgcggaccttgtcgtcgccgccgagtacaagaactctcggaagccccccggaggtgcaaacctcttcgacaagatgctcaaggagccgtgcccctatcatcaggggcccgtcaagcacactctcgaggagtgcgccatgcttcggcgccacttccacagggtcgggccacccgcggagggtggcagggcccacgacgacgacaagaaggaagatcaccaagcaggagaataccccgaggtccgcgactgcttcatgatctacggtgggcatgcggcgaatgcctcggctcggcatcgcaagcaagagcgccgggaggtctactcggtgaaggtggcggcgccagtctacctagactggtccgacaagcccatcaccttcgaccaggctaaccaccccgaccacgtgccgagcccggggaaatacccgctcgtcgtcgaccccgtcatcggcgacgtcaggctcaccaaggtcctgatggatgggggcagctgcctcaacatcatctacgccgagaccctcaagctcctgcgcgtcgatctgtcctccgaccgagcaggcgctgcgcccttccacgggatcatccctgggaagcgcgtccagccccttggacaactcgacctccccgtctgcttcagaacaccctccaacttccgaagggagaccttgacgttcgaggtggtcgggttccgaggaacctaccacgaggtactgggaaggccatgctacgcgaagttcatggccgtccccaactacacctacctgaagctaaagatgccgggccccaacggggtcatcaccgtcggccccacgtacaaacacgcattcgaatgcgacgtggagtgcgtggagtacgccgaggccctcgccgagtccgaggccctcatcgccgacctggagaacctctccaaagaggtgccagatgtgaagcgtcatgccggcaacttcgagccagcggagacggttaaggccgtcccactcgaccccagtggcgacacctccgagcagatccggatcggttccgggctcgaccccaaataggaagcagtgctcgtcgactttctccgcgcaaacgctgacgtcttgcgtagagtccctcggacatgcccggcataccgagggatgtcgccaagcactagctggatgtttgggcctgagtccgacccgtcaggcagcctctgcgcctcggtcatcaagggagagtcggcctcgcctcagcagagcccgaccctccctcgggggctaaaaagggggaacccctctgcgtcaagattgggcgtacttctccgtgtcaaaaattttcaatcaaaaaaggggcctctcgcgttctcccggctatgccagaagcagggtctcggggagcgaacgtgggtacatgtaaatggcgaggccgactgagccgaggaactcctgcgcccccgggttaaggatacctcactcatcacctgccacgaagaatgacccaactcgggaagccaccctattattgacgagctaggacggacacgcaaatgggaagaaaggagagtacgacttcatgcaagaaagacaaagtgtttaggcctcagcgaccgcggtgagatgcacatccaacaagaaattgttccaacaagaattaggcgccgccttgggaaggagccgcgccctcagcaccgtccccgccgtcggtaaggtccatctcggcctccggtgacggcacagggggaaggatctccgcctcaaaggtggtcgccagcgccgcgctcggacccgcggcgaccgcgtcgagccgctggacttctgccagggcagcttcgtcttcgtcaggaagacagtacccctcactaacccgctccaggtccacaacgtagtgggaagcgagcacggcgaaggcccgcctgacgccgtggtgtagcgcctcgcggactctgccgcgcgcgtgatcacccaaggcttgaaggcggctttgaggggagcttcctgatgggacgtcgccggagccgaggttacgataaacgtccgagacggcctcggacatggccgcgaggtcagcctccctctgctcggcagctccggcaagcgcctcggcgagcgccttggcggactcgtcaagggcggactcaagctctgcgaacaaccagaagaaagacctcaagcacaagcagaggaaaccgacaaaaacaagaatcagggacggccatggcgtacctccggctcgggcacgatgctccgaggccgcgacctgggctgcggctaggtcggccgcgagggtctcagcccggccttcggcctcggcagctcggtcccgagattggtcccgctcctcgacaacctaggtgaactccgaccgctgccgttgcgcctccgcgcgcgctgctgccgcctcggccctcaggtcagcgcaaagcaactggaggtccacaaccttggcgtcctgctgagaaaggcgcgcagtagccccggcaagcgaggtcctcagggatcgcagcgagccccagacatcggcctcgcggcggatgaatgatgacttggcggcgctccgatccgtcaggtcctggaggaaggagacagggcgtcacgacgaacgcctcgctcgcagaaaggaaaaggtatgcctgaaaccgttacctggaggattttggggacatccctgcagagaacctccagcgacgaccggagcgaccccaccgttgcttcagcacactcgcgaagctcatcccaggactggtcctcccgttcatcgtcgaggacgaagacagggtccgaggcctcgcgggtccggaatcggagcgacgggcgccgggcctcggggctccgctgcacagcgataaggctgccactcggctggacggatcgcgcgcccacacccacctcttctgaggcactgggcgccgacgcgtcggccatcctgacgctggcagcaaccggtcgctccccgactgggacggcggcgatttcggcagcaaccggcgccggcgtggccggcacgacgggcaggctcggggccacgtcagcgtcggccgcctcccctatcacaatggccacctcggcagaagagccagtcttgggagcccgctccccagagacgggcgacacccgagccccctgcggcggaacaccctgcgaaagggtcggctgaacgacaagacccgaggcggcgctgaccgcgcagtccggtgccgtcttgaggaccttccggggtgccaggtcggtctggccatggcttcgcttgctggataaaaaaaagaagagagagaaagaaagggaagatcacagccgagacacacgaatgggaagccaagacgcagacgttccgagatactcacccacttcgggccatgatccaccgcgcctggggggagccttcttggatcccggctcccgaaacagccgccgaggtccgcttcaccggcaccttcggcgccaccctcgttttggacgcccggggagcagattgcccgggcacagccgcgatgacttgagggtcacccccatgcgccaccggcacgagcggcggcccctggggagcagacgccctgatctggccctccggagccacctcagctcctccggctgaggggtcaggtgacttctcgggtcgcccctgcgcctcgggccgggaccccgacaccccaactccgggggctgacggcgtctgcccgctcgggggctggcccgacgactcctggccacaccccaagccggggctgaggccgagacgggcggccatgtcatcctcctcttcatcatcgtcgtcatcgtcgtcgtcgggcgtctctggcgatggctccctcgggagcccttccctctcctgctggcggcggcgcttctccaaggcgtcccgagcccgcctccgctcgcgggcccgggccttctccgcgtccttcttcttctttttctcctctacggcgacccgccgcgctgctcgatccaccgcgtcctccgggacccgtggcagggagggcttgtgccatcccacctcctaaaagaaggggagaaagaaacccgatcgtaagagcccggagcaacccgatgtgtgaaggagggggtgagtactcaccagagttacgcacccctggtcggggcgcatccgaagctgggagtaggcatgagggtccggcttccccatcgcagccgacactcgccattggagggtgtcgaagggaagaggatcaggggacatttgcgagcccccccagtcagccttcggagtcatctcccagagcggcagccgccgctccgccaaaggaagcaccctccgacgatggatggcggcgaccactcccgcagcggtgagtccccctcccgcaactccttcagggcctggagaagaggttcgagattcttctgtctctcgtgcggggtcccgtggcgccaggcgtcggtggcggcggtgactacccgctgggagaatggtgggagcaactcaccgtcattccggaggtagaaccaccggcgctgccaccccttgttcgaggacgcaaggatggcaggaatgtactgtgacgcccgcgactgcctcagcaagagagtgcagccgccggcccgcaccgctgcacgaacccttctctcccccgtcggcaaggtgaatggctcggcgaggaagagatgggtccacaaatcccaatggggagcgatccccaaatacccttcgcacaccgccacgaagatagcgacctgcgagatagaattgggggagaggttgtgcaactccaccccatagtggaacaggattgcccgcatgaagcggccagtcggcacgccgaatccccgctcgtggaaggagatgaagctcaccacgtaccccgacggtggggatggagcgactccgcccgtgggaggaatccactcaggtcgctgcccgtcggtgagggggcgaagcaaaccttcgccaaccagccccttcagatcgctcgccgtcaccgtggaaaatggccacggatcgcgcggggagatgatggtcactcggtcagccatcagcaaggcggaagggatggcggcgcaaggggcaggaagggcgttttcctctcctctggtcaaagcctctcgggttgcgaaaacctaaataaagaggcaggaagcggagcgaagaaccgtcgccgggttctctcccgagtatataaagaccagggcgaaaccgtttccagcgctccgcccggaccggacgcgggattcaaaaggcgtgatgcaaaatagtcgtccctcgaacggctcacgcatgcgcaacggccgccccgccaaccactcgccccgtcgcattaactccgcggcgggacaggcggcgcttctggcaggagaagcggacgatgcttcgccttcaccgtaataaccgcgccaaaaaaggtacgccacgtcgttcgatttcgtatccttttccctttttcctctttctctatctcttgcaacagggaccgggaaagggggataccccgaaaaggatccttccctgtgaaggaaccgggctccgagccccccccccctactgatcagaggttcgaaggctggccctccgaagggttcaacagtcgcctcagatcgcgtgggcccgacacccactactggtcaggggttcgaaggccggccccccgaagggctccatggccgcctcaggctactcgggctccgcgcccattactgatcagaggttcgaaggctggcccccgaagggttcacagtcgcctcagacgccgagcgagggatgaccaggggtacgttcgatacataaccgaggctcgggctgcgctcccgaggtaccctaggacatttccgagaccagcgggagcgatcttgtaacggaatcccatcggagggaggcatcgagccctcggaccccgtcgccaggggaccgggtccggcagatcacccgcaggtacttttgggcatgcctctgggcccctagccgacccccaacgaacggggcacggacgtccactcggattacccgcttgcagctcaccggagacaccatgttcggtgcccatcgagggtaacatggcgcactcccccctcctccttgcggaaaggcgacgtaggggcgtatgtaaaaagtcgagtctgtccctgatcgccctctcgccctgtgcggaggctcgggggctgctctcgcaaacccggctccggccgaaccgttgacagcgtcaacataccagcccgagaacttgggccccgaccgtgcacccgggctacggccagttcgcatgagggaacgaccagaccagccgaagcgttacgcaaggcattaagacctcgaaggagtgaaaccactcctccgaggcctcgggggctacacccggcgggtgcgctcgcgcgcacccaccggaataaaatgcaaccgaggaaggctggtccccttgcaaaaaagtgcgacgaaagcctccaagcgagtgctaacactcccttcgaggctcgggggctactgtcggggaccataattaggggtaccctcaagacgcctaattctcagctggtaacccccatcagcataaagctgcagaggcctgatgggtgcgattaagtcagggatcagtccatacgagtgactcgatcacgcttcacccgagcctagcctcggactcgggcagccgacctcgagggacttccgtctcgcccgaggccccccttataacggcggacacatctccggctcgcccgaggccttggcttcgctaagcaaccctgactaaatcgccgcaccgactgaccgagttgcaggggcatttaacgcaaaggtggcctgacacctctatcctgacgcgcgccccccggcagagccgaagtgaccgccgtcactccgctgctccactgaccggtctgacagaaggacagcgccgcctgcgccactccgactgcagtgccactcgatagagtgagtctgacaggcagtcaggcctcgccaggggcgccaaagagaactccgctccgcccgaccccagggctcggactcgggctaagacccggaagacggcgaactccgctccgcccgaccccagggctcggactcgggctaagacccggaagacggcgaactccgctccgcccgaccccagggctcggactcgggctaagacccggaagacggcgaactccgctccgcccgaccccagggctcggactcgggctaagacccggaagacggcgaactccgctccgcccgaccccagggctcggactcaggctaagacccggaagacggcgaactccgctccgcccgaccccagggctcggactcgggctcggccctggaagacgacgaactccgcctcgcccgaccccatggctcggactccgccctggcctctgccgaacgacttccgcctcgcccgacccaggggctcggactcggcctcggcaacggaagacagattcgaccccagcttcggaggagccaccacgtcgcccggcctcgggcgcgggcccgccacgtcaacagggagcgccatcaccactctaccccgagccgactcgggccgcagagaacaagaccggtgtcccatctgaccagctccgccagataggcaatgatggcgcctcccaaactccatgacggaggcggctctccgctctcttacggaagcaggtggacgtcagcaagggctcgaccgctccgacagctgtctttccgccaagttccgttgctcctccgacagccacgacatcacgccagcagggtgccaagatctctccggctgccacattggcatgtacttagggcgctagctctccctccgctagacacgtagcactctgctacaccccttattgtacacctggatcctctctttacgactataaaagggaggaccagggccttcttagagaaggttggccgcgcgggaccgaggacgggacaggcgctctcttggggccgctcgtttccctcacccgcgtggacgcttgtaacccccctactgcaagcgcacccgacctgggcgcgggacgaacacgaaggtcgcgggacttccacctctctcacgcctgtctccggccacctcgcctctccccccttcgcgctcgcccacgcgctcgacccatctgggctggggcacgtagcatactcactcgtcggcttagggacccccggtctcgaaacgccgacactatggtattcgtaccagtcaaactttcttaaatttgactagatttatagaatatattagcaatatttgtatcttcgaataatttaactacgaaagtagtagattcaaagatctatctactgatattaattatgtactataaatattaattttttatatagatgtgatcaaagttaaaaatgtttgactcccctaaaagtgagaacgagcaatatttatggagcggaagatcttgtgtcagtatggttcaatatgacttgtgtcgcaaacttcaatgcagcatagagcggaagatctataccattcccgacattgagtaataaccaaatctaatgaagggcccttacaatttgaatgtcagaagtaagtactgctttgtttgacacttatctgataactaccagctaacaaatagttctatgtgacccaaattacaaataccaactaataggtgcgctatttatcctctctaattaatagaaatagatgttttggtgagaaacggcatccatccattttttattagatctctaaatactgcgatactctatttctgatttgttactagccaaagaaagatagaggagtactggagttggttgtccaaagtgtgcatataatatagagaagttagagggtggaaagatataaatagtggtttccatctaaatggctctctaaactagggtttacatactaagtttaagaaagattgtaggatgatttagaaagtaaattcaagagagaccattggagatgcaccacgctagcttaactactaatgagtgtgctaatagttgacaaatttcacttttattacctagattcattttttcatgcaactattatctggggtacaagcaccacatatttaaagctcatatgacctaagaaatatcactatgcttcagaaagatggttgttttatattcttgcctaaaatgaaacatttctatctttgacaatttgtttctagaagtttatataatttaactaagattcgtattcttagaatcactaaatagaaatagagatgtttaatttaggataacttgtttaattaactagttgatattgctatttatatttatttttgttgtcttcccttatattaatctctagttgtatttaaaatttggactttctattattttctacatcgtctttgaacttgttagtattgtcgactaaacatctagagatgcaacttgctcattagggatgaaagtgggtatccgaattgttaggataaattttatattttaaaatagattttgatcctgtgaaggttcagaactaaggctaattaatcttctttctccatacttttcagcgtttaaacatttttagctctcctttgtactgtaacataatttatttagtttatatacatacttttgatgtgtatttatttcatggcctatattcaaatcttggctctggcgtcccaagccacactggtatctacgtggcctagctcggcgccacatatcacggtgccaagttaggcaataactgcatgtgaagacaacacatgtatttattgcctagctcggcgccgttatatgtggtgtcaagctcggcgttgtgatctgtagcgctgagttggtcaacgtatgcgccatgaattatgacgccaagccgtgttatcttcacgctatgatgtatgacaccgagtaaatagtctaaaaacaacattaagtgtcatattgtcatatagaggtttaaatgtgattttttttttggaaaaattactaaattgcacaaaaaaccggctaaacttcatactctatattcctgacagatactctgtcctaacgttcctaacgttaccgcagataagacactgacgtgcgtggccggtttgggtctggccccgcgtgtgctccctctatatttgtctctcttcaattgataggaacacaagacgacgtgttctgctaaagttttttttagcttcagcaggcactaaactaaaagcagcaaatgcttaacaggtcaccagcttcaagtgtgggggg

SEQ ID NO: 151 - DNA, 4300 bp, Zea mays
  Intron number 2 from transcript GRMZM2G323912_T01 (locus G RMZM2G323912) derived from phytozome v7.0 (chr-ID 7; pos 1 41003293 to 141007592)
aaccagcttaagtggcgctctggctcagcagtgaggtatgttaacctcttgtttcctacaattgtacacattatttcttaggtctcaattatttagtcaacttatttgcctttttatagtgttttgcactttattggctgaatatgtgcacacaagtgcatgcagttcctcttgtggatatctgcagtttggcctagaatatatgcatattgcatattatatttcccttggtaatagtcaaattcattttgcagttctggctgatattagctgtctcatcttcttagtttatattgtagtagtaactagcaaggtggcaatatattctgaaactgatggttggatgctttgtctgcatttcagtggttgttagtcgtgctgattttatgtgtgtgattttggaattcaatctgatataatagcagttataccaaattgcatccattgccttgagaagatttggatcatattcattcatctgatggatatggactaataactaaggaatagtactcatctagttttaaggttcttttctgaattcaaattgaactatccctcgtattaatatgatgtttagacacgggtaagtgtagacacatgatcacatgctcatattaaatctgtctattacctaactaaatttatttttttatctccgagatcgcctatcttcatgaccttgagcaaagcaattaggcctagtgccttgcaaaagtttgtagtatctatgatgtatgagttagggctatttctaaaagatataggtcgccccctcccggaatcctataacatgaacaaaaggatgtcttgcacctgcatcagatttttttggaatttttgtgggttaagttctacatgtggttgtatctattattgtggagaaatgataatgcaaaggatacaccaatcaaatttcgtaattagacatggtgcagctttcttctagtatttttcaatctgtattatctggatctgtgctaggaaccaagggtattttggtatattactccccgaattataaattatagttcactttggttttgtcctaaatcaaacctcataccacgttttttagaaaaaaacatattgatatctacaagataaatcatttatcaacacacgcgtgcgcgtgcatgcgtgcatgaagaatctgatgaaacacatttgatgtctaggtgttggtgatttttttcttctgcaaacttggtcaaagttaaagaagtttgacttaggataaaaccaaagtgaactacaatttggaacagagtgagtacttggtttaggttctgatattgtactcaaactcttacatgcttggacagaattttaaaaacattgcctgtttgaaaactacattggatgctaacatcttatatttggtacatagcttggagaaaccatttctgtattctatatctctatattctgcatagataaacattcttttgacttccatttttggtttttcgagagggaacaagcatcagaattgcttggataacgttaaaaaaactgcctgtttgaaaactacatttgatatcaaaatcttcttatatttgctatgtagcttggagaaaccatttctgtattctatatctatattttgcatacataaacattcttttaacttcaggctttggttgttggagagcgaacaagcatcaaatctttgtttgcatatcatcagactagtgctattctagtcagttttcatatcatgtgaactttgcatccttctcgcctattttattatgtgaatgagtgtgttggattatttacgttttagaaattagaattaaggttcttgattgacatatttttgtgaatttatttacatgctggctatcgtgtttttgttttttcagttcactactttgtgaatccattttgttaatgcagtctcctaatttttcttcatagtaccagaccagaatttggaaagctaattctaaactcttttttctcaactcatcgttttgctaatccttcaaattgaatctgtagcaatgatgattaaatttctcggtgtgtcttgtagtaatgctattagcaaactgagtttttcttttcctgtagtgctgagtccacaatgctagattcttgaggcatttacccctgctatagctaatagctccaccaccttttggatttttaccctattcagcttcatgtaacaactacattatatgtggctcatggtgggtttcatctctagcctgccccaattttcttgggattaaaaccttgcttgcttgttgttgagtatagcttcagctctttgaagacttgcttctttatgctatataaatggaatgctgattccactggtagggatgcaagtggtgtacccaatggtatttcttggtcagctaatgttgttcttttaccccctcagagtttgcaagtcctaaagctgcccccaacaggtcacccagaacgaactctcaccaaaacacacacgaaaacagtagtatgatgctgctcaaaggctttcagattttctggtttcctcctctgtttatacacagccgagagctacaattgtgtctgagatagcctcctagttattgcagacaattattttctcaatcaccatattattatcgtttactgtccgctagaatgctattagcactaaggcctgaacctggacactattttgcacctggaactaatctggacacaagataacttgataacaaatttgttacgtagcatgcctttccagttcattttagcaagttccgggtcgaccaaatgacccaaaacaagtggtacttgcatccatacccactgttagacatggccctctgctgactattgagtacctggaactttctgagagggttacctaccaagggccttctagactagtgaagctctgggaaatctatgaagtggttgcaccagttacctttttttcctgaacaatgcaggataggtgtgtgtcatttcgttaaggaaaaaacacaaactgcatacagaaaagggtgaggctaaaagaagcgcctcccagccacaccgatacagatgagactacaaaaagacatgccaaactaagggacataacacggccactaaccagccccacctctaacgaccctcaaggccttagcaacctgaggaggaactggtggagggccgcagcgccagccacaccacatgctgctttccttagccactgtgaggagtctgaatgtttggtctagcaccttcaaagacaatggcttccaatgtttccatctgcatggaggcacaaaaaaattgccatatttactagaggaaattccctcattgccaatggaatatatatgcattcccttggttgtcatttccattgaaatctgttaactttctgtaaagttgggtctgtccccccactttgagacatcgtggcgtgcagccctggcagctgctgctctgcatcgggccctgatcccgctgctgcagccgaactgggcctccgcctcatgcacatcacaccaacttcaccaagaaattcaccgacactgtcgtgggccttgttcgccaccagcctagttgtgcagcagatgcacattcgtgagggagtgccggggcagctagattcttgaaacatataaaacaatttatgcgtcactcccgcactatttgttttatacattatttgcttcctacaacaaaaaaaggtgaaaaaaaattcaaattcaaatccatatctgtatcctaattttatatctattatttgagaagatatatggtaaatttgatatttacgttttatgaatctttacaaattcaatgctaaaaacaagaatacgaatttgcgtagtagattcggtatcctatttattcgcaattaaagaaaaaagatcaaaaaattcatatccgaataagtattcgttttcatcactagagggaatttactcattctagcacaattttcaatgctcttcttatatatgttgtgcacttcatataatcatatatatattcatctctcagcattgctgcaaattcttgcattgccttttcaatgccctttgatgacgaagattgcaactgtagcttttaaggcacagataaattgtgcaagatgagaaattaatgttattttgctaacataaacataattgcaataataatgaagccaactatctctttactgctgaactgtaagggtaccttctagttagtatgtgttgatatttagactgcgcgtttgctacattattactatagaaagtatacgttccaattacaggtttaccctgtatctaccttaacactgtacacctttttttttctctggcagagg

SEQ ID NO: 152 - DNA, 11616 bp, Zea mays
  Intron number 3 from transcript GRMZM2G035341_T03 (locus G RMZM2G035341) derived from phytozome v7.0 (chr-ID 8; pos 8 102896 to 8114511 reverse strand)
tagcgcgaccagcgaggagtgcactgtcgcttggggtacaaatccaatctcctagggtcttctcacctatcttctttgttgtatcttttgtctgttgccactaattttatgttataggtatgtctcttcatgtggaatgaaagaattcgctattcattattttgcacactagttccgcggttgctcattgtggcatttagttttcgggaatcttacactaatcaatatgtaactggcaactatgtttagggtatgacacacacagatcgcaaaatatagattttccgtgctctttcctaagattctactatgtgatcttgattactttagtctggtgaactgtgcaatacgaacaatttgtttcatatacagtggcactggagctgttagaattatagtacgataagaattcaaaattgcacttcttcctcatctccaaattttgatatggctggtgaactgtatatgaaactactgcacctagtttttgtttgacatacctaattgcctcttcagatgaaacttatcctactgattacatatgaagctcagattacttaaactctgtttaagtgtttgtatatattttgagaaaaaatatccatgaatcccaaatttaactagataagtgataaatatctgtttaagtgtttgagccgaagttgacgacagtgggagtagggctggacgaaatactcgtggctcgctggctcgctcggttcgtggtcagctcggctcggctcggatcggctcgtttgaattttttcacgagctgagctaacatcctagctcggttcgttaatgagccagctcggttcgttaacgagccagctcgcgagctaaacgagctaccatattccagcaaaatgaaactatatgcatatcatttacaaaataattgatgaacatgttatatatatgtgaggtgtttatggcttatgaattaaactaatgattaatgaactatgtctatgtgttaatttggtttatacaaatataattatgggttaaaccgatgagcatgtatgtgaattgtgaattaatgagtgatgaattgtgctaatttggtgttatattgacgtgatttgtgaaactatgagtacaattactattttctattattaaattagtttgaaattaactaaaaaataattattatatacattttatttttttctgctctggctcgcgagctaaacgagccagctcgagctcgtaaacgagccgagccgagctgactctgtggctcgttaccttaacgagccgagccgagctggctcgttagcttaacgagccagctcgaactcggacgagccgagccgagctggctcgttatccacccctaagtgggaggggccgccgccgccaccgtcgctcccctgcaaccatgcgctgccaggacgagtaccacagcagcgtcagccgatggccaagggaaggtcggaaaccgcggtggcaccctggatccacccactggcgggccggatccactctagggaggcttgatctggtcgctgacgaggccctggcgacgaggtgatgaccgactaaagcatggatgaaacgggaggtggaggagaagaggggcatgagagagctgaggtaagccccgccgcggccttcctagcgcaccggcacgggcctcctggccgtgtgctccagcggcggtgaggtggtgttggggggcggcggtgtgtggatggcgcggcgcggggctctgcccgagtaggcggcatatcctcgggaaggacacaaaagacatacagttaaggtacaactgtataaactgacaatacaacaatctctgaaatctgaacattggcaaagctaaccaaaacattgaccactgtttctttaattgtatatgtttattttcttgattataaatattgagggtttgagacgaaaatgaacatatccattccagccttccttgcatgccatagtgggtacgcattaagataaatggatgagctatggcatcaagcgttatagaacttcacaacaatgacggtcaaacaaacaaaattaaaataaacactccaaacaaaatgcagaaccccttaaggtcgccaaattagatgagaaccaaacttcctgaagctcaagagttgtctcactctcaccatgacattgatactatttttcactaccactattactgtcacctaatttttttcttaaccaagaaacattcacattagtcacttcagtttgtcaaagctcccaaacaatccactcttggcccctcatctgtagacgcctccctgcagaaacaaatttaaataagtaatacctgctgatccaatgttatccatgttttagtagccttcaatacatataattcccataggtaactaatctcactgacaagagacaatcactgcggttgtcaggtagcaagttcttgttcaaaagctcttgtaggaagacatacatcattgtcttgctcattcctgacaccttcaattttgaaggaagaggcctgatgatctacctttagtttagtcaaggtacaacatgtaacctagtatccgtgatttcactgcacatcctgattcatctctattgtcagttggccaccagaattgtgctgattcatttctattttcggttgcccatcagtattgtgcttcttttagttattgagttatctagaataaatcaagtttggaattatctgaaagataagaaggtaaattcaatatcacaaagcaacctgaactaaacagacaagagacaactacatagtcgatcattttttttctcgaaaagcgcaggaaaactgtgccccataaatatattagcagggaagaaaaggtataagaagacctgaaatacaaggcgctccttaccgaggccagaaacaaccatacatgtataacccagccaaaaaaaaactaaaaccacctagttgaagcccctcagcagcaggaggggcagccaagaaagaaagacccttttgtagtgcccaaaggaacttgaccctacaaacagacccttgtatgctgaactcgcagaatacttgccatcaggtgccaaggagaagatgtgtttgtcttcaatattaggctgcaacacaatgacagaaagagcatcccagagagataagaaatctatcagaactccaactgagtgctcccttgaatatctgctatccatcttctgttcaacaaagcttcttgcacagtcctttttcatgctattctatttgggattatggcaaacagtcttggaggaatatctgaaacctttttccattgatccatctatctgcccagaagaaagtgttggacccactgccagtctcagtaatcagcacactagagaagaagagcttagctttgcttggaacttgtattgggaaccctgcccatgggcggttaggatcagttctttgcaaccataaccatctcatgcgaagagcccaacaaagttcatggagactacaaattcaaccctcctaactgcaaaggacggcataccttgccccatgcaaccaagcagtgttctccatttacctcttttctcccttgccatagaaagccctttcttatcttgtcattgggggaaatcaattgccattgcagcataaatagacatcccagtaaggacatgctgcacaaggattcttctccctgccctgttaagcaaatctgccttcaagaatgggagttgtagtcgatcatattcaaagtaatatttcagatactcaacatttaagctactatttatattttgtttggagggcaatttaaaagaatagagatggcagacatgattaaatgatataatttagaagctgataagcatactgctatcttttcaaatatttgaatcctgaacattttatcttacagacatggtgcactacatgttccacaactatagaaatagccactgtttacagtgtaaatatgtaccaggtaatgaatgggcaactggtgcgggattttattcattttaacttctattcaaggtgcttttaggaacaaaactaacataagagaattgagtcggccgatcatgcttgttgctacgtgtcgaggctcgaccagtgacttgcttgtggatggtggatcttacaaacaaactggtagaaacacctcggctgcgcagattataggagtgagtatcaagttggctggacgagcgggagcgaaggggcgccgtgctgccgctcggctgggaacttaggtgaggtgcggaacacaagtgaggcagggaacaatcacttcttagattgatcaatgcttccaattgattacagacgcctggactttatagtccaactctaaacagactccttaatcttaggaactctaacagactctccttaaaaaacagactccttaatattaggatctctaaacatattctccttatctaaggatcctcctaatccttatctatatgtccctctataatgggccgactagagggctgtttaggcctcctactataaaccataacatttctccctccctcgacgaacagctcgtcctcgagctgaaactgcggatatgaagccttgaactgttgtagaggttcccatgttgcatctactgactgagtaccattccagtgcaccaacacctgccattgtccgtgctgcatccttgctcttattatcttctctggcgatggcagaagccggccattttgcataggtgggaggtctgggggcaggacaggaggggtaccccggaaaggcttaaggagtcccacgtgaaagacatcatgaattcgtgccccttctggtaactccagacgatatgctactgcgcccacgcgctcaagaatacgaaatggtcccgcatatcgcggtcccaatttccctttgggtcgttcgaccagtgactgagcttgtcgattgaggagacggagccaaacccagtcatccacatcgaactcgagatcccggtgtcggccatcataaaactttttggcatgctcttgagcttgcagcagcctatctctgacttcccctagaaatatatctctttcccgtagcatatcatccacaacttgagtgtctgctgtcccctgcttatatggaatgagaggtggtggatctctgccatatactacacgaaaaggagttgtcttcaatgctgagtggtatgatgtattgtaacagtattccgcccatgcaagccagtccacccaagctcttggcctgtctcccgtgatgcacctcaaatacatggcaatagttttgttgactgcttccgactgaccatcagtttgggggtgaaaagcagtactcattcttaacttgacacctgttagcttgaacagatccctccagatatgtccagtgaaaactggatctctatcgctgactatggaacttgggaacccatgcagccgcactatgtcaataaaaaatgctcgtgccacagtcgcagctgtgtaaggatgactgagggcaataaagtgggcatatttagagaaccgatcaaccactgttaatatgacagacttaccatggacctttggtaaaccctcaatgaaatccattgagatgtctgtccatatttgtattgggacttccagcggttggaggagccctgcgggatgcagcgactctgttttgttcctctgacagattgcacatgatttgacccaatcctgtaccagtgtcctatccttgtgaatgaagaaatcagctcttaatcgatgcagcgtcttttgtactccaccatgtcctgctgagtgtgcggcctccagtattgagggaatgagtttggatgatgttgggataaacaccctgcgaccgtgcaatatcaagccttcccgtatctgccatggggcctctagggatccctctgtaatctgagcctggaggagtttccactcatcattattagcacattctgtctgcaattcttggtacagctggaatgttggggttgatatggtatggactgaactttcagttgtgtccctgcgagataaagaatcagccactgtgttgagtcgtcctgcccgatattccactgtgaagtcaaagccaaacaacttactaatccactgatgttgtggtaccgtggatagtcgttgatctagtatgaacttgagactgaaatggtcagttcgtaccacaaatcgtctgccccataaataaggacgccagtgacgtattgcctgtaccaacccaatgagctcgcgctcatatgctgccaattttatgtgtcgggctgcaaatggccggctaaaaaaagctattgggccgtgatcttggtgtaggacagcaccaaaccccgagcccgaggcatcacaatccacagtgaaagtccgttcaaagtcaggaagctgcaggactggtgctgatgagagtgcccgtttgagcgcttggaaggcggagtcggcttctggagaccactgaaagccttctttctttaggagtttggttaacggtgcagcgattaacccaaattccttgataaatttccggtagtagcctgccaatcccagaaatccccgcagtcctcgtggtgcctttgggatcggccaagaagtaactgcttccaccttgctgctgtccatagtcactcctttagctgagatgatgtgccctaaataagcaacggatgtcgcgccgaattcgcatttggactgtttgacaaacaaattgttggtcagcagggtctgtaggacagccttgacatgtatgaggtggtctgaccatgtggcactatagatgaggatgtcatcaaagaatactaggacaaaccggcgaaggaactgacccagtacttcattcattaacgcctgaaatgtcgctggggcatttgagagaccaaatggcataaccagaaactcaaagtgcccatggtgtgtcctgaaggctgttttgtgtacgtcttctggatgaacacggacttgatggtagccggatcggaggtccaatttagtgaagaaatgtgccccttgcagttcatctagcagctcatcaaccacgggtatagggaatttgtctttgactgttttctcattcagtgctctataatcaatgcagaagcgccatgatttgtccctctttttcactaggagtactggagctgaaaaagctgatgtgctgtagcggataatcccctgttgtaacatggttgtgcattgtgcctccaattcatccttttgaagctgtgggtacctatatggcctaactgcaacgggtgctgttcctggcaaaaggtggatcctgtgatcacaccttcttgctggaggaaggtcactgggcgtagcaaacaccttctgaaattgcaggagcagacgatccatcatcggtttggtggttgtgatatctgtgctaattgttctcactgctgggtacacattaatggccttccgatctgatcccagtcctttccacacaattcgttgtccccttctccagaaagctaggcacaggttctcgaggtcccaaagtgttggccccaaagtgcgcaagaatttgaccccgagaatgatgtcgaaagaatcaattgggatggcgtaagcatccatcagaaagtcttcctggccgatagtcaagctgatgctgttggagagcttacaacacatgattttatccccattggccacaaatgcctggagggctgggtttggctggtagtccagtttcagagcgcgtgctgtgtcttcgttgatgaagttgtgagtagatcctgtgtccaacagggctgtaagagctttccccatgatatgtacttccagctgcaaggtactctcagaatggatacccgtgagggcatgtaaggagatcactggtgttgggtcccctggcactgaatcagcctctatagattcatcttcctcatagtccatgacctcaagatagaacaatttagggcagctgtccacggacatactgttcatcacaattataacaaagtccctggcgacgccgctcagccatctcagcaggcgtcaacttcttgaatgttcgctgctgtcctgtactgggagctgcaggaatcgctggttgaggtgccggtactggtacagacgggcgctggggttgacgcatggtcttgttggtggttgatgtcggctggtgatcgagcacttgtgacctccgttcatatgcgcgcgccaaactcaaggcgtgattgatatcccgtggtgccatgagttccacgtcgatcttgatacgctccggaagtccagccgtaaacagatgtaccttctgctcctgtgacagtggagctgtttgggctagcaggtcccaaaacctctcctggtagtcatccactgtcgtgcggaatggaaggcgtgccagttcgccgagaggattgctgcgtaatgggggcccaaagcggagttggcaatgctgcttgaagagttcccatgacatggaaggttcgtcgcgctgcagctgggtgtaccacgtccgggcaattcctgtcatgtgataggatgcgagccagactttctcatcctccagcgtgcgctgaccttcaaagaattgttcacatcgattgagccactggagggggtcttccttgccgtcaaatagggcaaattcgaggcgatggaagcgaggaactcctgcagtaggagtatggggaatggtgttgagagatggcagtgtaggtggtggatagtgtgggatgggcgaaggggaatgtggcaatggtagaagatggattgggagctgggtggtggtgggtggtggcacatcatcagttggcgtcgtggtggggggtatgcctccatacccgggcaagccataggggcagcttgctggaagggacagcgccgctgatgcaggcggagtctccactgctgcaatgcgcgaggacatggaggacatctgcgttgcgaaggcccctagttggcgctggacttcggcaagggcggtggtgatcgctgccaactccgacgcctgggtggcggacgctgcactgtcgtcggtgttggatcctggcatctccgataccaaattggtagaaacacctcggctgcgcagattataggagtgagtatcaagttggctggacgagcgggagcgaaggggcgccgtgctgccgctcggctgggaacttaggtgaggtgcggaacacaagtgaggcagggaacaatcacttcttagattgatcaatgcttccaattgattacagacgcctggactttatagtccaactctaaacagactccttaatcttaggaactctaacagactctccttaaaaaacagactccttaatattaggatctctaaacagattctccttatctaaggatcctcctaatccttatctatatgtccctctataatgggccgactagagggctgtttaggcctcctactataaaccataacacaaacacacagaggttcatttggtcggtacattagcttgccaatggtggatcctacatttgtttgaagccatgtggttggctcgaaaattgcagaatagctttagacgtctaacatcaataagctgaatgggtatgcatgataggtggtgctgcataccagtgagcgaccatttgtctgttctgcagctggaccatggccatccttttttgcctggcgtaccagccaaccagccagctagtggaagccatactgcctatttgcatccctgctcatagccattgcagggatctgggtttacctgtcaacaaggaccggggcttccgtagtgccgttatctgaggctggttgctgcaggactggggatagggaactatgcaacgaatgttggagttgaacacaggtttggtgcagatttttctatttcttatgccacgctctgaaccgtggctggttatggttacatatataggaccaagtggtctgttacaactgaaagtagagctaagattccaactactaaactagagataaggtagaagataagatgctgaagtactacataaggtgctgacatatgcacatgacttatcctatcattctcccctgaagtcttgtggcgtcgctgtaggaattcgaaccatccattctggcatgaagctggtcttgagtgctgatgtacaagcagttttctgatgaagtggtacttgacccgaatgtgcttgctgcgctcatggaagacgagattcttcacaaagccaaggcagacttgttgtccaccctgagctccactgctcgtctatgccaagatcacccagcagttgtgccagctagagaacctgagtggaggcagaagtggcagcgatgtactctttgacacaatcggatagagccactacctgttgcttgactgactgccaactgatcaagcacacttaccaaggaataatagagttctgcccgtgctcttgctcatatcaatgtcaccgacatggtcgttgtagctgaagtgtgcagcgctgggacaccacgggtcatgcaattcatagtcagagatacccgtgacacagtgtaggatcctcttgatggcctgctggtgctctgatgtcagtcgctgcatgaatcgactgactagctgacagcgaacaccaaattcggccatgtgtggatgaggtagtgaaggctatacataacgtgtcagtactacaccacgcccacctcctctgccgtgctatcgtggctcagcttcagcctttccatgggagtgtaggctaggttgcagtcggtgagcccacctagcttgacgatgtgtttggcatcaacggtctggtggagtgagatattggagctgccctgtcagtagatagcagcatcgtaagcactttgctggtaccccatctgcttgaggcacctccgcctcttcttggtgctggtgattaccaagttgttgacgtagatgcctaccagtagggcataacctcccttgccctgtcagtagatagcagcatcgtaagcactttgctggaaccccatctgcttgagggtggggtctagcttggcgttccaagctcgtggtgtgtgtgccgcaaaccgtagagggccttgcgtaggtggaggaccttgttctctttgctaaaatctgattgcgtgggttgtcgcagagatggcattcatgaagaagtgttcctgtgggacgctgtgtggagtggcacttggagagaagttttatatgggacactatagcgccaggcagactatcgtggcgagcaagcgcacgtggggagtgagcgcatgaagccgggtggatggaatcatttgatgatacacttgatgtgtcagttcctgcagatgtttaccgcattatatctggattaaggcagttacaagcccataacagcatctgtagcagagcactacatgctctttttgtactgtgctcttggcaacctcttgtgtgttcgttgaatggaccacttgagcagtggacagtgaacttttcatcatgttgtggtgttgattgtagaaaaagctgacccatgtttgcagctggaaatgatgttaaatgctgcttggctcaaaaataaaacgaatggggagctcaagcatgtaaatcttttttttttctactaaatcttctttatatttgattgtacaaaccaatagacattggaatatgttgtggcatgtgttctacgtgtttttgggccccagtttcaccggcctaaaaaggtttgttcgctgggtctaacaagatttgtttttgcatactgcaggtgtctgtaatc

SEQ ID NO: 153 - DNA, 7451 bp, Zea mays
  Intron number 1 from transcript GRMZM2G426719_T01 (locus G RMZM2G426719) derived from phytozome v7.0 (chr-ID 1; pos 1 30733594 to 130741044 reverse strand)
ttaaagagtatttaagcccttgaagtacttggaaggtgttgggggccttcgtcttccgaaggtcctcaaaaacatgatttaacaatgtcttccaagtgtgacatatgaacaggtaccttcggactcgggttaaaagcatacacgatgtgaaaagcatggtcgtgacaaaggctggtgttgctccgaagctacgtgcaagggagcttcggctcaatggcggaaaaaggaaccgacttaaaagggaaaaggctatttagtccccattgtgttgtctaaaagtaaatagtaaatatgaagggcatgaatgtaatttcacacaggctgcgccctgtgcctataaatagatgaacagtacccccgtactgttcatgctgacttgtattcgttcatgcgtcacgcttgtactttcctcttctgtcaagccgaaggtacaaatgtaattctatactatttatgttcatccatgataatataataaagttgaattgataatactatatgatcattcatgttgtctcttgtatttcacatgcttcttctttcattaacatatattacgatgacaaaggtatgtccttcacgacctttgtctaaagatcattatatcccaagggagataatgtttcaaaggatgaatggtattaacctttaacattttgtgttgccttgttcttaactcatagcatttgagaacaagtccccaacattggcgcccacctccgatgaactcattcgaccactttcggcaagcactgaccttcgtcatgccgccgaagaaagcttcagcgcaaggggctgctgcgctgcagccactggacacaaatcaggaaactctttctctctgagaggctcgaagctagaagacaaaagccaccagtccaacactctaggaggaggagttggaccaagagatcagggacatggaaatcatccatcaacaagtgcaaaggaagaaggagaaaatggctcggctcgccgatcttcaaaggaagatcgacgaagctactgaagaagtgtgtcatcttgctcaagatgaacaagatcgaaggccccaacacagggagcttcgtcaggaaggtctattcaacgaagatgatgatatgatgattttaatcatgatatctttacttttgatgatgcttctcccttggcagcagaactacaggctatcccatggccacaatcttacaagccacctcagctacaaatatatgatgggctcttagacccaaaacaatttctgatgagctatgaggcaacaatatcctcatacggaggcaatgcagctgtcatggctaagtccttcatcatggcagttcgaaacgtggcccagacatggtattcttcccttcggccagggacaattacgtcgtggcaggagctcaaggacatgctggtgaccagtttcctaggctttcagacgaagccagacatagctcaggccctattccaatgcacgcaagaccatgaggaatacctccaggtgtgtgtccaaaggttcttgcgattgagggcacaagcgcccacatcgcccaatgaaattatcattgaggccatgattaagggccttcggccaggacctccagctcagtacttcgccaagaagcccccacaaactctgtagaagcttcttcagaagatggatgagtacatccgggctgacaacgatttccgccaaagaagggaagaagcttacagattctcgcaaatgaccaggggcttcggaggaataatccacctgaggcatgtcaggtcaatccataactccactcagaatgacgacaaaggaagtcaactttagaggccacagtacacctcacaatctccggggcagtagcaaagctctttccggcttccagctcaaaggggcagaggcgccaggggctttggagcaagatttggagatcagcccaggaagatctattgcttattctatggtgaggacaagggccatacttcaagaatgtgccaaatcaccatctagaagcagaaggagagtcagccgaagcaggtcttgcacactgcttcgtgccactctccctacataccagaatatgtgggtaatcatcctgcagcttctattgcttcggctagtcagtcacatgcttcctggccacagcccccacctccaccaccacttcaacttacctatttacggggccaacagccagaagggcgccagcactctcaacaacaacgggaattcagggaagaatccgaagctcgcacagtcaatagtactgtgccggaatcaaagaacatttattgagagatatcctacttctgaaatacctttacgttctatgttttttgtttttcaataaggaacaagtaatgtaaatttagttttaattccttgtaatagtttcgcttgtgttaaaatgaaatatatcttcgtcacagatttacgaagcttaaaaaatcgttcctaaaggaatgtagagctagataaatgccgaagctacaaaaaagtcgttcttaagggagcgctgtgtatgttttctgctcaaaagtcgttccaaagggaatgcagagccaataccgccgaaatataaggcgaagaagttcaaaagacgttcctaagggaatgcagaacttacaccaaaaagtcaacggtgataccgccgaaatagaaggcgaagaagttcaaagacgttcctaaggggatgcagaacttacaccaaaaaataaacggtgaagccgaaaaataaacggcaaagagacctcagttgttcctaagggaatgcagagattgtgttccaagtgtgggagtgtgagtgtgtgccttcgacatcaacatcattttgcatcatatcatcatatcattccgcataacatcacatcatacatcatatcgcatcagtaacacgaattgaatacgaagaggatctttggagaatgcttcgtaaaaatgaaaatgtgctaagggacaaaataagatttgagaaaaacagcttcatcagccctgtcacaaaagacgggatcctttgtttgagaagcatggatattcttacgaagcatgggatttttctttacaaagaatgaaaagaagggaaggtgttttttcgtcgaaggctcaaaaacggtatgtatataaaagtttcatgcatcgcaaaaacgtgaattacaaataatttacatgttagattcaaaattatatacatcgaatattagaatcttgtgcaacaaagttacattgattgtctgaaaatgtttctacaataagtattagtcttccttcaggaccttctccgcaacctcattcagcaatttgttaacaacttcgtcaacaacagattcggctatattaataatctccaatgcttccttcatttctggatcggccaggggatcgaacggttccagtggtggagataattcagctacaatagaaaaagttaatcagttcgaaaccataaaaacaaatgccaaaggtaaagaccacgaaacaatacctatgcgtctctcgcgttctgcagcttcttcagcttgttttgcttgtactcgggcgacatgaatgtctttttcgcttttcttcataatttcgtgagccatttctcggccaccatttatctagatatcattgtaaaatttcccgcccattaaacttgcttcagttgagggatcctttgtatcatccacggagaaggcagcttcggcctgagccagggtttagaaatggtcacatcccgccttctccaggatggctgaaattccccttgcaccggagaacgtgcagacgtccccgcgatcacttaaaatttcttcaaaagcttcggcccctccacttatccattcgataacaccttcagggtcgcctcgtatgaagttatctacgttagaataagcgcccacattggcaaagctagcctttatcttctccacgcagcccaaggatttttcgaaacatctttctttggatgtgcgaagttcttcaactattttttctacatagtttttccaatattcactaatatctcggttagcttctgcgagaccgcatttttctttggcttcggccagctgttttcgaaggtcttcaatctcattcttttggattttagcttgagccttcaaactagcttcatcttctttcactttgtttaccaatgaaatcaagattttgtctttttcaagaccttcgttccttagttcgattacctctgaacgaaggttgttcagagccatcgtatatccttcatcttcaatttttctgagccctaagcgcattgctaagaattaagccctgcaagagaaggacggaattaagtataagcaaataaaatatttcgttatcaaaatacaaaattggcttttatacctttatgctattatacgctaagctgtcagcaagctcatccttcgataagattgaaagaccgtcttctagcttcgggaatccgatgcttttacctatctcccggcaaacggatatctctttattatccgggagacagtacaaaaaatcttcttccccgcaaccattaaacactaatgcccccttcgggtattttaatttttgggcatagtgtagtgcttctagcttttcttcttgggaaagtctcttccccgaagcatgacaagtgatgtaatcggtgtcttcatttgaagcttcggtagcggcagcttcaacttttttagacggcgtttgctctgccgttttttcttcaactacgacaggctctgtctcggtgggctctgaaggcctagcttcggtttcagcttgaattgttgcagttttgacttccgcttgcattgtttcagcttcgggttgcactttcgaagcttcggcaatttttcttgaaggggtagaactcaaagtctttgatgtttccaatacaacatctagcatgtttgccatccttctcctcttaggagttgtggcaaaactcttttgtgtcttcggtgttgttgcttctgttgaagggctcaaaatctctggcatctttgttatttcttcaatttttgacccttcagccttatctttgtcagccttcgtttcaactaactcaaccgaaggtaccttcggcattgtagccggctcttcaatcctctgcacgggaggaacactttcttttgttttggcagccgaggaggtcccttcgccaaattcaggtatcgcggccggtttaatgtaacgcggtcggtgggtaagaacttttatcttttttccctttggcacaggctcggccgaggtgtccgaagcagcagttttcctctttttcccttgtcctcgcagcgggtagtggtaatcggggtagacgaagtcaatggcgtcaaaaactctgttcagtctcttttttttcccgatcgccgaaggccgcaaacagtgcattatcttctgccttggaatatgctccaagcagttcatcacttgtagcttcgatacacttcagccaatcatcacttggttcatcaaacttatctccaaacctgaacgtatatttcagccggaccaagtcaccttcgctagagttaatgatggtctccttcgacgtttcctagctttctacaagcggccacactctgaatgctatatgttcttgaattaaatctctggtgccaatgaaggagcagacagtattgaacgccttctgacacgcttcggcggcatcatcaagtttgaccttcggctttcgaaggccgaagcgagaccaaatggggcgcataatgacttccttaatgtcttcccttgcttccaaatcatttttcacataaaactactcttccatctaggacacgggccaccttttccgaaatgtcggcaccgggtggcttgcgttggggcgggcgataaatccataacaaccgaagttgttgtgatactgttctttgcccgtggccttcgtctcatacaaaagttcgtgcatactacaaaagcactttgcgcttggctctaacccctgacttctcacagcccaaacaaaaatccccatccttattatagcttcgggggtaatttgatggaggaaaatttggtatgttttcaatacttcaactacaaatttactcaaggggaaccgaagcccagccttgaagaagcttcggtaaatcacaacttcgttctcctcaggggcaggtacgtacgttgttgtctcctctagccctcacacacatgtcccaaaaatatcttcctctcatgttctcaagatggctttgtttgatggttgattttccgaaaattgaatgacttggcctccacggccgatcctcagaatcttcgcccccactttccaaatcataactatcactatcaccagtatcttcagacaagccttcctgtatctccttcgtaatcttctctgtattttttttgccattgactcaacaaaaccagcaatataaggattcacaaccttcttctcctcaaaaagcttctcctcttcagtcagctttgtctcagcagcaatcttcttgtcttgagacatcttttcttgagaaatggtgaaaacatgttttctaaaccgaagttcagagagcttgaaaaactatcaagctctagtgagcaagagctataaaattgagaaaataaggcaaatggcacaagcagtgtatcaagtgcagtcagtgtgagttcctatttatacgcccagtgcgctccaatttggagggccccgtcagtcattgactgttgctattctagcaaagggaaggtgttttttcggaccttcggcttaaggccttcgtccatatcgtagtctgaattcgttatcttaacaaattaatactgagagggactactgttgggggccttcgtcttccgaaggtcctcaaaaacatgatttaacaatgtcttccaagtgtgacatatgaacaggtaccttcggactcgggttataagcatacacgatgtgaaaagcatggttgtgatgaaggctggtgttgctccgaagctacgcgcaagggagcttcggctcagtggcggataaaggaaccgacttaaaagggaaaaaggctatttagtccccattgggttgtctaaaagtaaatagtaaatatgaagggcatggatgtaatttctcacaggctgcgccctgtgcttataaatagatgaatagtacccccgtactgttcacgctgacttgtattcgttcatgcgtcacgcttgtactttcctcttctgtcaagccgaaggtacaaatgtaattctatattatttctgttcattcatgataatataataaagttgaattgataatactatgtgatcattcatgttgtctcttgtatttaacatgcttcttctttcattaacatatattacgatgacgaaggtatgtccttcacgaccttcgtctgaatatcattatatcccaagggagataatgtttcgaaggacgaagggtattaacctttaacattttgtgttgccttcttcttaacttatagcatttgagaacatgtccccaacagaaggtttgtttcaaattgtcaaggaacaagtatttttt

SEQ ID NO: 154 - DNA, 9229 bp, Zea mays
  Intron number 1 from transcript GRMZM2G146778_T02 (locus G RMZM2G146778) derived from phytozome v7.0 (chr-ID 6; pos 1 23661613 to 123670841)
gcaccttatagatcgtttcgttctaaaccttttgggtaattgtatgaccatttgctaatgtttggtagctatggtggtaactactctacagataatgggccatcccatgagtgactgtttgctgctccaaatcttctgctggagaacatatattactgttcaaggagaagtttgagctctgcgtggacaaattaaattttgaattgcttttgccaaatttctacatggttcgcacactgtcaaagttcttttctcctttcaaactcccggagcttgcgaattggatgttctgaaaattggatggtcacaacttcagttcacctgcttttgtttctgctgttttgatgtgcctatacattattgatgtcaccatggaaatgctatgctgttatctacaaaaaactgatcagagatcagaatcctatctatttcggcacttggagattcacaattctgatatcaatgtcattcagcaggtctgtcacatcattcttcattttgctactaaatggaatgttgaatttgctgatcattgcttgctgaagatgctttgtgttggggacttgttctcaagtgctatgggttaagaacaaggcaacatagagaatgttaatcgttaaaatccttcgtccttcgaagcattatttcccttaggatataatgctttatggacgaaggtcatgaaggacgtaccttcataaactcattaaataatgacgaaggatgaagtataaagaatatgaaagacaacatgaacaattatatattattatcaggcataaacagaaatatcattgaattacaagtgtaccttcaattggaaggagatgacagtacaagtgtgacgcaaaaagtgaatgccaagtcagcgtgaacagtacggggctactgttcacctatttataggcacgggacgcagcccgtgcaaaattacattaatgccctttactctcgataataattctatagtaatctgtcgaggtctaaatagccttttcatctttaagtcggtttcatctgctgctgtcacgccgaagctttcctgcttacatcttcggcgattcaccaatccttcgtactattctggtctactgtaatgcctgacttgagtccgaagatacctgttcacacattatactccagaaacactattaaatcctgtttttgaggaccttcggatgccgaaggtccccaacagtagcccctcgcaatattaatttgttcaaaataataaatttagattgcgacctggacgaaggttttacgccgaaggtccgaaaaaacaccttccctttgctagaatagcaatattcactgacaagcggggtctttcaattttcaacgcactcggcgtataaatacggccataccgcaagcgcatttgacacgctctctggccacctgctcccgctcactcaatttttagctcttgtgcactacgatttgctaagcttttagttttgaagcttcggctttaaaaatagttttttagtgtctccgaagatgtccgaagataagaagactgctgctgagacgaagctgagcctcgacgaagagaaaaatttggggtttcttatagcgatgtcaaagaccaacacagaaaaaatcaccaaggagattctggaaggtttgtctgaggatactggtgacagtgacagctatgatgtggacagtggtggtgaagactccgaagatcgtccatggcgaccaagccattcagtttatggtaaatcaactatcaaagagaatcatcttatcaacatgagaggaaggtattttcgggatttgtccattgtgagggccgacgaaggggagaaaacttgcccccaccctgaagagaatgaagtcgtagtgtaccgaagctttttgaaagctgggctgcgatttcctttgagcagcttcgttgtggaggtgctgaaaatattcgaaatctatctccatcaacttacccccgaggcaattataaagctgaatatcttcgtgtgggccgtgagaagccaaggtctgaagcctgacgcaaaaagcttctgcaatatacatgaattatcatatgaaacaaaaccttggggtaaggaacagtatcacaacaattttggctgctacagttttgtttctcggtccgggtcaagctgccccgtgccaacctttcggaagagatggcccggagactggatgacggaatggttctatgtgaagagtgatctgacaatacgagaagatatcaaaggtataattatgcgccctatttggcaaagcttcggccttcgaaggccgaaggttgaaatgaatgaagttgccgaagaatgccagagggccttcggcgcagtctgttctttcattgggacaagagacttagtgcaagagcatattgccttcagggtatggccgctcgcggagaattgggaaatgccacaagaaaccgtaaaagaggccgacgaaggtggacttatcaggttgaagtatacttttaaatttggagataaattcgttgagccagatgatgactggttaaaaagtattgaaaatttaagcgatgaactgcttggggcttattcgaaggccgaagacactgcaatgtcagcagccttcggaggccgaaaaaagaaaaggctgaatcgggtatttgatgcaatcggatttgtctaccctgactattgctatcccattcgaaggcagaagagaaaaagcacaacctctgcaaaggaagaagctgcaattgctcctagcgagccagaaccgaaaagaaagaagataaaggtcctcacacatcggccgcgctatattgaaccagcttcggtgcctgagtttaccggagaaactccttcggccgccgaagctgaaaaaccagccgagccaaccttgctgccagaagtcgcagaaacggtcgaagtgccaacagagatagaattggaacaatcgaagattttgttatcagaaatgaaagagaaggccgaagcgccgttcgcagaaaaaatggaagaggtaaaagaagcaactgagggatccaaaacatcagaagttttgagtcccgcagcaaacattgatacagtaaaaaatcaaaaagtgccagcagtgactccaaaaagaaagagaatggctaatgtgctagatgtactggaaacgatcaaatcttcaagcacacctccgaagagggctgctgtcatttctgaaacaacaactaaaatttctggttctagagctccagggcaagagactgaagccgaagctgagccctcagagcctgcaaagataaaatccttggaaagtgaggcagaaaaaataacaaagccaacttttgttgaagaaaccggtgtcattgcccccgaagcatgcccgaaagttcgtgactatattcttcgtcatgcttcggggaaaaaattatcagaaaaagaagagcaagaggcccagcactacgcccaaaaactgaaatatccaaagggggcattaatattcaatggcagtggagaagaagacttcttgtattgtctccccgacagcaaggaaatttctgtctgtcgggagatgagcaggagcttcggattcccaactttagaagacggactttcggtgctgtcaaagaacgatctggccgacagcctagcttacaatagcttaaaggtgcgacaaatgaaatccttgtattttttgttgagttcaaattttttcgtttgtttaaacctattgacgcagacatatttctctttgcagggcctgatactcagcaatgccctcagggcacagaaagatgctgaagacgaagggtgttctatagccctgagcaaccttcgttccgaagttattgaactgaggaacgaaggtctcgaaaaagataaaatgttgtactcattgataaataaaataaaggaggacgaagctgcttttaaaggccaagctgaagctcagaagcgggaaattgaagatcttcggaaacaactggccagagccaaggaagaacgcatacttgaagaaacaaagcgagaactcagcgaccaatgggccgatcacttagaaataactgttgaagagcttcgttcatccaaaaagagatgctataacaaatctatagagtgtgttaaaaagttaaaagctagcttcgccagggttggcgccttctcaagcgaagaaaactttacgagaggcaatcccgaaggtcctatcgaatggatcgaccacgaagctgaggccttcgaagaaattttaaatagccgaggagatatatgtgccttctctggtgccagagggattgccaccatcttagagaagaagggctgcgaacatgtaaaaattttagcacagtccgaagctgctttgtcctttgaagatgcaagagatccttcggtcgaagctagtataattggtggaaaattttttaccgatatctgggataatggtggccgagaaatggccggagaaattattcgaagaagtgaaaagggcattcacgatgctagagaagtagctgaggctgctgaaaagagcgcagaggccgaaggtcaattaggtattaactaatagtttttattgtgttgtaatctttaggctttaagatttgtttgcgatttgtaatagcaatgtagccgtatcctgtcttacttcagatcctgctaaaacgtcttcgggccctcagccgaaaggagacgacgaaattaaaaagatggctgaagatattatggacgaagtcgtcaatcggctcctgaacgaggctgcagaagtcgttttgagagaggattaagtatttttgtgaaaacttctgaaatgtaatatactgtaacattttgtaaccccaaatgtaatatacctatttttgttagtcaattctttacgatgcatgaaactttacacgtaccgcttttgagtctttgacgaaaaaacaccttcccttcttttcatgcttcgtgaagaagaatttttctttgtcacaaccatatccaatattctgatgaataatatccaggcttcgtgaaaatattttccgaagctacacttccgaagatcaatgatgtatctttttgtgactatgatttctcccttttttcaaagcgttcttctgtagattgataatgtgtccacctcttgtgccatgtgcaaaatgatgtatgatgcttatgctatgcgaaatgatgcgatgatgttatgtcatgtgagatgatgtttattccgaagatacatacgcatccctgcaataaaatacaatcttttataagcctcccttaggagcttcttcgccttttacttcagcggaatcagcgtttatttttcgctgtaagcctcccttaggagcttcttcgccttttactttcagcggtattcgcgttgacttttcgcgcttcgccttttacttaggcggtatcagcgtttatttttcgctgtatgctctgcattccctttggaacgactttggagcagaaaacttacactgcgctccctttggaacgactttttgtgacttcggcaaacttactctgcgttccttagaacgactttttgttgcttcgaagaattttcgatagttcgaaggtcctctttgttatcataaggctgtgaagaaaatatattttccttgtaggattcaacgaaactaattacatgaaatctaaacaatgtcctttattacagaaaataaaactgaatgaaaaagattgctattaaggtaggatatttgtcaatagatgtgctttgactctggcacagtgctattgactgtacgagcttcggactgctctctgaagtccctctggtgtggagcatactggctcccttctggctgctggccttgttgcaacggaggtggaggcggaggctgttgccaagaagcttgaggctgactcgccgaagcaacagaaactgcaggatgattgcccacatattctggaatgtagggcgaatgatacgaagctgtatgcatgacctgcttcggctgagcttgttgtgctgctgcttcagctatttccttttgcttctgaatagtaacatggcacatcctggtagtatggcctttgttctcaccgcagaataagcaaaagattcttctcggttgatcgccaaatcttcctccaaagccactggcgcctctgcctcttggagctggtggtcggaaggagctttgctgttgtcccgaagcctgtgaggagcattgtggcctttgctgttggcttcctctgtcatcattttgtgtagagttatgaattgatctcacgtgcctcgggtagaacctccctccgaagcccctggtcatttcagaaaacctgaaagcttcctcccttctttgacgaaaatcattatcggcccgaatgtactcgtccatcttttggagcagcttctccaaagtttgaggaggcttcctggcgaagtactgagctgacggtcctggccgaagccccttgatcatggcctcgatgacaatttcattgggcaccgttggtgcttgtgccctcaaacgcaagaaccttcggacatacgcctgaaggtattcttcgtgatcctgggtgcactggaacagagcctgagcagtgaccggcttcgtctgaaatccttgaaagctggttaacaacaaatccttcaacttctgccatgaagtgatcgtccctggtcgaagggaggaataccaggtttgagcaacacttctgacagccataacgaaagatttggccatgactgaagcattgccgccatacgaagatactgttgcttcgtagctcatcaaaaactgcttcgggtctgagtggccatcaaatacgagaagctgaggcggcttgtaggacggaggccaaggtgtagcctgcagctcagcggacagaggagaagcatcatcaaaaacaaaattcccatgatggaaattgtcataccagtcatcttcgttgggaaaaccctcctgatgaaggtcttggtgctgaggccttcggtgttgctcatcctgagcaagatgacgaacttcttcagaggcttcgtctatctgcctctgcagttcagctagcctgaccatcttttctttcttcctctgtacttgttgatgaagcatctccatatctctgatttcttgatctatctcgtcctctggtggtgtcgggctgacagccttccttttctggcttcgggcctcccgcaaggagactgtctcctgattgtggtccagtggttgcagagctgcagccccagtcgctgaagccttctttggcgccataacgaaggtttatgatcgccgaaggtgttcaaaaaactcagagtggaagtgagttcaccggaggtgggcgccaatgttggggacttgttctcaagtgctatgggttaagaacaaggcaacatagagaatgttaatcgttaaagtccttcgtccttcgaagcattatttcccttaggatataatgctttatggacgaaggtcatgaaggacgtaccttcataaactcattaaataatgacgaaggatgaagtataaagaatatgaaagacaacatgaacaattatatattattatcaggcataaacagaaatatcattgaattacaagtgtaccttcaattggaaggagatgacagtacaagtgtgacgcaaaaagtgaatgccaagtcagcgtgaacagtacggggctactgttcacctatttataggcacgggacgcagcccgtgcaaaattacattaatgccctttactctcgataataattctatagtaatctgtcgaggtctaaatagccttttcatctttaagtcggtttcatctgctgctgtcacgccgaagctttcctgcttacatcttcggcgattcaccaatccttcgtactattctggtctactgtaatgcctgacttgagtccgaagatacctgttcacacattatactccagaaacactattaaatcctgtttttgaggaccttcggatgccgaaggtccccaacactttgtcatactcattacacagaaagatgtgcaggatggaacactgacaatattgcattccatatggtattatctacaatggccatcaatactcccattgacattcttcatcactgcattttccccacatctaaggttaaagcaaaagcaatcttgttgcttttggaagcaagttctatgcatctgaacctttttagccagatattcttggaaattttaaacaaagacacttctgttttgcaaatcaaggattcggattccaacaatttgtgggctcaagaagatggtgctatacttctgttgcctgccgctttatcatgcgtgaaatttcacagcaatgactataggcaatgtgctgaattccttgaagcagttccaatcttttattctgaactactattatgcgataaagggttttcaacttggaaaaactttgttaccaggaacattttttaggaagattttagtgactttataattagtttaattattccagagtcatctgagctatttgattctgatgttaatgatattaatcccacttcatgcaatggcattatgaagtttactgatgaattgttcgcgaaggtatcactaattaggctgttattatctcctagaaaatcattgtccaatgaagtagcttcggagagggagtccaatagggtgcacaaagcaaagctaaattttattagcatactggtcagaactacggataaaatactcatgaatttcccatcgagtgacaatatcttatcactctctaccaaggaacgaaaagtcatctgttttctggaatatgtatttctcaagaatttcattgaactgtcttcagagattcaaagctacctaaatcagctgaaatcaatacctttccttgctcaattaatcagatcatccctcttgcatagattcaatgatcctgtcgcaataaaagcaattcgatgtattcttgttgtgctatcacaaggaaagttctcagctgatgaaattcttgaacttatactgggtcactccaattttgtattgacaataacatgcaatgaagtttctaagtatccatctgcttgtaacaccacagggggatgctacagccagctccaagtattttgaaattagttgatttttctttcatggaagaaaataaggcagatatttctattgcagaaaagagaagagttgaaaccatcagattactaagggtactgtatgatattaagagcagacaacagaataatagccaattgagtggatcaagataattagttttcttgcttttgtctgtttatggtgcagcccttagtgaaacagatttggagatatttcacctt

SEQ ID NO: 155 - DNA, 1962 bp, Zea mays
  Intron number 2 from transcript GRMZM2G120674_T01 (locus G RMZM2G120674) derived from phytozome v7.0 (chr-ID 1; pos 2 86845993 to 286847954)
gaggtgagacccatccgatttagtttggctcgatctgtaattgttcaatagctggcgtctgcattttttgggtactgccaatgtcgttagttgatgattggttgactgaaatactgaattctaccttatatgccgactgttctatagttgtgcacgataggtcccaaatttctcgtctgatttgcatctcgaagcatatatgcaaacaaatgttaacgaactgcaaatattaacctctacgagcttaagaacaagctgcctgcatagaatccgtgcttcacttgcatgctttcatgatgaaggtatcttccagttgtttcgttccttatgcaccgttttccaaaaaaaaagagcctggtctgtaatgccttttttgttctttattaatgctaacggttgtcacaagttaccaaagggaaggcatgtctgattgacatgaaagatattaatagttaaactctgaatatgtgtgttttgccaagcatactactacatctagcttttattatctttcttatacagctaataaaaggcaaacatcatagcattgggaagttggaattgtaaattgtcttgttgtttttgacatcaacatggtcttcaataattgtttacaataggcgccatatttctcgtttgatttggaacctcgaagtgaagatgcaaatcaatggatacgaactatgaatatttacccctacgagcttaggaacaagctgcctacttaggaaccttgcatttatttgcatcattgcatgttttcctgatataggagccttgcagttgtgtcatcccttttatattgtttaccgaataagtttttttttctcgaaacacgcagcagagctgcgtataatttatattaagaaagagaaaggtcttaccgaataagtaaagctgtgatgcctttattttttgttctttagatgctaacgattgtcagaagctaccaaagggaaacatgtttgtttgacatattatttagtcaattctgggtatgtgcattttagccaagcatatctgttcatctctgtccttaattaagtcactgagctccacttaatttcataatttagccaagcatattggtacattttggccaagcattatagagccaataaaagagcaggcatcatagcacttgggactatgtacgcttgtcctccattattcaataacagagcaagcatcttagaacttgggattgtaaattgaatctctgagatattgacttccacaatagctaaatgagcacgacctacaccctgcagccctgtgcctattgtaaatcattactagctagtcaataatcatgagccattgcttcaatattcagtaacactgtagcaggatgttccacatcagtatgtattggcatggaagtgttaacctttatttgttggattcaactcattagaattatatgatatcacaatgcaagcaccatcagtatagaagccagagaaagcatttgttattgataaatagttaaatacacaactatcatttgtcaggaaaatagaaggacctgtgtgattcaggagagcatgggacccttccccattggaagtgtatggttactgaaaaaacatctgttgacagaaaaaatatcaaccatctgttgcctgaaggactaaaactcagtttttctcttatgtgattcagattgttgtttttttactacatctttcagcatattctattcattgtacatgtacttcgattttggtttgttaatgccacaatcggctagcttagttcaatcacttatttgggacctctctatgatatcagtgaatatcaatcataatgtagtttgtagtagtgtgctgtaacagtagacatggttcatcagtgtcttttattggcagcagaacaaactggctgctttctgattttaactgtcagtttgctaacgtatgtcaagtttacacttgtaggcacgttcaagctgactctgca

SEQ ID NO: 156 - DNA, 1711 bp, Zea mays
  Intron number 9 from transcript GRMZM2G444376_T01 (locus G RMZM2G444376) derived from phytozome v7.0 (chr-ID 1; pos 2 0648852 to 20650562)
gtgttgttttagcaagtcaactaggaaaagaataggtaaattaaattacttccttcccttctattgtgtgagtgatttcatcaattggatgccttgccatttaaccttttgcccaaactgtggatttatataacatacaatgctattttcagttttagattgatagaattgactttcaagaaacacctatttaacacattttacttcctgaaaatacctactgtggattttagataaatttcttgattgtttttgttctgacacatacaaatggtaggttagtatggtatttagaactataggcttaagtttatctgtaggattaagttgcagtaaataggtgacagatggatatttttatgtttatctgaccttctgatgctctttggtatatattcattcatccattacatgttaagtgtgcgtcaaatatttggttagttggtctcgagaagcatcacaacaatagagttgtggggtatttccgtgcgttgctacggaatcaatatgataaaatatagtgacatgtaaaaacactaatttccattgcccacctcgctacttccctcttctctccctcgctccctccatattccttgccactccctctccactggcgctgcagagctctctcccacccagtcaccctttacctatccagatctcctgactggttgcctcgactgaacctccctcagagcagaggtcgttcactcccttctctagataaaattttccttctgtcgtgcgaactgagaatgcttctaggatcatatatctcatccaacaacaaatggttgacaaggtcttagatgtaaactacaacctatagatcacatgtaaactgcaagctgtcaagttgggaccatatttaactacaaattttagatataaactgcaacctgtagattacttgtccaggaaactgaaaactaaaaacatgtcaggttttagaagttttactgtaaactgaaaacttcacagaaactgctttatacaatattgatatcaacgagttgcttgataggcaatgtgatgttctaggtagttcgtagtagttagttgttgtatggttcatagctgtatgcactaggtgctagatgttgtaaggttaaatgtgttgccattatctatgtatgaacatgatttgtttctatgaacatggtcaatttctatgataaacatggcagcatatttaaccacgaaccaccaatatttaaacacattagaggcatgactgtaataatcaagaaaagtgatatttcaataaaatataaggaaagtaacaagttctttattaaaccagaaaagtgatagaaacaaatgacttgtaactattgtttcataacttgcataaattaattgttctatctggggttgctgaccgcctgaccatcacaccttgatattaggatgccattcgtaaatggtaatgactgctaccatgcttatgaaaaaaatatgaataactttatgatggtgtactttaaagaatgtgcccttgttatcccggattttctcttgtttaacatagatttgattctaagttgtagaaagtatgtatcacatctagatagtgtttcctgtagaaaatttcccctgcactgattttacttttcactttttagtcttctggtttataacatacatttttcagtaactatctcttcttgcagcactggttgcactgtacctttaccctttcttgaac

SEQ ID NO: 157 - DNA, 5644 bp, Zea mays
  Intron number 1 from transcript GRMZM2G135790_T01 (locus G RMZM2G135790) derived from phytozome v7.0 (chr-ID 7; pos 1 51846010 to 151851653)
ccgctcaggaggagagcgacctacgccttcgcgaggtgcggacgctctccttgtatattcatttctatgcgttgcaaattagggcacttatctggaagcagcttgctcaaattgaatcagcaactgaagctatccagatccctggaggctcttatatgtttgtttgtttggtgtctatacactcctaattttctcccagtcttgcaaattttgggctaaacttgtatattttgcgttgcattggatctatttggttctggtgatgtgaacttttaacttttattgccatttataatttttttctttgtttagatttatgacatctctgcactatatttgcaaacctcggtcactaaaatcacacaaatgatcacactgtgtatgcgtgccattttttttggttgcatagcatagtaccagcagttggggaaaaatgagacgagatatagaagtttacctcattaccgttacctggatgcatgtcccttttttttgcgagctaaacacactcgcacctatgttagattctgatacctgtttttgattccaagtgttttttcctgtgtccccagaaaatacgctgaatcagacactgtcaccgaattagacactagcacctgcacttatgtccatctgacactatatataaattgaaaaagagagaagtttgactcatatcatggtttaatagaccatggtcgcctaagtaggtttggtgtctgccaaggcaaggagggatctagtaccttggtactggcaggctaggtttttacttcttgaatagtggaggagagaaaccacataattagaaccctggatttatatttatcttcatgtccatgtctatgccattgtcaaattgtggaaagtttgccagcttgcattagattgggacatcacatcttttgacctcatcgtcttcttgcatgtaaataatggagatacatttttgagagacagagaataacgggtaaagatggggagaagatgaaagcacgtcaacgaaggcaactacattagacaagctagatactgcagaatacatgcttactagttagttgctcgtgcatcgccacagtttctatatatatcatatatggtttctttgtataacacaaaccaacatgaactgtagtggttagagacgagtgctttgttcctagagaccatggttcgaatcctagtggatgcgcctttttttgatatttcgtgagcgcgtgggaaactctggctctgcacgcgtggatgaggggaacagacgtacgaagggagaaactcccgctttatattagtagagatagagataaagatagaggtgtatgtattatgtaggtcattttccttaatgtttgatgttagcaccgtctcaaaattttaacatgtcccagtttccaaattctgtgtcatacagcccatacacttatcctaagcgatctgttagatttctcaatacactgcctccacctttctagagatccagaagtcctatatggattctttgttcataggagcttctcaagctctatattcacactactgatagaaactctactaattctagtcgaaatgtcttgtttccgcacttatgttttttttcttagaatacggtaacacatgcatgcttgtttttctctctttttttgccaacatcatgtgaagccacaaaattaactatgtgtattttgctttcaaaaccaacccatgttcaatcatgctatattttaaattagttaaacttgtatgtatgtgataggataagtcctatgcctatgttagcatcttatcttctaacttatccctactttagtagttggaatcttatctctactttcagttgtaacaaaccagttggttgtcctatatatttaaccataattgcccatggttcatagagtggcataagagggacaaggtctcgaggttttgtgttcattgagcggatgcaagcgccagtcgtgcaagagggacaaggttcctcgtatggacagaggcgtaggtggcgatgtcataggcgagtgcatggctacccgagacgacatctgccacaagtgcggcaagactgaccattgggccaagggctatcggtaggcgaagcacgacaactaggcacatgtcacacaagcgcaagagggtgatgagctggctctgttcctagtgcatgggacatcacttccacccactacatgatcgagtggctggagtacttcgatgacctggactccgatgtgtgaggctttgttaagttttgggacacctccgccatagagataatggttttggctcagtcgtcttcactgcaagactaactagcaccaatcgctcactggtgtctactagatccccacgtcgaggaactccatcattagtttgggatagctaaggtgaatagaggaatcaatcgcctctatgttctccatgtgcaggtggcgcaacaccacaatgacgatgcatggtggcggcacgagtgctttgagcaccttaaattcgaggcattgaggcaaccggacaacaaggagatggtgcgtgccatgtcgttgtgtcgagcacatggagcagttctacgacacgtgcgtgttgacaaagcagtggtgactctccttgcgccaagcaagctaccacacaaaggagaagctagagctcatgcacgggtgacctcaacggtgacagtggctaccatggaggccgttgctacttcctcctcgtcgacgatgtgtcccactacgtatgtgttgtcctgctcgacaccaaggcaactgccatgggcaccatcaagctattgcggaggagtgcatacacaagcttcgggtgttgctcacgtacaacgacgactagttcgtggtgatcatcaatgacttggtgatcatcggtgctaagaagaggtggaggcgttcaaggttgatatgatcgacctggggccactctccttttacttggggattgatgtccaccaggacagctccgacaactcactccaccagaccgcctacaccaaatgcattgtagagctaggtgggctcatcgacttcaacccaacctacactcccatggaggagaggctgaagttgagccgtgatagcacgaccaggggcaggcccaggatttagagaatgggtatttgaaattgtactagagagaaaaaaattggatggcttaaagcctatcctaatagccttttttactagagagtaaactaaatcataactcatgtaaaaataataggtcatgagatgatgttgttaaacactaaacatattaaagtattaaatatagagaacattaaatagtataagaaagcttacatattacaagacaaccttccgatccttcaagctttgaaattgagtgataatgtcttcatccttgacttgcaagaagaattgtctttcaataaaagtaaccaagcatccatttaattttttttttgtcccatcttgcttcttagcttattttttatgaagttcattgaagaaaagattctttcaacaccagcagttgcaacaggaatttgttgttatctttgaacagatagcaaacaaaacaatatgggacagatggagcaacattatcgttcttttttgcagcagctcttgctaaaaaagctctcaaatcagtggtagcactgctctttctcttcattttcaaatctgcaaataaatcacaatacactcaattcaatgcctagtctaaaacaaattaaactagcacattgtacaccagagttacggaacagaatgactgttgactcaaatatttattttgtaacggtacatatggattatggagacgtaagtactaagtattaaagtgattgatacatgttattatgctaacagtacatatgagaaaaagatggtaaaaatgcaatcacataaaatatctaaatgtaaacaagtgctaatagtagacactgatacacatacacctgaattctgatgacctgtaggctgcagcggggatcaacaatcttggtatggatccatggctgttggtaagacgttggctataacttgcatgtcgccgactcgccgtgggccgtagcactagctggctagctgcaggtcgcgacgttgtccagcgctagctgtaggttgtcgcaggccacgcgcagccgctcccttcccgatccttgtggtcgcgttgccgccgtctttctgttgggattagggctgcgtaggcttcagacgcgcagagcgccagagccagagaggagggggcagagagcagtccaagctaaaatcggatgggcctgatgggccgcacgacagataaagggaaggaggtcggtacaaaggaaattgtggtccaaatagctataaaacactactattttatgttcttttacaatatttcggtgtatagcatagcatatatacgtatacgtgaatttttttttgttaaaaataatgggtattcaactgaatacccttgattcaatgtgggcctgcccctgagcacgacggagatggacgtgacacaatactggcgcattgtgggcaacctttgctaccttgtccacacacagttggatttggcgtttgccatcggctatgttagttggctcatgcattgaccggctacagagcaccagcaggccgtcaagaggaccctacgttacgtcatgggtacttctgacttcggcttgcacgactcgaggtgtcccattgctgtgcacttcatcagcgaccacagcggcgacatcgataggatcaagagcacatgtggggctgttcttcctcggcaagtgtttgatcagctagcagtcagtcaagtagaaggtggtggctttgtgcagctgcgaggcagagtacattgctgtcagttctgcctccactcaggctctctggttggctcaactgctggggtgatctccttggcagacgctaaagcagttgagcttagggtggacaaaaagcctgccttggacttggcgaagaatcccatcttccatgagcgcagcaagcacattcgggtcaagaaccatgtcatcaggagctgcttggatgaggggagtgtcaaggccaactacaaagcactcaagaccagctcgttgatttttttaccaagtcacttaggagggtcaagtttaggagcttcatgctagaattgggatggttcagatccctccagtggcgcaacacaagacttagggagagaatgataggataattcctgtgatgataggttaagttcagtgcctatgtcatcatcttatcttctaccttatctctactttagtacttggaattttatctctactttcagttgtaagttgtaacggaccacttggcacttggtcctatatatgtaacaataaccggccatggttcagtgtggcataagaaatagaaaaaaactgttccaaacctgtgttcaactccaacactatgtgcatttttcatgaaatcgcatagttttgtaggtttgaaattatatagcaggaataatttagattttatgttttatctttgaggtaaagccccagttttcaaccgatattttcaaatgcatgcatcatattttattatgtaaattcatgtatctctgaacctgcctgacttagttcaataagatagttctgttcatgtcaaataaattaatttatggttcttttggttgtaatattcaaaataattttaataggttt

SEQ ID NO: 158 - DNA, 862 bp, Zea mays
  Intron number 2 from transcript GRMZM5G849796_T01 (locus G RMZM5G849796) derived from phytozome v7.0 (chr-ID 5; pos 2 00479288 to 200480149 reverse strand)
aacctggaactgcttaataaaaagtcaagccggaggttagttttcttctctttattctttatggagtaccaaattctgccgttcacaatataaagccatttgctcgggtgttttcatttcacaatataactactactttaatgatgtgtaagagattaggtggttgtactataccatacaatagatgcatgtgttttcactagccaccaagtttcccttaagtttattgcctccttattgtatttgttgggggttatggaataatattttgaaaggactgtgtaatattctgttcatttttatatttttttgggtgaagttgattttcatataaatatttgagatctgtttagacaagccttgatgaactcagttgttcagtgtagttgggcttttacaatgtttagaatcttctttatatgcatggggcttatatgatgaagcttcactgttccactactatttgacattttacatttcagagttcaggattttgaaactatatattgttgtatttgttgggtttatggacctacgttttgaaaggagtgagcattactatttgtctcgtaattttgctacattttttacaagataaattttgttctgcgttaagttgattttctataatattttataacaattagacaagccttgatgaacccagttacccagatgtttagtgtagttgatctttcagaatgtttggcggtttctttcgtttcgtggggtttataggatgaaccttcactgctccactactatttgaaattttacatttcacagttcaggattttaaaagttaaaactacggacatcattaaaataggtcaaacttattttgatatttcgtgaattaggt

SEQ ID NO: 159 - DNA, 9559 bp, Zea mays
  Intron number 16 from transcript GRMZM2G043238_T01 (locus GRMZM2G043238) derived from phytozome v7.0 (chr-ID 8; pos 48125474 to 48135032)
ataaaaaactggttgcgtgggatccgagacagcgggtaagtattgtgatttatgactaataactttagctaattactagatgattttatcgtcatagaattttcaatctgaaattagaacttctttttattttctatggccaccagaaaatacctgtgctgaaatggattcaacggatggaaagtttcatcctattgtttgctttatcgatattagagagtcggattttattgttattggttgttagcctcagtagtactgcgaaatattgttagagcaactatgtaatgcattgacgtgttaataaggctgaacaatacggtttgcaccaaaccgtctagatgaaatttctgagggaatatggcttgtttggttcatggactcccaggcagctgcctgccaggcatgcaatcctagccccaggcgacatgaattggaaacttgggagtgctgcctgggccaggcagctccaccccaaacacaggtgcatgttgaagaaaaaaaagcagtggcagtttcacctacctttcaaatgatctggtccaaagctgtgggccaggggcgaagccagaaaatggaaccaccggggtcggctccatgaattattattattattattttctcgaaagcgcaggagaactgcacatcatttaattagagaagaaaaaaggtctaaaatggaccaaggtacaaagccctaagcaggctcaacaaaaacaaaacaaacacccactcacacgctacccactccctagccggtggggggggatgcagatggattgtccaccagccaaggcacggacaacgtgtgtcaaatacattgatgaacagtgttaaacaatatttacactggatttgacaaattccattgggtctggcgacccctgtgccttaaggcagctttgcccctgctgtgggcactgctagtgagtatgcatggttggtaatggtttagccttttgtggctgctagtttctgggcaaaaaccttcatcaaaaattgttgaattatttttctccgagttaactcccatatatgatctatctactactgcacggttttggttgtgtatcacaacaaaaggtttatgctcacaccatactatctttgattaagccaaaactgaactagtattttttccaagaacatgccttagcacgtatttcaaggacacaggttaagtggaagtagatctgatcttacaccggggcagtcctggttcggggtctgtcccttagtaaccaggttcccggatcgatggggtcgaggaaaggtaacatggtatgtggtacgatacttcaaattttaacaccacaggacgaatgttcccgcaacgaggaatgtggacaagttccacgttcttggtttctaaggtctgtccagaaaaaagcaactttcttttggtcagcccaaatcttgatttgccttcccaaattggctaacaaactatggctgtgacagatgcgtctgctcggtacacagcttagcagcactttattgctacgtgctagtggttgacagtaagaggtttttaagattttaaccaatcataccatcttcttggcggctcgtcccagaaggcctggctggcagatgctttaactgcctctctcaggatcactttgccttccagtgtacgctgaagacgaggtgttttcggtgccgggaatagggacatcgttcgtttgaatgcagtcagcttaaaaggccggtgtggcagaggattgattcttggaaggtggcagcgagcaatattgttgcctctcgacctgagactaagttctcggtctggaggaggatcaaccttccggagccaagtgcgatcggtggagatattctaaagggagcagcctcgacctgagacacgaatctcggtctggaggaggctctcttcatcttcagcgctcaaggcaagaagctggtgtggagaaggaaagataaccaacatcctcctgaagatacagatattgccgctcgacatcagaaaccatcatccatggagggagatggtaggggcttgatctctcaagaggttggcggttttcaatcaaaaagacagcgggttcgcaagagacgacatagagccaaaccagtttctgctttggctaagcggcctgcaggaccggtgtcacctgtagaagatgataaaccttgtatcttgcgatggactcagcagatgaccagagcagaggatgatcttcagaagacagtggtgattactgttatcagcgatcgtgagaggatcccagttgaagagattgctgagttaattgctcctaggctggagttggaagataggtccttgataattcgacagtattcagagtcaagcttcatcctatttctacctagctgtggcatggtggagctgcttgtgggcaattggccttttctcagggcggccactttcactgtcacctgcaggaaatggtcccgttttctgaactctaggggtgctgtgttacctaccttattggacatcgagcttcagggtatccccatccatgcttgggaaaccataactgtggaacaattgcttagtcccttcgctagtgttcatcaggttcatctagacaccttggagctaaaggatgtggctatttaccgttgttctgcttggtgtttggacacgtccatggtgcctgcttcaagagagctttggatcgtcgagcctccctttgccgttgatggtgtatcctctggcaggagaacgttgatgtatccaatccgcatcacattctcgtttgcctcgcggcgggatggatccgatcctaaccctcaggctattacatcaggcggtgatggttttgggaatgtacatcagggatctccattttcaagacctccccaatcgcgtcgtggaggggggaggggaagatggtcaatcgggacgtcgttcagttcatgatcatttgggtctaagagatgagaacatgcagcatcggaacatgagctcagagatggcagaatcagatctaatgagaacattggaatccgatcggggaccttgtctcctaggctgatagagatggctgaagacatgcaagacaaccctgatgtcgtcattcctacacctgtgaaggtgaagcagctgaaggtttactctcgtcaaaggctcaagaacgtcctgactttggaggaggctggagctcccaatcctgtcactgcgcctcctccctccccctcagacgtggtagctgctgacacggttccatctgaggaccctgtcttagatgttgacgctgtgttggcaactccgtctggaacgttaccttcctccctgtcagatgtggcagtagcacacgcggctccgtcagaggctaatgccttaggcgttgatgctgagttggctgctccatctgaggaggaccttccagcaagcaacccaattacacaagattctttggagattagtgcacgagaacaattcatcagcagattgtcaaaccagatcacacgcgtcttgccagtcccaaaatctgtcagacgccagtcctctaccccctggcggttccaagacgcagccaacgtgtgcgggggttggggttgaatttaaaattcaggattggggaaaaaggtccaagaaacaagctatggtggctcttaatattattgaagacaatgaaggattcaggcgtcaagctttggatgactacgccaagctcttcaatcatactctttctcgtagtcatgtgcaggctcttgctgctctttttgggtgggctatcccagataatttggaatatgataatgggactggggatattaccgcagcaagcttattttaggtggcagttttgttgttcttgtttgtcgttttacctcccattgttcctccatggacctggaaaaaataattgtttggaatgtaagaggtctcaaccctttggcgcgacagaattctgtccgtgagctcctcaattgttatggtgcggatataatctgtcttcaagaaactaagatggcgcaaccttctcagcgtactctcctctctatgttgggatatgattttaccggttcgttggccctaccttctattggtgcgagtggtggaatccttattgcttggagacgacatctgggggtcactggagctaccaggacagacattcatagtgtttgtgtgcagttctgttcagaggaggggctagagatggcaacgggtacccgaaacccgaaatccgatgggtttttaccccattagggtacgggtttgggtcaattttcatacccatgggtttgttaatgggcataaatctatacccggcgggtttatgggtacgggtttgttcctatagtacccaaacccgtgaacccgtgggttttttaaacccaaccaaacctagtgcatattgtcattttattttataaacgaccaacaaacttgttattccttatttacttcataatttttatcaattggtgaatgtatcagtagtcggtaagagtgttgcttgctattatagtttttactaacgttacatatgtggtggatggataacatagtgcaaggtcacttaattatacaacttattatttgtatttcattctctctactaataatttttataccaaatcatgaactcgttgttcattacatagattttggatcatgatctcattaatcattacgatacttattgattatgagaagaacaagtatattggagatgaaacccgcgggtaacccatgggtacccgctaacccgatgggtacgggtttgggcaaaatctcaaacccgtcatgggtacgggttttttaatgggcatgaatatttttcacgggtacgggtttgggacggcaaaacccagcgggtttgtacccgttgccatctctaggaggggcaccattggtggcttacttgtgtgtatggacctcaatctaatgaagctaagattcaatttctgcaagagctgagacaaattagagcagcttgtcaggtccttggatgatttctggggatttcaatctcatattgcaagccgaggataaaaacaactcgcatattaatcgggctatgatgggtcgattcagaaaattggtagacgatctggctcttaaagaaattccactccatgggcgcaagtttacttggtctaatcagcagaatcagcctactcttgtcaagcttgatagagtgctgtgctctattgattgggaggaattgtttcctagcgcaatgttacaaagtgcagcttctgaagattctgatcactgtcctttattattgggtctcaaagatagcaaaggtgttaaaaggcgttttctttttgaatccttctggacaaagattgaagggtttcatgaagtggtgcacaatgcttggagttcggttcctgttggccaatgtccattctccacttttgatttaaaactcaaagggacagctaaagcccttcaaggttggagcagcaagaaggtgggacacattgagactcagctgcatcttgcaagagacttgatccatcagcttgagattgcgcaggatggtcgtattttgtctgtgcttgagaggtggttgttgagtaagttgaagaaacactctctgcctttggtctcaaccaagcgaaccattgctcgcctcagatcaaggatttcatggctcaaggagggagatgcaaattctaagctgttccattcttttgcgcgttacagaaagaagaagaatcatatatccaaacttactgtgggaaatcaagtccttactgctcataatgacaaagctgcaacagtggatcagttttaccttgatctgcttggtgctaataaagacagaaatatatccattaaccttgaagctttgacaactgccggcactccatttccaaacttgctagagttggacaaccccattactgagcaagaagtgtgcaatgctataaattgtctgccctcggataaatctcctggaccggatgggtttactagtagattttataagacttgctggtccattattaaagatgaacttatggctgcggtgatggcggtttggaacagaaaatttgataatttccataagctgaattatgcttttatcactctaatcccaaagaaagatggtgctgatcaggtcaaagattttagacctattagcattgttcacagctttgcaaaactaatcatcaagatattggctactcgcttggcttcaagactcaatgatttggtctctccaaaccaaaatgcctttattaagggtcgctttatccaggataatttcatgttggttcagcaaacgactaaatttcttcaccaacaaaggcatcctcgtctgatgatcaagctggatattactaaagcttttgattcggtctcctggcccttccttattgaggttttgcaaaatctaggttttgggcagatctggagagatatcatctcagggctgctcctcacttcctccactcgggtgttatttaatggtcacccggaagcctcatttcacataaaagagggctgcgacagggggatcctctttctccgatgctgtttgtgcttgtcatggatgtgcttggtcaacttttttctaaagcagatgaggaaggtttgttacaacctctttcttctaggcagctgcaacaccgggtttctctttatgctgatgatgtggttctctccatcaatcctgtggcggaggacatgattatggtttcggacatccttcacctttttggtgaggcttctggtttatataataataatcagaaatctagtgtctatcccatcagatgtcatgaggacaatttagaggtgattcagcagttttggccttgtgagatctctagctttccttgcaaatacctaggtatgcccctttctttacataaattaaaaagggagcaggtgcagcccattgtggataaaatagctaatcaactgcataggtggaaagctgatttgttgactaaagcaggaagaagtgtgttggtgcaatctgttttgacagggatgctgatttacagtgctatggttggggacctgccttctgctacttgaaggacaaggacattgataaaattagaatagggttcctttgccgttgtcgtaaaaatgccatgggtggacattgtgcagtggcctggggcaaagtgtgcagacctcgcgagcttggtgggctgggtattttcagcatcactgaactgagtcgggctcttaaaatgcgttgggcttggctgcaaaaaactgagccaggtcggccctggtcatccccgccccttcatatcccgaggaaaattcgagagtttttacaaatggccttgtattctgagattggaagtggagcctctaccctcttctggagtgatcgatggttcggtgggcagcggatagtggatatcggtcctcgacttttagagaccattcctaagaagctgattaacaaaaggacagttcaggaggcgatcagagataatttatggattaatgatattcctgggagtttatctgttggagcacttgcagactttctgcgcctttgggatttggtggcccaagttgatctttaccctgataaggaggacaagcatatttttcgattggctgctaatggcaaatattcggctaaagctgcttatgaggggttggtggagttcgaaccttttgagcggatttggaaaacttgggctccgcccaaatgtcgattcttcttatggttggttgctcataagaaacgttggacgacagatagacttgaaaagcgaggtctgaatcatccgaaaagatgtcctctgtgtgattaggagagggagacaattgaccatctgcttgtgaattgcgtcttctctagagaatgttggttcctccttaggcaattcgggctgcaggggttggctccgcaaacatcgaatattaattttatggagtggtggcatcaagcaaatgaagctattcaggggtccttcagagatggcctaagctccatcattactgtaggtggtggtgtcgtccatggcagcgacggttggaggaagtcacagcaaggaacgaagccgggtcggggagggagcgaggtagggaagcctgcctgaagaacaataccggagggagcagtggaggtgagcggctgctccctgctgcgtccagaaacagaggaggtcgcggagtcggggcggctgcccgcgcgcggccgggagcgttggtcggcggtgcgggagctccgggcgctgggtcgcggagccaggggcggctgcccgcgcgcggcctggagcggtggtcgcggcagagggaggcgcggcctcggacgaagggacgaccgcggccaggcgggacgtcggaggcgcggcaccggggagtggcggccgcgcaggggcggcggccctgtgagcgacggtcgcgcaccgacgggagcggcgacccaggggagggcggcgcgccggggagatgggagggaggccggcggccggaggtgggtcaggggagggcggcggctggagccggcggcgctggctgtgtggaggccggcggcggcggctacagtggagggaaagccccctggcggctgtggctgctcggggagaggaaaaaagactaaacctagctgataccatgttagaataggaacccataccctaatcaggggttgggagtggtattaaatagggagagtaactgggccaaggcccattacacaggggtataacggtcattacacagggaatagcacaaaccctagacgggtagtctaacaattacgttgggtgcttggattttatggaatcaccgaaacagatgcatctttgatggcctttcccctaatattgctaatttcctaatccaaactggggatgagcgccgtctttgggagattgccggggccaaggggctgtcctcccttgttgcttccctctcaattgtggactagagctttatagatgagtcaatctatgttagtttcatttagaccgccataaggcgtcggttgtactccggtctactttagaccttgtttctttcttcttttaatataatgatacgcaactctcctgcatgttcgagaaaaaaaactgattttgaataattaagaagctaccgaaacaaattggaagcagtttttttgtaaaactaaattctacagtaccagttttatcaataattggtacatgatgtgtctataatccaaacaaccttctttctgggcttgccctggttttggtcatgaccaagttttggtgaggttatttattgctcaaaccaaatatacccttttctaaactatttatgccatgtaaatgtctggacccttggtcaacttcggatattcttacactccctgcatatttgataataaatgaacacttgattcacactttaacaaggttatcaagctgtatgattaatcaagattatcagtggcagtgccattacgatcagttatgcacaatgattagtcgcgattagtcagctgattggtgccatggtgactagggttaattagatgattcgaaaaaaaattgcacttcaatggacgaggaaaaaaatctatattgcagctcataaatattgagaagatttccacttttttctgatacgtgcaaaaaatgtcatattgcaggtaca

SEQ ID NO: 160 - DNA, 6013 bp, Zea mays
  Intron number 2 from transcript GRMZM2G047042_T03 (locus G RMZM2G047042) derived from phytozome v7.0 (chr-ID 3; pos 9 6223716 to 96229728)
ataggtgctttcaattcaagtaccacagtgtaaaggtgtgttctattcattgagatgttttggttaccactgtcaatttgtcatatttcctaggatgaaaattttaggagtattttctatatttcattttatccattcattctatatattatttctcttcaccttatctccatgtgcttcctcatgtgttttttaatcaaatctgaaataaatcatatagcatatcatgtaatttgtaacaaaagaaggccttttcacctgttcttagcatacattagttatgtgctgtacctgcaatgtggagttaacttctatcaaagtgaaaactttgaatcatggatacttatcagttgtgaagagatgatattttggttgttactgagctttaagttcaatttttttgtactaaggttgaatccactggaaaaccacctcattcttttttgaaaagagtactgcatgcattaggatggtttctcatgtaaaaaataactgttttctcccttttctacttggacatctcattgacacctctggaatgcacaataacttgatagtttgcgtcatacaatgcaaacaaataaggtcaagaatttacctgtattaaaaagttcattttcacttcttcaacgggtgtattgttcattcatcttgctcccgatctttcgatcagtggaatcgagtgtaaagctatgtttcctcactcccattaggatataatgcaaacaaataaggtcaagaatttacctgtattaaaaagttcattgtcacttcttcaacaggtgtattgttcatttatctcgttctgcaatatatttgtgttcaaattgcaacttctttatgggccaccaaccaaaggaagaattgacatttcttgagcccatgatttccatggctccaggttaatggatcctataaaaaaaatgcttgataggccatcttagctgaatgctatccatctctgtcttggcctgaaccagtgatgcggcgggagaaccctgaagcaagtagctagcagtagagtgtgtgtttgaatcactgttttcaagtcgtccgattaatcacgattaatcgtccaagtcggtttggaccaatcacgattaatcgcccaagtcgtccgactaatcgtgactaatcttgattaatcgtgattaatcgcgattaatcgccctagtcggtcagccagaacgactagcaaatcgtccgacttgaaaacattggtttgaatgtaatggcattagggcgtgtgggccgtgtagcttggtccggcccagtagagtgcctataaaggctagattttttactctctaaacaactaagaaataacataattcaaaatatccctacctcgcatgcatacctgagtccttcaggttgttcgtggcaactctcctcgccggagttaacctcacgtcgcgatggcgacgccgtgggcacggggaggcgttacagtggtatcaaagcctcttcccttccttggcgtgggtcgtgtttggtcccggcaattctcggcgagggcgcagaggttggagtcgtgtgctgcagaggttgcatacatccctgggtggaggagcggctccggctttatcgctacggtgcccactaccacaccttcggttcagtcgcggctcctgctagaggcgatggtggaatggaggaaggagaacgaggtgagatggaaccaggtgatgaatcggttggatcgtttgactctgttggcttgtccaaggatggagacagaactggaggtgtcgcggttgaggttggcagccatggccatggacatggaggtggagcctgaggaacggggttggggggatccacgatctggagaacgagggtgtcgttgtggacttgatgcacaggttgatggaggtatggttcttcctgtgtttgatgaaacgcctcacaatggcagcgaggaggtgattgccctgttctctgaaggttctgattcctcagtgttcgatgaaatgccattggagaatgtgatttgggatgaggaatctgggcagcgtgacttgttggatcagctagcacaagatgaggattacttagttgttgccgcgatgaaaccaactgtacataccatcattgtggacaagcagttgcagtatgggctcaatcagggctgtttcgagatgcctgccaataccgatgggtctgaagatttgttccaaaaccatgatgctgttgtctcagatgtcaagatcattgaggaagatgaattcatactcactggaggcaaagatggggctgatagggagatgccacaggcggatgaaaccagtgaagaagatgtggaagattacctcgctgaatctaaagaaggggctgaggatgaggtgctgcaggttgagttgacagatggtgaagttcagtgggatgaggagttttcatctgacatagaggcttacttcagcacacagttgtgggaatgggatgtctaattggtttcaatcaaggagaagtgataccggtcatgacacaagcccagaggtgccaccctttagatccattatatactgctgaaattgcagttgttatagtaactgtaagaagtaagaactactggaagaactcctgagggaagatacaacatgcactgtgttgaagttgtgctgttcgagtcagagaagaaggttgtggcattagcggattcctactcctttccacctttccagccattgctgctccctagaagcaaaggttctgctgtcagaccaagtaggttacttcctaggaggaccagacttgttggctacaacaaacaatccaatgggactagcatttggatcgtggaactatctgaagtgcatgcagttattatggctggaccacacagagggaaggtggtagcctctgaagttgttccagatgttcaatctgtaatggatgctatggattatgctgaaggtgaggctacactcaacaattatcctccatttattgaagctatgaagggaaattctaatgtggatttggttagcaaaaatatgccaacaaatgtgaatagctctcttctggaacttggtggcatggtggatataatattcggctgtgatcatggcttactagatctcagtttggtagatagtgccagattatgcactgcgatgttcttgcaggtcaacagtaacttgctgctgaaagaacatggggctgattttggtattgtcttgtcaactgctgagtgcgtggcatgatgcttatccccacaaagtcttaaccaacagggtgaagatagtttcagcattatcctatatgaagtatgtactggacagaagatgagatgtgaatgcaagtttgggttgctctttgatgggatgcagaacaagggcagtgttcgagaggtgatacttgaactaacacaatggtggctcaatgctgctagtctaggaaacaatgatatggaagttcagttacaacctgatatccaaagaaaagccatgaacaagttaatgggcttacaattcataatggtgtatgagaaaggcaaggagaatatattggctgatgcattgtcacgagtgggtccgtttatggctctgtattgtggcattcgtttccaaccagtttggatacaagaggtacccaactcttcgatgactgactcttatgctcagaatctgttgccaagagtgaccattcacagtccacatggagttgtgttctcagtacagcagggcaatattagaagactccatcagctttgggtgggcagaatttcagcactcagcactgtgttgatttcaacctttcatgattcaactgtttgggggcattctagaggggttgcatcttaccttgagatggcaatgggtacccggtatgtaggtaggtatggaatgatttctatatctgcgggtatgttaatgggcaacaacctctacccgttaggtagatgggtatgggtgggtactacccatacctgcataaatatacccatataataccactattattatctaataaagtcaatcttagttaaaataaaaccttttttcggctattgtttattaaactatcgaattatgtaatcatatggttttttatacttcaagttgaaattatttttgtgtatttatttgacattttgagtgatcggagtattataatttgagatcttagcgggtacgggttacccgacgggtaaaattacccgcgcgggtacgggtatgggtaagattttatactcgcgagcgtatatgggtaactcgacgggtataattttttgtgatcggtatgggtatggaatgctactatccgacgggtatatacccattgccatccctaatcttaccatatagtgaagagggtgttttggtggaagggtatgaattctgatgtggagcaattatttaggcattgtgcaactagtcagcaggctaaaggatagcagtcctttccctctggactcctacagcctctttaagtaccagagggcattttggaggacattacaatagattttgtggaaaagctacctaagtcgaaaggctatgatactagcttattttggaagcaccttttcacattgatggatggcaaattgtctttgaacatggcatatcattcacaaacggttggccaaagtgggaggattaaccaatatttggaaatgtatcttaggtgtgatgtcaatgataattctcacgagtggaatatttggttgtctcttgccaaagtatgtttggctgctccaaattttaaaggcaatgaggttctagtgtcaactgattgggagcagcagaggactgtctacagcacaatgttgcaggaacagctgtccagagctcatcagcgttgcacagaggtcaggggttactctaaagcgagttttgatccatggtcgggtatggcacttgagttttctacctggcggacttcaatgttgtgaagagtcattttcttactgcacttgcttgggggcaagcaagttctggcgaaggggcagatttcatggcctgaatcagtgatgcagcgggagaaccctgaagcaagtagctagcggtagagtgtgtgtttgaatgtaatggcattagggcgtgtgggccctgtagcttgggctggcccagtagagtgcctataaaggctagatttgttactttgtaaacagctaagaaataacagaaatcaaaatatccgtacctcgcgtgcgtacctgagtccttcattttgttcgtggtaactctcctcgccgcagttaacctcacgtcgcggtggcgacgccgcagccacggggaggcgttacaatatccagcacatctccacattgtatcatgttggagctccacctgtattactaaatcccagttatcaagatatttgaacagggcagctaccgatggagcttcctgtatatcttgaaccagcagcgatcaactgaaacttcctgtaccatccactgattggttttgcataatatatgcgggcaaataaatgtgggccaggatcagcagtgggctctcccaattactgcaactattctctttttcttagatgttactcattcaaggttgattttccgagtttacacattgacctgtattatataatatcatcatgcaatggtcatataatgcattctagacttgatttggttttcgatttcgatctgcctactaaacgttataacagtaaagatttaccattatatgaggtaaatatagtgttgaatctgattcttatcttatattcatgagatctctgtattgattcctttctcttttaaatatgagaaattgcacttctttgctaatactccctccgccccaaaatataattcgttttagactaatgatacattcattaagtaacatatgaatgtagtttgcatgtatgtctatattcattatcatttgaatgaatgtggatgaaaaaagtggtctagaaagaactatattttgggatggagggattatgtgacatacacttacgttactgcataacagatgttaatgtgtctgttttctcaggagcaacaaggagaagtggcaattactgcaaattt

SEQ ID NO: 161 - DNA, 11123 bp, Zea mays
  Intron number 1 from transcript GRMZM5G808737_T02 (locus G RMZM5G808737) derived from phytozome v7.0 (chr-ID 7; pos 4 6785877 to 46796999 reverse strand)
ccacgggcgttacattctcctgccgtatttttgcggtaattgcgccgctcttcccttccctttgctctgtattaggattcttgatttatgtgtgggtttccaccgcgctaccgcagtcgatgccgtacctcagatgcagacgaggtagagcatcacattaatgaggtgctaggattatcataagctctattctagggttcttgatttgggcgtgggttctgatttcaccccggggaaatactttgcaaagatgacggacacgtgtggaattagtattgcgtagccatcgatacaacgatttccttgcaactgaaattgatgaatactagtactaaaagtgattgaggcagctcctaaaataccgaacttgtacgccttagaaagttactgaaattgcagctttggttgctcatccgaaaagggcctgaaccatatgcatatcaggtatgggaagtttagccttaacacaagtctaattctcccacaaaagatggtgatgcaactacgtaagacatatatgatcaaattgatcatgccatcaagctcatctccttcgtcaatcatgagcatccagcaaaggtagtgtgccctccatgcattgtatactcctatagtcttagtttcttgcatgttatcgttagtaatgtagtgatttgtattaatcaatttttgttgaggacgggcttctgaagtccatgctgcctttttatgaatgtttgtatcaataggaacatcagagttatgaagacttctcgtatgatgccttagggaccagtttagaattgaatccgtgtatcagataataacatgcccaatttattttgtcatacgtagcaatgatatcaagggtagcttttttgtgcatttgtttactctagtatgctagttttgtattaattccttagtcgaaaacaagctagcatattaggtgcccttccattcaaaatgaaatatgtactaatctacttactggttgtatttattatttcatagattgtgaccaccagttctcgttggagaagattgaaaacattacatatttggtatttgaacttttaagaatggcaccattagtcactttcattaaaactgtcattggtcttcgattagaaaatgtcaaagcctgaaggtttcatcttctgcagcaactccagcttgttccatttctccttcgccagcgtctgccaatggtttagaagaccaatagttttgcaagcaactcgtttaggagatttcagtttttttttgttgaaaaaatagattgtttctcgtgttccacagagcccaacccgctccatctattacgaaccatatgaacatgttcttgttccctccttcgctgttctagcagttctcctgaaatttttaatggatgttgggatcttcgacaagcccaaactatttctcacccaacaccgcccaagtcataacagctgtaggacatctaaacaaaagattgcccacagtttcttcttttccacagaatctgcaccctttggacccatcccaatttctcctcagttgttccactattgtacattatcatcttttgcaatgcaaagattttcatctcttgcatttttggttacttgcttctgattgctataggttatcaaaaataaggcaacacaagttattaaaccataagcttctcccttcaattaatcctttttcgaaggttaattcaagagagaagacaaagggtgcaaacacatgtttattaacaagggtgaaatataaacaacaaagagtaaaacatgctactcatcttcgtgtttctgcccttatagtttttgtttcttgcaatataacgaataattacaaacgtaccttcggctccacaagaatgatagctcgaaggtacttcaaaggataagctaaacgaaactctgagctctcgaaaggtgaatttatgcatgacattgttcctctatttataggggaaagatacaacttcgtatgaagttacaagtatacccataacgtttacgcatatgatttttaaatataacaagggcaatgtcatccttcctcctttcttgctgatcaagacttttggttcttctcctcctctgcttcgtagatcaaggccttcggcaacgaagccgtcagcttcgtcccatgcctttgcagcatcaatgtttacgcggagctccgcagcttttcttcttcagtatgcaagttgcacctgccgaaggtttgcttcattgtctatccgtgttgtacctgaaatacattttctcaatccgaaggtaaggtattttgagggccttcggctaagtaggccctcaaaatgcatgatgctcaaatagctcacttacgtaatagttcattctatttcctttcttttttgtgcaatcgacagcttgtgttgaacagttcaagtaaccatatatatgattttcatatgtattgctatgactcctttggtacgctcatgtctggttgtccctgaaaaccatgaataatgaaaacatgtaccggtccaaccaccaaggctcatgaaaaccataactatcattttttatgccatattatttcaaaacagacattcgataccgtcggatactcaaggtaatgatgctcggtaaaaaaactcgacctatgggggttagacaacccccgagcattatattaagaaaaacaccttctcatggaggtcgagaaaacccttgaataactgccctacccatacatagcggcaccatagcccatgagagaacgaccgtgaccaggaccgggccttagacctatgctttggcgttggatagacgaagggatttgtttaaccacgtcctgaaatttgctcccacgtggagtcgaactcaggaactgaggagtgctactcagatcacctaaccaactcagctagaggacctttcggaataatgatgcttggtagctagtgttaattgtatcatgaaaattcagttcctattatcgggatgaactcaaagtattgatgttttgcagcactctttctgaagaatgttgaggataggcttggccaagtggacaagcaacaaccatatgaaaacgttatccatattattaagttgcatgaaacaaccaatctaactcaaaagcttaagttgatggagaggtggataattcacttgtattctaactcccctcacgttgaggcacttttaggcctcagatgtggaataggagcatgcaacaattattttatttaattgtgttaactaggattcaaactcgaggctgttagagtatatggggcccatgaggcccatgtatgaatatggtatagccaccctctagggttggcccaataagcaacttcactctctccaacatggtatcggagctaggtttctctcctctcctcccagcagccgccggcgtcccctgccgcgcgcccagggagagcaacggccgaccgccgtccgacgcctcgcggccgcgcctcccccggcagcgcgcgcgaccggcgcctgcgcttccctcgactcgcgcccgcgcctccacgggccgcgcgcgcgaccggcgcccgcgccgccgcctctcccctcccggtagcgcgagcccggcacgcctcccggcggctccactcgcgggcgcagggaccacccagccgccagaccgactgagcagtctggtcgctccgcgccagcgcctccgaccgccaggaagccgtcgcacgcgcgtcgcgccgccgtgccctccatggccagcgaccctcctcctccccctcctattcccaagtatttcctcccctcgccgcagctcttagtgctcgcgccgccgctgctccgccccgcgccggcgtcgcgcacactccctcggccgccccgttccctccacaccccctccccgctgccgccggcatcctaccctgcgggtgcgcaggcgccggtggccggggcgtgggggactagtgttgccgctacctcccctacgctcgcccgtgtgttgggtgcgtggggggcagggactcacgctgctggtgggggcggtaccctcaccgccgcaagcgccgtcgctgcccttgctgctgtggcggacgatgttcccgcaggggttgagggtccgggggaccatccccctccgccggtcgtcgatctgcctcctgtcgtctatccgccgcctcctccacatcctacaccggtctcctagcaggggtacaccgtcgctgccctcgccgctgcccgtgcggagcacgcggcgcgacaggcccgcatgcgggaggcggccctcatgtgggagcgcgagcgcgaggccaccgatgctatcgctgctcagattgccgcggcggagcagctgctcgcttcacctgcagcccacgacggcggggccacctcctctgataccgcgggcgtcgtgtacggcatcccgcccgcgccggtcgttggagccgggcaccgcaccaccttcaccaccacggtgccctggcacgacccggccgacccgctcgtggcttagctctaccttcaggctgggagtgtccagaatattcgcctgatggtccccgtcgtcctagagctggagtcgccgtcctacgctcgctggcggtacctgctccttctcacccttcgtcgctacgccctggacgaccacgtcctccgcgacctcgccggcgtggcgccgaccgccgcgtgggtgcgcctcgacagcatcgtgctcgcctggatcgtggggacgatctccgtcgacctccacagcctcctccggaaccttcctcacgctcgggctgcctggctggccatcgagggccagttcctgggcaacgccgaggcccaggctctccgcctcgacgcgaccttccgcaccttcgtccagggggacctcagcgtcggtgagtactgccgcaagatgaagaccatggcggactcacttggcgatctaggctgccccgtggaggaccgtgccctcgtcctcaacgtcctccgcggcctcagcgatcgctacacccacctccggtcgttgatcatgcgccagcgccccttccccaccttcctccaggtccgcgacgaccttgccctggaggagatcactctgggtgctcaggctgcatcgatctccggcccgggatcctcgtcttcctcgactgcgctggcggctaccaccccgacccgtccacccgggccggtcgggggcagcgggggccgaggtggtagaggcgggggcggtgggaccccagcagggtgcgccttggcccaccttccaccacccgtggtcagggcgcatctccatgtggccgttccaggggccaggttctgagactcgtcccccggcggccatgttcgccggtgcgcatccagggttctccttcgcctctccgtcgccctggacctcgacacctgccgcttcttcgtggtccacgccgccggctgctccaccgtccggactggttggttgggacgcggccgccttggctgccttccaaactcccactgactccgccgacgggtcccgagtggatcgcggacaccggtgctacctaccacatcactcccgaccctggtatactcacctcagttcgccctccttcctctcttccttcgtccatcatggtggcgaatggctcgtgtcttccggtcacatctgtgggtaccgccggcactcccagctcttttcgcattcctgatgttcttgtagcttcttctttggtccacaatcttctctctattcgtcgttttaccgctgataattcttgttctatcgagtttgactcttctggtcttactgtgaaggactcggcaactcggcgccccctcctcagatgtgacagcaccggccccctctacacccttcggcttccgcacgccacctcttcttcgtcttcgtcgcctgacaaagctgctgtttttgctgccactacaccttctactacctggcatcgtcgccttggtcaccccggacgcgatgccttgatacagcttactcgtagtgccactatcccatgtactagatcacatgatgagcatctttgtcatgcgtgccagttaggccgccatgttcgtcttcctttttcttcttctttctcgcatgctactcatgcatttgatcttgtacactgcgatttgtggacttcacctattaccagtatgtcaggctacaaatactatcttgtggtgcttgatgatttttctcattatgtgtggacttttcctttgcgtgccaagtctgaggctttccccgccctccgccacttcttcgcctgggtgaccactcagttcggcctcaccattaaggccgttcagtgtgacaatggtcgggagttcgataactccacctcccgtgacttctttctctcccacgggatgcagttgcggatgtcttgcccgtatacctccctcccagaacggcaaggctgagcgcatgatccgcatgaccaacgacaccatccgcactcttcttctccagacgcaccttccggcacgcttctgggccgagggcctccacacctctacctacctcctcaaccgtctcccttccactgcgtgcccggctcccactcctcaccaggcactcttcggtacccctccgcgctatgaccaccttcgtgtcttcgggtgtgcttgctacccgaacaccgctgccactgctcctcataagctagcaccccgttccaccctctgtgtgtttctcgggtactccccggaccacaagggctaccgctgctttgacctctcctctcgtcgggtcctcatctctcgccatgtggtgtttgatgagtccgtgtttccctactccaccaccaccacaccaccctccttcgaccgtgaccttgacctcttcactctctttcctactgatgcggtggtcgagccacctatacttcctctctctgcaggtactcgctcgccgcctgtcggtcctactcccggcccagtgccttgcccgggtccggtggtgtcgcctacagtggtgtcgcctctccgcggggccccgtctccgactgccctcgggtcgagcgggccttcaccgcctacggggccgtcgctaccagcccctccggcccgcttcgcacagccggtgcgtgtctactagcgccagcccccagtgcccatgtcgccggccgcgggaccgccgccgccggcccctccggcacgcttcgcccagccggtgcgcgtctaccagcgccggctaccgccgtcggggttcgcaccgccgccgccgtccccaccggtaacctctcctccggcggcgccgccggtggcccagtcctcgccagggacacctacacctccgccgcggccacccgcggcacgtgtcgagacgccggcgtaccacccgccgctccttcaccgcaactcacggcacgtccacccgatggtgacgtggcacgcggctggtaccctgccgcctcgggtcctggcggccacgcccggggactcgcaggtttctccggtaccctcctccgtccgcaccgccctgctggacccccactggcgtcgggcgatggaggaggagtacgcggcactcgtcgccaaccagacgtgggatctggttccctgtccgcccggcgccaacgtcgtcaccggcaagtggatctggacgcacaagcggcgggccgatggtaccctagagcggtacaaggctcgctgggttcttcggggcttcactcagcgccccggagtcgactacgatgagaccttcagcccggttgtgaagccggccaccgtccgcacggtactctcattggcccttgctcgctcctggccagtccaccagctcgacgtcaagaacgccttcctgcacgacaccctccccgagaccgtctactgctgtcagccggcggggttcgtggactcctctcgccctgacatggtctgccggctcaacaggtccctctacggtctcaagcaggccccccgggcgtggcactccagactggctacgttcttggtgacactgggcttcgtggaggctaagtcagacacgtctctgttcgaccaccatcatggagcagagactgcctacttgcttctctacgtggatgacatcgtcctcaccgcctccagtctgtcacttcttcgccgcctcatcgacgcgcttcagcgggagtttctggtcaaggatctgggtgtgcttcaccatttcctgggggtcactgctgagcctcgcccctcaggactccttcaccagcgacagtacactcttgacattctggagcgcgccaagatgattgactgcaagccctgctccaccccagtcgacacgcaggcgaagctctctgaggccgagggtgacccagtcgaggaccccactgggtacaggagtcttgccggtgcccttcagtacctcacctttaccaggccggacatctcctacgctgtgcagcaggtctgtctccatatgcacgacccccgggagccccacctcgcggctcttaagcgcctcctccgctacctccggggcaccatcgactacgggcttctgcttcaccggtccaccgcctccgagctggtcgtgtacaccgacgctgactgggccgggtgcccggacactcggcgctccacctccggctaagccgtcttcttaggcggcaacctggtgtcctggtcgtcgaagcgccaaccggtcgtctcccgctcgagcgccgaggcggagtaccgtgccgtggccaacggcgtggcggaggctgcgtggctctgaaagctcctcgctgagctccacagtcccctctccaggagcacgttggtctactgcgacaacgtcagcgtcgtctacctctccaccaacccggtgcagcaccagcggaccaagcatgtggagatcgatcttcacttcgttcgagatcgcgtcgccgtcggcgatgttcgggtactccacgtgccgaccacctcccagtttgccgacatcttcaccaagggacttccgtcctcgaccttcgccgagtttcgctcgagcctcaacatcagtagtggctagttgagtctgaggggggatcctatgctgtgacggaagttcggactgcggggggggggggggggggaggtgttagagtatatggggcccatgaggcccatgtatgaatatggtatagccaccctctagggttggcccaataagcaacttcactctctccaacagaggcctctggttctgctaacatattaagttgcatgtaccaacgagttcaacccaaaagattaaactgatgaagagatgtgggcaattcacttgtattttaacactcttctcaaatcgaggttctctcacgcttcagacgtggaataggagcgagcaataattattttatttaattgtgctaaccagtatttgaactcaagacctctggttttggtaccatattaagttacacgcatcgaccagttcaatgcaaaatattaagttgatggagagaggttcacttgtattctaacactcgtcacgtcgaggctctcttaggcagccccggtcctatgattttgagggccccgggcgaactgatcgtggtgggccctctagactataaaaaaattctatattatgcagcagagcatattaatatttcgtaaataaaagatgatgtgtattgaaattattttaaaaaatatataagaagctaggtaatatacatcgatacagattagcgcttcgcagtttgaaaaataagaacgacgatcgctgaataacctaaattctgattgctcgaccgtgcgtgtctggaggctagcgcagtggttcccagctccctggaattctggagggttggattggcgagatggcgaacgacgatcgcgtggagcgtgtggtctcatagacgctcggggacgtgagcgtgacgactgacaactgggcagtgggcaacggtgccacgtggtccgtgtgcgcccgggcgtccgtgtgcccagccctcctaccttgttggctacctatactattttaatactagcatataacccgtgctaacgctacgttcctgggaagaggagaggggtggacgatgacggtggtggcgcgaggagagggattgatggcggtggggacgcgaggaggggagggctaaaggatgatcaaataatattgtttattagatttgagtgagcaaaaaagatgatgttattcaacgatctgaaccgttgattttgatggtatgttaaatatgggtgcaatttgttttatggacttcgtaaatattataggtgtgtaggttatttggttagatgtgttttgtaaagtgtaaactggtgtattatatggtgttatagatactaaatattggtcccctaatagttttgggccccggccgtcgcctccgtcgcataggctcagggccggccctgctcttagtcctcgggcgtgaaataggagcagcatgtcagggaggcactgttcacccgattactgtagagcgtgaacaataccgagattagatcagattagattagttggtttgttaggcaaaaagataatgattagatcatattagttagggaagagataaggattagatcaaatttggttgataaggattggatcagattagttagagaagagataaagattagatcagatttgtttagttggaaagagataagtcagttgtctctataaaaggaacactattgtatcagttaagggtaaggaagaattagaagtacgccttcttcttgcctggccgtgggtagaggctctcgtccgacgttcctacaactacaactccctctccaattcctcaatcccattgtagtccataacagagcaataattattttatttaattgtgttaaccaggattcgagacctctagatctggtatcatattaaattgtatgcaccaactagttcaaccaaaaaacgtaagatgatggagagagttgagcaattcacttattctaacacatatatgatatatgagccatcccactattatgattgtttatatgggtttgtgtagtgaccccaagagtagctcaggactgcagttgaaagctgatgtatgggctcatgtatctaacactatctgttctgttcagacaatatatgtttcagtacctgtcatttatattcatgttactgatagaaccatgatatatactgggtagatccctggctaaccaaacaaatggtggagacatggattagtgcttatgggaaaatcatccccaacagggattgaagtgacagccagggatccactcatcccc

SEQ ID NO: 162 - DNA, 10456 bp, Zea mays
  Intron number 4 from transcript GRMZM2G138583_T01 (locus G RMZM2G138583) derived from phytozome v7.0 (chr-ID 5; pos 3 4786739 to 34797194 reverse strand)
ggccagctctacttttgcctgtagccggaaagaaggtactgcacatcattaatatttctatcactgaaccctttattaacataaacctgagtgccagactgccagcttccctgttttctttttggggtacttttcattcctttgttattagtaacctgtgttatactggccgtgatgaccactctcatgtggactttgttagctgattatacatcttacaattagaactagctgtatgttttcttgctttgagcaatcttgcattgcattttcttaatgttttaaatggcacattggtgacacaccgtgtcgtgatctaggcacggtgtcaatatgcaaggatcgggtcgctacttccatagtggcactggcacgctatgtcagcgtccgacacgccccccctggtgcataacaaaatgcatggtactcctataacatacacggcccaggcgctctaggctctttacggccacaccaagctctttcttcactaagctccaagtctttctctatccatgccgccgtcaatcgttgtcctcggcaatagtccctcgccacctcacgcatgctgtcaaacaccctggcactgcatgctctagtttctcttttctgcttcttatttttattcgattttgctcaattgaactgatagtccctatccctaacgtgtaaccttaaccctagtttactagtgtagataatgagtaatttctcttacttatagcaatagtttagtatacttgcatgcttgtattttggtatattctattaaaatgttttattacgtactaatgtgcttattatcgatcaatggtttcaagttgcccgactagctagtcgagacacctgagcgaccaggcgactaatcgcgattaatcgacgattaggtcgactaatcgggtcctagtcgacctgggcgtccctactggttctcctgcatatttacaggtacatgacctatatataattatatatatgtgtaataatgtaatattgatatatatatatatatatatatgcatatcatatagcaatatagcatataggaggcaaaaccaaagtaaccaaattaccaaacataacaaatatgaatactagaactggacaatggagagtgaacaattcagatttcagaacatcatagaaattatgaatactagaacatttagatttcgcaaactgagttggtcgtttactctgatgccgattgggcgggttgtcctgacacccgcagacccacctctggctatgctgtcttcttcggcgacaacctggtctcctggtcttccaagcgccagaatacggtttctcgctctagtgctgaagccgaataccgcgctgttgctaatgccgttgctgaggcaacttggcttcgacaactcttgactgaattgcatgctcctttgccgaagacgaccttggtatactgtgacaacatcagttctgtctacatgtcctccaaccccgttcagcaccagcgcaccaaacatgtggagatcgacattcatttcgtccaggaacatgttgctcttggcaatgtctgtgtcctacatgtaccgactgttaaggcccataaggcccatattgcctatatgcctatatatatgctacagtacccgtgggggtgattatctcgcttaatccaaggttagtaacatggtatcagaggaggtcacgaaaccctattttttttagccgccttcgcggctgtttcccgcccagccgccgtcgcggtccttccccacccagccgccgtcgtggctcttcatcttcctcatctagccgccgccgtcgcggatccggctgcccctgcctctgctccgtcgcgcggatcgccgcagtcgcggatccgccccttcctctgctccgtcgcggatccgactgcccctgcctctgctccgtcgcggatccgactgcccctgcctgctccgtcgcggatccagccgccatcgcggatccggcggatccggccgcccctcagcctctgcgcgcgaggcgccgcggatccggccgtcctgtcccgcgcggccgcggatccagcctttgcggcggccgtccctgtgcgcgcggatccagccgcgccgatcctgccgtccctgtgcgcagcgtgctcccctgtgctcctgcgcgcgaggtgccgcgcgctctgcgttcctgctgtccctgggtccctgtgcagatctgtctgctctgcatcttcaacaacagggacgctgtctgcctgctgtccctgcgccaatcgcagatttgcgcagatccgcccgccgttcctgcgcacggcctgctctgcgcaagatccgacgtccagggagtgcgcagatccggctgctgtcaaatcctgccgcatctgccgtcccgctgtccctcgtcaccatcgcagtcacctcgtcttgtgggcagggctgcagatctgcgccgttgctgtctctgcgcaggtggctgccattgcgggcagagttgaggtggccttgattttctgcagcagggtgacagctgctgtccatctcggttttcgctgcccaggatcttcgtcaagtcgtccaagtcgggctgctgtcagttgcggctcctctggtttgtttggtttcacttatttccattgaattcaatatgacgacaaatgctattgtggttaatatcactctcgatggtcaaaattatccggagtgggctttctgtgttgagactgcactccggggacatggattactcttccatttgactgatgcagcacctgttcttgctgatgatcgtcgcaatgctgctgatatcaaaacatggcagcttaatgatggtaaagtgatggctgctatggtgaacagcgtcaaaccgtctatgattatgagtctgtctaaattcaaaactgctaaatccatctggtctcatttgaaggagcgttttgttcaggatagtggtgctctattacacacccttatgcagcagacacatgttattgagcaaaatgatatgagtattgatgagtactactcagcctttgatcgcctgatgagtgctttgacatcaatggtgcctgcttgtactgctgatccatgtccggctcataagtttattgagaagttcttcacttacagatttgttatgggtgttcgggccgagtttgattctcttcgtgctcgtttacttcagggttctgacactctcacaatggctaaggcgctgtctgatttacttgctgaagagactcgtcttaactctctttcctctaatggtggtaatcctcacagtgtgttggctgctgcccagaaaacctaagaatatttttaagccttgtgatcactgtggcaagaccaatcatcgatctgagctttgctttgtcaagtttcctgagaagttgactgatttccgtgcacgacgtgctgctcgtggtcgtggtccaggaccatctaatagaggctcagttgctgttgctgccacttcgtccgcttgtacttcagagtcggcctgggtacttgattcaggagcttcctttcatgtcacatctgatcagtcaaagttggcttctactacacctgtcacaaatggtgcttcagtgcagacagctgatggtactgtatgccacattactcataagggttatctttcagatccacactttacagtacctaatattttctttgttcctgagctatctatggaccttctttcagtaggccaaattacggatcataattgctttgtcggatttgatgactcatcttgttttgtacaggaccttcgtacaggggaagtgattgggactggccgtcgccgtagagctgctcctcgcctctacatcttggactctttgcggcttccttccttggctacatctccagcgcatgtgctttcagctacccttgcttctgttgcgtcttttgcccagtggcatcatcgtctaggtcatttgtgtggatctagattgtctactctaataaagtcaggttgcttaggtcatacttcggttgagtctgattttcattgtaagggttgtcatcttggaaaacaaatacaacttccatattttactagtcattctcattctgttcaaccctttgatttggttcactctgatatttggggtcctgcaccttttgtgtcaaaaggtggatataaatactatgttatttttattgatgatcattctcgctacacttggatttatttcatgaaacgccgctctgagctgatttctatttataaaacctttgctcgtatgattcacactcaattttccactcacattaaaacctttcgttctgattctggtggtgaatatttatctgataatttccgccagtttttgacttcagagggtactcttgctcagctttcttgccctggtgctcatgcacagaacggtgtggctgaacgcaaacatcgtcacattatagaaactgctcgcactttgttgatatcttcttttgtcccgtcacatttttagggtgaagcagtttctactgcagtttacctcatcaatagacaaccgtcatccaaactctctggcaaaacacctggtgaagttcttttcggaactcctccacgatatgaccaccttcgagtttttggatgtacgtgttatgtactattatcacctcgtgaacgtactaaattgactgctcaatctgttgagtgtgtttttcttggatatagccctgaacataaaggctatcgatgttatgattcatcttctcgtcgcatgcgtatttctcgagatgtgagcttcaatgaaaatcgtcccttcttttacaactcttccactcattcttctttttattccacagagtctacctccttcatgagccttcctcccatttccgaaacttcatcagtatcaccacctactgtttctactccagatgtccttattcccatcacaccaccttccacttccacaacatctccgtcttactcttccaaaccacctgtcactcagacttacattcgtcgtcctcgctctactcccgcggccagtcctgatgacgatcctgttgatgatacttgtactaacaatgatgactctcatgttgtttttaatcaggggtatcatcttcgtgaccgtggcactattgcagctccagaacgttatgggttttcccgtgctggtgcagtcattgctgaaccatcatcttataaagaggcgtctggtatacctgagtggcagcttgctatgactgatgaattaaatgcccttcatcgcacatgtacatgggatgttgttccgttacctgctggtgttgtacctatcacgtgcaaatgggtattcaaggttaaaaccaaatctgatgggtctattgagcgatataaagctcgtcttgtggccagaggttttcaacagacatagggtattgactatgatgagacttttgcacctgtggcccatctgactactgtccgagctttacttgctgttgcagcctcatcttcttggactatctctcagatggatgtcaaaaatgcttttcttcatggtgatttacatgaggaagtctatatgcatccacctcctgggatagaggttccatcagggcatgtatgtcgtctccgtcgagccttgtatggtctcaaacaagctcctcgtgcttggtttgagagatttgtttctgtcatcaaggcttgtggtttctattctagtgatcatgatcctgcattgttcattcatgtttcttcacgaggacgcacgttgttattactatatgttgatgacatgttgattacaggcgatgatccagaccatattgctcatgtgaaggcgtctctgagtaaggaatttcaaatgtctgacttgggggcactcagttatttcttgggcattgaggttttgcagactcaaaatggtatttatctttctcaggccaagtacatacaagatcttcttgatcgttctggtcttagtgatactcgcactgttgccacgcctatggatctacacttatctcttcgtccgactgatgggacacctttggaggatccatctcgatacagacatcttgttggcagcttagtttatcttactgtcaccaggccagatattgctcatgcggttcagatcttgagtcagtttgtctctgctcctacatcagttcattatgggcacttacttcgtgtgcttagatatttacgggggacaaaaacacaatgtttattttatgactcaaattccccacttcagcttcacgcttactctgatgctacctgggccagtgatcctacagatcgtcgctccatcactggttactgtattcttcttggatcatcccctattgcttggaaatccaagaagcaaactgctgtatctagatctagtactgaagcagaacttcgagccctggctactactactgctgagattatctggattcgttggctcttggctgatctaggcgtttcttgtgactcgcctacacttcttcgctgtgacaacactggagctatacaaatttgtcatgatccagtgaagcgtgaactcacaaaacacattggtgttgatgtctcattcactagatctcattgtcatcagaagaccattgatcttcaatatgtgccttcagaattacagcttgcggatttcttcacaaaagcacaaactacggcacaacatcagtttcatctaatcaaactcaatgcttcaaatcctccacttccgccttgagtttgacagggggtgttaaggcccataaggcccatattgcctatatgcctatatatatgctacagtacccgtgggggtgattatctcgcttaatccaaggttagtaacaccgacgacttcacagtatgctgacgtcttcaccaaaggtctgccgtcttcggtgttcattgattttcggtccagcctcaacgttcgcccaacggacgtattgactgcggggtatgttagacagtaaatattcattgccttgtatataagcgtgatgcctggcttccataagcagccgaccagccttgtatagcaggttaggatagagagagatttggggaagagtctaggatggtaaggatcaattagggtcctgctgtttgcctgtttccttgtttaggaggtttcctttcgcctctggctcttcccctatatatgtaacaacactctactctatcaatacacacacaattcctgcattctacttcactcacatgttcaatgggaagaatggggacacaatctttaactttcagttagatgacttttgatgactccaatgagcgctttgtccgtaggattcaagaatatgaggctagaggcatagaaaagggtgaaaggggataaggcgatggacacttatggtatctcaattgagggatggagaatgcttcaggtacgtagctatagtatggctaaccaagttgttcaaccatatattccggtcaaacaagatgcctgacaagtggagaagtatattggtgccgatctacaaggataagagagatatttaaagttgtactaattaccggggaatcaagttgatgagtcgtaatatgaaggaatgggagagagttatcaagcatcgtctgagaggaataatgaggatatctatgaaccaacatggtttcatgcctggaaggtcaaccatggaagctattttcttaataagacaagtgatggaggagtatagggagcagaaacacctacacatagttttcattgatttggagaagacttacaataacatacataggaatattatgtggtgggctttggacaaacgtaaagttccaacgaagtacgttggactcattaaggacatgtacaacaatgttatgactagtctttgaacaagttacagagacacaaatgacttcctgattagaatagactacatcaaggatcaactttaagtccttatctttttgctttagtgatggataaggtcacaagggacatataagggatatcccttggtgtatgtttttttgccagtgatgtagtgctagttgataaaagttggacaagagtaaataggaaactaaagtcgtggcgggagactctagaatccaaaggttttagactcagtagaactaaaatcgaatatgtgagatatgacttcgacaccactacacatgaggaaggagatgttagtttggaaggtcaagtagtgtccagaaaggatacttttctgtatttaggatcaatgctacaaatagatggggatattgaagatgttagtagaatcaaatcatggtgaatgaagtggcgtcaagcatctggcgttgtatatgacaagagggtaccacagaagctaaaaagtaagttttatagaacaatttttatacttgctatgttgtattgtgtagaatattggcctacaaaatgatgacatgttcaacagataagtgttgtgaaaatgcatatgttgcattgaatttgtggccatacaagggatcgagtccggaacgataatatacatgataggctaggggtagcaccaattgaagaaaagcttgtccaaaataggttgggatggtttggatatgtccaacagagacctcgaaaggcaccaatgcgcagtggaattttaaggtgcgatagtaatgggaagagtctggagaaggtcaaagttgacatggaaagagatagtaaaaggaaacttgaagggatggaatacaacaagatttatccttgaatatgagtgcatgaaaaatagctacctagatgccgaaatcttgacttttggtttctgctgggtaaaaactctagcctactctaacttgtttgggattcaaaggctttgttttgttgtttaaacaacatttccttatagaagactattttttaacgattgacgtaggagaggtgtttcatttcattaagaagagaaagaaaataaggagaggccgatggctaactcccgcagatgtctagctacagacagccgtggcggaggacgacttagatttaaggtatgacgagttcgtttcatatcaagatcaagactcattcattaacacatcaactagggctaacaattaatagtctttagctaggagtgggagccattagccgagaggccatgggcacatgcgatgaaagcaacatgttggctaaagggaaaaaatcacgagtgttggggcgaagacatagggcctgtttggttcagctttttttgaccagcttttctgagaatttggttgtggagagaatctggctgtgggaagaatctgagtattgtgtgcattacgtgcggaggaagatgaagtggtcgaaagggttcatgatctagaaaggaacaaatgtctactatcgtgacgattcgaccgattttgtgttcatgttgattttggaaggtttttaccaaagcgattcttatagaagctggctgaaaagctggggcgtttggcgatctgcagcagcttttggtggccagaagctgtaaaaagccgaaacaaacggggccataatcagccttcgaccactcgtactcaccaatcacagatttctaatgcaggataaccggctaggggaagcgaaggcaaacacggtggctcgacctctacgaactagagccttttcagttagaccaccttgaggagaagcgaaggcctaaggcgaggacacgggcatatgaaatgcgcctcaacaagcgaaggcctatggtgttgggcggaggctaaccccgaccttgatccttcctaacaaccgcgaaggctacttggttacgtagggaccctggcgatacttcgatgaggggccgcactatcggcaagggcaggcgggggttaggacgtgtcgaaggcccccgaagcaccgaacgaagactcagcaaccaccagccgctaccgaccacgcgaggtcgctcctctctagcgggtctccgtggggcaacctttctctgaagaccccacgcggagtccacaagggcgtacccagtgccgtaggcttcccgcactgtgcggggtctggggaagggtatctttaagcgctaagccttacccgcataatatgcagaggctggggctcgaacccgggaccttccggttacagacggtaggctctaccgctgcactaggcccgcccttcacgcggagtccacaagacgagtcaaatttgaataagagttttaatccccctcaatcccctccaatccctgtgcaaccgaacaaagcctcaggggtggccaaacccatccttttctttcttaatgaaatgacacataactttcttgcgtggtttgagaaaaaaaaagacctctactatattttaatgtagaaatgcatttgttccacattcaattccttagtacactttgcaaaagtagacatagggattaatagcaaggatgaatctgttattcttgttgtgcaagaggcacatatttggcttttagcttcctagagtaatttccaaaaagtactttcttttttctgttgttttgtgctgaatggtggatattatgtgttaacgtactactcataaggcttttggctgatactgcagatatatagtgaagaagacagatcaaaa

SEQ ID NO: 163 - DNA, 2120 bp, Zea mays
  Intron number 6 from transcript GRMZM2G073934_T03 (locus G RMZM2G073934) derived from phytozome v7.0 (chr-ID 5; pos 2 1573559 to 21575678 reverse strand)
agaaggctgtccagcttaattggaatagcccacaggttagcattaaatcattattttatcttgagttcttgagtgcagattatattataaaacgaaaatataaaaggctccgatctgagttaatggacgatcaatgtgcacatataactgatataatgaccatcatggttcagtggagttaagtgtgaatccattgagaatgtcgcactcacacacatggttagacaatagaatgatgcccttttgtagtgactaggtcaatgtctatgtgttgcagcgggaacaaaaattaagacaaaagtaatccaggtttgcacatgtattgtatcatgacagaaaaacaatattcacaacatgtcagtttgtagctgactgtctcatatatgagtgttaaattgcatttgactgatagtcataatgggtatcggatggtgaggactgaggagcctgggagcacatctatttgattattgttaggcattgaacaaaagcaataacattcacttagtacagtgtttgaaatgcgcacttgttagagaagcaaatcaatgaacagttggcatgcacaaacaaaatgttgcagcttccctatgtacctttattgccaaagtgcaaatggataatgcaatgatgatctgtgcgagcatgtcccccagcggatttcaacatgcctgcacctcttcatcgtagccactgctgctaccctttcatttgctcacctcaaagtgcaggcatgcaaagccactgctgctaccatttcacatgcctgcacctcttgatctgtgcgagaaatgagaaatatttcttcaattttttctttacaaaatgaagaagcgtagagatcatatgttcattcgtgcaatgcattccactcctttccttcaatgctgcctccttcctttgtctattcacggtgaattcaagctcgaatttagatgttgaggctacttggcagtttggaaattgacgtaccgaatggccatgctcgcaggcgagggtgagaggccgacctcacacatcttactgcattgcacacccctacttgcgccacaacctcatcaccggccttgcaatgctatccactgccgtctttacacagttctgcgagtgcatccaacttcgaacccgagacagctcaagccgagggggacgcgactcagggcggggcggggttgcgggcgctaggggagacatattgagacggtggaccaaggaaaaattgcggctctcctcactgtaggatcttgcctaagggacctgccacatgcgatttagtgctgctccccggtgggcctgtgtcatgccgttgtgagatctgggagatagccatgggatgtgcaggatttgcccccattgttggtggagggagggagggagggagacggttaccagctctttgctgtgtgagtaggaggcgttgaagaaggggaatgcaaatgagattgggcgagcaccaccagatgagcaagagatgtttgcgacaggtgtcacaggcgagcaccaccacgggctcatgtagcggcgtaaatcaatgctcgtgtgatttgcacctattgcaaaactggggtggaagtgccaggtccaccggtcggcgtcaagggactttggctgcagctcgcagggtcgccgcacaaagacctgttggatgaaagcgttcaagtctttttatgtgtaatagatagctgttttttcttctaatttatcaattaaagaaagaaaaaacttgttgctggtcaagaaatcagagcttgccatggcttattcttactgtttaaattcctgtgatcttttgttaccaaaattctttataaatcaatataaagaaatatttttttatgaaagggtcttgttttttcgggcccatttctctccaccagcatttgaccaaatccatgaaatgagatgttctgatatcggtctattttggaccttctttctttttttaatttaaagatgcacagctcttccgcgctttcgaggaaaaaaaagagatgttctgatatcacttcaacttgaaacttctaatcttgaatttttattagccagtgttgctgctttcttaatttccttccttttcgattgcaggctctcaataactggggtcttgggctacaggtaca

SEQ ID NO: 164 - DNA, 5328 bp, Zea mays
  Intron number 1 from transcript GRMZM2G140590_T05 (locus G RMZM2G140590) derived from phytozome v7.0 (chr-ID 8; pos 1 15015594 to 115020921)
gggggcggccaaggagggcggtgcgcgcaaggacggtacgtcggatcttcgcgtcacccgggtcgaatcaggtggcgttccttggaatttggaaagagctggatcttggatgcgtttgtggtaggaaatgacccttaatttcttgtgaagtggcccgctgatgcgtgcaaagccgggatttgggtgggtagtgttacagaatgagcgaagctagctgttgtggccgtattttaactgtttatgttattggatttagatatgatagagctgaagttaatctctcctatttcgtttatcaaacggcatttagcatttgtggaattagtatttatgttggggtatatgatgaagtgatgttagcttaccttgttcgaggagtttaatatgtggaagagaggacgactatcagagttctatgcacctttcttcatgaaggggagagctttgtgcatcctttgttcataaagtagctgggataatatcccttaaactaaaaaaggaccataaccatcgccttggaagtcatagagtagtagagcttaggctcataaaaaatatgttctttcacagataagaactgacaaatatttgttgagtaaatttcattgaaccaccacatagatgatacaagtgggtacccaatgctattttagttcatctctccccaccaaaattagttattacatgtcatgctgttttagttcacttcagaaagttttgatcaccccagtgaacccagcaagtggaccttgcatccctaaccccagatccttgtcttaactgggaagactgaagccaaatttatttcaagtcagctcgtttcttgttttgtaaaacacgcacgaacatactctgtggacaatggggtgggtgggtatgttatatgtttatcttctattaatgtaaatacacaattctcctgtgtattcacagaaaaagaaaagaaaaccagactcatgtcttgccaagcgaaactaccactggttttggcccccttccacaaactaccactattctcctcctacattatcctgagcagtgagcatctgagccaactcggcagtgtcacatagtgcaaaacagagtaaaacaaagtagtggtaaaatgtgacaatgacaagtgggcccaggtgctgaggatactgtaggaggcatagctttatgagaagcgcccaaagtagtgtggttctgtgaaatggccttcagaagttatgtgacagttaggacagaaatgtggtagttttgggaaatttactctgatttgtttgatgatgattattgagcacatatctgcctgccatatcccctagattttgccctgcactctataatcatgtgatattgattagcatcagtagcttcggttttatcttttctttgtttgttatgtatttcaccagtagatttaagtatccctttatttatttatttttcttgaaagcgcaggagaactgcgcgataatatattaaagaagaggggcagatacaagaacaaactgggggcccctacggcggccaataacaggcatacagaaacccatccatgactaaaaaactaacaagaactaccacaatgctagctaactagcagggaggcccagaatgggggcggtgagcaaagacaactttgcacaagccatcttccaaaggtcaacctccaacccaactcttctaattgcgtcagcaatactggggctcttactgtcaaatacacagccattgcgctgcttccataaggtccaaactcccagaatgactagagaattgaggccatcccttgcaattccagagtccttagtgcataacgttctccaccattcaaggaaggcactatcctcagattggggggcaagaagctgaaggttcacttgaagaagcagtttgaaccaaaattctcgagcaaaaacacatccaatcaacatatggtccaaggtttcttgatcctggtcacataatggacatctctccggatggtccatgcctcttttctgcagcctataattatatgctgtccaaaccttcctgtgtgcgaccaaccacataaaaaacttggtttttggaggagcccaagttttccatattctatgaaaaggctcaaactcagaagatcccataaagaaacccctatatgcttcctttgaggagaactttccgtttgaagctaggcggaaaaaaaatgcttgtcttcaacttgaggtcttagaacaattgagtcaattaaatcccacaagatgagaaattcattgataattccaacagaaagagctccctgaatgtcagaaatccagctctgattagagatagcatccaccactgttctcttgttaacccttctcttaggaaaagtatccctttatttatcacttaattcttccagtttaaaaaatcagctgtattaggattttaggtagtcaaatttctttaacttagcccatcaatacatgcacagttacataagttgacaacacatgattgattttattagattttttgtagaccaaggcatttagccctgcttattttgaaagcatcacataagttttgctggggataccagtttacaagaactgcggagcccagttaaaactcacctccactaaaagccaacaccaggccctacccaaccagagaaacactaacaaaacaggtaggttgctacaacgaaaaacaaaaaggaggaaaccacagcaagagagaaattctgaatagcaaaatgaaaagaaggaacagctaagccacagatgctttgcctttagcctcctttttcttcatgtcttttggcaaccagacgctcctagttgtttgacaccatctttccgtctaggcacatttcactatcttgaaagtccatcctttatcttcaacaggaattcctccatcttgtctctgtcttccttcttcgtcgtcatctgccactggtttagaaaaccaagacattgaagccacttgtttaggagatttaagcatttttttggagaaaactagaccatttcttgttttccacaacacccaatccacaccaactactatcacccacaaggacttgttcctatctccaccatctttgttcaggcacagctcctggaatttatcaacgatggtggtattttcggccagcccaagctgtcctgacccagcaccaggccaccatcgctataaggcatctgaacagcagatggtccacttgatttttactagatagcatataacttccactatttcgaatgatatatcactacaaaaatcacaagtaaaagtgtcacattggagactgtcactttcttaaatgacttacatttggaatcagaaggagtactatgtttttagattaaagtccatatcagtgggaatgggatggtcaaactttgctctgagagactagatattcacattttaatcacgtgaaaaaacaaaatatatacactgttgcattatttggtgggcttagacactattgtacatcagtgggatatggaatgtgcatattagaattgttatagtttgttagttgcgtagttaatacatgtatgttttcagttatatatattagacctttataagaaacacaactctgtatatttgcaagtatggaacgtggccgacaatattattttacaccaggaggtgccttagcagcacaggtggcgccttagtctggttcctgttctagtaaggctgcatacaatgcattcttctttgtgtccatcaagtttgtgccttggaggagaatttggagatcctcggcaaccctggggtgtaaattttttttgtgtcttgctgtcaaaaagtggtctggatggctaatcaaaattgtacaaacaatattgtacaaacatagtttaacgcatcctgctgctagcttattgtgtgatcaagctgaagagaccatcctgcatattttagtttcttgtattttcgctcggcaggtctggaccttggtattacagaagcttggacttgtggcactagcacctgattctgatgtaacaagtttccccagctggtggtgtggtgctatcaagaagatacctaaggacgtgaggaaatgatttaacacttaaattatcctggtagcttggaaaatatggaagcatcgaaatgcatgtgttagctcaaacgtgcaaatggttttacaggcggtgggtactgagagaatcctttggtgctctccaggagcttctgctctttaggagctgctcccccccccccccttcagattaggtttgagttttcctggttgtggttatttgtattttttttaggtgtgggtgtgtgagtctcaaggttttcctgggagaaggttccatgccctctccccctggtgttctttcttccatcttaatgaaatgacatgcagctcttctgcatggttcgagaaaaaaattactgtaaggtatctctatctaatatcagaagcaatatggtttcttctagaaaccttcttgaactgtgcacatgaacagccatgttgtcccctgtctttccgttatcatccatgacgcttggaactagagttgtttatgtgcaaagttcagaatctatcttttgtatgccttctatgatccagtaagaatcaaaacacaattcacattctatcaatgcttactggtcaaacagtccatgtaccaaacggcaaacctcttactcatacatgcatgcagatgcaggcggcgtgttcgagcccaacacaccacatcattagagcatttgttttacaaaagaggctgccatggcatttttttatgaaagaagagatctgtgaggggaaaggataagctgtgctgtgtgcttgagcacatgagtctcatacgttattaggctgggagtgggagcgctggttgaggttaaagtgtgctggaccaggaagtggtggcccaagttgacctttattcattttattgtattacttttattgttctctttaaaacatgtaatttatgtatagcccaataaagatgtgcatcaaccagttgcttggaccctgggtcatcggcctcataaacttgggttgggtttgcataccaagtcctaaattgtcattaaatgatatattctattttctaaatgttgacagtaagatcgttactcttagcaacacatgggtatgtttgctagtaaagataggtgctaagtgctctagatcaacttattccgaaatacttgatgcaccgaatttcttttagttttcatttactgctttaacttcgcattttcggttgtagttcatcttgattatgttgaaccctttaacccggatgtgacctaactctagactaacttctgctttagataaatcaaaaccacagggtggactagactctaagaagg

SEQ ID NO: 165 - DNA, 5754 bp, Zea mays
  Intron number 1 from transcript GRMZM2G107985_T02 (locus G RMZM2G107985) derived from phytozome v7.0 (chr-ID 8; pos 1 55017977 to 155023730 reverse strand)
catcgtgcccttcaccagcgacgagcacccaacaggtatgcccaccctctgtctccattgagggaccttcacgggcggaaccaggataaaatgtgattgagggtatacttccaacaactaacgagataattgccattatggacgaagagaggagaggattcgacgaaatggaggcgttggcgttggcttctctgttctggagacgcagcgacagccaaactccaaaacggaaatgagacagcgcttggagctgcgttaacaggtattagtttcctctctccgtttaccgttcgcctgcgcagacggcgtacctggctgttcgtctctacgccgtctctggcaggttctcccccccactcctctccgtctccgatcccgtccgcattgcttcgcgccggaccaaggaggaagggtcggcgtcgcaggcattgcagtctgctagccacgaggccatggacccgtgcccgttcgtgcgggtgctggtcggcaacctggcgctgaagatgccggcatcaggggggaaggaacttggtgccactgccactaaccgcgagcgcaggtcgctgttgctgcggcaggagaacttgcacgtgaacatgggctgcttcatgctccccttaacctggagcaactgcgggctgcactcggtctcgccgtcgaactcgaagacgaacctcgggtcaggctcgcccaggactcttgtaccatactgtattattagttttcgcatcactagcagaaactttggcaatcgtaactttgcaaagcattaggtcagtggcgaagactaaaaatcgtatcgatcttataactaaaaaatgtatcaatatttggtcagtggcggagactatgcaaatctgagtatatgacagataaacagaacaaaagaacttcaatttcagaatggagataagcatatctcgaagctgctggagactcgagaaaaagagacatacaaaaaaatctgtaacagagaccatcatacacacatctggaatcttgagcactgcttgcgtccaaactactcataaactaggggctgcttcatgctccccttaacctggagctgcttcatgctccccttaacctggagcacctgcgggctgtactcggtctcgccgtcgaactcgaagacgaacctcgggtcaggctcgcccaggacggtgaggttgagctgcacgcgcggcgttggccgccgctggcttcccggcgccgcgcttgccgatgtcgaaccagccgttgaggaagacgaagggctcggccacggcgcgcctgcatgtcagacaatcagaagatgtagcattcaaattgatacatggtgacaaacaaatattttgcaggtcgccgctggctcatatccttgccgggtgtgccagagttcgctgagcgcgcggaggcggtgggagtagtcggcgacggcgaggaagcaccgcgctgactgccacaccgtcaggatctgcggcagccggtgcagcgtctgcagcctaagcgcgtccgcctgcaatgtaacccatgtacgccgcaagaagagacggtgtagagacgagtgcgccagacggcgtctgcgcaggcgaacggtaaacggagagaggaaactaatacctgttaacgcagctccaagcgttgtcttctttccgttttggagtttggctgtcgcctgcgtctccagaacagagaagccaacgccaacgcctccatttcgtcgaatcccctcctctcttcgtccataatggcaattatctcacaactaacactaaaatgtcagagcgaggacatctaatctattaggctctactacttgcaatagacaaatgagcagaggcatatgcccttactaggttacatgtaggtccgcccctgggttccttaatcgatgacaaaccatgttttcaccctcgcccgtcgctccttccaccaccgctccctctgctcgtctgcccgctacggtgttgcctcgtcaccttttgttttgaaacaaatcgggggcgatgccgacctatcattgatagactgaagacgtcagcattcgagtagaatgataaacgcagtatacagtgacggacccagaaatctttgagagcctgggcaaatatagtactcatactataaaatatagttttgtctagttttttatctacatttaactatattttactgcttggtgcatgtttacaagttgagtaaaatacattttcggtccttaaacttgtcgccctgtgtcatccttgtccacaaacttttaaagtgtatcggcccgatccttaatcgatgttcgggtctcagttaggttcaaatgggtcgcgattgacatatagaccgcacatgtcagccgacaatgattttaagtcgcctagtcgtctggtcgaaccctgagaccgaccaggcgactagtcgcgattaggtgacgactagggcgactagtcgacccctaatcggtcctagccggtccctggtcgttctagactagtagttatacttatataggtatatatataaatataattgtatacattatataaattagaacaaacaactaggataaacaaagtaacatattgcttcattgtttagggtttagggggagaagtgggggagcaggagggaccttcagatgacgtgctcatctcgtcactggttcgcagccaccgccggttggagactgcagcagtgcagcaggcgagcagaactgcaggagaaggggcaggggacacagggtgttgtagccgccggcaatcaggagttcaggactgcaggggcggtgccaagagaggagaggagaggagacgagacgtgtagattggagactgttggcggctaggttagaacagagaggagagggtactctaaattagactgtagatgggctaaaaaagtcccaataactaaaccctagccgggatgactaggacacataactcggatgactagtcgtcctagtcgacgattagtcggacgaccaagacgactaggtcttctagtcgagtcgtccagcaaatcgtgtcataattgccgaccagcccgactaatcgtgatcggacgacttgaaatcattgtcagccggtgtatctgttttctctcttttcttggttctctctcaccggacacgtggaaaagggagagaaaacatatacacaggctgacatgtggggtccatatatcaaacacgacccgtttggacctaactgagacccgaatagcgattaaggaccgagatgacacactttagaagtttgtggaccgggatgacatagggcgacaagtttaaggaccgaaaatgtattttactcatacaagttcattagcactaatgcaggagtctgggcaagagcccgggcttgcttgcacttgggtccagtcgtggcggtacatgagttcagaagttacatgtgtgccccattgaacaatagactccctgtcacgagcggggaatcaatggcaccaaatgttgaggtcactagtaatctttgcgagaagcacacgcacaggagggtcctcgttcctgaagacataaattatttctatcctcacatattctccacagaatgacgcctcggaccaccggctgaattccctgcgaacaacgtcggcatgattggggggggggggagaccgttccaagctggcaacctgaaggctaagcaagcgccacaaactcttgatcctagcacattctacaaagttgtgaaggttgtcttccagcgcctcgccacaatgggcacacctagcgtcggggagaatgttcttcttgaacaagtttcctcgagtatttaacctgttcttaaaaagaggccataggaaaatcttcagtttgcctcaccacctttcttgtgtccgaggcccgaggggacgggatgcagctgccgcagcctgtaggcgcctgctttttcttggatcttcattttgttgattgccggtgctagacatcttgaggcattgggtcttagtgctgcagttattaggttcagggatcttttgggtgattagtgaagagcagttgtgtgcagttgggtgtgtgtggcctgctggcacttttgctgtttgtctccttttgcgtactgctgttttcatgcgcagaaagaggctgcagttctgtgcgcagcaggagtctggtggtcttatgttctgccttttttggcattgtactttggtccattttggactgtttttctctcttaatttaatggtgcgcaactctcctgcgcgttcacgattttttttttgttgatgattgggtgagaggtttcttaggttatttatttagtaccagcactagcatcttccctagatggctacattgctataggttttgtgatggatggttcatctgttgaagtttgtaccagcactagcatcttccctagatggctacattgtgttaggttttgtgatggatggttcatcagtggaagtttggtggcatatgaaagtttgctctatctatcaataaaatattactggaatggacgaaatgctgtatctatgttgaattttgcttttattttgttgaagctgctactcattctggtctgtggatgctgtgcttgccaattgtgctaactgcagtatgaaattcttctgtttgatacttcgattcgctactataatcttcagaggaatgcaccctactcgcttccaacttggtcgcatgtttagtctgttatgattttccagtacttacgaggatgtgctgaaatgtgattgattaaactgtcaattttaccgattataatcttagctattgcctgtgaatgattttatggtagctatgttcgtgcctgaaccttgacttgtggcttcggttgggtttcaactctagcctactccaacttgcttgggactaaaaggctttgtcgttgttgtacgtttgttctgaaaattttcagaaaccctgcccttgtgtccaaagagagagattatttctgcttcagtgcaattccctcgagatttgagcaatgcaagtccttcaaatttacgtattcatcaatattatatatcaacttatcaaggcattgtatattcacctctctggagttgtataaatgcttcttagacttagtgcactaaggctccatttctgctcttttaaatccgagggcggtgtttattttggttgatgtaagatctacatgtgatgtttataggttagtagtttaaagttgaatttcaattgattggcatgactcccgagccaacttgtcacagcttacaatgtcttttctgttctgtatttagaaaatcaactccttcaatttgtgtgaggaattgagtttactgctaccgcttcctgcaaagttttatgcagttgtcagttatatgtttagtatatagtacagggtatactccgttgctgttacaattagcataaactcaagagaattcattgtttttgaccatgatttccagtctgataaatatttctgcactctgttttattgcttatgctaggaagaaggccagggctgaggtgacagttgggcatctatgtggccattcattttttttctttgtctagagacttggtattaaaccgaaaagtcatgtgcagtcatatggttgtcttgtcatttgcaaaccagaattgtcttcctgacttacaatccattgttgtcttgtcagaacacaagatcaatcaattttggtatcactatttttgtgaactataggaaccagagttgtcttgtgacaagtctaagcatcatagaagttttgaatctttctaattggttgttgatctgtccccaggtaatcatacac

SEQ ID NO: 166 - DNA, 7563 bp, Zea mays
  Intron number 1 from transcript GRMZM2G048800_T01 (locus G RMZM2G048800) derived from phytozome v7.0 (chr-ID 5; pos 1 70813837 to 170821399)
cgggcgggagggtccctctgttcggcgatctgcgggtaagtgctgcgcgcttttgatttcgtcgtggttatgctctgatcccgtgcggcgtggtggggatgggatgccatgggatcggccccgggctctctctctcccgttcctctttccctacggggcgcgtgctcgaattctgtcccgatctcaatggaacagtgcggtgcagtgcagtgcagtacgccatggaattctcgcaacgggttgggggagttttgcgagcctatagtgcacatctctttgtcctgtcatggtttacttgaacctgacaggcgtctgtttcgctgctccgcacctggaaatttctgcctgtttcaccgtgtgttatttgcggccggagttcccatctttcacgtggccgtggaccatgcgagctcagactggtgagcttcagcggggagctgcctttgaagcgcttctgccgagcggcgacaggccaacgttgggagtggcgacggcggctcagagtgaacttcgctctcttccctcctttttttttcctcggctcgttttcctctctctctctttgtcctccagttgtaagaacagaaaagacgcgggtggagatccgtgtctgccgcgccggcggcgcaggtttttaatgcacgcccgcggccgacctgccccgccgcgcccgcgcccgcgcccgcgcgcggccgtagtcgtatacagtcagtcagccggcggcgaggggcagggcacggcagagtgccaaactggtcactgctacgccgccacacgcctgctgctgtcacctcgctgtcggcctctgtctactacagctattggaaaaggagggcagctgtcttttctaccgtgctcctggtgcaagcgcacaggcagaccggcagggcagcagggttgctacagcatctgcttcgacctcgctgtcgggctctgtctactacgcctgccttgtcttgggatcccagtttggcgctgctccgcgcctccgctgctggtgtcgagctcattcggatttggtggtctcatatgctgatagcctgatagaacaacttgtagaggagaacaaaatgttttgagcaacaccaatgcagaccaacacgaagctgcaagttttacgaaaaatcttctgctgtattaggctttgcacaactcaaacatacaatgctccaacgcatgtagtaggagtgctgctttacctggacatgcagctcaacaacagactggcctgtttggttgatgacctggcctgagagtgctgaccatgcagatagatccaactactagacactcaaaatcaatggcctagttacctgtctggcccaagcaagtttgccaaggtcccaaccaaacaagccctataagggcttgttcggttagctctcaatccatgtggattgagtgggattgggtgagtttcaatcccaagcaatttaaagtatttctaaatttttttcaatcccatccaatccatatataatgggaataaccgaacaaggcctaagtggggtgaggtggagtgggggtaaagacctgtttagatcaatggtgctaaagtttagcactatatttttagataaattttagtatattgagatttaaacaggagtactaaattttagcattcaatagcagtttatctcttaaaagtatgtcctaactaagttgattagatggtctaagtaaaacttaggttttaagtacgacttcccatggaaacgaattttaggctaatattaaaaaaatctcttcgactgtcctacaccaccttttctctctcctcaaacttttaccttttttgaccaagtcacctagatacattaccaaaccatatcctccactctctcacccttccacttggtgttcaagcttacatagccctagcaaactaacaaataagttggggtgttagactggctaagtcagagtgcgtaggaacaaaagagcttatggtttaacgaaagataagctagttaagtcaaagttgagctagctaagagggaggagtgatgagcaaaaggtgaaagaggctatattttaacaaaagagtattctgtgttaatccattctgtttcttctatatctgcatggtggcggtttttagttgaagccaataatattattagcttgcattagggaactccttagctgcctcaaacatcatttatattgtaaatatgtggactatatggcttaaaggcttacccatcaattatcaattaagaaggatagggatggggtacacgtgttttagaccaacactaatgtagactaacacaagttggaggtttgagtaaaatgttgttgccatataatgaacaactattatttcaatgcatgtagtagaggggttgttccttcatctaagacatgtggcactgcaacatggctatgagccttagtttttcaaacgcaccttcttctctctcctcaatttcatttgcactaaccaagccaccctgacatactaccaaaccactttcccctgccctctcctccatgtagtgttcaagcctacatggacctaagatgctaacgatgggactggtgcattagggctggtcttatctaaaagtttgatgttacacaaaaattatatatacttcctagagtgtgtttggggcaaaagatccttactagtttgacaaatgatgacctagacgagagagatgagcaaaaggttaaaggaccattttttaccacaagatagtttgtaccaatctattccatttattcaatggctatgtggatggtggttcagttgaagctaacaatgttattagcttgcgttgggaaagccattatttgttgcctcaaacatcattttattttctgaatagagggactatatggctctaagccataccaatcaattatcaattaagaagaataggcatggaggacaaatgatttagagcaacaccaatataggccaacatgacttggaagtttgagtaaacaattgctgccatataggctttgagcaactgaaacaactattgtttcaatgatgtagtacaaggggtgttgcttcatatgggaaatgtggcacaacaacatgactagaaacctccacttttctcacacaccttctgtcggtgtttcgaacccgctccgataagtaaatttgtatgtgcgtgtttcgtggtccagatggtgtgctcggtgcgcgcaagatttatactggttcgagcagaacgtccttgcatccagtcttcggtgtctcacgctaccgtcacctttgttgctcaatgctcgtagtaggggttacaagcaggcgagagagggagaagctcccaagtctcttgtgtgtggatatacccaaagactacgggactagagttctatactaagccttggacgtcacggtggctctcaccttggctccggccttcgggtcttctggccttgtagtccgtgggcgagtgtgtatgcccgactttagtccttctcgtctcgtggtcgtcctcctccttttataggccaacgtggggccgatcaccggtagcttctttgagaaggagctactgggttgtggtaaaatgaagtgttatactctagttaggttgcgtttgtccgtatatgcctcggtcatctaggtttccctgatcgtgctctttatggcgggcggcgtggccgacgaagagctctgacaccagcattgtcgtctctgtgccgcgccgacccctggccggcgtagcctaggtctcgacacggcttgtcgagttgcggggcctgtaggcggtcagtgcactcaggcctaagcttgataggtcatcagtgggccataggcctaagagcccgtaggttatgagtggaaagtggaccgactcacactctatggctcggcacaacgagtcagtcctggactcctggttaggcgtggaattcactcgattggcttcctctcgatccgctcgaccccccttacgtctccgcctcgctcgatccttggctcggtgcctcgggtttatccggggataggtccttccggggtggacctttcccacgtccttctactgattagtggggcccaggtgcccggggatcatttccccgacaccttctctccttaaatctttacttcttttctaaccaagccaccctgacatgctaccaaacaacctccgttcatcctctctccttcatgtggtgtctgagcgtatgtggtcctatgaggttaataaaccatattggtgtgtgaaaggaaaatgggtcttaatccatttttatatttgttttggtgcttgattactatcacaaccatttggactaactagtttgctgagtttatgactcacaggttcataaaatcaactcctaggattctaagtccaaaatagctcaattttcaagccaaaaaagggtaacctttggagaagatgaaatttcagtattgaaacaccttggataagttctaaacaccccttagcatgtatttgaaccaaccaaagcaaatgtaaagattagattttaagtttcacaatttttgtagctaagttgagctgaaaccggaatatgagttatagaattcaaatcgactaagttttatgacttagactagttggatagtctctagatatatttgcctaagtcatgggaacaccctcatgtgcagccaaatcaagttgaagaagaattggataaatttgcaagaattgggttctactgtgttgcaccggaccggaccgtttatgcaaagagcctagaaacttgacttttggctactggcgcaccgaatcggtccggtggctatccataccagttttccagagagggctgaaaaatggtttctttgacctaatgcaaatatcattatgttttgaatagagggagtatattgcttaaagttataccaatcaattattaattaagaaggataggggtgtgtagttatcaattacgaaggatggattgaccggatgggcacaacatagttgcaatactagccaaataatatagtggtccctgtcatttgtgttgtttaatatcccatctgtctgaaatataaggacttataaaaagttatcataaattaaacaatataaagggaaaacccatcacatatttcattaaacatcttgggtagctccggattggtttaatttatggcggacgagctcctaattagtcagcgtacattagttaacttgtcatatgggatcctgtggattcttcgcattttcatattttggggaaaaataaatatacaagcacttagtttttgaaaggaatgcttactccatatacaagtagcccaatcactatgtttgaaggcttgtatcatcctctaaggaactgattatttggatgttgttgttttagaaaaccatgatgccaagcaactattgttttataaacttatggcatgtatgactcttggtatgaagatagctagggacggatccagcggtggggccccctatcactcccgagtccatagagccccactagaacccctcctaaaatataaaacatacatattataatctaattatgcatttgatggctttttatcatttatcagtgtattaatataatactacttcaatattttgtctgttgtaagtgattcaatgagattatatcgttgtagtggtctcttaatttttttagctccgtccctgaaggaagctagggttgagaaagcgcaagaggatgggctagacccttgcccacagccgaacaaaagggaagagtctttcttcttaattattatttttattagattgatacatctcatctccttatatagagagacatacttggcccctaagaaaatatcctaaccaaatcaatctaacttttctttccttatcttatccgcgaaagggcctctagctgagttggttaggtggtctgagtagcactcctcaggtcctgggttcgactccccgtgggagcgaattttcaggctgtggttaaaaaaatcccctcgtctgtcccacgccaaagcacaggtctaaggctcagccccggtcgtggtcgttctcacatgggcttcgatgccgctgtgtatgggtggggcaggggttcgggggttttcttgacctgtgtgagaaggtcttcttcttaatacaatgcccgggggctgtcttaccccccgcaggtcaagtttttccttatcttatcctaaccaaccaaatcaatctaacttatctatttccttattctaaccaaaccaatgtatctgttcgacactattcacacttgccataacactgctcaaccattctaaggcatctcgtcctcgagctatgctagtgattatgaccatagatgtcaatgttcctatagagatgcttggcttagaaaggcaccatccaaccaacgaagttgcatgtgtacaaccaactgaatcccatggcgtcgtccgaagggtgtcgacacatatgtttccgaaattggcatttttaatttaatttatatcattttatagtggaccagatgcctaagccaagaggttatagtggaggctagggttgatggggcacaaggggacgactatgggccttgtctacaaccgagcaaaagggaattgttttttccttcttaattattgccttattagattgatgcatctcctctccttatatagagaggcttatttgacccttaaaaatatcgtagccaaatcaatctaacttatctcttttcttatcttaactaaccaaatcttttcttgtcctaactaatcgaatcaaacttatctcttttcttgtcctgatcaaatcaatctatcagtatggtactgttcacacttgccataacaatgtggtttagaaaaagcatgtttcatatggagttgctaaaactctaaaaacactatagctttaggcctttagcaatgcggtggtttagagaagttaaagggctgttgcatcgaaacacatgacaacattcaaaaaccaaactagtttgcagtagcacaatatttatccaatatattactctaataataatttgcatccaaatatagcctttgtaatgcaacttgtttagtgtttgggaagagcagctgttctccacgattatgtaggattcgctgattgtaaaactatttcctgtctctaatataatgatgcatatttttctgcgtctttcgagaagaagtgccttcttgtaggaataggatatggcagcctctgctatgttcctccaggattttgtggttttgccacacacttgcgctttggtttgagttagcagtaggggtataaatctgtgcgtgtgtggggcaagttttagtaccatctgttctcactgtgttgatctactcgttgcatctgtgttgtgatgtcctataacctctttctttagtcatctcgtattctcgtctgatgtttaattgtgttcatttttttactgatcaattaggtgctgtgcaatttgttctaatttttgaatacctagtactttctgtgataccgtatctgtcgtccttaattattgctaacctttgtaaatcatgatttctcctatagccacatgatgtggacctgacgctctacattttgtcatgtttttttggcagttctaccaccatcgatttatactgtggct

SEQ ID NO: 167 - DNA, 18554 bp, Zea mays
  Intron number 3 from transcript GRMZM2G025867_T02 (locus G RMZM2G025867) derived from phytozome v7.0 (chr-ID 4; pos 1 69486145 to 169504698 reverse strand)
acacaaagttaggatcctcaacaacaaatacaaaggtactcaacaagtcctactcttccttatggagatggagttacattatatatgcaaagttcagctaggcgctagacggaatctaggcggtgacctattgcctagcgcctagtcgggagtactcggtcttaggcgcttttctagccgttttggcaatatagccataatatatatatatataactatatatacgtatataactactatatatgagtcacagtaagtataaaaagaaggccagtagacatatctgattcctagctgagcttactcttgcatgttcctagctcctgcaaggctgtaacacattttgacagctagtagttagtaaattagtcaatagacagctagctgttcatcgaaaaaatagaaaacactaaattgtgacttatctggatgatttcagcagcctcccattcatgagcagttgagcacaccatatcagcacctggtaattacaacacaagtggataggacagtaatacaagtgcagaatacaatttataaataaaggacatcacaagcacatagttcttagttcaggtctcacacaaaagaagacacacagacacaaagtgacatagttgtagttcataagaccagggcatcacaaaaggcttcactactagatggagatggtccagatcatatttcatcttcactgtagcacaaatcttcatcttcatactcttcttcttcatactcaaactcttctccttcatagagctttctcactcttgcacttctacgaggctcaagctgttattctgctcccactgcctctccaataacagaccaaggtatccctgtaccttccatctcatcttcctccccatctctaacgacaacttgtgcacaatcatctccaccctcttggagaaaaccttgagcttcagttgtatcactagacaagagaacatcaatgattttctttgacttaatcttttctctcttattcatcagcctgttattgaactgaatatagaccaacttgttgaggcgggttgtagtcagcctatttctcttcttagtgtgtatatataaattagaaacaaaagcattttcagttctgaaatttaatcatagtagtgctgaaatgattaatagataggtactaaccccttcaaacccactccaatttctttcacaaccagaagagcttgatgtcaaagataatatccttgtagccatcttctgtaaagctggtgtttcagttccatataaccgccaccatgatgctaaaataaattagaaacacctctattagtttaaaaaacaccaaacaaccatgttagaaaacagcaaacaaccatataataagtacctctacctggattgtaatcatagttttgaaaagttcttgcaagcttcttgctaaatggtccttctctattctgaatttttttaaattcaaagttgacagcctgttcttgttggtcctcatcatgataataaaattgctcgacacaagatatgaaggcttcattcattttgggctcatcaaagattgatgggttagcatagctatagtgtggattcagcaaaaaagctgtcaaatgcaatggagaatcaagtcttccattcatcttcttctcaattacagccataacatctttgaatcgagactcaacattgccaaaggcctctttgacctctctctttgcctttagtagctctccataaaggaaacccatggatggcttcacatccccatcaaccaaacggaggactttgaccaatggctcaaaaacagccaacattagcttcacatccttccaaaaggctggactcaatatagtagttgtggcctcttttcctttctttgatttcacatcctttaatgagtcccacctgctatgaaccaccatcttccttaactggtccttcttctcttgcatactgttcaaagtgagaaagtatgaaacaaacctagtcactcctggcctcactagctctttcccctctgtgaagtatctcaagcactccaatgttcttgtgtggccatacacaaatatggtaaatgactttgcttggtcaatcactttcctgaaccaaggcaagttgccaattccttggagcatcaagttgattgtgtgagttgcacaagaggtccaaaatatttgtggtctcttctcaagcaatagcttctttgctcccatgttgttagggcattgtcagtgactacttgcaccacattttcttcaccaatgtcttcaattgctttgtccactaattcaaaaatgacttcacttgtgtgtgacacatctgacatctcttttgagctgatgaaggaggttccatcagcacaattagtgcatatattcattatgcttctcctcttcctatctgaccaagcatcggtcataatagagcacacatttttcatcttctcggcttcacgttcctgcagcaaacacttggttctttcatattcttcttccagcaaactacctcgaaaggcatcttgagttggaggtgtaagtcctggtccaaattgtccaattgcttcacacatttgcttgaactcatcattatcacatgcattgaaaggtattcctgccaatgattaaaaaatgaagtctaattactgttcagttcatgaattttaaaatgtgaaaacaacatcgtatactagcaatttaccatgattataggcccatcttgcaataaacttgtgcacctcatgctctctttctttccatagttccttgttcagttgctgttgtttgaatgaatcagccttggtaggatcaatagcacgtgtccatttgtcaattggccctaatttgtgaggctgtgagcttccaacacaagtgacttcttctgactcctctccaaccctagatacattcacttcctctctaagttctagctcacgaacagtcttctcctccctcttcctttttgcagcctctattgctttcttgcacttctctttagcctctagagcctgcggtgttgcagacgtgcatttcttcacattatttccaacatgggcaagatgctccttcaacctataaatccctcctctcatctccttgtcacagaacttacacttcaccttgtctttgttgttagcatcaacaagaacaccatattcccatccaacatcatctgaatttctttttaggagattcgctctagccgcttcagtttcagaaggtgcagctgcagtttctgatgacatccttaatcctttcacttgtacaccgcaggctatcctttctcttgaccgcaggatgtagcatcccaaaaattcaaatcctgaaattttctcaaactcgccctaaattcaaaatgaatttcaaatttcatttcaaaatgtttgtttgcgagttgatatcagcaaataaaatatagtggtctatattctctccaaaatcctcctcaaatatcctacaaatgtttctctagtgaacccctcaaattctttccagaaataccgcccagatatttcccgagtaatcccctcaagttctttccagaaatattgcccagatattccaccgatatatctccaagtattttcctcttgagaaataccttcagaatcatttttcaagtccctataaatattttcttcataactttcctcatgctcatacgtatacgtatgcctctagtgtcatacggtgagctctacaagctaatctcacttatacaagacaaatacatgctaatctcccactaatcctctcatcctcccactaatcctctcatccgtccccctaatccccccaccatggctataaatacaggggcaagggcctcctctcatcccaccccaagccatttcatggcaactctcttcccccccacacacccactccatgttccacacaagcacacactagcacaaggatcgttcgatcgttcttcgatcgttcgtcccctgttcttagtttgttcgttcgtcagatcgttcgatccttcgtctgatcgttcatggttcgttcgtccgttcgtccgatcgttcgatcgttcgtctattcgttcgtccaaataatctttttcctaccgttatgctgccgaaattccgatcgttcgttcgttcgatcattcgatcgttcatcgttcgttcatagttcctattcatcgttcatcgttcgttcatagttcctattcatcgttcatcgttcgttcatagtccctattcatcgttcttctagataatctttgtcctgccgttatgctgccgaaattccgatcgttcgttcgtccgatcattcgatcgttcgttcgttcatcgttcctattcatcgttcatcgttcgttcatacgactattcaccatcagtatttaccattactattcatcattactattcaccgacactattcactatcgttactatttgttgttactattcatcatcgttactatttatcatcgttactactcatcgatgatatctatagtaactttttgtcgtcactattcatcgttactattaatcaattagccgatcaccccaaatttcaactactcatacatcatgctgtctagtccacctaagaccagccagatccatattccagtcatacgaactccggtgactgtgatttcccttctagtgggaacttcccatctggtcacccatcccaggtttctccaagttgagcacgcttaactttgagattccttcgaaccaggctcccaaactcagattccaataattctcgtttctaaattcttatcaaactattccctatccaaccatgtcatcccttaagcatggtccatattccagaaaactcccaaaatactcttgtctcatattctgcctataactcttctattcatactaagtcagacgattcattcgtcactattctcaccaacagtgaacttcactgtgctacaccacatacacccagctataaatacacccagctaccctctccctctccacacacactcaacaccctcagccaaggcaaacaccccacccactcagttactctgctctgccggctacacacgtagtgtcgcttcgcctccagtccaccctcctggtaagcacctccgctccaccactagtaatatcacaacaccacatgacacagattctactcaagactctacccatccatatatcgctattctgaccactatactaaatatttgttggtatacttgctggtttgtatgtttgcttgttcatgttgcatagttatcggagcgttcgtgccgtctcgtggaggccagatccgcaagtctacgctaggcggtggagccagaagccagttccgcgagctctccttcccccttcgccggataagcacagcaagctcactggatccctttgatgcataagttacctatgtttttcaaccacaaccatcagcctgttattttatgcatgatatgattttgagataagttattatggccacccaagccgcttgccgcaatcaatccttaatatatttgttacaaatgatttgagaaagggtgtgagttttcaaaagaaaatgcttttcaaaatgtgtatgatgaagggttttcacccttatcaccttgtgagtgggataatcagggactccctggtttaggggagggcctaaggtgttggctcagctggtttaggcgtgagcagaaggattgtcccctcatataaggaccggtttgtcatcttcactacctgtactctttaatagtacaaccactcgagactgtgtgggcagtcactcaatctgaactcgtgcggtccgaccccagggttatgaaggctggggagcaccgggaggataaggagggggaatgttttgtccgatttggacatggtggtggcctgactccttccggtataaccgttaaggttaggacgtgcagggaaagaaagagattcggattcggatctcattgatcatgagatcgcagagccggactagtgggtaaagtgtacacctccacgtagagtttgaaaacctattcgaatagtctgtgtccacaggaatggacgagtctggtgcggtatggcaattagtgttttgttttccaaaaaaagaggtgcttttgagaaaagtggtttttaaaaaggtccggcggttgagccgtgagctatggtggacgggaggtccagtagctgtttttgaaaatgaaaaccagtgggaaactgctgagatacctggatggtttagtccaggggattttgttctaatattgaaaaacttcctgctccttttggagaggatgcgctttgcgaaaatacaaaatgtttttcaaaacaaccctgcataaaataatgttgtttctgcaaaatatcctgagctccacatattccatgcattatatctgacttccccattccgcgggtgaaggtgggctgctgagtacgtttgtactcacccttgcttatttgttgtttttcagaaaaaggagatcgggtaagagttacgactgttcccaaccttgcctgtggctgttggaccgctgatttgcttcgctgcgtatatcgggctgctttagtcccactctgatgatatgtcccgagttgtggaccaactcttaaagttgatcgccaccgttataggtttgtctcgtttaagcagatctgaaatcatctgatgtataaatgtgtttactagcctcctgggactagtaattgtatcacatttgagtcccagaggattggggcgcttcacaggatctagaggctaaaagcaggggaggccaagttagcaggggagcggctggcggagggggatgagcaaggaggggagcagccgacgggggaggagaactcaccttgggagcagccggcggggaggggtgcggcggctgaacttcctccggcactggcactggcaggaagtagggccggcggggacgagggaggccggcggctgcacttccttcggcgcgggatagcgtctggattttgccgcgtggggaggagggaggccgagcgggatagcgtctggactgtggattttcccgcgcgggagcaggacggcgcgcgctaaaaactcggtcgcgcgctcccgctgcccgcctgcgcgcccgcctacggcgcctgtgatagtcgcctagagggggggtgaatagggcgaaactgaaatttacaaatataaacacaactacaagccgggttagcgttagaaatataaacgagtccgcgagagagggcgcaaaacaaatcccaagcgaataagcgagtgagacacggagatttgttttaccgaggttcggttcttgcaaacctactccccgttgaggaggccacaaaggccgggtctctttcaacccttccctctctcaaacggtcccttggaccgagtgagcttctcttctcaaatcaaagccgggaacaaaacttccccgcaagggccaccacacaattggtgcctcttgccttgattacaatggagtggtgatctcaagaacaagtgagaaagaaaagaagcaatccaagcgcaagagctcaaatgaacacggcaaatcgctctcactagtcactagggctttgtgtggaattggagaggatttgatctctttagtgtgtctagacttgaatgctagagctcttgtagtagttgagaagtggaaaacttggatgcaatgaatggtggggtggttggggtatttatagccccaaccaccaaacatgaccgttggctgggctgtctgttcgatggcgcaccggacagtccggtgcacaccggacagtccggtgcccctgccacgtcatcactgccgttggattctggccgttggagcttctgacttgtgggcccgcctggatgtccggtgcacaccggacaggtactgtttgctgtccggtgtgccagcatgggcgattctgacttctgcgcgcgcagagcgcgcattaaatgcgcggcagagagccgttggcgcggagacgaccgttgcttcggaggcgcaccggacagtccggtgtacaccggacagtccggtgaattatagcggactagccgttggcatttcccgaagctgacgagttcctgagggcgaccgcccttggcgcaccggacactgtccggtgtacaccggacagtccggtgaattatagctgagtcgccctggaaattcccgaaggtggcgagtttgagtctgagtcccctggtgcaccggacaggtactgttcactgtccggtggcacaccggacagttcggtgcgccagaccaggggtgccttcggttgcccctttgctcctttattgaatccaaaacttggtctttttatttgctgagggtgaaccttttacacctgtataatctacacacttgggcaaactagttagtccaattatttgtgttgggcaattcaaccaccaaaattatttaggaactaggtgtaagcctaattccctttcaatctccccctttttggtgattgatgccaacacaaaccaaagcaaatatagaagtgtacaattgaactagtttgcataatgtaagtgtaaaggttgcttggaattaagccaataaaactacttacaagatatgcatggaatgtttctttcttatttatcattttggaccacgcttgcaccacatgttttgtttttgcaaactcttttgtaaatcattttcaaagttcttttgcaaatagtcaaaggtaaatgaataagaatttttgcaaagcattttcaagatttgaaattttctccccctgatcctaatgctttttcttttgactaaacaaaactccccctaaatgagatcctcctcttagtgttcaagagggttttgatgtatcattttgaaatactactttctcccctttttgaacacaataggataccaattgaaaaatattcaacactgagtttttgaaattttgaaataggtggtggtgcggtccttttgctttgggccatttctccccctttttggcatgaatcgccaaaaacggaatcattagagccctcgaaggctttcttcccctttggtaatgaataatgagttaagattataccaaagacgaagtccttttgcttggtgctcatgttttctccccctagaacggagagttgcttggagcgacggcgaaggatgagttacgtagtggaagcctttgtcttcgccgaagactctaattccctttcaatatacctatgacttggtttgaaatagacttgaaaacacattagtcatagcatataaaagagacaggattaaaggtatataaaagagcaatgtgtgcaatctagcaaaagaaattgcgtaaatcaagaatattgagctcatgcctaagtttgttaaaagattgttcatcaagaggcttggtaaagatatcggctaattgatctttagtattaatgtatgaaatctcgatatctcccttttgttggtgatccctcaaaaagtgataccgaatggctatgtgcttagtgcggctatgctcgacgggattgtcggccattttgattgcactctcattgtcacatagcaaagggactttggttaatttgtaaccgtagtcccgcagggtttgcctcatccaaagcaattgcgcgcaacaatggcctgcggcaatgtactcggcttcggcggtggaaagagcgaccgaattttgcttctttgaagcccaagacaccaaggatcttcccaagaactggcaagtccccgatgtgctcttcctattgattttgcaccccgcccaatcggcatccgaatatccaatcaaatcaaatgtggatcccctaggataccaaagcccaaacttaggagtataagccaaatatctcaagattcgttttacggccgtaaggtgagcttccttagggtcggcttggaatcttgcacacatgcatacggaaagcataatatccggtcgagatgcacataagtagagtaaagaacctatcatcgaccggtataccttttgatccacggacttacctcccgtgtcgaggtcgagatgcccattagttcccatgggtgtcttgatgggtttggcatccttcattccaaacttggttaagatgtcttgagtgtatttcgtttggctaatgaaggtgccctcttggagttgctttacttggaatcctaagaaatacttcaactcccccatcatagacatctcgaatttttgtgtcatgatcctactaaactcttcacatgtagactcgttagtagacccaaatataatatcatcaacataaatttggcatacaaacaagtcattttcaagagttttagtaaagagtgtaggatcggctttaccgactttgaagccattagcaataaggaaatctctaaggcattcataccatgctcttggggcttgcttgagcccataaagcgccttagagagcttatagacatggttaggatactcactgtcttcaaagccgggaggttgctcaacatagacctcttccttgattggtccattgaggaaggcacttttcacgttcatttgataaagcttaaagccatggtaagtagcataggccaataatatgcgaattgactcaagcctagctacgggtgcataggtttcaccgaaatccaaaccttcgacttgggagtatcccttggccacaagtcgagctttgttccttgtcaccacaccatgctcgtcttgcttgttgcggaagacccatttggttcctacaacattttggttaggacgtggaactaaatgccatacctcgttcctagtgaagttgttgagctcctcttgcattgccaccacccaatccgaatcttggagtgcttcctctaccctgtgtggctcaatagaggaaacaaacgagtaatgttcacaaaaatgggcaacacgagatcgagtagttacccccttatgaatgtcgccgaggatggtgtcgacggggtgatctcgttgaattgcttggtggactcttgggtgtagcggcctttgctcttcatcctccttatcttccttatttacatctcccccttgatcatggccatcatcttgaggtggctcatttgattgatcttcttcttcatcaacttgagcgtcatcctcattttgagttggtggagatgcttgcatggaggaggatggttgatcttgtgcaatcggaggctcttcggattccttaggacacacatccccaatggacatgttccttagcgctatgcatggagcctgttcttcacctatctcatcaagatcaacttgctctacttgagagccgttagtttcatcaaacacaacgtcacatgagacttcaactagtccagtggacttgttaaagaccctatatgcccttgtgtttgagtcataaccaagtaaaaagccttctacagttttaggagcaaatttagattttctacctcttttaacaagaataaaacatttgctaccaaaaactctaaagtatgaaatgttgggctttttaccggttaggagttcatatgatgtcttcttgaggattcggtgaagatataaccggttgatggcgtagcaggcggtgttgaccgcttcggcccaaaaccggtccggtgtcttgtactcatcaagcatggttcttgccatgtccaatagagttcgattctttctctccactacaccattttgttgtggcgtgtagggagaggagaactcatgcttgatgccctcctcctcaaggaagccttcaatttgtgagttcttgaactccgtcccgttgtcgcttcttattttcttgatccttaagccgaactcattttgagcccgtctcaagaatccctttaaggtctcttgggtttgagatttttcctgtaaaaagaatacccaagtgaagcgagaataatcatccacaataactagacagtacttactcccgccgatgcttatgtaagcgatcgggccgaatagatccatgtgtaggagctccagtggcctgtcggtcgtcattatgttcttgtgtggatgatgagctccaacctgctttcccgcctggcatgcgctacaaaccctgtctttctcaaaatgaacatttgttaatcctaaaatgtgttctccctttagaagcttgtgaagattcttcatcccaacatgtgctagtcggcgatgccagagccagcccatgttagtcttagcaattaagcaagtgtcgagttcagctctatcaaaatctaccaagtatagctgaccctctaacactcccttaaatgctattgaatcatcacttcttctaaagacagtgacacctacatcagtgaatagacagttgtagcccatttgacacaattgggatacggaaagcaaattgtagtctaaagaatcaacaagaaaaacattggaaatagaatggtcaggagatatagcaattttaccaagtcctttgaccaaaccttgatttccatccccgaatgtgatagcttgttggggatcttggtttttctcatatgaggagaacatccttttctccccggtcatgtggtttgtgcacccgctgtcgagtatccaacttgagcccccggatgcataaacctacaaaacaattttagttcttgactttaggtacccaaacggttttgggtcctttggcattagacacaagaactttgggtacccaaacacaagtcttggaacccttgtgtttgcccccaacaaacttggcaactactttgccggatttgttagtaagcacataagaagcatcaaaagttttaaatgaaatggcatgatcatttgatgcattaggagttttctttctaggcaacttggcgcgggttggttgcctagagctagatgtctcacccttatatataaaagcatgattagggccagagtgagacttcctagaatgaattttcctaattttgtcctcgggataaccggcagggtataaaatgtaaccctcgttatcctgaggcatgggagccttgcccttaacaaaatttgacaatcttttaggaggggcactaattttgacattgtctccccttttgaagccaatgccatccttaatgccagggcgtctcccattataaagcatgctacgagcaaatttaaatttctcattttctaagttgtgctcggcaattttagcatctagttttgctatatgatcattttgttgtttaattaaagccatatgatcatgaatagcatgaatatcaacatctctacatctagtacaaatagatacatgctcaacaatagatgtagagggtttgcaagaattaagctcaacaatcttagcatgaagaatatcatttttatctctaagatcggaaattgtaactttgcaaacatcaaaatctttagccttagcaattaaatcttcattctctaatctaaggctagcaagagatacattcaattcatcaatcttagcaagcaagtcaacattatcatctctaagattgggaattgaaacattacaaacatgtgaatcaaccttagcatttaaaatagcattttcatttctaaggttgtcaatcatttcacgacaagtgcttagctcactagatagtttttgacatttttctacttctagagcataagcatttttaaccttaacatgtttcttgttttctttaattagacaatcctcttgggcatccaaaaggtcatccttttcatgaatagcactaactaattcatttaatttttccttttgagctatgttaaggttggcaaaaagggaacgcaaattatcctcctcatcactagcattatcatcactagaagattcatatttagtggaggagttggatttaaccttcttctttttgccgtcctttgccatgaggcacttgtggccgacgttggggaagaggagtcccttggtgacggcgatgttggcggcgtcctcgtcgtcggaggagtcgcttgagctttcgtcggaatcccattcccgacaaacatgggcatcaccgcccttcttcttgtagtaccttttcttctcctttcttctccccttcttgtcgtcgcctcggtcactgtcactagatataggacatttagcaataaaatgaccgggcttaccacacttgtagcaaaccttcttggagcgggacttgtagtccttccccctcctttgcttgaggatttggcggaagctcttgatgacgagcgccatttcctcattgtcgagcttggaggcgtctattggttgtctacttggtgtagactcctccttcttctcctccgttgccttgaatgcaactggttgggcttcggatgggtcgccaagctcgttgattttcctcgagccttctatcatgcactcaaaacttacaaaatgcccgataacttcctcgggggtcattttagtatatctaggattaccacgaatcaattgaacttgagtgggattaagaaaaatgagagatcttaaaataacatttaccacttcgtggtcatcccacttcttgctcccgaggttgcgcacttggttcaccaaagtcttgagccggttgtacatgtgttgtggctcctcccctttgcgaagccggaaccgaccgagctccccctcgatcgtttcccgcttggtgatcttggtgagctcatctccttcgtgcgcggttttgagcacatcccaaatctccttagcgctcttcaacccttgtactttgttatactcctctctacttagagaggcgaggagtattgtcgttgcttgtgagttgaagtgctcgatttgggtcacctcatcctcatcatagttctcatcccctaccgacggtacctgtgcaccaaactcaacaacatcccatatacttttgtggagcgagattagatgaaatcgcattaaatcgctccacctagcgtaatcttcaccatcaaaagttggtggtttgcctaatgggacggaaagtaaaggagtatgtttggaaatgcgagggtagcgtaggggaatcttactatacttcttgcgctcttggcgcttagaagtgacggagggcgcgtcggagtcggaggttgatgttgatgaagtgtcggtctcgtagtagaccaccttcctcattcttttgtgcttgtcccctctccgatgcggcttgtgagaagaagatttttccttcttctctttgtggtgagaagaggaagactttttctccttccgtttggaggagtccttcttcttctccttcctcttggtgtgggactcttccgatgaagtgctcccttggcttgtagtgggcttttcgccggtctccatctccttcttggcgtgatctcccgacatcacttcgagcggttaggctctaatgaagcaccgagctttgataccaattgatagtcgcctagagggggggtgaatagggcgaaactgaaatttacaaatataaacacaactacaagccgggttagcgttagaaatataaacgagtccgcgagagagggcgcaaaacaaatcccaagcgaataagcgagtgagacacggagatttgttttaccgaggttcggttcttgcaaacctactccccgttgaggaggccacaaaggccgggtctctttcaacccttccctctctcaaacggtcccttggaccgagtgagcttctcttctcaaatcaaagccgggaacaaaacttccccgcaagggccaccacacaattggtgcctcttgccttgattacaatggagtggtgatctcaagaacaagtgagaaagaaaagaagcaatccaagcgcaagagctcaaaatgaacacggcaaatcactctcactagtcactagggctttgtgtggaattggagaggatttgatctctttagtgtgtctagacttgaatgctagagctcttgtagtagttgagaagtggaaaacttggatgcaatgaatggtggggtggttggggtatttatagccccaaccaccaaacatgaccgttggctgggctgtctgttcgatggcgcaccggacagtccggtgcacaccggacagtccggtgcccctgccacgtcatcactgccgttggattctggccgttggagcttctgacttgtgggcccgcctggatgtccggtgcacaccgataggtactgtttgctgtccggtgtgccagcatgggcgattctgacttctgcgcgcgcagaggtaaatgcgcggcagagagccgttgcgcggagacgaccgttgcttcggaggcgcaccggacagtccggtgtacaccgacagtccgtgaattatagcggactagccgttgcatttcccgaagctgacgagttcctgagggcgaccgccttgggcaccggacactgtccgtgtacaccgacgtccggtgaattatagctgagtcgccctggaaattcccgaaggtggcgagtttgagtctgagtcccctggtgcaccggacaggtactgttcactgtccggtggcacaccggacagtccggtgcgccagaccaggggtgcctttcgttgcccctttgctcctttattgaatccaaaacttggtctttttatttgctgagggtgaaccttttacacctgtataatctacacacttgggcaaactagttagtccaattatttgtgttgggcaattcaaccaccaaaattatttaggaactaggtgtaagcctaattccctttcagcctgcacgccgcaaaatcgctgcagaggcgcggctgagcgccgcctaggcgctgcacccgcctaaacgccgcacagcgccctaggctacgcggcagcccaccgattagcgcctaggcgcgcctagtcgccgcctaaccgccgcctagccgaacactgtatatatgcatgatcaattcataataattaaagagtaaaatacattttctgtccttaaacttgtcaccatgtctcatctcgatcacaaacttttaaaatatgtcagtccggtccttaattattgttcgggtcttagttaggtctaaatatgtcacggttgacatattgatgtcggtgtgatccgaggtcctgggatgctggatatgtgggcttccatggtgggcgatgtttttgttttgtatcatcttctatttctgttatgtgtgaaacaccatatgagactgtctgcagcaacgtcctctaaatttggttttttaaaggaatattctctcaacactctctaaaaaattttattctctatatcttcttcatctccagcaacgtcccctaaattcggtcctctatatctacaacgttaacaaaatccataaactacaatatttgttctaccttttgcatataatttgaatttgacctaccgtacctatttcaaaaaaagtaattaacattggtcactatgacaattttgacaacttactgtacacgcaaacagaattctgttcgtttgtactgaaattaaactttcacacttcattttttatcgcttttttgtcacatgcgtagagcatgcacagaaaacataaaaagtaaaacttctctatgaaacaaatctcctcgggatcccactgtgagtgcgcagggacgatcgactagcgtatagaggacgcagctcgtccgccacatttagcacttcaccagcgaacgctaaaatttagagcacgttataccagaccttgttggaggtataaaggaagctgggacacgataaatgtaggatttagtaccgtttacataaccttgttgaagctagcctgaggggtagtagtcttggtgctctggcttgtggcttccgccatgagggctggttacctgcctcgacaggtggttgggttaggttaggctctctagcgtcttgcgtaaactggtatccccagctgagtgtgcgtgtgtttttggttgtatttgaactctatatgctttcctaaaagcagagaaagtttctcgttaaaaaaaagaatggcctaagtagatgatcataaattttactaccttcattttttattttatttaacgctgaatagtttaattttgttcaattttatatcaagaaacatcaaatataaaaaaatcggaggtagtacctttctatcacacactgcaacgaaagatttgacgtagtcgatcaagcagcacagctcagtgttgctagctcgagtgcggcaacaagcaacacagctgtttagactctctccagcaggcacagtaaaacgtacgtcctgtactctaaaattttagaggagattctcgttatatccagtggtgttctctaaatttaaattagaagacagtgctacatcctttgtatataaagtttctctttacttttctctatccatttaatattttaaataacacatttagtaaaactaaactatatataatatacttgagagtataacatataacaaatacatacgtacaaaattaaaaataaaatatatctctaatttatgtatttacgtatagagaacgagatataacaagatataacaaatatatacgtataaaaattaaaaataaaatatatctttaatttatgtatttacgtatagaggaagagatatataggatgttgaaaaggatgtagatatagaagagagattttttttagaggagaacgcgaagaactaatatagagatgaatatgaattatggagatgggaatgtatcctgtgtttatggagctcttgtgctcatatgagcattttaaatctgatgcattcattttttattcaggggtgagtgtagtagtgacacatagaagagac

SEQ ID NO: 168 - DNA, 10233 bp, Zea mays
  Intron number 2 from transcript GRMZM2G172442_T01 (locus G RMZM2G172442) derived from phytozome v7.0 (chr-ID 2; pos 2 00895526 to 200905758 reverse strand)
gcgcgccaggctagccaacgagcaacgctacattggtacagtgctaacttgcttatggcatcttaacaacagcaaagactttgcccaagttagaagtctacatcggatatatccaaacaatctcaattggtgttggacaaactttttttcaattggtgctacctgtactcatgtatatcatcgtttgaagccacaaattaagggtttatacacgtcgatagctgttctctattcatttctgttcagagttagatctttagtatattccatcttttctagtctcctctttccatattaacttcggtcttctcctatctctcttcctattactatcatgtattagtatcccactatatattggtgtctctggaggtctacatcggatatattcaaacaatctcaattgatgttgtacaatctttttttttcaatttggtgctacctgtacccatgtatatcatcattcggactcgatcccttcttatatagccacaaatccaacataatatacacatttccgcaacacttattatctgttgaacgttgaacatgatgcctttttagcctaatatcctgcaccatgcaatgtaacaggtctaattgctgtcatataaaagtttccttttagtttgcgtgatatgctctggttgcatagacgccaaatgtttggtgccacttcctccatcatgctttgttttatggctaacatctaatcaatacccctatctctctatctctccgtagcattgatcctaaataacggaagttatcctccttgggcatttcttgaccttttaaactaacatctccttgtgtatagtgttgaagtcccatctcacgtactctgttttatttctattgaatctaaaacttttgaactctagagtctcatgccacaagtttagtttcctattatcctgcccgactttcatcaatgagcactacatcgtcctcaaaaagtatataccaagggatatccccttatatgtctcttgtgacctcatccatcactaaggcaaaacggtaagaggcctcaaaattgactcttgatgtagtcctattttaataagaaagtcatctgtgtcccatcacttgttcaaacactagtcacgacattgttgtacatgcccttaatgaacccagcatgtttagttggaactttatatttgtccaaagtccatcacgtaacatttcttagtattctgtcataagacttctccaagttgatgaaaaccatgtgtatgtccttctgatccctatattgctctatcacttgcccttcttatgctttggcatgttatgtttgcaaattcatttatctactgttgtcagtagtttttgcttataatctgccatattgcctcagccttcagcaatcctactataagagttagcacatgttgtatcattttcttctgattttaacatgtaagttgttataccgccagctttttatccttaatgcaatattcgaggaaagaattgcacatttgatttttgaacaccttagtacactaatttgatctgcaattttatttttatgtttcaatctactgttggggacttgttctcaagtgctatgagttaagaacaagacaacatagaaaatgttaatcgttaaggtccttcgtcctccgaagcattatttcccttaggatataatggtttacggacgaaggttatgaaggacgtaccttcataaattcattaaacaatgacgaaggatgaaatataaagaatataaaagacaacatggacaattatatattattattaggtataaacagaaatatcgttgaattacaagtgtaccttcaatcagaatgaaatgacagtacaagcgtgacgcaaaaagcgaatgccaagtcagcgtgaacagtacgggagtactgttcacctatttataggcacgggacgcagcctgtgcaaaattacattaatgccctttacatttgataataatcctatagtaatctgtcgaggtctaaatagccttttcatctttaagtcggtttcaactgctgctgtctcgccgaagctttcctgtttacaccttcggcgcttcaccaaccttcgtattattctggtctactgtgatgcctgacttgagtccgaagatacctgttcacacattatactccagaaacactattaaatcctgtttttgaggaccttcggatgccgaaggtccccaacagtagcccctcgcaatattaatttgttcaaaataataaatttagattgcgatctggacgaaggctttacgccgaaggtccgaaaaaacaccttccctttgctagaatagcaacattcactgacaagcggggtctttcaattttcaacgcacttggcgtataaatacggccataccgcagacgcatttgacacgctccctggccaactgctcccgctcactcaaattttagctcttgtgcactacgatttgctaagcttttagttttgaagcttcggctttgaaaatagttttttagtgtctccgaagatgtccgaagataagaagactgctgctgagacgaaactgagcctcgacgaagagaaaaatttggggtttcttatagcgatgtcaaagaccaacacagaaaaaatcaccaaggagattctggaaggtttgtctgaggatactggtgacagtgacagctatgatgtggacagtggtggggaggactccgaagatcgtccctggcgaccaagccattcagtttatggtaaatcaactatcaaagaaaatcatcttgttaatatgagaggaaggtatttccgggatttgtccattgtgagggcggacgaaggggaaaaaacttgcccacatcccgaagagaatgaagttgtagtgtactgaagctttttgaaagctggactgcgatttcccttgagcagcttcgttgtggaggtgctgaaaatattcgaaatctatctccatcaacttacccccgaggcaattataaagctgaatatcttcgtgtgggccgtgagaagccaaggtctgaagcctgatgcaaaaagcttctgtaatatacacgaattatcatatgagacaaaaccttggggtaaggaacagtatcacaataattttggttgctacagttttgtttctcggtccgggtcaagctgccccgtgccaacctttcggaagagatggcccggcgactggatgacagaatggttttatgtgaagaatgatctgacaatacgagaagatatcaaaggtataattatgcgccctatctggcaaagcttcggccttcggaggccgaaggttgaaatgaatgaagctgccgaagaatgccagagggccttcggcgcagtctgctctttcattggaacgagagacttagtacaagagcatatcgccttcagggtatggccgctcgcggagaaatgggaaatgccacaagaaaccgtaaaagaggccgacgaaggtggacttatcaggttgaagtacacttttaaatttggagataagttcgttgagccagatgatgactggttaaaaagtattgaaaatttaagtgatgaactgcttggggcttattcgaaagccgaagacactgcaatgtcagcagccttcggaggccgaaaaaagaagaggctgaatcgggtatttgatgcaatcgggtttgtctaccctgactattgctatcccattcgaaggcagaagagaaaaaacacaacctctgcaaaagaagaagctgcaactgctcctagcgagccagaaccgaaaagaaagaagataaaggtccttacacatcggccgcgctatattgaaccagcttcggtgcctgagtttaccggagaaacttcttcggccaccgaagccgaaaaaccagctgagccaaccatgctgccagaagtcgcagaaacggccgaagtgccaacaaagatagaattggaacaatcaaagattttgttatcagaaacgaaagagaaggccgaagcgccgtccacagaaaaaatggaagaggtaaaagaagcaactgagggatccaaaacatcagaagttttgagtcctgcagtaaaaaatcaaaaagtgccagcagtgactccaaaaagaaagagaatggccaatgtgctagatgtactggaaacgatcaaatcttcaagcacacctccgaagagggttgctgtcatttctgaaacaacaactgaaatttctggttctaaagctcccgggcaagagactgaagccgaagctgggccctcagagcctacaaagataaaatccttagaaagtgaggcagaaaaaataacaaagccaacttttgttgaagaaaccggtgtcattgcccccgaagcatcccccaaagttcgtgattatattcttcgtcatgcttcggggaaaaaactatcagaaaaagaagagcaagaggcccagcactacgcccaaaaactgaaatatccaaagggggcgttaatattcaatggcagtggagaagaagacttcttgtattgtcttcccgacagcaaggaaatttctgtctgccgggagatgagcaggagcttcggattcccaactttagaagacgggctctcgatgctgtcgaagaacgatctggccgacagcctagcttacaatagcttaaaggtgcgacaaatgaaatccttgtattttttgttgagtccaaaatttttcgtttgtttaaacctattgacgcacacatatttctctttgcagggcctgatacttagcaatgcccttagggcacagaaagatgctgaagacgaagggtgttctatagccctgagcaaccttcgttccgaagttattgaactgaggaacgaaggtcttgaaaaagataaaatattacactcattgataaataaaataaaggaagacgaagttgcttttacaggtcaagttgaagctcagaagcgggaaattgaagatcttcggaaacaactggccagagccaaggaagaacgcatacttgaagaaacaaagcgagaactcagcgaccaatgtgctgatcacctagaaataactgttgaagagcttcgttcgtccagaaagagatgctataacaaatctatagagtgcgttaagaagttaaaagctagcttcgccagggttggcgccttctcaagcgaagaaaactttacgagaggcaatcccgaaggtcccatcgagtggatcgaccacgaagctgaggccttcgaagaaattttaaatagccgaggagatatatgtgccttctctggtgccagagggattgccaccatcttagagaagaagggctgcgaacatgtaaaaattttagcacagtccgaggctgctttgtcctttgaagatgcgagagatccttcggccgaagctagtataattggtggaaaattttttaccgatatctgggataatggtggccgagaaatggccggagaaattattcgaagaagtgaaaagggcattcacgatgctagagaagtagctgaggctgctgaaaaaagcgcagaggccgaaggtcaattaggtattaactaatagtttttattgtgttgtaatctttagcctttaagatttgtttgcgatttgtaatagcaatgtagccgtatcctgtcttacttcagatcctgctaaaacgtcttcgggccctcagccgaaaggagacgacgaaattaaaaagatggctgaagatattatggacgaagtcgtcaaacggctcctgaatgaggctgcagaagtcgttttgagagaagattaaatatttttgtgaaaacttctgaaatgtaatatactgtaacattttgtaactgcaaatgtaatatacctatttttgttagtcaattctttacgatgcatgaaactttacacgtaccgcttttgagtctttgacgaaaaaacaccttcccttcttttcatgcttcgtgaagaagaatttttcattgtcacaacaatatccaatgttctgatgaataatatccaggcttcgtaaaaatattttccgaagctacccttccgaagatcaatgatgtatctttttgtgactgatttctctcttttttcaaagcgttcttccgtagattgataatgtgtccacctcttgtgtcatgtgcaaaatgatgtatgatgcttatgctatgcgaaatgatgcgatgatgttatgttatgtgagatgatgtttactccgaagatacatacgcatccctgcaataaaacacaatcttttataagcctcccttaggagcttcttcgccttttacttcagcggaatcagcgtttatttttcgctgcaagcctcccttaggagcttcttcgccttttactttcagcggtattcgcgttgacttttcgcgcttcgccttttacttaggcggtatcagcgttgacttttcgctgtatgctctgcattccctttggaacgactttggagcagaaaacttacactgcgctccctttggaacgacttttttgtgacttcggtaaacttactctgcgttccttagaacgactttttgttgcttcgaagaattttcgataggtcgaaggtcgtctttgttatcacaagtctttgaattttaatcaatataagcctgtgaagaaaatatattttccttgtaggaatcaacgaaactaattacatgaaacctaaacaatgtcctttattacagaaaataaaactgaatgaaaaagattgctattaaggtaggatatttgtcaatagatgtgctttgactctggcacagtgctattgactgtacgagcttcggactgctctctgaagtccctctggtgtggagcatactggctcccttctggctgctggccttgttgcaacggaggtggaggcggaggctgttgccaggaagcttgaggctgacttgccgaagcaacagaaactgcaggatgattgcccacatattctgggatgtagggcgaatgatacgaagctgtatgcatgacctgcttcggctgagcttgttgtgctgctgcttcagctatttccttttgcttctgaatagtaacatggcacatcctggtagtatggcctttgttctcaccgcagaataagcaaaagattcttcttggttgatcgccaaatcttcctccaaagcccctggcgcctctgcctcttggagctggtggtcggaaggagctttgctgttgccccgaagcctgtgaggaacattgtggcctttgctgttggcttcctctatcatcattttgtgtagagttatgaattgatctcacgtgcctcgggtagaacctccctccgaagcccctggtcatttcagaaaacctgaaagcctcctcccttctttggcgaaaatcattatcggcccgaatgtactcgtccatcttctggagcagcttctccaaagtttgaggaggcttccgagcgaagtactgagctgacggtcctggtcgaagtcccttgatcatggcctcaatgacaatttcattgggcaccgttggtgcctgtgccctcaaacgcaagaaccttcggacatacgcctgaaggtattcttcgtgatcttgggtgcactggaacagagcctgagcagtgaccggcttcgtctgaaatccttggaagctagttaacaacaaatccttcagcttctgccatgaagtgatcgttcctggtcgaagggaggaataccaggtttgagcaacactcctgacagccataacgaaagatttggccatgactgaagcattgccaccatacgaagatactgttgcttcgtagctcatcaaaaactgcttcgggtctgagtggccatcgaatacgggaagctggggcggcttgtaggacggaggccaaggtgtagcctgcagctcagcggacagaggagaagcatcatcaaaaacgaaattcccatgatggaaattgtcataccagtcatcttcgttgggaaaaccctcctgatgaagatcttggtgttgaggccttcggtgctgctcatcctgggcaagatgacgaacttcttcagaggcttcgtctatctgtctctgcaattcagctagcctggccatcttttctttcttcctctgtacttgttgatgaagcatctccatatctctgatttcttgatctatctcgtcctctggtggtgtcgggcttacagccttccttttctggcttcgggcctcccgcagggagactgtctcctgattgtggtccaatggttgcagagctgcagccccagtcgctgaagccttcttcggcgccataacgaaagtttatgatcgccgaaggtgttcaaaaaactcagagtggaagtgagttcaccggaggtgggcgccaatgttggggacttgttctcaagtgctatgagttaagaacaagacaacatagaaaatgttaatcgttaaggtccttcgtcctccgaagcattatttcccttaggatataatggtttacggacgaaggttatgaaggacgtaccttcataaattcattaaacaatgacgaaggatgaaatataaagaatataaaagacaacatggacaattatatattattattaggtataaacagaaatatcgttgaattacaagtgtaccttcaatcggaatgaaatgacagtacaagcgtgacgcaaaaagcgaatgccaagtcagcgtgaacagtacgggagtactgttcacctatttataggcacgggacgcagcccgtgcaaaattacattaatgccctttacattagataataatcctatagtaatctgtcgaggtctaaatagccttttcatctttaagtcggtttcaactgctgatgtctcgccagaagctttcctgtttacacctttggcgcttcaccaaccttcgtattattctggtctactgtgatgctcccgcgagtccgaaagataccctgttcccacattattatccagaaacacttattaaatcctgtttttgaggacccttaggatgccggaaggtccccaacatctaccttgctgatagcaaagataaagagatttacagaatctatactttgactttccaagtgtgaaacaaaactgatgtatcacaatttgctcagatatggaaatctttaagtctctgtaccaggaattcaggatcttgcataaaatggaaatggaacacagttcccatgaactacatttcttcataaattcctttttgtgtggtgtgaatatccacagtcatccttgctagtgtaatacaaaagggctagtgtcacaatttagtattgtttgttttttactgtgtgtttcacagtatctgattcgaataagatgtattttggactaatagagtaaacttttgacttagtgggtttccagagttctgtattttgaagattgattggaataagattagtgtgaatgttgttctctaatagcactacaccatcaggagccccaatcattcatatttgatatggcgatgtagaaattttcttttggggacatttaatgtttagtcctgccatattggtacctagcaagagatggttttagttccaacctttggccctatatctattataagtagagtacttggagtaggtgacatgacttcagtccctttcaaaggcctcaaagtctgaacctaatatcatattcttgtttgaatctgcacacattttgcactagctcattaatattttgttgacttttgcttctccttttttacattcttccttgtaaacccaaaaaaattgactgcattttctttgttaaccgcttaattatgacgaagagcataatatatttcattctcactttactgctgggaagtccttaataatccagaaaaaatgtggatttaaacgcttgtcttgtgttataatgttgcttgatatctataatatgttggcctacatgaccgaactttatcatattagatagttgtagtacataataaatagttaatatcttcaattgatatttggctacggatctaagtctggttgtaaattgaatgttaaaccagaacaaagttcccaagtaggaatttcgtatagctgcaaattggaagactttactaccattttacagctagaaggtgatgaaaaacaaaagctgcaaaaaaatgtggttgcatggctaacatatacctggttgatgctatttcagtatttctagttgtgaatctatttagtggctgaaaacagttgaccattctaccagtatttactataacataaaaacataagaggccctgggaacagctggtgcctgtcttaaccattctgtttggtagtcatgggacctaacacattttccgtttcaccttttgtgcag

SEQ ID NO: 169 - DNA, 10118 bp, Zea mays
  Intron number 2 from transcript GRMZM2G000623_T02 (locus G RMZM2G000623) derived from phytozome v7.0 (chr-ID 9; pos 1 599689 to 1609806)
tgccagtacttctattggtcgctccattattccaggttctatgcttactttccacttccgacaatcgtcatccatttccccgcttttaccaataaggcaatacccgcttgttacttttaggcgggcatttacagtttgcttaaccagcaaaatctgccatttattgatgtcatttagaatctgtactacgttacatattattctgtgtttttcagttgttcctctgcacccattattcttttatgagttagcattacttttgtacttttgtaacctgtaataaattcttgtaatgcctcctgagtatccagagcaaagggctctcctttaactaaaaagggatcgattttgcatatacttatctttgtattgcgtcaatatgagaatatccttcctaaattctttatcttatcaatcattaacttagattttcccaagatcttggccgctattccaaattaaattattttactatcccgaagacaatgaaaataagtaggacccaaaaaattgtggggttctattgatgccttgaataacatgtaatatagacaatgaacaaaaaagagaaaaaacgatggatttggttttatcctccatattcagttattcctgctctccacagttcgggtttaggataaatcaacctatttgcatctaataatctagtagtgagaaccagcaacttccatcattctatagctctttgttggggttcacatattcttcaggggaactatatccacaagagattggcactcgttttgtagcatgacaagaccttaccatgtcttgtagcatgcatcaccgttctttcttgtatgtcattgttcagttgtccaaaacaaaccaagtgcggcaattgagaattttaccttacaaagcaacttaatctgcttttagaatgttattgaatcttgctatctaattgtgcacagggtgcttagtatttaagcccaatctacatcatttagtgtgatctatacagtgtatgcagagccctttgtcttgtccttctttacttgctggttcacttttcatgcaaatttgttatagtttacttgtaccaagtactgaatacaagcctaattagattgttgtttgaacctggcaagctgaagtttcagccgtatgtactgtttcaagttgtaagccatcgtaattactttacccatttgacatatccatccctttgcttactgaagaattaaggctcggtacccatttttgaattttgagataatgaactaaaacctggctgctctagtaacacatataattaatcctgtgatggcaaaactgcttgacacaagaatctgatctttggtgtttactgccttatggacctcttcgctcaagaatcacaagggtgatcctagttgcattgcattttaaaatatcctcaaaattaatggcacatgtgcttcctttagttgtttatttggcacttcatttttttctgttaaagagttacatggtccagatgttgtaaaagttttggtgtgacggagtcagacaaggacaatagggccatggcccatggggactaaattacatgtgatgcttagcaaaacttgaagtgcatgtcgagataacttttttaaaggtcatgtttgttactaaccttgggattaacaaatgatgatcagtccctaaggactatctgataaatataggctataggcctgggcctaatgggccttaacacccctcctcaaactcaatgtggagaaggaggatctgaaacgttgagtttgatcaagtgaagttgatgttgtactcttgtttgtgctttggtaaagaaatctgccaattgagattctgagggtacatattgaaggtcaatagtcttctgctgacaatgagaccgagtaaatgatgcatcgacaccaatgtgtttagtaagttcatgcttcacaggatcatgagaaatctgtatagcactcatgttatcacataatacaggtgtaggagtgtcacaagaaacaccaagatcagccaatagccagcgcagccaaatgatttcagcagtggtagttgcaagtgcccgaagttcggcttcaacactagaacgagatatggccgcttgcttcttggatttccaggcaataggagaggatccaagaagaatacagtaacctgtagtagaacaacggtcaacagggtcacttgcccaagtggcatcagaatacgcatgtagctgaagaggactagcagaatcatagagtaaacatcttgattgtgtcccacgtaagtatcgaagcacacgaagcaaatgaccataatgaactgaggttggtttggatacaaattggctcaacatatgaacaacatgagcaatatcaggtctggtgatggtgagataaacaagactaaccacaatatgacgatatcgagtggggtctgctagaggtgtcccatcctgcggtcgaagttttaaatgaatatccattggtgttgcaactgtccgagtatcagtaattccagatcgatcgagaagatcttgtatatacttggattgagacagataagaacctttttgaagtctgctgaacttcaatacccaagaaatagctaagtggacccaaatcagacatctgaaattccttactaagataagatgctgcttgacatgagaaatgtgttctgagttgtcacctgtagtcagcatatcatccacatataatagaagtaaagtgcgcccttttggagagatatgaacaaacaatgcaggatcatgttcactagaagagaaaccagtagctgtgatgacagagatgaaccgctcaaaccaagcacgagtggcttgtttcagcccatacaatgcgcgacgaagacgacaaacgtgtcctgagggagtatcaacccccggaggaggatgcatatacacttcttcacgtagatcgccattgagaaaagcattcttgacatccatctgggagatagtccaagaagatgaggctgcaattgcaatcaaggttcgaacagtagtcatatgtgcaacaggagcaaaagtctcatcataatcaagtccttgagtctgttggaaaccacgagccacaagacgagctttatacctctcaatggaaccatctgattttgtcttaattttgaagacccatttgcatgtaataggaacatgtgagggtaaaggaacgatatcccatgtaccagtgcgttcaagagcagccaattcatcaatcatagctagctgccactcaagaatcccagaagcttcctgataagtagtgggttcaacaattgccacaccagctcgtgggaaaccatagcgatctggaggttcaatggtaccacgatcacgaagacgatatccctgattaaaaacatcgttagacacataattgttagtacaagaatcaggtacaggatcaggatcaggaccagccgcagggatagaccgggaacgacgaatgtaggtttggatgataggtggtttggaagagtaagtagaggatgacgtggaggtggaaggtggtgttatgggaatgagaacatcagatgtggatgtagaaggtgatggttcagcagcaggaatggaaggaagacacatgaaagaagtagaatctgtgggataatatgaggagtgagtagactagttgtgaaagaagggtcgattttcattgaagctcacatctctagaaattcgaatacgacgagtagatggatcataacaacgatatcctttgtgttcaggactgtatccaaggaatacacactctacagattgagcagtcaatttagtccgctcacgaggtggtaacaaaacataacatatacatccaaacacacgaagatgatcatatcgtggagaagtcccaaaaagaacttcacctggtgatttgccagaaagtttagatgaaggttgtctattaatgagatacacgacagtggaaacagcttcactccaaaagtgtgaaggaacaaaagaagatatcaaaagagtatgagcactctcaataatatgacggtgtttgcgttcaacaacaccattttgggcatgagcaccaggacaagaaagttgagcgagagttccctctatggtcaatatctggcgaaaattatcagataaaaattcaccactagaatcagaacgaaaatttttaatagtagcagaaaactgggtgtgaaccatgcgagtgaatgacttgtaaatagaaggcaattcggagcgacgtttcatgaagtaaatccaagtataacgagaatgatcatcaataaaaatgacataatatttatgaccacctttagaaacaaacggagttggaccccaaacatcagagtgaattagatcaaaaggtttagcagaatgggaattactagtaaagtatgggagttgtatttgttttcaagatggcaacctttacaatgaaaactagactcaacatgtgtaggacctaaacatcctgactttattagagtagacagacgagatccacataaatgaccaagacgatgatgccactgggcgaatgacgtcgtggggtccgaagcagcaagcacatgaggtgtagtggtatgggttgaaggaagatgcaaagtatccaagatgtagaggcgaggcgaagttttacggcgacgaccagtcccaatcacatcccctgttttgcgatcctgtacaaaacaagatgagtcatcaaatctaacaaaacaattgtgattggtaatttgaccaactgatagtagatccatggataactgaggtacaaaaaatatatttgggacaataaaatttggatcagaaagagaacccttgtgggtgacatgacataatgtaccatcagcagtctgaacagaagtaccctcggtgacaggtgtagtagtcgccagccgtgactgatcagatgtcacatgaaatgaagctccagaatcaagaacccaagatgatgacaaagcaccagcagatgaagtagcagccactgcaactgagcctctaggagatggtcctgttccacgaccacgagtagcacgacgaacacgaaaatcagccagcttctctggaaacttagcgaagcagttctcagatcgatgagtggtctttttgcaatgttcacaaggcggaaaagaagtgtttctggacttctgagcagcagccaacacactgtgagaactcacaccagtaatagaagacatggacttaagacgagtctcttcagcaagtaattcagataacgcctgagccatggtgagagtatcagaactgtgaagcagccttgcacgtagagtatcaaattcagatcgaactcccataacaaatctgtatgtgaaaaacttctcaatgaacttgtgggctgggcaaggcacagttgcacaagcaggcaccatggaagtcaaggcattcataagacgatcaaaggttgaatagtattcatcaatggacatatcatgttgcccaatgacatgagtctgttgcataagagtatgtaaaagagcaccactgtcctgaacaaaccggtccttcagatgtgaccagatagccttaacagtggtgaatttagacaaactcataatcatggtttagtgctattgaccattgcagccattaccttgccatcattgatctgccaagtcttgattgcaacagcattgcttctatcggctgctaggaccggtgaatcttcggtcaaatgaaatagtaaaccatgaccacttaatgcagtctgaacacagaaagcccattcgggataattctgaccatcaaacacaatattgacaacaataacattggtcgacataatgaagagcaagagaacagtcagagaataccaaaattcctggcaagaagcctgaataaagctcactgatcggaagtggcaggctaattctggactgatcggaagtgaccacgtcgccgaatcagatctgggcgaggtgaccgcgttggtgcagaggacaacaggcagacggcggacagatctgcgcagggttggtgcagaggacagctggcagacggatctgcgacgtccaggggaggtatctgcgacgtcccagcaggcgagcagaggagtctggctcgtgggcggccggatcggagcagagtcgcgggcgaccgattctggcgagtgcgcggcgcctcgcgcgcaggagcggccggatctggcgagcgcgcggcgcgcagagaggcgaggacgatccagcaggcgacctcaggcggccgatcctggcgagcgtgcccagcaggcgacctcgggcggccggatcggagcaggggagcgcacggcgagcatgcgggatcgacgatggcggatgggaggagcgcgcgacacctcgcgtgcgcgcagatgggaggagcacgcggcacctcgcgcgcaggggcggccggaaaaagaaaatccgcggccgcgacggcagccgggagggacgcggccacgacggcagccgggagggaggtggaggtccggtggaagggctgcgacgacagcgggaggaagaccgcgacagcggctaggaaggagcgacggcggcggctaggagatttgagaaaccctagtagtaacctgctttgataccatgttactaaccttgggattaacaaatgatgatcagtccctaaggactatctgatatatataggcctgggcctaatgggccttaacaatgttgagataacttgaactacataaggctcacgagtcactaccatgttttgtaaaactgctgaacttcatgttctccatgctgccaaacagctctactaactaataaatcatgtggtggtcctctctctttctctgccccgcaacataaaaaagggttctagttgatggaagatattagatggcaagtaaatggtcggcaattgtagtgaagtccttgttctgatattggtatctgtattgttatttgttccccacctagcagagtttatgctcccttgttgtcatgggcatcatagggagcgagaggcaacaaccaggctgggataaggctagagaataagattgagatgagctgggataaggctagagaataagattgagatgagagaattgtggagagttgattagcatcagataagtccaagaaagtaggagttagttgagagtttgtaggagaagttggttagccatagggctatttataagccgcatggcagcagggaataaatcaagcaagatcattaacaaaccaatctccctctcttgcaatgaccctctcaagcgcctagggctgctaccctagaaccaagcctgcggcagaggggtataacctcgccggagaagacaactatccccatggaccgaaggtccatgacacctggtatcagctccaggttatcctcaccaccaccagccgcccatccctcaccaccaccagccgccgcaacgcctcccacccgccctctccaactccagatgcattcactcggctcgaagagaagtgggatcaattcgttgtgatgttccaccgctacaagaagacagagaaggaactccaagcagcggtgcggcttcaggcggcagcgcgaggattcctggcacgccgccaggtacagtcccttcgtggggagaagcaccttgctgtggcctccagggccaccccatggccgtcatcacatgagcatgccgtggtgcgcctgcaagccgcagtgcgcggcttccttgttaggcgggcggtgcggaagctgcacttgctgatcagctcatcgctgcaccaactcgcagcctgcgcgcccaaccaccaggtctcgtctatactttttgaaccccctgcagaagtcgagatctgggtatgcagcccccctgcacggccaaagagggtcgtctccttcattcgggcaactgccttggtgctggacagacccaacataagaacgggttggttcctccttcacctttcatccaacgtgaagtccgcagttcagctctttccttgggatccaggaggacaggaggacatagctgcagttcaaatttatattttagttccacaattattttgtattttcgtcttaaataataaaggtaagccgagatgtaaaaggcttaaccttaagtcgtgtcaggtaagtctatggcagctcgaggacgagctggtcttcaagggagggggagatgtcatgggcatcatagggagcgagaggcaacaaccaggctgggataaggctagagaataagattgagatgagctgggataaggctagagaataagattgagatgagagaattgtggagagttgattagcatcagataagtccaagaaagtaggagttagttgagagtttgtaggagaagttggttagccatagggctatttataagccgcatggcagcagggaataaatcaagcaagatcattatcaaaccaatctatctcccttgcaatgaccctctcaagcgcctagggctgctaccctagaatcaagcctgcgacagaggggtataacctcgccggagaagacaactatcccctggaccgaaggtccatgacacctgtatattgtgcattgccttgtacaacaaacttctgtccaagcgcgactagtatttcactacagtttctgcttaatatttatcaaacatggtctaccttgatggttttaccctggtttgttcttctgcgttggtaggttgctgccttactggtgatagatacaaatgtaccctagtttactggctctaccatttcttgggatacattgataaatgttaaacttgagcgcaatatagtttaatgctggcaacataagattttagcagtgtgtgagctcctaattactacctccgtcccagaaacgatgcaattctataaggtcccgtttgtttcttgtcatttcgagaaattgaaatcttactaacggaatagactattttttttagaatatgacattccaccactttccaatattatcatacaagcctacctcaaattcatggggtgagagatagaaattgaatctatagatttacatgctatttttccgatgtacaacttatagcacattcttctacttgcgcctctataacataaatgtagtatataactatctatctcatatgatttaggataatatacaaatatattacatatataaatatataaacttaattagttttatttaaattataattattaaaatggaattcaattccaacgaaacaaacgggccctaatagtattcaggtaaaccatattaagcttgaccaaattcatgtaaaatactaatatttaccatattaaatatgtatcattagattcatcatggaatatattttcataatatgcctatttgaagtaataaatgtttggtactcaaatttaagatagtctgacttggaccaaacctggaattgcattctttctcgagtggagtactttactggtttgacttacccatccctttgcttagtacatagttaagcatttattactgattgatttaaggtttggctgtcttggtaaatattagttaatccaatgatagctgcatttcattgagaatgtagttttgttgtttcctgccgttagacctgtttagtctagaattgccagggtagtgtcagtcagagtttcatcaaatataataatggagtccttgcttcctttatagcccttggttcaacactttggatggcctattgaagagttatctggtccagaattttgatgtgatggagtctgacaaggccaataagactgtcacatgtaatgttatttgattaccaaaacatgaagagcagtcaagataggttgagatcgatcgctatatttgttggttcctaggactcttggtggaagatatgaggttgctcccaacactgaatttatgtatggctgaagtaaattcactgttctgattttggtgtccacattcttatttgtttcccagtcagcaaactgaagttcagtttgtgttccattgtatactgtgcattgctttctacaacaaaatttctatgggactagtagactcccatgcattgattgttcctgcttattttgcggaaatgtgaaagcagatgctgctgcaatgttgcaacgagagatggataataatatgcttaacagcctctcctgcattccattgaggttgtcggtttgctgactgaatctcaatttcgtagtggcaaggaaacagcagagtttctgatcgaacccg

SEQ ID NO: 170 - DNA, 1970 bp, Zea mays
  Intron number 5 from transcript GRMZM5G800915_T01 (locus G RMZM5G800915) derived from phytozome v7.0 (chr-ID 5; pos 2 05673731 to 205675700 reverse strand)
tgggttgtctgcaaaaaaaggtactatactttaatcagtcgtttgtcttttcattatgattatctaatgtggattgtctgcaaaaaaaggtactatactttaatcagtcgtttgtcttttcattattccaatctttattttaataggttgcatttccagttttttcagttctaattacaagatgatcatgatgcatatgttcctctgttttttacagactacaacgatgtagagcatgtggctaaataatataacataaatcacacctaactaaatcaccaaggatacttgtttgtgttagcagatagatggaaacccatatagtctctgtaacctaactgaatgggtttgcatacgtttgtttttttactttttttgggttgccaggctcactaaaactgttaagtgggtgcctgattgttgtggtgaccaataagtgaaactaagcttaaaaaaataacacgagttgtatattatagatagaatagtgcaacagtttgtgagaaagcgagttagatgtatgctattaaaatattcagaacatgtacacttttgtgctccttccaaacttaattttaattggttgcatttccatttttttattcagttctaattactgattgcgttaccagccaacctttgcttgcatcaatagcaacacagttgacccatgagctttcaaatgtcacgctctttactggatgtataacctgagtgcaacgcacggtcatacacctatacaatatgaagtgattaacatagtattgttcttccctgttgttttcagtttgacgcaatccatggattcagtaccaataaaaccattggagtacctgggttctattagtaacgtgtgaatatggaaattcacaacgattatatggtgaactcatgtttctttttctaatgcaaggaaaacggtaaagtcttcatttttcacattcttgttagtatttacgaacagacaaccattacaaacgaatataaaaatgtattattgtgttctacaaatgcttaccgacagtttgaacaatgaaggtcaatgtgttttgtattattctttgaaattgtttctgttattgattagttaatgtctataatacttgatggttatgtcttcatccatattaatttgtttgatattatcgaatacgaatgaattagtactatttctaataagactcgattatctaatgtgtgtttattaatacttttaagctacgactcctttgacatccaggtcggcgcctccgcgctggggtcgtcggtgaccatcacctcgctcaagaaagccaccttctaagctttgattgatcgcccgtcaaagtcgccggaggctggcacatgcactttttttcaccgtagaatatactgtatcgtacttgtctgctcccatccctctcaatatttttctagcgctttgatgtgatcatcaggtataacaaatgcatattcttagtaaaacgatagaccatttttttccagggaccttcggtgtctggagattcgatgtcagaaaaattgatagcgaactgagggatacatgcacatactgctcatgatgaataggcactgttgtgttattcctaatccttataattggagatggggttgagaaaaattatgaaggtttttaacggatttaaacctatcaatctcctttaatttatatagattatatgaattgggttgaaaacgatgaggccctaaaatggatctcatccgctgctataaatcaggccgttgggcatgcaaattattgggagcagattaacgccaaacctaccaacacttgattctcttgtggtccatgggtggatgtgattagttgttgcattattattgctttataaaccttctatgattctttatagcatttgcgttggcaaccaaagttggtttcatgtcgcatgtcatttattccagttttctgatgggtctccatcttgatatatttgtgacagactgaa

SEQ ID NO: 171 - DNA, 707 bp, Zea mays
  Intron number 1 from transcript GRMZM2G419512_T01 (locus G RMZM2G419512) derived from phytozome v7.0 (chr-ID 9; pos 1 03694583 to 103695289)
cactgaagattgtgattcagtagaagttacagaacaatgtcccaggggtcgagaaagtaagagcataggctcaacaattatagatgttactactcatgacacacagttgttgtctgaatactatgaatgaattggcccttgttaggaagcaacttcaagagatggagaggaagcaagcaattttttttatttgttgcaggtaactgtcatgctttgagttgtgaagatatcgtcaatttgatttgtgtctatatttacctaattatgggtcgtatatatatcgatcaatgtggtaatagtgtaagttataatgcaaggctaacaactccagctatatggatgcataataccatttcaaattagtcgcagttcttctttgtgcactttatgttcttatgctagcatacaatatcgttaagcttcttggttatttatgattttgttgaacactggcaccctgaactgtgaatctgttatcctattttgtcatgttgctttcctcaaactctccacttgccaatttaagtaaaaatggcagtgcttattgatagtaaggatgattgtcataaaattctgccaagttttacctttccactgcatcatgtaggaaaatctatgcaccatctacaaattcatatgaagagaccatgtatgtaaagaagtgaatttatatcttttttctcaaatgatcctcattgtaggaattt

SEQ ID NO: 172 - DNA, 4897 bp, Zea mays
  Intron number 15 from transcript GRMZM2G044143_T01 (locus GRMZM2G044143) derived from phytozome v7.0 (chr-ID 2; pos 19001072 to 19005968)
tgcgaccattgaaggtggttcgaggaacattccaagtaagtgatttctaggcatgtttgccattagcatcttctcataataatgcataatttaaaatgatctctttccattctttaaaggttactagtttatgccaattagctaattgcacatttcaccttcaatatatcagtgcatattgcagatattatcaggaaaagctgtagtatctaacataaaccataacctaagtgtgaattggtacaacaattcatgcacaatattgcatttcaacattttgtgtgtgttgtccagtattatgtaatatgctaagatatgcaagctctcatacatattatgagaaaacagtacagtgaacttttgtagttgttttagagaaattctacacaattctatgaaaaagtcgtggcacattattagttacaaatatctagggatggatccagatacttattcggattttaatttttttgtcttctttcttcgattgcgaataaatataatatagaatttgctatacaaatttatattcttgtttttagcattgagtttaccaagattcgtaaaaattaaaccccaaattcattctatatatttttaaataatttatataaaattcggatacggatacgaattcaaattcggatgtttttttcacctttttcgttgtagggaaaataatgcacaaaaaatctatacaaaattttattcttgtctctcagaaaaaggttttaacacgatgttaattcttgtggcttggcggctttggaagcatcaaaacacatgtgtcttcgatggagcatccccgagcattggaaatgtccttcagcaaatccaggaggatgcaattctgtggggctggttggggctagaggtcttaggggcatctggccttaaggcttcttccctgttaggtagattaggggtggtctttgccttgtgttttagatgagtgtttttttgttcttgtgttttcgacctaaggagtcatttgtatctggtctgttctaagaccttattcctttcttaatatattaacacacagttgtcctgtgtgttcgcgaaaaaataacattcttaacaatatgactaaagcttaacatcaaattatatgcatatctatgttaaaatattatatttgtcatataattcggatgtttaggatccatccctacaaatatctcaacaattcttcgcgagattttattttggctactagagtaagttaattgtattacaaaggttactaacagtgtgatacaaagtaggtaaaatttttggtggttattcgctgatacttgtactaatagcaactccagcaggaaccctaaaatcaaggcccttgatttgagggctcctatttttgagagctcaagttttttgtttctagcccagtaggagcccttaaattcattccaacatagaatgcaacatgggacccactcgtcactatccttgctccaatcaaattgaccaatgaagtatgaactatgcatgggaggggcttgtggtcgttggatatcactaggcgttgggaagaattgcatgcgacgagtctcatcgggagaaggggttaggggtcgccaggaaaggagaaggccatgctaggatctcgaaagtagagccacacacaggaagaatctcgaacctaggatctcgtcggcatcatgcttgtgataacaagcactcaggccgtcggattgacgagcctctcctagtatcacctgacgcaccccagacggatctatctcctgctcgaacattgtcgcttctcgcaacggcatagggcggcaatgtgggagaggggcactcacaacatagggcgatagtgtgggagaggggtgcccgccgccccgccgcaagggcacgatgaggaagagaaggaccagaccgaaggaacaaggctgcaaaaagggctacccttggcgtaggaatggggtatggagggaaggaaagagtagatgtgggagtgagaaaatggctaaccgcctgataggggtcgacgggtcgtggtcgacgctcacaagaatgaggactgaagagtgagatttgagggccttcttaatctgatggctttaataggggcctgttggagttgtgttttttagctgaactctcaaattttggtttagtggattgtttgactgacatgtttgagctgaaaacacaaaagactcatgtacattgtctgacatatggctgatgttacatgcgtcttttgtgaaattatttatgctacttatgttgatatatattatattctggtttttggattgtgcatgttagactcttgtatatgcgtgtggattatgggcctagagcccagtccattaggggtaaatatatgtactatgacagcaacccatctctttagagttttctttccaacatggtatcaagactaagcttgtcttcttcctgttccctcccctatccgccagaggtttgggcgctgccgacactggtcaagccccatggtcggcgctcccccttctattggctatcctcatctcccttctctctctcgtcgctgggcctctgtggaggctggcacttctttctcccccgtcgttgcccccatatccaccatggagccgccgcagccagggcttggatagttgtcgctgcctgtccctgcgcttcctgtcgccaactagcctgcccctgcacctgcaccagccgacctaggcacaaggtttgacggcgaacgaaacgaaacctccaaaggaaaggaacatcctttttcacaagttgagtaagtcgatggtgtgccacacgacattgcacacgcgccggaggtggtgtcccttgagtgtgcgctcgacgctttccatcaccgatgtcgccgcgcgactatctctgcggtggcaccacaggctcaccgtcgtcgtcctcgacatgtagctctacttcccgacgacacttgttcgctgccatcttcgtctttggccaggctaacacaacaacgagggtcgactggtgtcacaattgcggggcgtgttgtctctccaggcacgcgatggtcgggacggtcgtagtgtgcatgtggtggtcgtcagcgaggagtgcatgcagctccatgctgcctgcggggaagtggcgacagcgacggagccaagcttgggcacgtgtctaggcaggtcgggccttggctccgttggtgcactccaccctggtcgtggcactcacgactgctaaggccgctatggccgctgaccgctagagggaacaagtcttagtccttggctgcgagcatgaacacactgcggtggatgctctcgcccgataggttgccaaggttgagcgccatctcactggctctccttgccttgatccccctcgaagtacttggagaacatccactctggtccccatcctcctcggcctggctttttccacttatgccagctggcgcgacctcgtcctcctcacactgtagcgctacacccttgacgaccatgtcctcaccgacacgacgtctcttactatcccctcttagtggtagatggatagtgtggtcctctcttggttcctcgggatgatcgctgttgagctgtaggatgtcgttcgcaagcatcgttgtattggtcgctaagcctgggttgccatcgaggagtagttcctcaacaaccgcgaggctcatgctctccacctcgacgacacctttcggacctttgtcttgggggcgctctctgtcaccgagtattgccgctagatgaagggcatggcagcctccctttgtgaccttggggagcctgtcttcgatcacacgttcgtcctcaaccttcttcggggtctcaacgagcgctacgatcactttcggacttcgctcgatctctttcccttccttccacaaggtctgcaatgaccttatccttgaggagctcaccaagggggtgcctcctcgctcaaccaccactctacagcacagggagcccgacctcgcgcatgacttcctccactcctgcctcgggtgctcatcgttgtgtccgtctgtccctttggtgccccctcccccgcgtcctccttccctgtctagcctaaggggggtacaatgtccagtgatggtgggcatcgtcgacagaagggtggtcgtgggggtggacagggggatgcttcctgaccctctctccaactcgtggattgggtggatctccatgtggcttgtcctgtccctaggtggatcttcaccacacctgcgcagcccccaccggctcacttgacgatgcttggctcggggtatcctctcggtccacccgctcggtgccactggcacctctgccatcgctcttgcctttgccactacactcgattgccaccatacacttgtctactacgacaatgtcagcactgtctacctcttcgtcaaccccatctggcaccaacgtacaaagcatgttgagatcgatcttcatttcattcgtgagtgtgtggctgtcgaggacgttcgtgttcatcacgttctgatgagcttacagtttaccgacatctttactaaggtcttccctccttgttctcggactttcggtccagtttcaacatttgtcgtggctagagtttcaactgtgggggtgttagactcttgtatgtgtgcgtggattatggacctagagcccagcccattaggggtaacatatatgtaatactaagactacatcccatctctttagagttttcaatccaacaatgcaaaaaaattatattgtttgatttgtgattcgcttaactacttgtcatcgttatatcaaattttgttgttggaatgtttggttttatattcttaccaatgatcgattaatctgcttttattcaacttctactttagtttctaatgcatgtcatttgctccctttattttgttcccaggtaacttcaaagaggattaacttcataattg

SEQ ID NO: 173 - DNA, 5224 bp, Zea mays
  Intron number 8 from transcript GRMZM2G334917_T01 (locus G RMZM2G334917) derived from phytozome v7.0 (chr-ID 3; pos 4 7129062 to 47134285 reverse strand)
atcccagtctcgagcatcggtaccgtaagtgtcgtgaagagcagcttcagaaagacaaagaggtcattaaacagatagttggcatactccatggaaacccgtactccgagcaccttaggagcatgggccatgttgagaaccttgatgactatcatatcgcattgaaccttgaccagactttgaaccagaagacatataacacgcctctcacttcggaggtggctgctgtatggatcgaggggagcgaacggcgaggccagttcagcaagagtgttatgctacatgggaaggataggtcaagccacggcattcgctcataccatggatgctacgatgcactatcgtatccactgttcttccctagaggtgaacttggatggcatgcaaatatcccaaaggttggtgtatccatggatgaagtggatgcataccgtgcgacacatagggcaaacaattcaaacgatgaagatgcaggttagttgtttctttgtactttaggatttttgcacattattaactattctttcaacatcactcacttttcaatccttgcgtatgcagaatctcctacccatttatgtgtgtccgtacgtgactactactgctacaaattccagattcgtcccggtgtattcaatccaatacttcatggaaagcggcttttccagcagttcgctgtcgacacgtacatcaagattgagagctctcgtttagattttatacgtaagaatcaagatcgtttaagggcagacctataccagggcttggtggatagcatgttagacggagatatcagagcagaaaaggtcgggaagcgaactgtgctgtctacgtcgtttattggcggtcctcgtgacatgaaacgtcggtatatggatgctatggctctggtgcggaagtttggtaaaccggacatctttcttaccatgacatgtaaccccaactgggatgagataaggagggagcttctccctggccaaacaccgcaagatcgtcctgatcttgtagtgcgtgtctttcatgcgaagctacaggagttaaagcataggctgactaaacatgatattctcggtaaggtccgggcctacgtctacgtcgtggagtttcaaaagcggggtttgccacatgcccattttctactcatcatgcagaggaagtacaagctaacgtgccctgagcagtatgaccttttgatctcagccgagatcccacacaacaagtaccctgaactacgaaagatggttatcaaacatatgatgcatggtccgtgtgggtcgctaaaccctaactgcccatgcactaagggccatgcatcatgcaagaatcattacccccagccttttagtgacacaaccttgcaagggaaggactcatacccgatttacagacgtcgtgatgatgggcgtaaggaaaaggttcgagggtgcgaattggacaatagatgggttgtcccttacaacccttacctccttcgtctcttcaactgtcacatcaatgttgaggcgtgtgggagcatcaaggctgttaaatacctgttcaagtacatatacaaaggccatgatcgcgcgtctgttgttatgagagatgcaagcaaggcagatgatgatgtagatgagatcaagcaatacagagatgcaaggtgggtgactcctccagaagcgttatggaggatatacggctttgagcttagtcaaaactctccacctgtgatgcaactgcaactccatcttccaaacatgcacatggtggcgtttcacgaacggcaaatggtcgagcgagtcgtcaatcgtccaggtgctgataggtcaatgctcacggcatattttgaagcgaataggctacatgagggggctcgtggcattctgtatcgtgacttccctgagtggtacacttggcagagtggtaagggcaaagtatggcaacggaggaagcgtgatacgggtggacaagtcggtagaatagtctctgctcatcccgctgagggggagcgctactatctccgtgttctcctaaaccatgtgacttgcgccacctcctatgtagatctaaggacagtagatggtgtcacgctaccaacttttcgtgaggcagcagagagaaggggactgcttgagtcggacaacacactggatgagtgtctcactgaacgtgctcttttccagatgccatcggcgctgcgacgactttttgccacaatactggtgtattgtgagccaagcgacgtggcggtactctggcaaagacacctagatgctatgtctgaggactatcaacacaggagtcagagtaaaactcatgttgagcagatggtattgattgacattaggaacatgctgcagtcaatgggaaaggacataaagacattccctcttcctcctatcatcgacacgtatgacgatgctattggtactgctagggaggtttacgaggaggaaagtatcgaaccgggagtgggagatgtggctctcaaagactctcttaacaaggaacagggggccgcctacgataagattctatctgccgttgacactgatcagggcggattgttctttgtggatggacctggtggcaccgggaagacttatctatacagagtgctgctcgcgacgctacgcagccagggcaagattgcagtggcaacagctacatctggcgttgcggcttccataatgcctggaggaagaaccgcccattcacgcttcaaaatacctctcactattgacgatggcgctgtatgtagcttcacgaagcagagtggaactgcagagttgctacggaaagcatctctcattatctgggacgaggcttctatgaccaagagacaagctgtggaggcactggacaatagcatgcgcgatataatgggtcggcccgaactaccattcggtggtaaaaccattgtcttcggtggggattttagacaagtcttgcctgttgttcgtaaagggtcaagggctcaagtggtcgcttcttcgctacggatgtcttacctatgggagtccatgtcccacttaaagcttgttagcaatatgagggcaaaaaatgacccttggtttgcggagtatttgctgcgcgtaggcaatggaactgaggacacaaatagtgacggtgatatatgtcttcctgacgaggtatgtgtgccttatagtgggagtgacagcgatcttgacaacctaatagacttcgttttcccaaatctcaacgaaaatatgtctgattcgacctacatcacttcaagggcgatactgtcaacgcggaatgactgggtggatatgataaatgctaagatgatcgaacgttttcaaggggagcatatggtgtaccatagtttcgatagcgccatggatgatccacataactactacccacctgagttcctaaacacactgacgcctaatgggctgccaccacatgttttgaagctcaagattggatgcccggttatattgcttcggaatatagaccctgccaatggactttgcaatggcaccaggctggtcgttcgtggtttccaaagaaatagcattgacgcagaaattgtgctgggccaacacgctggaaaacggattttcttgccgcgtatacctctatgtccctccgatgaagagatgttccctttccagttcaaaagaaagcagtttcctgtacgccttagctttgcaatgacggttaacaaagcacagggtcagactattcccaatgttggagtgtacttgcccgaaccggttttctctcatggccaactatatgttgctctatctagagcgacagctcgatcaaacataaagatccttgccatcccagccgtcgatgtgaagaagaggtcgaggaagggcgtaaaaaagaaccccacaatagattgtgggacatgcaccaagaacatcgtctacaaggaggtcctaacaaactagacccatggtaagggctacgtgttcagctaacaaactaataggatgatgttcatcttctgtttgattggtctggtgtattatcaagtcatgtttacacgctacaattgttaatgttatagctacacaatttgatattaccagaaaacgcttggaaaatttgatgatttgaaagctggagtactaggacccataactagacatggcttgggggtcggggtagtgactatatcatttgcagtccaagtttaaacatcctgattttattgatattttggttacatttgggcatttggcttgtctgaataagtcttttgatgcattttgattgagattaaaatgacatttgtatgtactccccgttacttattgagacacttttgtattttaacattcatgactgatgagttgaaaatgattagtttattgccctcaatacatgctgcatgcgagtttggttagttttgcagatgttgaaatagcaaattttgtctattcaagtgtcatgttcattatacttatttcttagactttgtattgttgcctgctctttgctcatgctccagctaatttcagtgtttgatgctactcatagtactaaactgtacatagtctcattcgattttcagttaaattaacatgttaatttggtaccatgattttaaatatgttcattttctcttggtgcttttaaatatgttaattctgactcgctccttgcataactgtagagtattcagctactatggtggtgtactgaagattacttctctactaaaaggtaggagtcagtcagctgctggtcacccattctgagaactgtgtggccactggattcttgtcttgtccttttaaccattcttctttaatggaatgactcacaactctcctgcatattcaagttaacaattacacatctcgtatttttaagcaacagttcacatcatgtattcgccctcactttgaacagttgattaaccctaaaccctcttatgtacgctcttagaacttcaaattgctaatttcttaactaatgaacatacttgagagcagttttctgccactctctcagaagctcaggcttcatgtttcaaatccaccatgttttgttttatttgtttcattgggatttgagcttctcacaacctcattgtatatataactcttcgttgttcagtgaaatgtacatcattacatatagcttatcatttctctaactaacatctgtgagtcttttttaatggattatatctcattagcttccttttttggcatattcagctgctgttgctcagctcaaaaacttgaactgtttg

SEQ ID NO: 174 - DNA, 2091 bp, Zea mays
  Intron number 2 from transcript GRMZM2G030880_T01 (locus G RMZM2G030880) derived from phytozome v7.0 (chr-ID 1; pos 4 3552290 to 43554380)
tcctcccaagtaactgcacaagtgacagctaggaggtgagttgtaaatcaatattatttcaaatgggaagtctggattgtacaatttttacgtgcattacaccaactacagtagtattgcctccattgcaacctagttgtatattaagttactcttcattccatcgaagaaatatttgggggccaggtacaataatatgttggtcggtattcaataaatcataatacatgctgatgctcctgatttaacttttgcgcacgttctaacttctcagcgactgcaatgtctggtcatcgaatattagctgtattaatcagtgaacggtagtttgtagtgttgggactatttgggcaagtggacatgtgcaaagtatcaaattgggagctgatatgtacacacgaggatcatgtttcttgtaacagacaaatccaagtcaaaagagacagatcattgtcttcatacaataataagccctaggcagacaggaatcttgcttagatgtaaagctgtgtaactaaccttgtttcctaggccctaaataattggctcatgtctcttgtgccggaggcatcaaacttcagacttctcatccttcaggcttaaacagtctccaagttttgactctcttgtagggttgttgcagtgtaggtctagttaaaaaaagagatcggttcggttctgaaattggaaacaataatggttatttgcattcttaaagttagcatgctgtttagagcatccggagttggttatttgttaccttgggtccttcactaatgaaaaaaatgtctgaaaacagtgtagaacaataaattacaacgttttttttatgaatcgttaccgtgatacttatacatgtcccctgcttctgaagctcttgcattgcctttgattccaaacagtagcaaaacagtggtccatgctgctgacaccaagactttcttccccctgtgtgaacggaatagatggggtcatatagtatagtgtggcatccaagtcaactgctctctggatgaccagacaatttcttctaacaactttggccggtctgcacctgtatttcagtggctcattgaatgtgcattattgtacagattatcagcagatgccttttaggtgacgtctagttctggggcacttgccaggtccgtgactaacaaagaaccagagctgcatagcgttagtgaatctctatcttcctctcctgttcttgtctggagacctaatcccattgctagatattgatttcagtacttgttagaccatgtacagtcagcatgggcaatttgggcagccggacaagggctatagttttctatggctagccagatggattgcttatcgcagaatctagccagtcgtagtccaactttttttttcagattagccttgtgactactctacccaaacacggaaacgccagattggctggacatcgttgttcttgtaaatctgatttcattgctggtaaccaacagaaggtggctgatttttattcccatgccagtagtacttttgttatttattcttcacattgcacagctgtcacttagcagtgcatcagaggttttgaatagtactagaggccaagcagcacaatgcacacgacacatcgtccaagacgcggtttctccgtagtaagaactaagagacagggttgccccagtgtatttcaaggtttcaggcgctaaaaacacagtgctgcagcgtacttctagaaggtctcaaacttgggagaggagatccttgctctccaagtaaactgccccccacccccactcttgcgagaaatttgctgttttgccactctcaaatttggctgcttgttattatgccatcccgtgtctatgactggtgggaccatctgtgtctatgatttatggattcgatggcataatgacgaagcccacaaatgataatggcaaaattgccaatggctccactcttgctcggctctcatctggaccatcccatctgctctgcctgcagctataaaacggcggagctctcgcccgctccccgtcactcacccactctgacattagacacaacacagcccacacggctctccagtccccagattcccgcgcc

SEQ ID NO: 175 - DNA, 9497 bp, Zea mays
  Intron number 11 from transcript GRMZM2G048403_T01 (locus GRMZM2G048403) derived from phytozome v7.0 (chr-ID 1; pos 210109886 to 210119382 reverse strand)
gccgacgcggtggtagggatggcggccgtggacgcggtggccgtggctttttgagagcgcctagagggggggtgaataggtgatcctgtaaaacttgaaacttaagccacaaaaacttggttaagcgttagcacaataatcgccaagtggctagagaggagtctcaacaaaacataataaccacaaagatatcaatcacagagatggcacagtggttatcccgtggttcggccaagaccaatgcttgcctactccacgttgtggtgtcccaacggacgagggttgcaatcaacccctctcaagcggtccaaagacccacttgaataccacagtgttttgctttgcttttcttaatcccgttcgcgaggaatctccacaacttggagcctctcgcccttacacttgaagttcacaaagaagcacggagtaagggagggatgagcaacgcacacaagacacaaaatcagaatgtcaacacgcgcacaagtcgcaacaagagctcgcaacacaacccgacgagttcacaactcaacaagagctctagatgctatcacgaagaaacaaatgcgtggaatcaaagtcttggtgcttaggaatgctttgagtatgcttggtgtgctcctccatgcgcctaggggtcccttttatagccccaaggcagctaggagccgttgagtgcattctaggaaggcatttcttgccttctgtcgactggcgcaccggacagtccggtgcaccaccggacactgtccggtgcggatttctttccttctttgtcgaagccgaccgttggcactttggagccgttggcgcaccggacactgtccggtgcacaccggacagtccagtgccccctactagctgttggctcggccacgtgtcccgcgcggatcgcgcggccgaccgttggctcaccggacagtccggtgcacaccggacagtccggtgaattttagccgtacgccgttaattacttcccgagagcagcaagtttgcctcagtctgcctgcaccaccggacagtccggtgcacccagactgagcagactttggcagaacaaagccacctcttttccaatttggtttctcctgtttccagcacttagacacaatacattagttcataaaacaatgtactaagtctagaaacataccttttgacttgatttgcactttgtccaccactttgcatagatcaacacttaggcacttgtgttggacattaaatcaccaaaatacttagaaatggcccaaggcacatttccctttcaatctccccctttttggtgatttatgccaacacaacataaagccagtagaacaagtgcaaaatcaattcaaataagaactcaaaattgttttgattcaaatttgacatatatggatcactctttgccaccacttggtttgttttttgcaaatcaaactcaatttcctatctctaagtcaaacacacatgttgaaccataatgagagctgtttcaaaactccccctttttcccatgattaagccttctccccacaagagaccaacttttgacaaaagagacaacaagagagttttgacaaatcaaaaagttctattctactattttcaaaatttctcaagtggtagctgatccatttattgctttggccttattttctcccctttggcatcaaacaccaaaacgggatcaatcttggccctttaaccccattgcctcaccaaaatcttcaactaagagtaaaaaggcaataagagtacaaagatgaacttggaaaagttactctttcatcggagtgcagtggaagtcttgcatggtccaagtccaccttttccctttcaattcacctttgagactaaatcaagcactcaagcacatggttagtcccaaagagtcaagttgtaacacacctccccctaaatatatgcatcacttgcaagtggacttgtaaggtccggggagtgcttgtacaactttagcaccattaataaacaacacaatgcataaggaacatgatcaagggcataaacacatgtatgctataaatcaatccaagttccgtgaatctaagacatttagctcactacgcaacttgcaaaaggtctgctcatctaaaggcttggtaaagatatcggctagctggttctcggagctaacatgaaacacttcgatatctcccttttgctggtggtctctcaaaaagtgatgctggatgtctatgtgctttgtgcggctgtgttcaacaggattatccgccatgcggatagcactctcattatcacataggagtgggactttgctcagattgtagccaaagtcccggagggtttgcctcatccaaagtagttgcgcgtaacattgtcctgcggcaacatactcggcctcagcggtggatagggcaacggaggtttgtttcttagaactccaggacaccagggaccttcctaagaattggcacgtccccgatgtactcttcctatcgaccttacatccagcatagtcggagtctgaatatccaatcaagtcaaagttagacccctttggataccagatcccgaaacaaggcgtagcgactaaatatctaagaattcgcttcacagccactaagtgacactccttaggatcggattgaaatctagcacacatgcatacactaagcataatatccggtctactagcacataaataaagtaaagaccctatcatagaccggtatgccttttgatcaacggacttacctcctttattgaggtcggtgtgtccgtcagttcccattggagtctttgcgggcttggcgtccttcatcccaaaccgcttgatcaagtcttgcgtgtacttcgtttgggagatgaaggtcccatccttgagttgcctcacttggaacccaaggaaatagcttaactcgcccatcatcgacatctcaaacttttgagtcatcaccctgctaaactcttcacaagacttttggttagtagaaccaaatattatgtcatcgacataaatttggcacacaaaaagatcaccatcacatgtcttagtaaaaagagttggatcggctttcccaaccttgaaagcattagcaattaaaaaatctctaaggcattcataccatgctcttggggcttgcttaagtccatagagcgccttagagagcttacacacgtggtcggggtaccgttcatcctcgaagccagggggttgctccacatacacctcctccttgattggcccgttgaggaaagcgctcttcacatccatttggaacaacctcaaagaatggtgagcggcatatgctagcaaaatacgaatggactctagcctagccacaggagcaaaagtctcctcaaagtccaaacctgcgacttgggcataaccttttgccacaagtcgagccttgttccttgtcaccaccccgtgctcgtcttgtttgttgcgaaacacccacttggttcccacaacattttgcttgggacgaggcacaagtgtccaaacttcatttctcttgaagttgttgagctcctcctgcatggccaacacccagtccggatctagcaaggcctcttctaccctaaaaggctcaatagaagagacaaaagagtaatgctcacaaaaattaactaatcgagatcgagtaggtactcccttgctaatatcacccaaaatctggtcgacgggatgatccctttgaatcatcgctcgaacttgggttggaggtgccagttgcgcttcttcctccattacatgatcatcttgagctcccccttgatcacacgcctcttgttcatcatcttgagttggggaatgcaccattgttgaggaagaaggttaatctcgttcatcttgttcctgtggccgcacatctccaatcgccatggtgcgtattgcggccgttggaacttcttcttcatctacatcatcaaaatcaacaacttgctctcttggagagccattagtctcatcaaatacaacgtcgctagagacttcaactaaacccgatgatttgttgaagactctgtacgcctttgtatttgagtcataacctaacaaaaacccttctacggctttgggagcaaatttggaattcctacccttcttcactagaatgtagcatttactcccaaaaccccgaaaatacgaaacattgtgtttgttaccggttagtagctcatacgacgtcttcttgaggaggcgatgaaggtagaccctgttgatggcgtggcaagccgtgttcacggcttccgaccaaaagcgctcgggggtcttgaactctccaagcatcgtcctcgccatgtctataagtgttctgttcttcctctctaccacaccattttgctgtggtgtgtagggagcggagaactcgtgcttgatcccttcctcctcaaggtactcctccacttgaaggttcttgaactcggacccattgtcgctccttatcttcttcaccttgagctcaaactcgttttgagctctccttaggaagcgcttgagggtcccttgggtttcagatttatcctgcaaaaagaatacccaagtgaagagggaaaagtcatcaacaataactagaccatacttacttcctcctatgcttagataggcgacgggtccaaagaggtccatatgtagtagctccagaggtcttgatgtggtcatcacattcttgctgtgatgcgctcctcccacttgtttacctgcttgacaagctgcgcaaggtctatctttttcgaaagtaacattggttagacctatcacgtgttctccctttagaagcttgtgaagattcttcatccccacatgtgctaagcggcgatgccacagccagcccatgcaagtcttagcaattaagcatgcatctagactggcctctttttttgcaaaatcaactaaataaagtttatcgtctaatacacccttaaaagctaatgaaccgtcacttcttctaaaggcagacacatctacatttgtgaatagacaattatatcccatattgcataattgactaacagataacaaattatatccaagagactcaactaaaaacacgttagatatagagtgttcggatgaaatagcaattttacctaacccttttaccttgccttgattcccatcaccgaatattattgaatcttgggaatccttttttttgacgtaggaggtgaacatcttcttctctcccgtcatatggtttgtgcatccgctgtcgataatccagcttgaacccctggatgcataaacctgcaaggcaaatttaggcttgggtcttaggtacccaactcttgttgggtcctacaaggttagtcacaattgtcttagggacccaaatgcaagttttatctcccttgcatcttgcccctaacttcctagcaatcaccttcttattttttctacaaatggcaaatgaagcattgcaagcatgatatattgtagaaggttcattaactttcctaggaacattagcaacatttttcctaggcatatgatcaacatatcttctagacatatctctaccatgcatataggaagaactagaagcaaacatggcatgagagtcaaaagtatcataagtattacaactcctataagattgtcttctatcatggtacataaaagcatggttctttttagtactactagccataggggccttccctttctccttggcggagatgggagccttatggcttgttaagtccttggcttccctcttgaagccaagtccatccttgattgaggggtgtctaccaatcgtgtaggcatcccttgcaaattttagcttgtcaaattcattcttgctagtcttaagttgggcattaagactagccaattcatcattcaatttggaaattgaaactaggtgttcactacaagcattaatgtcaaaatctttacacctattgcaaatcataacatgttctacacaagagttagatttactagctatctctaacttagcattcaaatcatcgtttatgctctttaacctagaaattgtctcatggcaagaggatagttcacaagaaagcatttcacttcttttaacttctaaaacatgagatttttgtgccctaacaaatttatcatgctcttcatataaaaggtcctcttgtttctctaaaagtctatccttttcattcaaggcatcaatcaattcattaatcttatctattttagctctatccaatcccttgaacaaactagagtaatctatttcttcatcactagactcatcatcactagaagaattataagtactattgtctcgagtacataccttcttctccttcgccatgaggcatgtgtgacgctcgttggggaagagggatgacttgttgaaggcggtggcggcgagtccttcattttcggagtcggatgacgaacaatccgagtcccactccttgccaaggtgtgcctcgcccttagccttcttgtatgccttcttcttctccctcttgctcccttgttcctggtcactttcattatcgggacagttagcaataaaatgaccaatcttaccacatttgaagcatgagcgcttcccctttgtcttggtcttgcttggctgtcccttgcgaccctttagcgccgtcttgaagcgcttgatgatgagggccatctcttcatcattgagcccggccgcctcaacttgcgccaccttgctaggtagcgcctccttgctccttgttgccttgagagcaatgggttgaggctcgtggattaaaccgttcaacgcgtcatccacgtatctcgcctccttgatcatcattcgcccgcttacgaacttcccaaggacttcttcgggcgatatcttggtgtacctaggattttcacgaatattgttcaccaaatgttgatcaagtatagtaaaggaccttagcatcaggcgaacgatgtcatggtccgtccatcgcgtgcttccgtagctccttattttgttgataagggtcttgagccggttgtatgtttgggttggctcctcgccccttatcattgcaaatctcctgagctcgccctctaccaactccatcttggtgagcaaggtgacgtcgtttccctcatgagagatcttgagggtgtcccagatctgcttggcattgtccaagccactcaccttatggtactcgtccctgcacaaagaggctaacaacacagtagtagcttgtgcatttttatgaatctgttcattaataaatataggaatatccaagctatcaaatttcattccattctcaacaatctcccatatacttggatggagagagaataggtgactacgcattttgtgactccaaaatccgtagtcctccccatcaaagtgtggaggtttgccaagagggatggaaagcaaatgtgcatttgagctatgcggaatacgagagtaatcgaaagaaaagttcgaattaaccgtctttcttttgtcgtagtcgttgtcgtcgttgtccttttgggaagaagtggactcatcgctgtcgtcgtagtagacgatctccttgatgcgtctcgtcttcttcttcttcccatctttgcgtctgtggctcgagcccgagtcggtaggcttgtcatccttcggctcgttcacgaaggactccttctccttatcgttgatcacgattcccttccccttaggatccatctcttcgggcgattaatcccttcatgaagagaacggctctgataccaattgagagcacctagaggggggtgaataggtgatcctgtaaaacttgaaacttaagccacaaaaacttggttaagcgttagcacaataatcgccaagtggctagagaggagtctcaacaaaacacaataaccacaaagatatcaatcacagagatggcacggtggttatcccgtggttcggccaagaccaatgcttgcctactccacgttgtggtgtcccaacggacgagggttgcaatcaacccctctcaagcggtccaaagacccacttgaataccacggtgttttgctttgcttttcttaatcctgttcgcgaggaatctccacaacttggagcctctcgcccttacacttgaagttcacaaagaagcacggagtaagggagggatgagcaacgcacataagacacgaaatcagaatgtcaacacgcgcacaagtcgcaacaagagctcgcaacacaacccgacgagttcacaactcaacaagagctctagatgctatcacaaagaaacaaatgtgtggaatcgaagtcttggtgcttaggaatgctttgagtatgcttggtgtgctcctccatgcgcctaggggtcccttttatagccccgaggtagctaggagctgttgagtgcattccaggaaggcatttcttgccttctgtcgactggcgcaccggacagtccggtgcaccaccggacactgtccggtgcggatttctttccttctttgtcgaagccgaccgttggcactttggagccgttggcacatttccaaaatacttagaaatggcccaaggcacatttccctttcacttttgtaacaagtaggcactcctagtgcaggtacaactcatcctgtaattgtaaagttcactgcattttggtttgagaattttttttgccgcattgtggtttcttgctgcaaaaagcttgaactcactactgtactaccttttatttgcacaggaaagaagaccactttggtgatgattggtgatgaacgtggaggatgcggcaaaaggaggaatgatctgctgatccaatgaaactgagtttttttgggtcttgtgttgtggtaccataactggaatttggtatttttgtccactatttactgtagtggtatctggatttcccttatgttgcctatgctgcaatacaccattctgattttgttatccacctctgtcgtttataagaagcggctgtcctcaggctactatgccgaactaaaatggcaatggagcaaaacaaaatcttagttctggagcgaccaaaacgaaatctccgccaacatgacatggagagttcacacaattgattcttttttactttgttgtcctggagccttgagggtatatctttactactattaaggctgcaaggggtaggctgcctccctggttctgccttcggtgaatctacaccgtctactcgcttccgtaaatctacgccgtccgcctgcccacgcccacgttcgtccccacgtctccccctcccccaccctgcgtgaaccgccgcctcccccctccagtccgccgccccgcctcccccctccatggcctgtcatctctgtcccctcttcaatctccgactcttgctgctactcggcgcggttctcgggaacaccgaccgccggggcggcggagcggaggcttcagatcgggcggagcctgacccgtactcgatcctgatgtggcacgactactcgccgccgtcgcccccgctcccgcccccggacccgccgtcgccgacggtgacatgtgagggggacctccacgggaagggggacttccacacgaggaagtggagctggacggcgacgtctacatcacggg

SEQ ID NO: 176 - DNA, 40827 bp, Zea mays
  Intron number 1 from transcript GRMZM2G009268_T01 (locus G RMZM2G009268) derived from phytozome v7.0 (chr-ID 10; pos 48400951 to 48441777)
ttccttggcctgccctcgtctctagggatgagcccatgtcggcgccctcctctagctcagccactggcctgccctcgtctccctgctcaatttttttcctttttctctctactctcggccgctggcagccatggcgctggcacctgctccatgccgatgccccctgctcctcttctctctaccgcaagcacccctcctccctgctctctgttcggcgcaggagcccctatggtgccttgaaacggctggcgtcttccacttggccggaaatctcctcatccaaacttgctgcctgtcctcgctggtcgtgtgcagcgagcatccctcgccgacatcctccctcgcctcgccagccgagctccttcttggccgagctctcctcatgcccgtcgcgcctattcccatccagattccgtgccctttctccagtgtagcagcactgctgcggggtttcctcgtcgcactcgttgtggcagaaccacccgaattattctagtttaagtgcccaagtcacgccacagaggccataacacacttaaatcggaataaccctccagtccctcagatctagtctgattaagccactttaccaggatcaaataccacaaacccactcgaaggcgagtcacagaagaaatacaatgaaacaggaaaacctcaaattaaagtactgaattattacataaatcagagtttttcaagtagctgatataagatcacaaaataagttgcagcggataatcgatatcgtcgaaagtgaggaaatgggcaaggcctagcccactcctcctcctcctcctttcctgccggagcagcatcccactcgaccgtccaacccggtggcagggtggtaggccaagtcacaccatcaaccatatcctgaagcgtacctacaaaaactatgccacaagcatggctgagtatactaatactcagctagacttacccggtgtgaggaaactactcctctacctctagaccatggagctgtttggctgagggatttggtttgccaaaagcactagctgagtctaaaatcaaattttagcttttcaatttctagcatcattatcttagctaagtttgctccttctaagcacacatggtaacaagcatttagtacaatcaacaagttatctcaagtaagcctcatttcacttcttactcaatgtagtacaaggggtcaagcagtctcattagctgcgagaagcagacgatttgaatcgagtttttatccttgtaaggtaaacctaaacacacgacatgtaaggccgccccgtccccacacacgtcaactgtccccatcgattccccgttcgcggccagggctcaccgccttggcatacaatgctccactgaccccggctgccgccgtgcagtgaccgcacttgtacccaccatagctagcatgggagacccagtctcaggacaagtgaggggaaaagtccacgcccagcttcactcaggtactaggtttaccggttaccatatttcccgatatgtgtttagtacgttcaaacgcttgactcaggtatccacacattaatccttaattccttttcccgtctcatggacaaggcatcctccctggatccgagtccatggaccatcatagatcccgttatcaagatgaatagaatcaattccttacctcgcgcgagtgctagagaaatcactcgacttctaccgagatcctaattagcatagcagctactcgacctagcatactagtatccatctcaaaaaggaatcctgagttcatgcaactaaaggtttcaaacaactcctatacttaagtgcacattacaagcctacaatattaagtgtagtaaagtagcatatataaacggttatgcataaaaccggggtttgccttcaatagctggggctgcagggagatcctcgatggcagtctcgggagcttgctcctggtcttcctcgtggacagctccttgctcggggatgagcacgtactctccgtcagtgagattgcaatctaatgaatgcaatgagtaagatacatgcatggtatgatatgcaatttagcaattaaactttgatggtgaatgatcaaattaataaggtagagcttaatcttgctactgaagattcttgtggtatacttagcaaatgagggtcaagcttggttaagctaattggtaagtttattttggtgttctactgatttccctttaatgtcttagtgagtgtttattaaggtttctagctgaatcattagagtgagatttattattccctctcttaattcttatttcttttatgcttttaaggtgggtttgaactacaagatagcttaataaatttccaacaattctgcaaaaattacagtggcttcttactggtgtataagcctctatctcaaaatttggggtttaaaaagtgagtggttcgctctgtataaaattatcaaatattagggcagagggggtgttttgaactacgaccttctttttacagtgagttattctctaagacttatttttgttggcattcagaggctataacatgattttgtacaaatgtttagccactattactcattagttattttactatgattttctaaagtttctagccaaaggggtgctttctactaccactatatttgaaaatatcaaacaaccaatttctaattttttcctatcttcttctttgtgcaagagcaatcattctgaaatttggcaactttttgcttaagggaaaggtggtaggaaattcttgaactagatggcctttttcatgaagtattagcaatgggtgttacttgtagctttcaattgggttttgcatttttctctagtggcctatttctttattaacctggtaaaaatttatttgcccactgttgcacactttttggcttgcttatgatttaattgaaatatggcttaatatcatgttctatttgtttaccctatttaaaatgatggactggggtgtttatcatttttgtagtggggttctagtggttacaagtccactggatttttcttaacaattttgaaattgttttcataattctaataattgtttttctagtttgattaatgcttaataaaacatttcacctagaatttgttctggactagggttccctttatttttcctaaattttctattaccttagtaaactaggaaaaataattgcattcactactcattattttctagtgcctttctcattttcctaagttttgggcacatatggcttttaataagtaaccttgtctaaatcttcaatactagggtgctcattatttttaaagagtgcttatttggggtttacacttctacaaattttcttaggttcagcacagaagcataactaatttttcttagtttaatatggtttggtcagtttccttaattaattccaaactctaaaatttaaaacagaaagcacagggttcaatatttttatgtgatagttcataatattttgaatccagcaaaattggtttagttaaatttggttgaatataactcaagatataaattttctaagttctttgctgcatttaaaaaaattaattagaaatggttaaaggaaaaactgttttgcactggggtccctggcgaaaggttttgaatgaattacagacaggtcctcggtacactattcacatgagtctaaggctctgcagaatacaccctagggttttgcaaaatcgaacccgcagtccttcccaatggaacagtggccttggaggaagaaaagggcggaggggcttaccggcggcgagactgctccggtgaggtggtcgaggatgtaggggaggtcctgagggtcacggtgatgtgcgggtcgccgtcgggaatggtcggagtcggccggtccacgtgcgcaggcggagatgctcatcggcggcgaggaattcggcctgctcacggcgcgattgtccaagtgaaccggtcagagagcttcgccagaggtcaagaaggacaggggtgcaaggaattagacaatggatcaccggattgctcggtccacgcgcggcggcgggcgaccgaagttcggcgatggtgaatccgcctctctagtgaggcaataccttggctcaagcttggagaagcttcacggcttcacggggaagcggtccaggggctggggcaaggttgggggtcaacataaggggctggccacaacggtcgtgctcgagcagtgatggcgggcggtggtgcttgctttccacggcgaactccggtgatctctggctcgggcggagctttgggtgcgcgagtgcaaacagctaaggcctctgggggcatttataggcgagggcgacgagcagacgcgcgaggcagggcgaccacgcgcggggcacgcgctgccgcggccagtccgtgctcggccggcctgacacggcgtcgagcaagtggctctttgctcctgcccgagtttaaacgctcataggttggagatcttcgtgtatttgggcatgatcactgcacaagatttgctctcccgacagggctttgtcgtttatgtgtggaagtcgagcggtttggggctgtgtacagagagttgtcgcgtcgctaaggtggaagtgccacaaggtcgagtcccgaggtaaatccatgtcaagatcatgtcaaatggtggagagaggtttccaaactttgtcatggtgggttctaggaaatttggcgccactttgctatttggacttgtttgatttaagttttgaaaaacatagaacgcggtcgatctttggaaaggggctgaaattcagatttctgaatttctgattttttcccaaagtgcattagttcaggggctgatttagggattttgaaaagttcaaatggcaaaactttcttactatattttgttggttatttagtgtactaaaactttgttatttgggttttaccaaaatttgtatttttctcccaagtcttttcccaaatgccctttatgtgcttaaatggtccacttaaggttaattagggtttgagagttcttcttaccttgaggttcatcacatgattaaggagaatttcttaagataaaaagacttacttcaacctttgttattaaattttttttgtttgatgttcatcccttcatttggttcacatgtgataatggtttgggttagcttaaggaagaaaccctaggtgatactggggtgtcacaacattcccccttaaaggaatctcgtcccgagattcgggtcggagtcctcccggggtgaagtaagggttaaagctttcttgatgtgggtgatttattcattaaaatccttcttggcaaactgctcttcgaatgtcatcctctttgcaacttcagaaggaagcccttttaattttaatcttatcattaacttattctgttttaagatcatttttcttatgttttgattcaaagggcaggggaggggttgggcatgattacgtaccaattcccttaggtagacaatcagggaagttggaacgcagaaattgctcagtctcccaagtagcctcttcctctgagtgattactccattggatcttatacatcttgatcgatttagcccgagttgatctttctttgcaatccagaaacttggaagggtactcttggtacgatagatctagctcttatctccaattctggttctgctatgatctcggtcggcaatcgaacacacttctttagttgggatacatggaacacattgtggatggcagacatttttggaggtaacttcaacttgtatgccacggtccacatccttctatgatctcataaggtccaatgtaatgaggggctaacttgcctttgattccaaacctctgcactcctttggtgggtgataccttcaaatacacgaaatctcccacttcaaattggagaggtttctttctcttatcatggtaactcttctgcctcgcctgagcagattctagattcttcctgattagtttgaccttccttttggcttcagtcactaagtcaggtccgaaaacttctctttctccaggctaagaccaattgaggggtgttctacaccttcttccatagagagcttcgaagggtgccatccttaggctggattgataactgttgttataagcaaactctgccaaggagaggtgcttatcccagttcttgccacaatcgatcgcacaagctctcagcatatcttcaagaatttgatttaccctctcggtctgaccatcagtctgcgggtggtaagctgaacttcttattagcttggttcccaaagactcttgtagtttttcccaaaatctggcaacaaatggggctcctcggtcagagacgatggtccggggcaaaccgtgcaaacacacgattcggtcaatgtacaactctgcatacctttgagccttatcagtggtgtgcactgggagaaaatgtgccactttcgttagtcggtccacaataacccaaatcgaattatgatgacgagaggtgttgggcagacccacaatgaaatccatgctgatgtcatcccatttccatgaaggtatagataggggttgcaaagctccagctgatttcaagtggcttgcctttatcctctgacatgtgtcacattctgatacatattgggctatctccttcttcattttggtccaccaatacaggggcttcagatcgtggtacattttggtgctccctagatgcatggagaatttggagagatgggcctcatccaagattttcatcttgagatccttatttttaggaaccaccaatctgctttcaaaccacaacataccttttccatcttggcggaaacatttatacttctcggtcttctgatggaggttctccttaataatttgcactcccttgtcactgagctaggccatgatgatctggacttgcaaagctggctcaacagaaatgtgagacaaagcaccagaaggaatcacttcgatcttcattttgctcaactcatcacacaaggtgttaatgcgagaatccatcataacacagtcgcattgcaatttccgactcaaggcatctgcaaccacattggctttccttgggtgataatgtacctccaggtcataatccttgatcagctctagccatcttctctgcctcatgttgatatcatcctgagtaaagatatacttaaggctcttatgatcagtgaagatgttgcagtgggttcccatcaaatagtgtctccacattttcaatgcatggaccatggctgacaactccaggtcatgagtgggataattctgctcatgaggtatgagggctcttgatgcgtaagcaatgactcagttgtcttgcatcaagacacaacccagtttagtgccagaggcatcacaatacacatcaaatggcttgctgctgtcgggttgcgctaacactggtgcggtggtcagatgttgcctcaatgtatggaagacaacttcgcacttctgaccccaaacaaacttggcttctttcttcagcaactcagttatgagcttcacaattcgagataaatccggaatgaatcttcagtaataaccagccaatcccagaaaactccgaatctgacggatagtcgttggtggcttccagttcatcacctcttgcaccttatcaggatcaacagctatgcctgcctgagagatagtgtgacccaagaatttgatttcctttagccaaaaatcacattttgacaatttggcataaatacggtgctctcgcagacgttgaagcactacatgcaaatgcccgacatgctcttcttcgttctttgagtacaccaggatatcatcgatgaaaaccactatgaatttgtctagttcgggcatgaaaacagaattcatcagatacatgaaatatgctggtgcattggtcagcctagatgacatcaccaagaattcatacagcccagatctggtcgagaaggcagtcttcggaatatcacttgctcatatcttgatctgatgatagccggagcggaggtctatcttggagaacactttggctccgaccaactgatcgaaaagaacatcaatacgaggcaaaggatacttgttcttgatagttaccgcattaagggggcggtaatctatgcacaacctcaagctttcatccttcttttttacaaacagggctggacattcccaaggcgaattacttgggcgaataaaacccttgtccagcaattcttgcaattgtttcttcaattctgccaactcagcgggtggcatctggtaaggcctcttggaaataggtgttgttcccggttgcaactcgatggcgaattcgatgtcccggtctggtggcattcctggtaattcatcaggaaaatcatttgcatactcacagaccactggaatcttcttcacaggtgactccatcatagcaaaagcacatgattgagtagaatcttggctgggtagatataacaccaggtctacggatgtaggggaacgaatctccagagctctggcaactacatccatcactactcgatgatgagtcatccagtcggctctgagaatgatgtccataccctctaatcccaaaatcaggagtgtggttttgaagattctacttcccatggagataggcacacttcggtttaattggttggtggcaattttacccctaggtgtggctatcataaatgacccttttgtatgatagaaaggcaattgacatctagcactgaacttctggctaatgaaactatgagatgcaccagaatcaaacaaaattaatgcagggtgattaaaaactgaaaagatacgagtcatgatgggggctccctcatgtcactcctccagagtagtgaagttgagcttcccttgcctgacttgcaccttctgctttcttcccttgtcttgatttggtgctggcatctgcctctgctgatttcttgggcaattcttggcatagtggcccacattgccacaagtgaagcacatgttcccattgccctggcggaactgctgctgctgcggaggctaattgttccttggagcgggagctggaaaacgagtgggtgtcggctggtgctgctactgaggtggcctgatcacccatctgcctgcctgctgctgtgctgaaatcccctactctggttgtgagaaacaatcctgaacctctgggcctgagcagatggtgctgccattggtgcctttctcttcttctctgcccggtgagctacaatacagtccttatgggagatggccaggttgaccaactcattgaagctatcagcccagacaatgttgagatgttcccgcagcttggtgctgagacccctgcggaagcggtctctcttcttctcatcggaatcaacatgataacctgcgtactagcacatgtcattgaaggcctgagcatactgcaataccgtgtgagttccttgattgagtgccagaaattcattcaacttgcgatcaagaattccagctgggatatggtgtcctctgaaagcagtcttgaattcctcccaagacacttcacgatcagcaggtagcttagcacggaagtggtcccaccaagtctgagcagggccatgaagctgctacatggcgaagcgagtcttggtatcatcagggcagtctcccgtgaggaggggaaacttggattccatgacgggtagccacacgtcggcatctaacggatcctctgccttggtgaacaagggcggttgcgtactcaggaactcctggtaggttgccactgccggaggtcgctgcggctggcctccaccatactgctgagggtggggctggcgctacaagagctgtcgcagaatctcgttctgctgggccatcagctcctgcactgtgggagctggaggaggtggcgggggaacttgctcgttttgcctgcgacgctgcctagctgccatctgaaaacagagattgccgccattgttatctcaattcacaatttcgaacgatatgctatgatctcatatggaaagaaattgccataatcctaatattcggtttgaatgaagataacatggttacaaacatcccacagatctcaaaaattcataaggattacatcatttaggggaaagtacccgtaagcctagtccaaaatctgccatcactaagcttgcgtaggtttctgtccgcctaaggcgcctaagcgactgatcaaccctgagcggtggaagcgacactagatgcgggtgaagggggcatcgcggaggcagccacattggttccaggggctggtcctaactcctcaggagcctcttctccctcgcttccggcctcattggcctctatctccaggtgatgcatgtcaaggtggtcattagcttcttcaagttcccgctgcacatcatggagcttgttctccaagacattaatagtgttgtctcggatctccacctgctgctcccaggtggtgatgcactggctcagcctttccacccgcaggtccttctccaccaactcggaggacaagtcgaccacaaagtcttctcggctgtcgagggggagcttggtggtttgagcgaggttagcaagatgtgccatagcgtcgctctgctgagcctgaaggcggtacaacgcactcataccctgaatagtgaccctcccaaccaagttgggatacatcgcccagacgtccttcacatggctcacatggttgcaccacatggggtcatccttcttctcagcagggaagagtcccaaggggtgcatcaccacctctaggggatggtagccacagaaggtcgttagagtcttcatggctgctgcttcagtggtgtcgtccgtcctgaatccaatcgtctcagagtcaagagaacgccaacccggctgaaggggatgagcctccaaagtcagccagactcggcaacatggtacccgatgctcctcgtacagctgcaccgtgtacaaaggggcgtagggtaaccggcggagttaagcacttcccacaagatggaaggaaagccatcgtgagataggaagtcagagctgaaacgagtgtctcctccactggagggggtgggtgaagtcatctgcggaaggggatcagatgtaaagattatggtggaaggaagaagataaaagagcccggatggtttaaaaggaagcgggttagctcaaatttttacttctttagtgtctaatcccttttagtttttataatgcatgcatgctgaaaataacgtctcctctccgaaataaagtgtgctcctagggcatcctttaaaaagctaaggactggcccacatggcctacttacttggccacctatttctccctctattcctaaggcctttcgtcctaggtctagcggtcttgtcctgacgagtaatgctagtttctaagcaagttttagatttttcgaaaattggtattcatggtttattgtgcttctctatggtggtatttgctccgataccagctgtggcagaaccgctcgaattattccagtttaagtgcccaagtcacgcctcaggggccgtaacacacttaaatcggaataacccgccagtccctcagatctagtttgattaagccacttaaccaggatcaaataccacaaacccactcgaaggcgagtcacagaagaaatacaataaaacaggaaaacctcaaattaaagtactgaattattacatatgtcagagtttttcaagtagctgatataagttcacaaaataagttgcagcggataatcgatatcgtcgaaagtgaggaaatgggcaaggcatagcccactactcctcctgctccattcctgtcggagcagcatcccactcgaccgttcaatccggtggcagggtggtaggccaagtcacaccatcaaccatatcctgaagcgtaccttcaaaaattatgccacaagcaaggctgagtatactcatactcagctagacttacccggtgtgaagaaactactcctctacctctataccatgcagttgtttggctgaggggtttggtttgccaaaagcactagctgagtctaaaatcaaatttttgcttttcaatttctagcatcattatcttagctaagtttgctccttctaagcatacatggtaacaagcatttagtacaatcaacaagttatctcaagtaaacctcatttcacttcttactcaatgtagtacaaggggtcaagcagtctcattagctgcgagaagcagacgattcgtatcgagtttttatccttgcaaggtaaacctaaacacacgacatgtaagggcgctccgtccccacagacgtcaattgtccccatcgattccccgttcgtggccagggctcaccgccttggcatacaatgccgcactgaccctggctacaggtagaaaggctgagccagtgcattaccaccttggagcagcaggtagagatccgagacaacactattgatgtcttggagaaccagctccacgatgtgcagcgagaactcgaagaagctaatgacctggacatgcaccacttggagatggagaccaatgaggccggaagcgaggaagaagaggctcccaaggagttaggaccagcccctggtgccaacgagactacctccgcgatgccccgttcacccgcatccagtgtcgcttccaccgctcagggttgatcagtcattttgacgtcttaggagaatagaaacctatgcgagcttagttaatgtcagattttggactaggcttatgggtactttcccctaattgatgtaacccttgagaacttttgagatctatgggatgtttgtaaccatgttatcttctttcgaaccgaatattaggattatggcaatttctttccatatgagatcatagcatatcgttcgaaattgtgaattgagataacaatggcgacaatctctggtttcggatggcagctaggcagcgtcgtgggcaaaacgagcaagttcccccgccacctcctccagctcccacagtgcaggagctgatggcccagtagaacgagattctgcgacagctcttgtagcgccagccccaccctcagcagtatggtggaggccagccgcagcgacctctggcagtggcaatgtaccaggagttccagagcacgcagccgcccttgttcaccaaggaagaggatccgttggatgccgacgtgtggctccacgtcgttgagtccaagtttcccctcctcacgggagactgacctgatgagatcaaggctcgctttgccgtgcagcagcttcgtggccctgctcggacttggtgggaccacttccgtgctatgttacccgctgatcgtgaagtgtcttgggaggaattcaagactgccttcagagggcaccacatcccagctggaattcttgatcgcaagttgaatgagtttctggcactcaatcaaggaacccgcacggtattgcagtacgctcaggccttcaacgacctgtgccagtatgcaggttatcatgcagattctgatgagaagaagagagaccgctttcataggggtctcaacaccaagctgcgggaacgtctaaacactgtctgtgctgatagcttcaatgagttggtcaacctggccatctcccaggaggattgtattgtagctcactaggcagagaagaagagaaaggcaccaatggcagcaccatccgctcaggcccagaggttctgtattgtttctcacaatcagagcaggggatttcagcagcaggcaggcaaatgggtgatcaggccacctcagcaacagcagccggcacccactcgtttaccagctttcgctccaaggaacaatcagcctctgcagcagcatcagttctgccagagcaatgggaacaagtgcttcacttgtggcaatgtgggccactatgccaagaattgcccaagaaatcagcagaggcagatgccagcaccaaatcaagacaagggaagaaagcagaaggtacaagtcaggcaagggaagctcaacttcactactctggaggagttacctgagggagcccccatcatgactggtatcttttcattttataatcaacctactttaattctatttgattctggtgcatctcatagtttcattagccaaaagtttagtgctaaatgtcaactgcctttctatcacacaaaagggtcatttatgatagccacaccattgtttctgaccgaggagcccaatttgttgccagattttgggaacaactgcaagagtctttgggaaccaagctaatcaggagttcagcttaccacccacagactgatgttcagaccgagagggtaaatcaaattcttgaagatatgctgagagcttgtgtaatcgattatggtaagaactgggataagcacctctccttggcagagtttgcttataacaacagttatcaatcaagcctaaggatggcacctctcaattggtctcagcctggagaaagaaaagtttttggacctgacttagtgactgaagccgaaaggaaggtcaaactaatcaggaagaatctagaagctgctcaggccaaacagaagagttaccatgataagaggaggaaacctctccagtttgaggtgggagatttcgtgtatctgaaggtatcacccaccaagggagtgtagaggtttggaatcaaaggcaagttagcccctcgttacattggaccttatgagatcatagaagcatgtggacccgtggcatacaaattgaagttacctccaaaaatgtttgccatccacaatgtgttccatgtatcctagctgaagaagtgttttcgattgccgacagagattatagcagaaccagaattggagatagagccagatctatcgtaccaagagtacccttccaaggttctggattgcaaagaaagatcaactcgggctaaatcgatcaagatgtataaggtccagtggagtaatcacttagaggaagaggctacttgggagactgaagagttcctgcgttccaacttccccgattgcctacctaaggaaattggtacgtgatcatgcccaacccctcccctgccctttgaatctaaatttaagaaaaatgatcttaaaatagagtaagttaattataaaactaaagttaaaaaaggacttccttgtgaagttgcaaagagaatgacattcgaagagtagttgccctaataaataaagcacccacttcgtgtaagtctcacccttcgcttcaccccaggaggattccaatctgaatctcgggacaagattcctttaaggggggaaggctgtgacaccctagtgtcacttagggttttctcagtgctaacccaagaaccatcacttcatgtaagcaaatttgagcaagaagcaccaaattaacttgagaataaaagatccactaagtttacatctaaaagaatcatgttcaaaacaattgaggttttcaaaaaggggaaatgttgaaaccctaataccaaccataagccatttaagtagagaagaagaaaagggatgaaagaccatgaaaaacataaaatcatggcttaggccaattataaacattgaaatacactaaataagctagaataaagattaggaaagcttgtccaaaatagttaattaaaaactccaaacaagccattcaagtggaggttcaatggggatttctgaaattcagatttctaaattttcagcccttgaaccaaaaccgagtgtgttcaccttgatccttagctctaatcctagtgctcccattaacaaaaacgtgtctaactaacccctctgtcacatgccagaagatggcattgggacatgagccctagacacgacaaaaccaaggatttgcctcgggctcgggcagggagacagaccagacttcagggctccaaatctttgaaaccagtaggcaaaaccctatgacccccacacaagatcagtagcttatagggaggagaagaggttttgtgcactgaccaaggcgagagcaggctcggatgaatgaccacacgtaccggaacttgggcagaatgaacgcgcacacgtgttcgaccctggtcggcacgccagtgttcgcccaacccgcacgcgcactcgccccagcgttcggtcaagtccaccgcgtgccctcgccctcggtcgtgcccgcccgcacctttaaagcctccccgggcacgcctcacctcaccccgtgcttaccctcgctggccagacgcccctccttagctccgacgagctctcttccgcccgccatcactgcccaagcctcggccaccgtggccagcagactctagtcacttctaagccacgcctgcccttcagttagcttcgccggtggcctgtgaagctttccaagcgctcggacccgacagaacttcaccggagacccaagatcgtcctcgccggacttcggtcgcccgcctgcgcgcgtggaccgagcaatccagtgagtcattctctgattccttgcacacacaccttccttgatctctggtgaagctaactgacccatttgattgaacaatcgtgccctggttaggccagactcctcgccgccgatgagctcccccgcctgcgcacgtggaccggccgactccgaccatccccgacggcgacccgcacatcttagtgaccctttagacctcccctacaccctcgaccacctcaccagagcagtctcgccgccggtaagcccctccgccctttcctccaccgcgggtactgtttaattgggggaaggacctcgggttagatttagtaaaacctcaggggtttttttgaattgtcagtggcacatttgaatagtaacccaaggattagtctgtaagaaaatttgaaaacacacgccagggacccctttgcaaagtctttttccatttaatcattttatgtttattctttttaatgaatagagaacttaggaaattcataacttgagaaatctttaaccaaaagttattgttgaggacttgttctcaaatactatgaattaagaacaaggcaacacaaaatgttaaaggttaatgcccttcgtccttcgaatcattatttcccttaagatataatgatcttcatacgaaggttaagaaggacataccttcatcaatgcaatatatgttaatataagtagaagtatatgaacataagaaacaacataaacaatcataaaacattattaattcattctcattatattattttagagagacagaaataatattgaattacaaaggttacctttgtattgatagaaggtaaaagtacaagcgtgacgtgcgagtgattacaagtcagcgtgaaccgtacgtgggtactgttcatctatttataggcacagggtgcagcctgtgtaaaattacattcatgccctttatatttatcattgacttaaggacaatccagcaaggactaaatagccttttcccctttaagtcggttccttttcctgctgctgagccgaagctcccttgcgcgtagcttcggagctgcatcatccttcgtctcgaccatgcttttcatattgtgtacagttttattctgagtccgaaggtacctgtacatatgttacacttggaagatattgttaaatcacatttttgaggaccttcggaggacgaaggcccccaacagtagcccctcgcagtattaatttgtttaagataacgaattcaggctgcgacatggacgaaggccttaagccgaaggtccgaaaaaacaccttccctttgctagaatagcaacagtcaatgacagacggggccccccgatatggagcgtgccgagcgtataaataagaactcgcaccaaccacatttggtatgctgcttgtggcatttgctttattttcttaattttatagctcttgctcactaacgcttgctagtttctcaagcttcctgagcttcggttagaaagacacattttcgccatcttctgaaggaaaaaatgtctcaagacaagaaggttgctgctgagacgaagctaactgaagaggagaagcattttgaggagaaaaaggttgcgaatccttacatagctgggtttatcgagtcaatggcaaaatcaaatacagagaagattactaaagagatactagagggactgtctgaagatactagtgacagttatgatgcagaaagtggaggcgaagattccgaggatcgaccctggagaccaagtcatgcaattttcagaaaatcgaccatcaagaaaagtcacctcgaaaacatgaggggaaggtacttttgggatatgtctattgtgagggctagcggagacaacaacgttactgcacctgaggagaaggaagttgtgattttctgaagcttcttcaaggctgggcttcggttcccattgagcaggtttgtggttgaagtgttgaaaaccttccaaattttccttcatcaattgacccctgaagccatattaaggatgggagtcttcgtttgggcaataagaagccaagggatagagccaagcgcaaaatgcttctgcagcatgcacgaacttctgtatgagacgaaggcctcggggaaagaacaatatcacaacaacttcagttgttatggatttatcgcctgtcccaacgcaagccacccagtgccaacatttcggaagagatggccgggaaattggatggaagaatggttttatgtgaagaatgacttgataacgagggacgacatcaaggaggttattatgcgccccatatggtcccgcttcggcctccgaaagccgaaggttgaaatcgatgaagccgccgaagcatgccagaaggcatttggtactgtctgcttctttattggtacgagagatttaattcaagagcacatagcatttagagtatggccgcttgtagagagctgggaaatgccgaaggagaccatcaccaattctagcgaagatgaactggtccggctgaagtatacattcagatatggggataaattcgatgaaccaaacgatgactggctaaaatgcatcgaagttacaagtgatgaagtgcttggatcatattccaaggcagaagataatgcattatccacagccttcggaagtcgaggaaagaagagattgaatagagtttttgacgctattggcttcgtctaccccgactaccgctacccgctgcgggggtaagggaagaagaggaaagctactgctctggccacctcggctgaacctgtgccgaaggctacaggcaaaaagatgaaggtacttacccgaccacattatattgaaccggccgtggtgcctgagtttggcggggaggcctcttcagctgctgaatcaagagaaactgctcctccgaggcagagggctaaagaaccggctataatgccgaaggcaccttcggttgagctagttgaaacgaaggttgacaaagataaggctgaaaggtcaacaactgaagaggtaacaaatattccagggactttaagtccttcaacataagcaatagcgctgagggcacaaaagagttctgccataactcctaggagaagaaggatggtaaatatattagatgtactggaaacaaccgactccataagtcttactcccaaagggaaggttgctgaagctgacaaaacgcaaccctaagcaaatagatattgaagctacaacaacccaggctgcaaccaaggcggggccctcagtgcctgctgagatgaagcatgcggaatttgaagaaaaggcaacagaagaaaaggccatagagcaaatttcgtttgaaaaggttgccactcctgctcccgaatctttaaaagagagcattgattacatcatccgccatgcttcgggaaagagactttctcaggaagaagaacgagaagctcaacattatgcccaaaaattgaaatacccgaagggggcattagtgttcaatggcagtggggaagaagattttttgtactgtctcccggataataaagagatatccgtctgccgggagataggtagaagcttcggatttccgaagttggaagatggcctttcaatattatcaaaggatgaactggctgacagtttagcatataatagcataaaggtataaaagtcaattttgtatttgaaaacgaaatatttcatttgtttatacttaatcttgtcttcctcttgcagggcttgatccttagcaatgcccttagagcacagaaaaacattgaagatgaagggtatacaatggctctgaacaaccttcgttcagaggtgatcgaattaaggaacgaaggtctcgaaaaagacaaaatattaatttcattggtaaacaaagtaaaaaagatgaagctagttccaaagctcaagctgagattcaaaagaatgatatcgaagagcttcagaaacaattggcagaggccaaagaaaaatgcgctctcgcagaagctaaccgagaggccagcgaatattggaaaaactatttagaaaaaatagttgaagaacttcacgcatccaaggaaagatgttttgaaaaatcattgggctgcgtggagaagataaaggctagcttcgccaacgtgggcgcctaatcaaacgaagataacttcatacgaggcgaccctgaaggtgttatcgagtggataagcggagaagccgaagctttttaagaaattttaagtgatcgcggggatgtctgcgcgttctctggtgcgagaggaatttaagccatcttggagaaggcgggttgcaatcatgtcaaaaccctggcccaggccaaagctgccttctccgtggatgacacgaaggatcccttggccgaagcaagattagtgggcggaaaattttacactgacatcagggcaaatggcggccgagaaatggctcatgaaataatgaagaaaagtgaaaaagatattcatgacgctcgagaagcagcgaaaaagctgaggaagttgctgaacgcgagagacgaataggtatcgtttaatggcctttagcttcatcatttgttttcgtgacttcgaactgattgattttttctaccgcagctgaattatctcctccaccggcgccgttcgaccccctggcggacccagaaacgaagaaagcaatagaaatcatcaacatagccgacgaagttgttaacaagttgttgaatgaaattgcggaaaaggtcctgaaagaggactgatattgtaaaaacatttttagtcgatcaatgtagcttcgctatatcaagactgtaatattcggtgtgcatattttttaatctaatgtgtaaattatttgtaactcagttctttgcgatgcatgaaactttatatacataccatttttgagccttcggcgaaaaaataccttcccttcttttcatgcttcacaaagaagaaaatccgtgcttcgtgaaaatatccatgcttcgtaagaacctcccagcttcgtaaacaaaggatcccttcttttgcaatagagctgacgaagctgtatttctcagctaactttgtgccttagcacattttcattttttataaagcagtctccgaaggtcgacttcatattcaattcatgtcatcagtgcaatatgatgtatgatgtgatgctatgcgggatgatgtgacgatatgatgcgaatgatgctaatgtcgaagatacgcacccacacgcccattctggaacacaccatctctacgtccccttaggaacgatcgaagtctctttgccgtttatttttcggcttcaccgcttatttttcggtgtaagttctgcatccccttaggaacggcttttgaacttcttcgccttttatttcggcggtatcaccgttgacttttcggtgtaagttctgcatccccttaggaacgtcttttgaacttcttcgccttatatttcggcggtatttggctctgcattccctttagaacgacttttgagcagaaaacttacactgcgctcccttaggaacgactttttgtagcttcggcgaaacttacgctgcgctccttaggaacgactttttgtagcttcggcgaaatttacactgcgatttttagctctgcattcccttaggaacgacttttgagcttcagtttttttagcttcgtaaatatttgaagaagatatatttcattctgataaaagtgaaactattacaagaaattaaaactagttccgcattgtttgttccttattaaaaaacaaaatgacatagaacacaaaagtaaggatatcgctcaataaatgtgctttgattctggcacagtgctattgactgtgcgagcttcggattcctcccagacttcacgttgctgctaagggtactggcgcccttctggctggcctcgagaataggtcggctgtagtggtggcaggggtgggagttgtggccaagaagcctgtgagtgacactagccgaagccacagaagctgtgggatgattgcccacatactctggtatttagggagagtggcacgaagtagtgtgcaaaacctgcttcggctggttctgccgagcttcggcttctgctatctccttttgcttctgaatggtgatttggcacattcttgtagtatggcccttgtcctcaccacagaataagcagtagatctttcgaggctgatccccaaatcttcccccgaagcccctggcgcctctgccccttggagctggtggtctgaaagagctctgttgttgccccgaagattgtgaggtgtattgtgacctctgaggctgacttcctttgtcgtcactctgagtggaattatggattgacctgacgtgcctcgggtggattcttcctccgaagcccctggtcatttccgagaatctgtaagcttcctcccttctttggcggaagtcgttgtcagcccggatgtattcatccatcttctgaagcagcttctccagagtttgtgggggcttcctggcgaaatattgggcagtaggtcctgggcgaagacccttgatcatgccctcaatgacaatctcattgggcaccgtaggcgcttgtgccctccatcgcaagaaccttcgtacatatgcctgaaagtattcttcgtggtcttgcgtgcattggaacagagcctgagatgtgaccggcttcgtttgaaagccttggaagctggtaaccaacatgtccttaagcttctgccacgacgtgatagtccctggccgaagagaagaataccatgtttgggctacattccggactgccatgacgaaggacttcgccataactgtagtattgcctccatacgaagatatagttgcttcgtagctcatcagaaactgctttggatctgaatgcccatcaaacatgggaagctgaggtggcttgtatgacgggggccatggggtagcctgcagttctgctgccaagggagaagcatcatcaaaagtaaaggcatcatgattaaaatcatcataccatccatcttcattgaacaagcctccttgacgaagctccctgtgttggggtcttcgatcctgttcatcttgagcaagatgatgcacttcctcagtggcttcatcgatcttctttgaagattagccagccgcgccatcttctccttcttcctttgtacttgctgatggattatttccatgtccctgatctcttggtccaactcctcctcctagagtgttggactggtggctttcctcttctggcttcgagtctctcgaagagaaagagtttcctgatttgggttaggggctgcagtgcagcggtccctggtgctgaagctttcttcggcggcatgacgaaggtcaatgcttgccgaagatggtcgaaagagttcaccggaggtgggcaccaatgttgggaacttattctcaaatactatgaattaagaacaaggcaacataaaatgttaaaggttaaagcccttcgtccttcgaagcattatttcccttaagatataatgatcttcagacgaaggttaagaaggacataccttcatcaatgtaatatatgttaatctaagtagaagtatatgaacataagaaacaacataaacaatcataaaacattattaattcattctcattatattattttagagagacagaaataatattgaattacaaaggttacctttatcttgatagaaggtaaaagtacaggcgtgacgtgcgagtgaatacaagtcagtgtgaacagtacgggggtactgttcatctatttataggcacagggcgcaacctgtgtaaaattacattcatgccctttacatttatcattgacttaaggacaatccagcaaggactaaatagcctttcccctttaagtcggttccttttcgtgccgctgagccgaagctcccttgcgcgtaacttcggagctgcatcatccttcatctcgaccatgcttttcatattgtgtacagttttattccgagttcgacggtacctgtacatatgttacacttggaagatattgttaaatcacgtttttgaggaccttcggaggacgaaggcccccaacagttgtcaaaccaatttggctggattcaaaatattatagactatcaattaaaaatactaaaccccatgctttctgttttaaatttcagagtttgaaattaattagagaaactgaccaaaccttatttaattaaaaaaatttgttatgcttctgtgctaggcttaagaaaatttgtagatgttcaaaccccatttaggcactgtttaaaaataataatcaccccagtattgaagatttaagtagggatatctattaaaggccattttagcccaaaacttaggaaaatcagaaaggcattagaaaatagtgaacagtgaatgcaattatttttcctagtctacttaagtaacagagaacctagaaaaaataaatggacctctagtccagaacagattcaaagtgaaatgttttattaggcattaatcaaaccagaaaaacaattattagaattatgaaaacaatttcaaaattgttaataaaaatttagtggacttgtaaccactaagacaccactacaaaaatgataaccaccccagcccatcattttaattagggtaaacaaatagaattggatattgggtcctattttaaataaatcatgagcaatccaaaaatagtacaatgatgggcaaataaaattttactagatcaataatgagataggccaccagagaaaagtacaaaacccaattaaaagttgcaaaataatatccattgtcaatacttcatgaaaaaggccatttaatccaaataattcctaccacccttcccttaagcaaaaagatgccaaacttcagaatggttgctcttgcacaaagaagataggaaaaattagaaatctgttgtttgatgtttttcatgtatagtggtagtagaaagcacccctttggctagaaactttagaaaatcatggcaaaataacaaataagtattagtggctagaaatttgtacaaggtcatattataacatctagatgccagcaaaaatatgtcttagagaataaccctctgttaaaaaagagttgtagttcaaaaacaccccctgctgccctaatatttgataattttatatagtgagaacccctcactttttgaaccccaaattttgggatagggagttatacaccagtaagagcccctgtaatttttgcagaatttttggaaatttattaagttaatttgtagttcaaaccccaccttaaaagcataagcgaaatagaaggaaagaaatgaaagaaaaaacctcgctccaataagttcaaccagaaatcttgataaattctcactaagacattaaaagtaattcagtggaacaccaaaatatatttaccacttagtttaactaagcttgaccctaaattgctaaaatatgccctaaggatcttcgagtagcaagatttagccctaacttattaaaatgatcattcaccatccaagtttaattgttgaattgcatatcataccatgcacatatcttactcattgcatttattagattgtaatctcgctgatggagagtacgtgctcatccccgagcaaggagctgtccacgaggaagactaggagcaagctcccgagactgccatctaggatctacccgaagccccagctattgaaggcaagccctggttttatgcataaccaattatatatgctactttactacacttaatgcttgtaggattgtaatgtgcacttaagtgtaggagttgcttgaaacctctagttgcatgaacttaggattcctttttgatggatactagtatgccaggtcgagtagctgctttgctaatcaggatctcggtagaagtcgagtgatttttctaagactcacgcgaggtcaggaattgattgtattcatctcgataacgggatctatgttaatctatggactcagatccagggaggattccttgtccataagacgggaaaaaggaattaaggattaatgtgtggatacctgagtcaagcttttgaacgtactaagcacatgtcgggaaatatggtaaccggtaaacctagtacctgagtgaagctgggcgcggactttatccctcacgagacctgagactgggtctcccatgctagctatggtgggtacaagtgcggtcactgcacgacggcagccggggtcagtggagcattgtatgccaaggcgataaggcctggacgtgaacggggaatcgatggggacggttgacatgtgtggggtcggagtaccctgacatgtcatgtgtttaggtttaccttgcaaggataaaaactcgattcgaatcgtccgcttctcgcggctaatgagactgcttgaccccttgtactacattgagtaagaagtgaaatgaggttacatgagacaatttgttgattgaactaaatgcttgttaccatgtatgcttagaaggagcaaacttagctaagataatgatactagaatttgaaaagctaagaattgattttagaaacagctagtgcttttggcaaaccaaaaccctcagccaaacagctgcatggtatagaggtagaggagtagattcctcacaccgggtaagtctagctgaatattagtatactcagccttgctagtggcataatttttgcaggtacgcttcaggatatggttgatggtgtgacttggcctaccactctgccaccgggttggacggtcgagtgggatgctgctccagtaggagaggagcaagaggagtagtgggctaggccttgcccaattcctcgctaccgacgacatcgattatccgctgcattttatcttatgaactatctcagtttacttgaaaactctgatttatgtaataattcagtactttaatttgaggttttcctgttttattgtatttcttctgtgactcaccatcgagtgagtatgtggtatttgatcctggttaagtggcttttattagactagatctgagggactgacgggttattccgattgaagtgtgttacggcccttgaggcatgactgaggcacttaagctggaataattcgggcggttctgccacagcggcaggctaccaaagtccggcgagggtgaatccgcctctccggtgaggcaatgcctcggctcaagcttggagaagcttcatggcttcacggggaagtggtccaggggctggggcaaggctgggggtcaacagaaggggctggccacaacggccgtgctcgggcagtgatggcgggcagtggtgcttgctttccacggcgaactccggtgatttctggctcgagcgggactttggttgcgcgagtgcaaacggctaaggcctctgggggaatttataggcgagggcgaggtgcagacgcacggggcgcgcgctaccgcagccagtccgcgctcggctggcctgacacggcgtcgagcacgtggctctttgcttctgcccgagtttaaacgctcataggttggagatcttcgcgtatttgggcatgatcactgcacaagatttgctctcccgacagagctttgtcatttatgtgtggaagtcgagcggtttggggctgtgtatagagagttgtcgtgtcgctaaggtggcagtgtcacaaggtcgagtcccgaggtaaatccatgtcaagatcgtgtcaaatggtggagagaggtttccaaactttgtcatggtgggttccaggaaatttggcgccactttgctatttggacttgtttgatttatgttttgaaaaacagagaacgcagtcgatctttggaaaggggctgaaattcagatttctgaatttctgaatttttcccaagtgcattagttcaggggctaatttagggattttgaaaagttcaaatggcaaaactttcttactatattttgttggttatttagtgtattaaaactttgttatttggttttttaccaaaatttgtatttttctcccaagtcttttcccaaatgccctttatgtgcttaaatggtccacttatggttaattagggtttgagagttcttcttaccttgaggttcatgacatgattaaggagaatttcttcagataaaaagacttacttcaacctttgttattaaatttttttatgttcatcccttcatttggttcagatgtgataatggtttgggttagcttaaggaagaaaccctaggtgatactggggtgtcacactcgtcgtcggcctccaaccgggtgtgtgcagcccatccacgacgccgtcgaaacccgtggtgagaaacccccactgtcctcgatgattattttccgatgtgtgtgatgttcgatgaactgccgccaacaaatttgtgtgttttggcagctagtgttcgacgtcgcgcttcgcgctttgcccgttcaacaaaacgccgagccgtgtggacaacccatgtgactaatctcgattcgtccaggttgttcacttggtattttgtggattaatctatttaagctatggtcgatgttgtgcatgtgtatgtatatgtgtaaaaaatgtattggtatggaatgaagtttgtggcgaaagaaaacgagttagaaagagggctcggatgtttttaagtttcggtaataatgtatttgatgtgtggtttgcggcgaggataaatttttaaaatgcggattatgtgttggggaatgcatcgataggtgtctacgtgaaaagtgtatttgttttatgcatatgatcggcgattgtgatagtcgaggtgaatggggaatatgattaatcctgttggagtcactggtgtggttgatgtcttctgcgtaatatggggacacgtatgtgcgtgtgtgccttggtgtattatagtggtggtggcgtaagatatttgattaaggtgtgcgggtatatgccgtaatatggttatactcacgacgaggaaagatgtatgtattgtgtaacacgacgcttaggtcgctattatataattgtgtgaaggatgctcatgatggtcgtgtgattgaggagtggtgtagtggcaaagcgagaagtaagtttagtatttttaaacggttagctgatagcatctatcggtgtcgtcatgctttctgttgtatgaccgatcgatgccttgcttggtcaagtattgcattccattcccattgggtaaataaatatcttattgattgattagaggtcttatatgagtgtgatcgcagcccaataattattggagtcgggtaatgttcataagtcggtccttgttaaaattgaaaaacaatccgataagatatgcacataagtgctttaggtccctcagtagccaatgtaagtcttatggagttttatgtcatgtgttaatgcctctatgttagaccccctaaaatgtgctattttaggtgacttgtgggttaactaatttaagttgagcaatggttaagaaacactaattattctgctcccacccatgttttgagtcgtaatgtctaaaatggtttgctaagtcttatgctgtgattagccaactcatattaagtaggagtcgattgcattaagtgattgttatatgtatatgttgtgtctcggattgcgataataataggcaagccgacgtgcatgttatttagcgggtatgtcattgctctagttagctgaattgttagatagtttggttaagctcgtaattacgataaaatgcttgttgtagtctagatgcgcatggttatggtcgtgagtaaaaattagtagtgctcatgtggtgtctaagctaaaatgcgaactagtgggtgaaaagcgtttcgatatacatatatgccggatttgatgattgtggtgaatgcgttgattaattgtgtatggtagttctagcgcacgaaataacttgtataaaaatttgtaagtctacttgttagtcctcattttattaatttaactctaacgaatggtaaagtgttaaaataattcaagtctctaaagcgcggcaattcttgaattatatagaagctgaaaatttattaattgcagttttgggctgcacgcgctgtttttgtcgtgctgtatgtttgatgaactaaatcatgttttctgtagaaacgtcatataaaagagttgtacataaccttattatcttgcttgtactaaaatatgacaaccataaacctgatcgtttagaagttgtacttttcacaagcccagtccctgaatctgtcgaatttctgaacagatttaagaaattgcaatggttgcttaagttaatattgaaatcagttattggtggtcacaagaaagttgtagatgactctattatcttacttgtgtcaaaagttgacaggcataagcctgaacgtttaggagttatgctttttacaaattcagtaactgaatctgtccaaattctgtacagatttcagacactgccttgtttgcttatgttaatgttaaaatctgttcatggtcattataagaaagttgtagatgcttttcttatctcacttgtgttaaaattttcataaccataggtctgatagtttaagagttatgaattttacaaactagaagctgtgttctgtccactgatagaatagatttcaaaaactgaattgtttgattcagttaaacatagaatcacttcttggtgattataaaagttatgtagtgctttttccaagctttccaaaatgtcttggatcgctctttttggtggtctgaagattaagttatggatgtttaaactgtgaagactgaatctgtccagttctggacagcacagccttcatagtgtattttacccttgatacatattaaaccagccagggatgtttataaataatttgaagaacatttaattagctttccataaagtctaagatcactctgtttggatgtctgaatctttagttgtgaattttttaatttgcaagtctgaatctgtccaaatctggacagcgctgttgtattagcacgttttgacctcgctaagtgctgaatcatgttgtgatgacaataccaaagttgtagagcactttttaagctttccagaaaatcctagtttgctagttttgggttaatatttgaagacttatgattaaaacaagcaactgatgtgttgctctccaaaaatctgcaagtgacatttgatggttgagttcacccttttggctaaaaatgcttagttagcacttaacggacatagacttgtaatgtctaaacataggttaacatgcgttccatgattaatgtgcttgcttgagtagttggttgtggataggaattcctcctctgttgaacttgtgcttgggatgcttttgtgggataaataaaagaactaatgaaaagtcgtagcaaattaaataaatgctcgtacttatgaggtcgtatttgtgttgcgtaaatatacaaaatgtttgtcgtctttttagtggtgttaatgtttgtgcgctcgatgacagatagttagctaacgctagtgtgtgtggttgcttatgatgtctcgctacttagtgtttaattcgctagcatgtacttaaagtatcttgtgatattttcattatattcatacatatgcatcttgcatctcatttaggatcgagagatgatgatcgagctagtgatgtggtgccaaccacaagatgcagttggtgggtgacctgaagaacgatggacaagatcagtggatgctcgccaagcgagtgccacccagcaaacactatctaagtgttaaagaaaaggcaagccccggttttatgcataaccaattctatatgctattttactgcacttaatgtttgtaggcttgtactgtgcacttaagtataggagttgactggaaccttagttgcatgaactcaggattccttttgagatggatactagtatgctaggtcgagtagctgctttactaattagggatctcggtagaagtcgagtgatttttctagcactcgctcgaggtccggaattggttgtatctttttttatatcgtaatgatgatggtctgtggacaacgatccatggggattggttgtctacgagacggaaatcggaataaggattaaggtgtggtaccgtgtgtcaagcgtttgaacgtactaagcacatgccgagaaatatggtaaatcggtaagcctagtacataagtgaacctgcccgcagactttacccctcacgcgacctgagacgtggtctcccattccggttatggtgggtacaagtgcggtcactgcacgacgacagtctgggtcagtgaggcattgtacgccaaggcggtgagccctgttctattgacgggaatcgatggagacggttgatgtatgtggggacggagtgcctcgccatgtcgtgtgtttaggtttaccttgcaaggttaaaactcaattcgaatcgtctacttctcgcagctaatgagactacttgatccatgctgctacactgagtaataagtggaaatgaggtgactggcaaaagatgttgattgataaaatgtttgataccatgtatgaatagctaggtacacatctagttttaaaaggatcatactaaaacttgaaaggctaaaacttgattttagactcagctagtgcttttggcaaaccaaacccctcaaccaaactcctacatgtctagaggtagacgagtagactcatcacaccgggtaagtctagctgagtattagtatactcagccttgcttgtggcataatttttgcaggtacctccttgatttggttgatgtagtgactggcctccatccctgccaccgggatagacggtaagtgggttactaatttcgcaggagaggaccaggaggagtagcgtgccaggcttcaccatgttactcagttttctccgttagtatttctactgcattaaaaatttatggttattatttctgaaactccgataatgtaatcactaattgtacttcttaaattgtggtattatgctttattgtatttctctgtgcctcaccttcgagtgagctagtggtattcgatcctggataagtggctttatcggactagatccgagggactgacgggttattcctgtttaagtgtgttgctgcccttaaaggtgcgacttgggcacttaagctggaataattcaggcggttctgccacagctggtatcagagcgaataccattacagagaagtcaataagtcagtaataccaactttttaaaagtaaaacttgctagaaaccaatgctggatagatcatcaggatgatcaggatagacctaggacgtgaagccttaggaaaatagatgggtagctaggtggctatttatataggccataaagactactactactattaataaggatgttgtagaagcatccgaaatattagttaggtctgagaagacaactagaatgagcatgcatcatgattgtcacattataattgtctcttgcgcatcaacatgcttctctcacctttattccaataataaaaacttgtgaataatgtgatgtactgctatgttagaaatgccttacctcgtgtcagattggtaagtcttgttaggtcgtgctatgtgtttctcttgtcttgctagctaggtggtattgtaattgttcaaccctctttgccaataaaaattgttgcctgttttgcccataaaagacccccttctccaaacaacctagtggttcactagtaaaacctaaaaaaattatcatgtgcttgtttcggtgtttctagcccttgtgtgttttacacttgaatttacacctacacaacttgtagattcccatagcttgacccctaaatcgactaaagcttccttgtgcacttgtagtgtcaaattttttttgttgttggtgtctagttgcacaaaccctatcaaggccatgtttctttccataaatccttgcccctaaaacttcatagcattcctgttgatcatccagctgatcttgttgcctacctctcctttcgcatggatctggtgatctctttccttgtgaatcatgttgtggctttatcatccgaatctctggaacccttaatgattctgcaccgtaatctggttatctgctataactcgttctcaagtatcggatgttgatcttgcctaaatctctcatttctggtcattctcatacccccttctctaaggatcatggcgtcattttatcaacttatctctgaacgacatatccatgtggattaatggatgttgctgttatctttggatctctcatgtctctaaaagcctataaatctggatctcatggttggttcctcctcatatcaaatatcgtatcaatctttggcggataatcccgtgaggatcataaaatagttctctgagttgaagaaaattctcatgtattgctctttttgccaacaattctatgtttcaactttagtcacattttctgtgccgtattctcataggctccatctatatgtgctatgtggatttctcattggttgcgtttggtaatggtattatgactaaacgactgatggtgtcgcgacgaaaccgagagcctcctgtgggcgcgcacacatggttgagctgctcggcacgcgctggtatcgcggttaatagtcgtgatccattgcgagacaatactgatgtgctgtcttttgtgaacattctatcaaagtgatcgctgcattttgtctaaacatgtcgcgatattctatccaaatctatcttcattatcttgtcagatcccatcttataaatttgcatctacctctatcgtgggagttacatgcttctccacccttaaagatcctcattcgaatctcgggacgagattcttttaaggggggaaggctgtgacaccccaggtgtcagtttcgtggtatctcaggagatttgtccataacttgaatgctcagtgaaaatttcttatttctcgatcgtgtctatctcaatttattaggattattcatggaagctcaccgaagtcggagttattcgatcgcgagaaacaaccaattttggagcatgttaaaacttttatttctcggaacgaatgcaaattcgaaaatcattctcgtattataaatctcatctgaagctcattaaatcaaactctcgacggttttttctgatctgagcccgagtctaattcctctgtgacacccaatgtcacctagggtttctctaagggctaacccaagaattaacatttcatgtgagccaaattaagcatgagcaccaaattaacttaagaataaaagatctaccaagtgtatgtctaaagaatcatgttccaagaaaataaagttttcaaaaagggagaaatgttgaaaccctaataccaaccctaagtgagctaattaagtagaattgaagaaaaagggtaaaagaccatgaaagatataaaaacatggcctaggccaattataaacattaaattatactaaataagctacaataaagattatggaagcttggccaaaatagtttaataaaaactccaaataagcttctcaagtgagggttcaatagggatttctgaaattcagaattcagaattctcaatttcagcccttgagctaaagaccaagcgtgttcaccttgatccctggctcaattcctaatgaccccattgacaaaattgtgcctaactaacccctctatctcatgtcagaagatggcatcgggacgcgttccttggacacgtcaaacccgcgatcttctctctgtgcgcagcagtgagacaaaccagatttctcccctctctatctcttgatccagtcagcaaaacctgcaagcctccacacatagacgacaaaggaatgtcagaggaagagatctctcaacaggatcatggccataatctcatatttggagccaattcacgcttgaactcgacctctctctacgctacctcatgctcgacgccgtgccaggcgctagagcgcgcactggcgttcgcctgcgcacgccccgagcgcttgtcagagccccgccctcggccgtgctcgcccgcgcctataaagcctccccgagcacgccttacctcacctcgtgctcaccattgccggccagacgcccctccttagctccggcgagctcttttccgcccgccattgccacccgagcctcgaccaccgtggccagcccactccagtcgcttccaagccacgccagccactcggatagcttcgctaagagcttgtgaagcttccccagccctcagactcgacagaacttcaccggagaaccaagatcgtcctcgccggacttcggccgcccgcttgcgcgcgtagaccgagcgatccggtgagccgttcttcaattcctcacgcacacaccttccttgatccctggtgaagccttctgacccatttgattgatcaattgtgccctagataggccggactcctcgccgccgacgagctcccctgcccgcgcacgtggaccggtcgactccgaccatccccgacggcgacccgcacatcgccgtgaccctcaggacctcctctacaccctcagccacctcaccggagcagtctcgccgccggtaagcccctctgccctttcctccgccgcgggtactgtttaatttgggggaaggacctcgggttaggattagaggaaccccagggggttttctgaactgttagcgacacatttgaatagtgatctaaggactagtctgtaaggaaacttaaaaacatccgccagggaccccgttgcaaagtagttttccttttaatcatttctgtttaatctttttgatgaactgagaacttaggaaattcataacttgagaaatacttaaccaaaaattgtcaaaccaattttgctggattctaaatattatggactaccaattaaaaatactgaaccccatactttctgttctaaattttagagtttagaattaaatacagaaactgaccaaactttatttaattaaagaaaattagttatgcttttgtgctgaacctaagaaaatttgtagatgttcaaaccccatttaaacactgtttaaaaatagtgggaaccctagtattgagaatttaagtagggatatatattaaaagccatttttgcccaaaacttaggaaaaatcagaaaggcattaggaattaatgaacagtcagtgcaattatttttcctagcctacttaagtaacaaagaacctaggaaaaataaaaagaccactagtccagaacagaattaaagtgaaatgtttatttagcattattccaactagaaaacaattattggaattataaaagcaaatccaaaattgctaataaaaatccagtggacttgtaaccactagatccccactacaaaaatgataaccaccccagcccatcattttaagtagggtaaacaaataaaacttgataatgagtcatatctcaaacaaatcatgagtaacccaagcataatgcaataatgggcaaataaaattttgctagatcaataatgagataggccaccagagaaaaatgcaaaataatacctattgccaatacttcatgaaaaaggccatttaatccaaataattcctaccaccccttcctttaagcaaaaagatgccaaacttcagaatgattgctcttgcacaaagaagaagctaggaaaaattagaaatctgttgtttgatatttttcaaatatagtggtagtagaaagcacccattttgctaggaactttagaagatcatagtaaaatgactaaaggatattaatggctagaaatttgtgcaaagtcatgttataacatctaaatgccagcaaaaatgagtcttagagaataacctactgttaaatggtagttgtagttcaaaacaacccttcttccctaacatttgataattttatctagaaagaactattcactttttaagccccaaattttaggacaaagaataatacaccagtaagaagccactgtaatttttacataatttttggaaatttattaagacaacttgtagttcaaacccactctaaaaacataaaagaaatagagggaaggaaaggaaagataaacctcgccccaataagttcaacttgaaatcttgacaattctcgctaaggctttaaaaagaattcagtggaacaccaaaatggacttaccacttagtttaactgtgtgtgatctaaattactaagtataccaccaaaaatcttttgtagcaagattaaactctatctgatttaagtggatcattcaccatcaaagtttaattgctaaagcacatatcatatcatgcatgtatcttactcattacattcattagattgtaatctcgctgacggagagtacgtgctcatccccgagcaaggaactgtccaagaagaagaacaggagcaagctcccgaggctgccatcgaggatctccccgcagccctagctattgaaggcaagccccggtttatgcataatcgtattattatatgctactttactacacttaatgcttctaggattgtaatgtgcacttaagtgtaggagttgcttgacacctctagttgcatgaacttaggattcctttttgagatggatactagtatgctaggtcgagtagctgctttgctaatcaggatctcggtagaagtcgagtgatttttctagcactcgtgcgaggtcaggaattgattgtattcatcttgataacgggatctatgttagtctatagacttggatccagggaggatgccttgtccatgagacgagaaaaaggaattaaggattaatgtgtggatacctgagtcgagcttttgaacgtactaagcacatgtcgggaaatatggtaaccggtaaacctagtacctgagtgaagccgggcgcagactttatctctcatgcgacctgagactgggtctcccatgctagctatggtgggtacaagtgcggtcactgcacggcggcagccggggtcagtggagcattgtatgccaaggcggtgaggcctggacgcgaacgtgtaatcgatggggacggttgacatgtgtggggtcagagtaccctgacatgtcgtgtgtttaggtttaccttgcaaggataaaaactcaattcgaatcgtctgcttctcgcagctaatgagactgcttgaccccttgtactacattgagtaagaagtgaaatgtggttacatgagacaatttgttgattgaactaaatgcttgttaccatgtatgcttagaaggagcaaacttagctaagataatgatactagaatttgaaaagctaagaattgattttagaaacagctagtgcttttggcaaaccaaacccctcaaccaaacagctgcatggtctagaggtagaggagtagtttcctcacaccgggtaagtctagctgagtattagtatgctcagccttgcttgtggcataatttttgcaggtacgcttcaggatatagttgatgatgtgacttggcctaccaccctaccaccgggttggacggtcgagtgggatactgctccggcaggagaggagcaagaggagtagtgggctaggccttgcccatttcctcgctatcgacgatatcaattatccgttgcatcgtattttatgaactcttaccagcaacttgaaaaactccgatttatgtaataattcagtacttaaatttgaggtttcctgttttattgtatttcttctgtgactcaccttcgagtgagtatgtggtatttgatcctggttaggtggctttatcagactagatctgagggactgacgggttattccgatttaagtgtgttgcggcccttgaggcgtgacttaggcacttaagctggaataatttggacagttctgccacatcctcgaactttgatctaggttcgactattttatccgggtccgtattctcaaacgggatactccgtatgtcgccctctaattaattcttatccgactcagcttaatacctatgtgtttgattcgaattcaaaaatcaacaccggcaataattcttattaaccgacccgattgacctcgttcacgaatccaaaaccaataggtctcaattcattttgttcctaattgagtgcgaggaattattttcaagcgagatcaaatcaaactcttggttgagttactcgctcaatcttctgttcgtccgaactctatttcgctctgctctccgtagagacgaattccgcaggagcattttcactccggaaaataatttagcgcgacccgattacgtgttttgggccagcccaacctagcccagcccactaaaaaccctaaccctagggtttctctataaatacggaccccctcacttgcacttggctattttttacctacccccctagccgccaccaaccaactccacttttttctccactccatctctcctccttgctccatggcgctcggcagcaggactgctccatgggcgtcgcctccctccactccggcagacccgtggagcataggatgtcggccaggggaaccagcagctgaagcccctttctgctctctcatcttccttggccgccaagcccaaccatggcgccctactccctcaacgttggtataggttgtctcctccctggcagcgcctccctaagctcctttccctagccatggtgggggcgcgcagatgttccctggcctgccctcgtctccagggatgagcccatgtcggcgccctcctctagctcggtgcccctccctgctccattttttcc

SEQ ID NO: 177 - DNA, 1483 bp, Zea mays
  Intron number 1 from transcript GRMZM2G072573_T02 (locus G RMZM2G072573) derived from phytozome v7.0 (chr-ID 9; pos 1 27212031 to 127213513 reverse strand)
aactgtcaactgaccatagcacgagtattgaggaggtaataattctgttaaacaaatgctattattgtgttcacttcctaatgacatctgctatcctatacatatttggctttgagttcttcgtctactaatcctgcagaattagcggttcctttgatcagttttctttatttccttaaggaaacagcaaaatgatatacaaacttcttgccttagttaatacagcgatgctaaaatatgtagtttcctaatttgagttgattttgtggcacagaatttgatagagctgattgtaatggagtttaaacctcttcacatatccaaatcattttattgatactgtaaattcatgatattatggttttaaaaggtattgtaagtagttcagctatcaggaaaccagcaaccgaaaattttatttagaaaataatcgtttttatgatttatatgtgcttctgtgatttttggatactattcctttaggttggtcaaaaataattcaaacccacaagctatcttgaactttttgaagtactagtttggcttatcatcaccacatgttagaaatacctcttgcttaaaacttgtgcctgttactacattcaaatcactgtgcccgtttgtcctgaactgcagccagtaatcttactttttttggaacacgcaggagagttgtgtttcacattaatagaataagagagttacaacatacacgcagccaccccacaatcatgaaaaagctataactgtcacttttaagagaaaataataatgacacaacccgacgaacttaaaaccccgagctaggagcagtaaggaaagggagtaccttaactcatgccatggaccaatgctgagattcctccaatcctccccagcaagacaagagactgtaagtaggcttggagaaatgacattgacaaacagtcagtttctgtgtttccacagcaaccagccagatatagtctgcctggcttctttaagttatctagatgattaattgagcttactcactaatttagatatgcagaaactatcaaataagttcttcaaaacaaaaatgcatttgagtaatgtttccgtttgtcgaatataccaaattccatatctaaaataaattttgaaatataataggactgggcctagtgcagtggttagagttgtctctttgagtcactaggtcatgggtttgaagcagcctctccacatttgcggggaagacttgccttggtttatcccttcccttgacccactcatgtgggagtctttgacactgagcctgcattcctttaataggactgctatattattgaacattagtatgccttactagctagtagttacaattgttcagtacatactttacaagaggtccacagatcacaacctagtttatttgcatgtaagctcgtagacgagatgtctaatgctaactttcatttaatgccctgcagttgaatttgtcttggcgacagccaggggt

SEQ ID NO: 178 - DNA, 1314 bp, Zea mays
  Intron number 2 from transcript GRMZM2G421029_T01 (locus G RMZM2G421029) derived from phytozome v7.0 (chr-ID 3; pos 1 10516051 to 110517364)
ttacgcacaaaccccgggagacctccaaggatgtcaagcatatgttttttccaacgatcaaaagcttgactggtcagacatgcttggcatcattagtcagcctcctccggcccgtgacatgaaacattggccgactcaacctcttactttcaggttaccatcggatacggatgtttgttaattaattctaactaccatatatatatatatatatatatatatatatatatatatactagtcgattgaccgtgcgttgcgacggcttacaacaatacccacgtaaactatctatcaaaaaaatttcaaatttttttagttattgtctccactctctgtataatatattttttttgatttgactaactgatgttattgtttagaagggagttcacaacgattgactgaatgaacagagattataaaataacataattccatcatacagagaccaaataagagaaagtttgtgagatcaagtttctaaaataagtcccatgaagtcaaacttataaaaaagatagatcaaaatatggagtgattgctaaagtcaggcatcaataaaaactggatgagctccatataaactatgctacttcgtagcaattactaacgtttaaaaaccatcaaataacaattcattttgttgttagtgtgacaaatcattgctgctccatccaattcagcaacctcaaacaccatgtagtccattgcgccaatgtggtctcagaaacgacttaatgtttgcaagagccaagaacgtcgtgccgtgcttaggctgtagcctcggcccgtagtgctggcccggcccgacacgattatttttttattttacaaaaaaacttatatacctatatacaatttatattcaatattaaaaatatcttagcgtgatgttctactggttagacagtctcacctagtgtctcccccttttttcatcagggcacgagttcgaacctcacctcctacaccgttttttaacattttacgccgatttaatgccatagttgtggcccgcgtgcatctagtccgtgtcgggcgtcgtttggcatttatagacgtgcaaaagattaatttgaaatagctgtgaggggttatttgtaaaaagatgacgcatgacgacagttgaaactggtgctttaagtatatatatatatatatatatatatatatatatatatatatatatatatatataattttttatttgtgatgtcaggaaatcccttgaagattattctgctgaagtggagaaagttgctcactccattgcaacagccataggaaaaattctgaatattgatccagaactg

SEQ ID NO: 179 - DNA, 1560 bp, Zea mays
  Intron number 7 from transcript GRMZM2G049588_T01 (locus G RMZM2G049588) derived from phytozome v7.0 (chr-ID 2; pos 1 56945350 to 156946909 reverse strand)
ggaactgaaaataggtgagtttttctttctagtggccttattctaatgtgtgccctttacgttcaaaaaaacgttctaatgtgtgcccttccatctcctttttctcaaacacaagagaattgtgtatcatttcattaagaaagaagagagtacaatgggaagtaaagtaaccctaaaaacacacacccaagacacacttacaagatacaccactaacataacttaaggagaaaacagaagcagcaaactggcaaccaacaaccacaagccaggagtgctagcctatttgagacgacctgaaaagcatctcctagagaccttttactccaccagcacaccaaaggatatactcattagtgactggttgcagcaacatcatggcatttggatttgcacaattgaagagggaagactgagggacacaacaattgctacgcttccaaatttcccaagctacaagaataatgagtgaattaagccccttcatctccttgggtggtactagcttgagaatctgctgatcaagggtggtgttagaccattgaagtccaggggggagggatatccctttggctaagtcccccctcccccctaatcttggtttccttgacagtttgtggaggctatgccttccatagtgaacccagtgttccaatagttctccagggcatttctaatgaaagcgctgtctagtgctttgctcccaaggtacttgctccgagcatctagtccgtgcggtgagttgggttgcagatttttgtggatgtgtcctttttagtttttctgtccatggtgtggggagggcatggactttatttaattcctattgattcgtttccttaaactctgtacacattctttctttaatttaacttaaaacagcttgtgctgtggggattggtgaaccttccgacagttttcattaaaaacgtatttggcacgtgcatggcagtacttgaagtttgaaaattttccttgatgtgatggaattgttttaatttctaattgctatagcatcgtaacttgtgattttttttaaaaaaaatgataatcatgtaatgatttgtgatagggtctctaactgagttagttaggtggactgagtagcactcctcatgtcctaagtttgactttccgtgggagcgaattttaggctaaggttaaaaaaatatccttgtctgttccatgacaaagcacatgtctaaggcttggccttcgccgcggtcgttctcatattgactacggtgctgctgtgtatggatggggtaagagtttgaggggtttatcgacctatctgagattcttaattcaatgaacggggctgtcttatcacctgtaggttgagtttttttagtcatatgatgatttaaatgcaaatcaattcaaagcattgaataggagatatctgcttttcattctttgttgtttaatttatattctaggttatttgtgatttgtagaaattttgtttcttgaagttgtaaattgctagtttgctttatttacattgccatgttctgcacagttctgaagatacccgatcacgtgccaaaaggctag

SEQ ID NO: 180 - DNA, 8230 bp, Zea mays
  Intron number 1 from transcript GRMZM2G174732_T01 (locus G RMZM2G174732) derived from phytozome v7.0 (chr-ID 4; pos 7 1908988 to 71917217)
tcgtggccaagctccccggcgccgtgctcggacaggtacgttcgtgccagaccggccaccaaacggaaccaccggccgtttttcgtagcttgcttgtctcacttgggttgttttctctccggccaaacgcgttcatagttcggttgtctcatagttcggggagcgatccttactaaagataacctagccaaaagacgctggaatggcagcttgtcttgtagcttttgcaaccaaaatgagagtattcatcatctcttttttgactgctatatggccagcaacatttggagattaatttactatgccttaaaaatagacatgcccgttagcattaatcacgttattgggtcttggggaagcaatatgagtccaggatacaaaaaattattactctctggaatctcagctttattttggtctatttggcttagtcgaaatgaagttgcttttaatcataaaccaataccatcaattctgcaggtcattttcagaggtacgtactggttcagattctggagacttctacagaaggaggaatcacatcaacaaatcctcgatgtctgtcaagcgttggaagtggtggcgatggaagtctttgcaaatcatggatggcgctcaaatgcaagaattgaggatgcctagagttacctacattctagtgattttgcttctttaagttagtttcattatctatgcaacgtttctcggatgtaataattgtcttgtgtgggctgtacgcattaccatgctaaagccggaactcttgtttccataatcaaaaaaaaaaaagttcggttgtctcatttggcgtgtttttttcacttttggattttgcgacgggttttatttctagtttcttaattaaattaggacccgttttttcacttttggatgtggtacgttaccgctggggcctacgtatattatattgataataatctaacggtcaacgatgacgggattggatggatgagctttgcatgccgccgttggatggtcatcggcacgtttggctggtccaccgacgctgtccgtggagagattcgttgacaactcaattgattagttcagggatacataattacatatgtagtacactgcaatggcgtaggtttagatgttttaactaatgtctagcagtagccatgcagttagtagctttttattatatacctaggtagttttattattataagttactagttcgagttgtatacttttagcgacccagacaacagaacagccgccacaagtctcaggaactagagaaggtgaggtgaaggagaagaacagtagtattagggttcatcattctcgaccaccttcctctcagcggacaagttgtttaagtatgtcattacatggcctccggcccatcaattaatccagtcgcggcccacaaccctgtgattcggcctgcgtgcacggcggcccctttcttctcctccggcttcagacttggtgctctgttcctctgaatgtgccttagcagctatgctgacatttccctctccaagagatggcggttgtccccaagccgccgcagtgggaaaacgttgacgcaaggccacctcgtcctcccatgtgtcaagggcttcatcacagttggaccagcgcaccttgacttgagccacatgatgtccgccgcgtgagactgagcgccgcgcaagcaccagcacagggacctgtacatcaatgtgaatatgaggtaaagactgactgacgagatcaacagatttcacactgggtttgagctgggagacatggaaaatggggtgaatcgacgaagatgaaggcaactccaatttgtaggccacactgccaatccgctgcaatattttgtatggcccaaagtacttgaaggacagcttgtggttagcacgtgctgcaactgagctctggacatatggttggagcttaagataaaccatgtcaccgaccgagtaaacacgatccgtccggcgcttgtcagcttggtatttcatacgttgctgggcgcggagcaagtgctggcgaacagtttgtgtcatgagctggcgatgtgataaccatttctgaagatcagcatgaggaatggcgtccgaggtggacactcccagactacggggtgaacggccatataatacttcaaacggtgaagtgcccagggaagaatggcatgaagtgttataccaatattccgccagcggcagccacttacgccactgttgtgggtgagaacttgcaaaacagcgaaggaaggtttccaaacattgattaacccactcggtctggccatccgactgtgggtgataggaggaactcatgcgcagcattgtgccagacagccggaacagctccttccaaaatgtactggtaaaaattctgtcacggtcagagatgattgcctctggtagaccatgtaagcggtaaacagaatccatgaacagctgggcgattttcagagcagtaaatggatgcgccaatgcaaggaaatgtgcgaacttagaaaacttgtcgacgactaccagaatgcagtcatatcttcccgatttaggcagtccctcaataaagtccatcgagatcacttgccaagcgtgagaaggaacctgaaggggctgcaacagtccaggatacttggacctatcaggtttggcacgtgcgcagatatcacaggattgaacgaaattgcgaattgttgatttcattccttgccaagcaaacagctgtttcactcgacggtatgtaactgggaaccctgaatgcccccccatggcgctgttgtgcagagcagcaataactttggtctgaagggatggactgtgacccaaccaaatacgattcttatatctgatgatgctgtttgaaagagtataatgaccggtatcaggtgaaccagcagataactcggtaagcagttggatggctttaggatcctgattgtaactggaaacaatgtcagataaccactgtggtgtgccaactgaaagagcattgcagtccagggaagtatgaggacgacgagacagagcgtcagctgcccggttagtcgaaccttgcttgtaaacaatttggtattgaagtcccaacagcttggtaaatactttctgttgccagggtgtcttcagatgctgttcattgagatgtatcagacttttttgatctgtaaaaatctgaaatacgccatgttgcagataagagcgccagtggtcgactgccagtaagattgcaaggtactctttctcatatgcggacaagcccatgttcttgatgcccaatggtttgctgacgtaagccagagggtgtccatcttgcaacaggacagctccaacacccgaccccgatgcatctgtctcaatggcgaatgggcgagtaaaatttggtagtgctaacactggtgctgaagaaagggccggtttcagcagagaaaacgccaaggtgtgttcgtcagtccatacaaagatagtatgtttcttcaagaggttggtgaggggtttggcgatgacaccgaagttcttgacaaacttacggtagtatcctgccaaaccgaggaacccccgtaactcctttgcattctgaggtgttggccaagaagatactgcatccacttttgttgggtccgtagaaacgccatccttgctgatcacgtgacccaagtaagtaattttctgttttgcgaaggagcacttagacaatttaacttgccactggtcctggcgtaatagctgcagtacccattcgaggtgcagaaggtgattgtcccatgtatcactgtagaccaaaatatcgtcgaagaacaccaacgcacatttcctgagaaggggtttcagagtgctgttcattgcaccctgaaaggtagcaggcgccccagtaagaccaaatgccatcacacaaaactcgaagtggccatgatgtgtctggaatgcggttttgtgctgatctcgtgggtccatcctgatttggtgaaatccagctcgaagatccaaggttgaaaaccaagctgctccaaagagttcgtccaagaattcatccataatgggtactggaaatttagccttagctgtgagtgcgttcagatggcgatagtccacacagaagcgataggagttgtccttcttcctgaccaaaataacagaagaggaaaaggggcttttgctgtgttgaataaggcctgagccgagcatgtcgtcgatctgcttctcaatttctgttttaagagcaggggcataacggtacggtctcatttgcaccggccgagctccaggaatcaacggaatccggtgatcacaatccctgacaggaggaagaccttgcggcactgcaaacactgatgaatagcgatccaacaatgactgtaattctggtggaagtgaatgaataatatgttggtcggtgtctggaagttgtgaaaggctgcacaattgaaccaaagcactctgtccatctgaagcttgtactccatataacttgaccagcgaagaccccactgttaaagacaaccatttgtctgcccaatggacccacatcgggctatgttcggataaccaatccatgccaatgatcatgtcaaatggttgaaggtcgagaatcttgagggtggaagtaaatcgatggccttgaatggaccagtctgcattgttgagttcagcacaacaagatagcttagagccattagcaacttggactagtaacggctgacagctgaccggcagcagtgggacatgaggtacgatggacgaactgatgaaggaaatggagctgcctgaatccaacagaataagaacagatagtcccccgatctctcccacaaacctcatagacttggactgacggtcatccctggacaaggactgacataagtgtaagcaattcagatactggaattgctgccacagttcttccaccatgtgtaactgcactgtgtccggacatgtgtgacctcgagaatatgccaagccacacttgtaacaaagacccttagccttcctgtaagcatataccgaagacaaccggtcgggttgagcagttgctggagtcttaacgtcaggacgagtggttgggccccctgttggaggaggcaatggcatgggagtcctctgagacgtcttggaataagatctggggtcgaatttgctgaattcccttggcttgtgtgtcgccccaatttcatcctgcaattgggcaagaacataggcagtatccagatctttgggacgttgaatcataacaacagacttaatatcgtggcgtagaccatctaagaaacgcgtagtataatataatgggtctgacattggctggtaactgtttagctggtctactaactgagcaaactggtctatatactcagccaccgatccgagctgtttgatgtgaaacagctggcggatcaagatggcatgttggtctttcccaaaatgctcgcggagcaaaaacccaaactcggaccatgatatgtggggtagcttatgttcaacagatgagagccaccgagacgcagcgccagaaaaatgcattgtagcgaccttaatccacactctaggatggacctcatacatggcaaaataattctcacagtgggtttgccaaagcctggggttatcaccatcgaagggagggaaggacacacggggcagctgacccaactctgaactaggatgaaacccatgagatcgctgaccactgctaacagaagttggatcgatgtgctgaaatggggaatgaaacagaaattcgggcgtaccgttgtgcgggaggtgggtttgggcatagacacgcccaaagccagactcccgacgttggtgttcgacgcggtgccccattgggccgtcggccttgccagaggtaggtggtggacgcggtgccccgggcgacgggtaggaacccagcacgccggtcgcgtggaggaacgaaggtgtcggggacggaggtggtggagcgcgttgcttggcgaggtcctgccgcaccagattcatggtgtacttgaggtcgtccaccgatgcttccatgtatgggcgccaggaatcgaacgccgcagtggcggactccaacgcccccacccgggacacggccgccacctccaccgcatcgagccgctccacggtcgcggcgacgtgggaatcgatctccgtccgtagggtagcagccacggaattggacacggtcgtctccaattgctggatcgacgcggtgttccgagtgacagacgcgtccagcgaccgccagcgcgcatcctgcgccgctaggcgctcgctgatgtcgcggagtagcttggactgctcgtcgatggcgagcttgaggttcggctccatggctcccaaatgcttggcgcggcgcgtgaagtaggatttctccagcccagagaccggtgtctccgataccaatttgttagcgacccagacaacagaacagccgccacaagtctcaggaactagagaaggtgaggtggaggagaagaagaacagtagtattagggttcatcattctcgaccaccttcctctcagcggacaaactgtttaagtatgtcattacatggcctccggcccatcaattaatccagtcgcggcccacaaccctgtgattcggcctgcgtgcacggcggcccctttcttctcctccggcttcagacttggtgctctgttcctctgaatgtgccttagcagctatgctgacatatacctaggtgttggatccactaccactagagctgatcattatctatttggatccaatagatatggtagccagctagttttttttttgagaaaatgaggtatgtatgtacctatgagctttatcaatggccaatgagattttaggatgttatatatccaatctagacaacgttttgcgtacacatccatttggcaaagatccttaactaaatggtctttaataatgttcttctttgtactttggaaacaagtaagcaatattttccatgtcccttcttatattatccacgcataacaaaagaacaatctatctaacttgtcctagtaccaaaataactcatggggctagttcccaattgaactaatttctcttagggctagtttggtaacctcattttttcaaggatttccattttcccaagacaaattagttcattttcttttgaaaaataggaatcatttgggcaaataggatttccaaactagccttcggtgcagtagttttcactgggttttttttttgttcctagagaatgtaatagaattgcttatgaacctcttgagtacgagtgcgtgtacaaggattgagtactggttgggctcacttccataacacaataatgccatttctgctgaagaattgtcaacccatgtgtgatgagaagctatccgaaaaaaaaatcttgctgcggaagttgtttggaagttggacttctgagtggtgctgctccctcatgcaatggtacacggtagttgtgacttctgacttttcggcttctgagtgctgcggacttgagacttggcgcatgcacggtagttccatagttgtcggtcgggtgccgatgatgttggagggatactttagcatctctaaaaaggtccctcaaaattaaaatactacgctatttaaagtgtttttagggcacttaaaaacaaatccaacttcaacatttaagccctaaaccatgcaatttaggaaataaattacattagcatgaaagaaaaaagattatggatggtgtggaaactaagtataaggcactgatatgaggtgtagtatatttgagtggctccatgatgtgtcttatattttttatgtatgatagaaatttgtaaaatatggtattgttggaattgtttttttatgggtcaagcattatatttcaagataaggtactaatttaagtcgctattggagatactcttagaaggttgtaatttgtttaggccttgttcgtttgtgtcggattgcacctggaatcattctcactaatcaaagtttatataaattagagaagtaatacggttaggaatcgttccgacccactaatccggcgcaaacgaacaaggccttaatcgcttatctgtaagtgtaacatcaaccttgcattttacaataaatcaaatatatggttcaatggtttttttcccgccgaataactagaataatcttgtagcttcttcttcttcttcaaccgccttgcgtacgtactaacgtacgtgtaagctagagtattctccaaccagactctactctgaacaacatcaactccgtccgcgtatgcaggggtacggc

SEQ ID NO: 181 - DNA, 8472 bp, Zea mays
  Intron number 3 from transcript GRMZM2G436804_T01 (locus G RMZM2G436804) derived from phytozome v7.0 (chr-ID 3; pos 2 07010435 to 207018906)
tacatcatacgtcatcaattacaggaatccaaggggtatgcatgcttatactgaactcttggcactttttttttggctttcattctgtaagcaatgcttttgcttgaatctttcaacaacaacaaataaacaggcaaaaaaatcaaccacagtaatgattgtctctattactgtagcgcttcgtcattctcattaatctttggtttggtcttaggcattggaagttattccaacttccaagtaaggaaacaaactggaactgctttattggaagttttagtttcgtgccaaatcacaaactattggttactgctttaatggcagtcgagcaatgaaccaacagcctgcttggttgggttccaaaactggtccaaccaaaatcatggcaagccaaaactcaggcttgcgaaagttagggcaaaaaatgtaggcatgcatttggtcgagtgacaagaaaaaacacggcaacgagccctgttcccttctgtgagtgttggggacttgttctcaaatgctatgagttaagaacaagtcaacacaaaacgttaatggttaaagtccttcgttcttcggagtattatttcccctcaggatataacgactctcggacgaaggttacgaagaacataccttcgtaagcatgacatataaaaatgaagagggattcatatgaaatataacaacatgaacaattaaatatgttgttattaatgaattatttttatcttattattatgaatgaatagaaatgataaattattacaaatgtaccttcggcttgaaggaagataaagagtacaaccgtgacgcaaaagcaaaatgccaagccagcgtgaacagtacgagagtactgttcatctatttataggcacgggacgcagcccatgtaaaattacatccagaccctttacatttgttaataactccatagtaattcatcggggtctagatggccctttcccctttaagtcggtttcctttttcctatcaacatgccgaagctcccttgcgcacagcttcggctctgttccatcctccgtttcccttgtgcttcttcgcattgtgattttgactcatgtccgaagggtccaagtccgaaggtacctattcatgtattatactccagaaacatcgttaaatcacgtttttgaggaccttcggaggtcgaaggcccccaacagtagcccctcgcaatattaatttgttagaatgataaattcagattgcgatatggacgaaggccttaagccgaaggtccgaaaaaacaccttctctttgctagaatagcaacagtcaatgacaggcggggccctcccacttgcaacgcactgggcgtataaataagagcgcactgcgggcacacttggtacgctttcttgccatctgctcttgctttctcaatattttagctcttggacaccaacgattgcctggctttttagactttttagcttcggccttaaaagcacattttcgacatttccgaagatgtctcaagataacaaagctgtcgccgagacaaagctgagcctttctgaagagaagaatcttgggtttcttgaatcgatagcaaagacgaacacagagaagatcactagggagattttagaaggtttatctgaagatactggtgaaagtgacagctatgatatagaaagtggaggtgaagactccgaagatcgaccgtggcgacctagtcacgcagtcttcggaaaatcgagtattaaacagagtcatctcgataacatgaggggaagatattttcgagacatgtctactgtgagggccgatgacggagagatgactgtgcctactcccgaagagaatgaagttgtgatcttctgaagcttttttaaagctgggcttcggttccccttaagcaaatttgtggttgaggttttaaagatctatcaggtttaccttcatcaaattacccctgaagcgattataagaatgggaatcttcgtctgggccgtgagaagccagggcttggagccaaatgcaaaaagtttctgcagtatgcacgaactgctttatgagacgaaaccctggggcaaagagcaatatcataacaactttggctgctatagcttcgtcgctcgttctggctcgagctgccccgtgccaacttttcggaaaagatggcctggggactggatgaaggaatggttttacgtgaaaaatgatttaaaggcacgagaggacattaaagatattatcatgcgtcctatctggcagcgcttcggccttcggaagccgaaggtggaaattgatgaagcagccgaaaaatgccaaaaggccttcgacacagtatgttgtttcatcgggacgagggatttagtccaggagcacatagccttcagagtgtggccgcttgtagagcaatgtgaaatgccaaaggaaactatcagtaaatctgacgaaggcggactggttagattgaaatacactttcagatacgagggtaagtttattgagctagatgatgattggctgaaatgcatcgaagctacaagcgacgaacttcttggaccatattcaaaggcggaggataacgcactgtctgcgaccttcggaggccggaagaagaagaggttgaatagagttttcgatgctattgggtttatgtactctgattatcgctacccgctgaaagggcaaaagagaaaaagcgccacttctggaaaaggagatgtttcagttgctctaagtgaggccgcgccaaagaggaagagggtgaaggtccttactcaccgaccacgcttcattgaatcggcctcagtgcctgaatttgatggtgagacctctatgactattgaagccaaaggacctgctcttacacagaagaatgaagagccggctgcaacgccgaaggctgataaaattggagggccgagagctgaagggacaaaaacatcagaaattttaagtccttcggctgaagttgaagtcccaaaaacccaaaaaggtccagcagtgacccccaaaagaaaaaaggatggttaatgttctggatgtattggagacaataaagtcttcgagcaccactccgaagaaaattgccgaagctcccgaaacgcaaattgagacaacagcctctgatgccgaagctacaaagcaccaagctgaaactgaagctgggccttcagagcctgccaaagtgaaatccttgggaaccatagaaaaagaaacaaaagcatcagaacaaattttggctgaagaaactggcactgccacctccgaagcattttccgaagctctcaattatactttacgacatgcttcggggaaacagttgactgaaaaagaaaaacaagaggctcagttctatgcccaaaaattgaaatatccgaagggggcattggttttcaatgacagcggagaagaagacttcttatactgtctcccagacagcaaggagatctctgtctaccgagagatgggaagaagcttcagaatcccaacgctagaagacaggctctcagtgttatcaaaagatgaattggccgacagcttagcatacaacaacttaaaggtgaaagaacaagatctttgtgtttaaaaacaagatgttttcgtttgcttatacttaataccacacttcttttgcagggccttattcttagcaacgccctcagggcgcaaaaaagcgccgaagacgagggatataccatggccttgaataaccttcgttccgaagtaattgagctaaggaacgaaggtcttgaaaaaggcaaaatattaaactcactgataaacaagataaaagaagacgaggctacttcaaaagcccaatttgagacccagaagcgcgaaattgaagatcttcggaaacagctggcagaagaaaaattaaaatgtgcggttgccgaagctgaccgagacgccagtgaatactggaaaaattactcggagaaaacagttgtggagcttcgttcttcaaaagagagatgctatgaaaaatctatggcatgtgtataaaagataaaaaccagcttcgccaattttggcgcatactcaaatgaggacaacttcgtagtatgcgatcctgaaggtccaatcgaatggatgaagggcgaagccgaagcctttgaggaagttttgagtgaccgtggagatgtctgcgccttctcaggtgctaggggaattgcggctatcttagagaaggcagaatgcgagcatgtgaagattctggcccaagccgaagctgcgttttctattgaagatacaaaagacccttcggctgaggcaagcctaattggcggaaagttttttaccgatatctgggaaaatggtggccgagagatggcccacgaaattataaagaagagtgaaaaagatacccacgatgctagagaagcaccaaaggcagttgaaaaaacagcagaacttgaaaagcagataggtattgtctaattgcttttgactttatgttttattcttgtgacttcgagcttattcatgttttgtattgcagccgaattgtctcctcccccggagccctttgagtcacaaacaaaccccaaagcaaaaagtgaagatgaaattattaagatggccgaagctattatggacaaagttgtacctcaactgctaaacgaagctgcggaagtagttctgaaagaagactagctattgttgtaaaaacattcggagtactgatgtaatatttgctgaacaaagtgtgtaatattctataattttgaaagtaatatatataagttgtatgtaattcaattctttacgatgcatgaaactttacatacataccgtttttgagcctttggcgaaaaaaacaccttcctttcttttcatgcttcgtaaagaatatacatattcgtgaaaatattatgcttcgtaagcaatagatttccttcgatactaaagttgacgaaactgcacttcttcagactttattttgtgccttgacacaatttcttcgaaaacaatttccgaaggttaacattgtattcccttcttgtgccattgatgcaatatgatgtatgatatcatgtttatgcgaatgatgtgatgatgctatgatatgcaaatgatgatatttgtgccgaaggtacacacacattcccacagtagaatatagtctcttcgccgtttatttttcggcttcaccgtttatttttcggtctatcagcgttgacttttcgctgtaagcctcccttaggagcttcttcgccttttatttcggcggtatcagcgtttatttttcgctgtaagcctcccttaggagcttcttcgccttttatttcggcggtatcagcgtttatttttctctgtaagctctgcattccctttgaaacgacttttgagcagaaaacttacgctgcgttcccttaagaacgacttttgttgctccgacaaagacttgccatgcgttccttaaaacggctttttgttgcttcgtcaaaacttttggaacttcgtcgatttatgaggaaggtatattacattatgataatgtcgaagttattacaagaaattgaaatcaacaaaagaactaaactttcaatggttgctctttattgaaaaaggtaaatgataacaaatgtaaaaactgtttcagaggtaggatatgtcttagtagatgtgcttcgattctggcacaatactgttgactgtgcgagcttcggactgctccctaaagtctcgctgctggtgagtgtgctggctcccttctggctgctggccttggggataagcgggttgcattggtggtggaggtggaggctgttgccaagatgtctgaggttggtttgccgaagcaacagaaattgtaggatggttacccacatactctggaatgtacggtgagtggtatgaagcagtatgcataacctgcttcggctggctctgttgggctgcagcttctgctatctctttctgtttctggatggtgacatgacacatcctggtagtatgactcttgtcctcaccgcagaataggcaataaattttcctgggctgatccccaaaccttcctccgaagcccctggcgcctctgccccttggagctgggggccggggtagttctgttgctgccccgaagcctgggaggaatactgcggcctctgttgctgactttccctgtcgtcattctgagtagagtggatagatctgacgtgcctagggtggattctccctccgaagtccctggtcatttcggagaacctgtaagcttcctcccttctttgtcgaaagtcattatctactcggatatattcatccatcttctgaagcagtttctccagggtctgagggggtttcctggcgaagtattgggctgtaggtcctgaccgaagccccttaatcatggcctcaataacaatttcattagacaccgttggcgcctgtgccctcagtcgtaagaaccttcggacatacacctgaaggtattcttcatgatcctgagtgcactggaacaaagcttgagcagtgaccggcttcgtctgaaacccttggaagctggtgatgagcatgtccttcagcttttgccacgatgttattgttcctggccgaagagaagagtaccaggtttgtgcaacattttttactgccatgacgaaggatttcgccatgaatgcagtattgccaccatatgaagatatggttgcttcgtagctcatcagaaattgcttcggatctgagtgtccgtcatacattgagagctggggtggtttgtaagacgggggccaaggtgtagcctgcagttctgctgacagaggagaagcatcatcaaaagcaaaatttccatgatagaaatcctcataccagtcatcctcgttgacgaagccctcttggtgaagctctctgtattggggcctccggttctgctcatcttgcgtaagatgacgaacttcttcagaggcttcgtctatctgcctttgtaggtcagctagccgggctatcttttctttcttcctttgtatttgttgatgcaatatctccatatttcttgatttcttggtccaagtcgtcctcctgaggcgttggactggtggccttcctcttctggcttcgggcctcccgaagagaaagggtctcctggttcgggtccagcggctgcagagcggcagctcctgttgctgaaactttctttggcggcatgacgaaggtcgatgcttgccgaaggtggtcgaaaagggttcaccggaggtgggcgccaatgttggggacttgttctcaaatgctatgagttaagaacaaggcaacataaaacattaatggttaaagtctttcgtccttcggagcattatttcccctcaggatataacgactctcggacgaaggttacgaagaacataccttcgtaagcatgacatataaaaatgaagagggattcgtatgaaatataacaacatgaacaattaaatatgttgttattaatgaattatttttatcttattattatgaatgaatagaaatgataaattattacaaatgtaccttcggcttgaaggaagataaagagtacaagcgtgacgcaaaagcaaaatgccaagtcagcgtgaacagtacgggagtactgttcatctacttataggcacgagacacaacccatgtaaaattacatccagaccctttacatttgttaataactccatagtaattcatcggggtctagatggccctttcccctttaagtcggttttctttttcctatcaacatgccgaagctcccttgcgcacagcttcggctctgttccatcctccgtttcccttgtgcttcttcgcattgtgattttgactcatgtccgaagggtccaagtccgaaggtacctattcatgtattatactccagaaacatcgttaaatcacgtttttgaggaccttcggaggtcgaaggcccccaacagtgagattaacaaagtttctactgacttgccaagatttaggccataaacattggcgtgcccttttatggcaatgaccaattggtatccaaaatttttaggcatttcttaattttggttgggcaagttttggaacccaaacaggcaggccctaaatggcaaagtaacttagtggtttagtttagtttttaggtaaaagaacaagacacaaagagtgaacaacatcagaatgccatcaaggcatcaagtaattgttcaatgattacatagaattgcatacacataatattttgttatgctatttttttcggttctctttgactgtctgacactcagatatccatcaacttgatgtgagatagccttagcattttgctttgttgactttaatatccagttgagtagatttggttgcctttaagtggtaagccaagtcaactttgcatcctgaaagatattaattcgattacagttcagatatcattatgaacactcatattatccaaccattccttacagttgtgatttcattcaataattctgatggttttaccgccatatatttacaggatcctgcatcaggcctgtcctcgaggaacaaaag

SEQ ID NO: 182 - DNA, 5768 bp, Zea mays
  Intron number 4 from transcript GRMZM2G128206_T01 (locus G RMZM2G128206) derived from phytozome v7.0 (chr-ID 1; pos 3 8618028 to 38623795)
cgacttgtggtaaaactgcgtatcctcttgagaaggtaattttgatcacattatgttgttgtacttttcattatttcctctcaaaattttgggatgtagcttgtggcatctaattcagtagttcatcaaggtcagtatttgctatggaacatctcagggtcaatcaccatgggttccaatggctttcacaactgaacaaatactcgtccccttctagtcatgttacccaggtcgtgctgacagcctaaattttgctccatttaataataaaaccaaatctttgttcaccttaattcgtctaattatcctttcttgattgccttgagttatcaaaactcttatgtggacagtggttctaatgcatggctgttaaaaacattgcaggtaacagtcgaagagaagtcctaccataagtcatgcttcaaatgctcccacgggggctgcgcgattacaccttccaactatgcagccttggagggcatcctctactgcaaacaccatttctcccaacttttcaaggagaagggaagctacaaccacttgatcaagtgcgcgtccgtcaagcgcgctgctgaagcacagccagaacaaccggcctctgattcctcctcctgaccacgccatttaaacagtgggggtttggaggcgagagagttgggaagcctcctgtttctacttaaaaccgcgtgatgtatgttattccatctatgccccgaggatactagactactactctattttggtatcctctgctgtgctagctggatcatatcagcgaaccatggaattgctgtcattttcaatgaaactgttgtgcatcaagtagtgaaatcttcactgaaatcgggtatcttgcctttattgatcaatatattatctatgttgttttgttgtctttagtactatgcaatctggtttggtaaatggtcaaactaaaaggttctttttggttgagttggttgagtgaactttcttttctctagatataggtcaaaaagcgacccatttttgggaggtttctttctcccagaaagggaaattgaagaagctatctcagacaagggttaaggctatctccagtaaactttatatgattgtgcaaaacactgtattgtaaattgcattgtctgtagagtgaaatttaaaataaagtatgcgataggttgaagactcatcatactcacaaagatttttgaagcacgagcataagcctaactacactattaatatctgacctatcatactctcacaaagattcttcaagcacgaacataagccggctgtaaagtttcccttgtttctcgtaaatataatataaaacgtacgtgcatcttagaccggctccagcgagaacctataaaagctcttgtcctctaaatataaaagcccatgtcctttaaatatagaggtttgtcagatccgttatccctccaacaaaagactctaaaaggtcctctaaaatttagaggacggcatgcctacgctatgtatacatggtgtacggtagttctctatacactactgattcatgtgtctgcgttcacgtgctgacgagcggtaataaataatatagaataccaaatctggtaacactgttgatatagaggatgaaatttagagaatattactggagatgaagatatagagtacataatcttttagagagtgatgtaaaatatagagaatattcttttagatgatgaaatttaggagacgttgctggagacagccttatataacctatatgtgtttggtttgaggtcaaaaataatgggatatgaccatctatagatttagagatatagatattcatattgtctgtttggttagaatttagatgaatgggaccagcaaccgtgtatatggccacatggaacactattttatattatagactattatttacaacgtagaatttgaaatatgagatataatgagtaatgttgtcgaagatagccttatagatgaatcgccatcttcagtgatattcaggaaaccaaatgcatccttacaccatcttattatgcttgcttataattcacggttttaaagttgctgacatcgcctataatatttgtttgcgccactcaggtcaaaacaaatagaaaagtctagattgcttttgtgtatatgttcatccatatagtcctgttatcttgtgcgccagatatttccaccttttaattcaaaaagatttaaaatcccttatgcggactaacattaaaatcaatggggactgccttaaatcataaacgtacggtactgtccacagtgtagacctcgtagaccaggttattaggcattcatcccatctcgtcgatcatatgaactggaaggaaccaaacatacaagctgtactcaggatgactgtagttgtcgagcgtgtccgagagtttttgtcttccttccatgtaccatggcctctcctttagcagctgcaaataattgtagggcctctgtcttattgctttcagattggaatccaggtgcttccaatttgtttggtactcgcactctttgtttctggttgcgagcttgaatagatcaccaaggagccactagatcacttggcgtgcaaaaaaataatcaaggcatttgactaagagaaactcattgtggatatattcaaatttcattgaacttgtagagaaaaaggcttgtgactgtacaataaaataggcatcaattcacatttaatataaaatagtatactgaaaaatgcaaccaaacagctgtagcactgtctattaggaaatacagtgtgaatgttatgacaaagaccagcaacaaacaaataatcaacaattaggtaaatgtatttgttgacagaggctctacatgatggtagatagaagtatgcattagcacgaaaggagtggaggatataacctatgaagcaaacatgaacctcatgtaaaataaagggaacttgtcactaacaaaataagaaggttcaggttagctggttacagattcaccaaacaaaatatatatacatatatattcatacactgcaaagacaactgtactgaagattaactgcgatcggtgaatgataagcactcattaatgtgccttttctggttgataatttgacctatatcaaacagaaaagttgataattttaccaatgtggtttgcttattaaaagtgcacggtccatgtacatcttcagaaatcagcacatttacccggtccatgtacatcttcagaaatcagcacatttacctgttggacttgttggtgtaatgtgtcaaactgatctacattacaacagacatcgccagtgattgttgggcacaaactttggatccttgaagaaaacaatgtgtctggctggaaaaacaataaaacacttgctaaacaggccacatttgaataatcataaatattttttcaaagataagggtttctttaactatgttatattcaaatcaaggtccaaggatcatattgtcagtttgtcaccttaacagctttggttgcatttgcacagtttaagaccttcccgtcgcttcgttgtgcacaaatgtcgtacatggaacagtaaccttctgctggtacaaccctacaaaagcaaaatggtaagatagatgaccaccaagggctctaggaatatggaacaccaagtataggcatgtaaaatagtaaagtacaacagcatattctagaagcaatcaagcatatgttagacttttgagctacaatcagtataacacaggtcactgacaagttaccttgagccattggattgctgcgcactgatcgggaacactagataattgatctgcaccatagtaaaaataagttagatgttatttagaccacccgaatcacagtgaagttcgaccatatcaacacgcttgtacaatgtacttctatctatatgatagcctacttacacactatacatgatccaaattaaatattgttttcgctccatatacacataacggaaaagtaaagtgacatcttaggtatcagcatagtttacccttattaaatgcatactctctctttcacccctgtaaataaacagaaactactagcagtgtttgcaggaaaatacatgggatgtgattgggtgatactgttatggtttcaaatcctcggggggggggggtatgatcataatttaatccacatacttcagaaatatagtctagaaatcaatttgcatagctaaaattaaaaggtcaatgcagacaccgccgagtcagcagaaactataacctagcaaattctgaatagcttgcaattggaatacaattgttggcttattgggcacatgaatgcaattaattctcaaggtcgaaatgcggaaaacatgtggaaacagattaattatacaatggaagttccatgtgaaacctgcaaaagagatagttcaactaaggaacatcacgacacgaattgcaaagtttcaaggttccaatcctgtacaaggacaattacagcaacaaattacattacatctcataacaagaatcgaagttgaccatccaactctaaagaagcagattcccttcaaatcaatatgtgataaaaggggggaaatcagaagaagaaaaattacaacaaacccgtaagatatatcctgatagcatgcatttcaaagcaaaaataaaataaaaacggagagttatgacgaaggaggcaagcatagcttactataacccaaacagtgaacaaaaaaaattaaccaactatgccgaactaaactccgccggcttcaactaaaatcgaactaaattgttgacccaaccgaggaattaatgtataccaatctgattcctctagatcaaacatattcatgatctcctgcttgcctcagaatctgaagaccacagagaagcagatgaactttcagataaagagctgtaagacttgtccattgttttactcctggtggtatctgctggttcagtctcagcgatagtatccatcagtaagtgctgtaagacttgtccattgttttccaaacatccaacttccacttcctgcctgaaagccaatatggactcattcactaggttccaaacccatttttcttccccccgtcacactcacagtttgagctgtgctgatcattgtaatgcttatcattccatgcatcatcaagcaaggctgatgcagtccctgcttcactgaacttctctggttccttgatacatctattctcaagagatgctatgctgctcatgcgctcacctgcttcagcggctgctgcagtttagccatttgccactattgagttttcagcaggtgtacaatctacaagttggtgcagtttttatcacgagcctacagcaggccagagttctttggatatgcaaattgtatcgaacacaagactttatttagatccaaacaattcaaaaccacaatatcgatacactgctcattgcggcagacaaagctgaccacctagagctgtttattgcaaatataagcatgtggcacattacaatagcacaggttatgtagcataaataattaggcttggctgcttcacaagataaccagtggcagcaactctgaatctgatctctcgtcgaccgcatcagcatttcatcttctttacctctctttcctcgctctcatccacagcatcagcttcacagcagggagcatcactctctgagcgattcttgacaatgtcaccagtgaagtcctaccataagtcatgcttatgtggacagtggttctaatgcatggctgttaaaaacattgcaggtaacagtcgaagagaagtcctaccataagtc

SEQ ID NO: 183 - DNA, 16081 bp, Zea mays
  Intron number 6 from transcript GRMZM2G470666_T01 (locus G RMZM2G470666) derived from phytozome v7.0 (chr-ID 5; pos 1 16904215 to 116920295)
ccacttcaggtaatcagatgttctgacttggaatatgttgatttgtcattgattcatttgttctggtactactgaaattgtactcagaatagttaatactctctctgtcccaaaaaataaggcatatattttttttggaaaagtctttgaagtgaaactttgaccattatttttttaaaaaaatatgaaatcaacaaatgcaaattaagcatcatattaaagtatttttgaaaatgaattcaaatatataacatgcatacactaaaaacatatgtttttttgctaagttattggtcaaagttttaaaatgttgacttttctaaaaacatgcgcgccttattttttggatggaggtagtagtattttaaaggaaaaatttgctcgtggacattgagaacggccccctttgctcgtggacactgaaaatagtgagagttgctagagaacactctgctttttattaaaggtctgtttgggagaacttcacttcaagaattttaggttcgttctagcttctttcataaaatcaggtcttactccacgagctctagctctgaaaaaaaattaaaactagaggccaacttcatgaaattcacaatactcctctagaggtgcttcacaaacaatgcttttatacctcttcatgaagttgcatgaaaattacacaccatgacatcggttacctaacatatcgctttagttctctcgtgacaacccactaatcaattgtattacagaagctggagtctatatgcaagccaaacactactcgaacccatctcaacaatttgatgaagctgaaaaactaaagctgatatattttaagttaaacactcccaaacagtcccttaaatacttaaacttggtggttaccacacccaacaaaatatctgttttccaaccataactcatgcatgctatgttttctagacatgatatttttacttaaagtgttctatgcatagataagcctattctttagatttcaactactattttggatacgggatgcagctattaaaattactgaggaaggaaaagctagccttatggatatttcactcatacagttatctcgggctagatttctacagtagattactactacgatgtatcagttggaatgagaaatcctaaccctagaatagggttgagcagtgtattaatagaccaaataactgggccaggcccattacaagagacgggtatctaacacccctgccgcagtcacaactctatcctgtacagatgttgagattggaccgaaagtctaggaatacattggatggcagccccttggtgaagatatcggtgaactgcagtgttgtggggacgctgagaacacgcgcctgctgtgacacgctcccggacgaagtgtaggtcaatctccacatgcttcgtgcgcgatgctgcacgggattagtggagaggtagacggcgctgacgttgttgcagtagactagggtggtgcgctggagggagctgtagagctcgtggagtagctggtgcatccaggatgcctctgcccccggtggataacgagccagctcggctcggctcgtttacgagctcgagctggctcgtttagctcgcgagccagagcagaaaaataaaatgtacataataattattttttagttaatttcaaactaatttaacaatagaaaatagtaattatactcataatttcacaaaccacatcaatataacaacaaattagcacaattcatcactcattaattcacaattcacatacatgttcatcagtttaacccataattatatttgcatagaccaaattaacacatagacataattcattaatcattagtttaattcataggccattgacacctcagatatatataacatattcatcaattattctgcaaatgatatgcatatagtttcgttttgctggaatatggtagctcgtttagctcgcgagctggctcgttaacgaaccgagctaggatgttagctcagcttgtgaaaaaattcaaacgagccgatctgagccgagtcgagctgaccatgaaccgagcgagccagcgagccacgagcatttcgtccagccctacctctgccacgccgttggccacaacgcggtactcagcctcggcgctggagcaggagacgatggactgctgcttggcggtccaagagacgaggttggcacccaggaacacggcatagccggaggtggaccggcgcgtgctgtagccgggcctagcagcgtcggtgtagaccacaagttccgacgtcgaggatggtcggagaaggccgtagtcgagggagccccgaaggtagcacaaaatccgcttgagggcggtgaggtggggctcccgtggtgtgtgcatatgaaggcacacctgctgaacgacgtaggcgatgtcgggccgggagaaggtgaggtactggagcgcgcctgtcaggctcgggtaagacgtcgcgtcggcgattgggagcccgttgtcctcagagagcttcacctgagtatcaacaggggtggagtagggcttatagtcggacatgccaacccgctccagaatgtcgatggcatactgacgctagtgcaggaagagaccctagggccgacattcggcagtgatgtcgaggaagtgatggagaggcccttggtccttcaccgcaaactcccactggagggcgatgatcgtgcgctgtaggagagcggtggtggatgtcgtgagcacaatgtcgtcgacgtagaggaggaggtagacgatgtcctcgccccgtcggtagataaagagtgatgtgtccgacttggcctcgacaaagccgatggaggccatgtaggtggcgaagcggctgtaccaggctcgcggcgcctgcttgaggccgtagagtgagcggttcagccggcagaccaggtctgggttagtggcatcgacgaagccagtgggctggctgcagtagacagtctcagtcagagtgctatgaaggaaggcgttcttgacgtcgagctgatggatcacctagttccgggagagggcgaggaagaggatgacgcggacgatgaacttgacgacggggctgaaggtctcatcatagtccactctagggcgctgggtgaagcaccgaaagacccagcgggccttgtagcggtcgagggagccatccgaagtcagcttgtggcgaaacaaccacttgtcggtgaccccattggtgttgggtggacgcggcaccaggtcccaggtgtggttggccagcagggccgcgtactcctccatggcccgatgccagtgtgggtcagcgagggcggtgcgaacggaggaggggaccagggaggcgtccagtggagtagtggtcgtatcagcggccaggatcagcctttcgacaggccgaagaacaccggcggcgcggcgagttagcatcaggtgaatgtgtccggggtcgcggtgaatggcgtccgggtggtacaccgatggctcaggggccgcaggcgtggctagcccacggcgatgataaacgacggccgggtcggcgaatcgggctgcgatcgttgaggggcccgggtctgtgggtgccgacggaggagtgctcccgcggcggtggtagacgaggacggggtcagcgaagtggttcccgctcgtcgatggggctggagtagccgaggccgcgcgttgcgcaggcgtggtcggcggggccgcgtgtggcgcaggggggtcgacggagccacgcgtggcgcaggcagggttgacagggccgctcgtggtgcaggcagacgtgcgagcaggggcatcaaggccacgtgtggcatggacggggtcgatggggtcgcacgcgagtacggtgaagttgcgcgaggtgctggcaacggtgcgaggcgaggtgcttaggaaggatgggtactcggatcagactcaaggagggagtcgagatcggtgggtggggaggagccagcaaggtgaaacatatcttcgttgaaaacgacatgatgggagatgatgatgcgctgagaggtgaggtcaagacaacgataccccttgtggtcaagagagtagccaaggaagaggcagcgagtggagcgtggagacaacttatggggagcagtagtggaagtgttagggtagcaggcacatccgaacactcagaggtggtcgtaggacggggttgtgccgtacagggcgaagtagggggtggggtggctcaccgccttcgatgggagacgattgaggaggtgggtggcggtgtgcggggcttctgcctagtagctagcaaggagagacgcctggaagagaaggcagcggatcatgttggtggtggtgcgaatcatgcgctctgcccggccattctgggcgaaggtgtaggggcacgagagatgcaactgaacgccactggtgaggaagaatgatcgagaggtgtggttgtcgaactcgcggccattgtcgcactgcagtgcatggatcgggcgacggaactaggtggagacctaggcgaagaagtgagtgagggtagtgaacgtgccggactttagccgaagggggaaagtccaaagaaaatgggagtagtcgtccagaatgaccatgtagtatttgtagctagaggctgaggacaggagacctccagagatcacagtggacaagatcaaaggcctgaacagccctggacatggaagtggaaaaaggaagacgggagtgacggttgagctgataagcatgacagaggcgctcagaagagccccgagtttaggatatgtctgagtggctggaaagcagggacattacgtcaggttcagggtgcccgaggcgacgatgctaaatggcgaaggaggtggtggtagtagcaagagaatgtgatgtggaggtagtagtaagtgcaggagatgaggctactctagtggggggagttgagggcaagtgaagagaatagagggggtcggagctgtcacagcgagcgatcacaacatgtgcgggaaggtggcgtatggtgagccccaggggtcgaactccatagaatagtggttgtcactagtgaagcgacgaaccgagaggaggggatgagtcagaccgggagcaacaaggacgacagagaaaggatgtgagggtgtggtggatggcagtggaataacgaactagttgtgggagtagtgtggaaggaggctccggagtcgaccacccaatcggtgggagagggagacagtggggaggctgcagggtgcgcggaaagagccagaggaggagctctgacgtggttactaggaagggagggagacaacgggggcccgatcgcaagggaggcgatcacaacacgtgggaagataagcggtccaggcatgtgacgacccgcctgaggatgtagctcgacgcagtcttggacaacaggattccaggccggatcgaaggacacaaaagtgcccaacacaagttggccatcgtaaagtaagacgcgcatagtgatcccggcagaaccaggcggagctaggaaggagggggtgctcgcatccagtacgaaggtggggccgaaggggccaggggccatgggagcagtggaaggtacaggtgctgcagtcagaggagtaggggcaaggacggatggggataggtcgtacgtggtggcgccgtaggagtaggggatgggtaccgccatggagggagcagtgccgcgccgagcgcacggaggcgagaggcaaggagaggacgactgaggcacgagtgagacgcagtcggcgaggtcgcaggcctagggacgatgaccgagcatggagagagcagcgaggcaaagaccactagcgaggtggctgggtgctgcagctgcttcggcgatgggcggcggcggtggagctgcacagggtggggagagggccgcctgctgggcggtattgcacggggcgagggctgcacggggcaggggcgcgacaactgggatggagatggtcgaggctgcgcgccgagcggaggccgcgctccagcgggaagggaccgcgcgctggcgggggcaggaacccaagggggccgcacgtgtgctggcgggaacagaccgcgcgccgtcggcaggggacccacgggagaggcggcggcctggagatggtctcggcagggcagatccggcgggtctggacgcccgacggcgtggggaggcgcgacatcgcgacgaccagcgagtggcgcggctgctggctcgacctgcagcgccacgtgcgacctccagcggctggacgacggcggctggcgtcctagctcccacgcggggggagggagggttaggggagcagcaggggggaggaaggggagggctgccagccggtgtccgtagagatggccgggggtcggcgacggctgtggggtggggtgggagaaggtaaaactggctctggtaccaagttggaatgagaaaccttaaccctagaatagggttgggcagtgtattaatagaccaaataactgggccagacccattacaagggatcaatatctaatatatagacctctactagattgtgtgttgtattgcactgagtagcaggatcataatatatagacctctactagattgtgttccaccttattcatagaaacaatgaccaaggagtcaatcagggagatctcacactaaataggaaacaaccatatagaaaagaatcacccattagtaggcctgggcaatcggttaaccgtttttttcggttcggtttttcggttttttataaattcggtttctggaaaacggtaaccgaaacctcctacggaaaataaaaaaccgaacctttagttaccgattttttcggttcggttttcggtttaaccgaaaaaaccgaatagaataaaactgttacgatgttgttatacaacttagtccatcctggaaatataaaaatgtgaatacacaatacagtcatacaaatacacaatacaaatgtttccctggttatacaaatacaacttagtccatcctggttataaaaatgtgaatacacaatacagtcatacaactgagcaccagaagatccagagtgatttgaaaaaccagagtgctatggcactgcataatggaccaattggtatgcccccaatgctaaaacaggtaccttttctgaagtttggaccttacataactggaaaatactaaaatttcatttctgataagacacgcacatatattcctaatagaccaactactactctcccagtgccaacaatggttattattcttggactaaaatatgtttccacttttgaacaatggacccggactaagcaagatgcccagaatgaccaaaagctctttcttccatcctccactccgcagctgtcatcgccacaactacctcctgttaatgaagaaaacaaatcttgctatgaaaaacagtcactcaaaattataagtgctaatgtacctatctggattaacacattgtgcaaaacaacctatgttttcaagcgacgaatcattaaaatttaaaagtaagctttaggggaacaaaactatccaaaaaggagtcagaacttacaccaaatacttcacattatatgtttctaagtgcccagtcaaacttaaaaatgtctatgctgaagaaagcactcaggcaatggcagtgacaactctggaattaggtaaagacaattctatcagtgaaattcagattatataataacaaactagtagtaaactaagttacaacttgtttaatcatgagaacacaaactttaatcatgagagcagtaaaacaaccatgcacataatagcaacacataccttaatcatgagaaataacatctgaacttggtttggttatggatttacttttagcagctttctccatagcctttgcatcattatgttctgcaattaattctgaaatacaagataaaaacaaataaaagtgtaagttatttgcaggtaataatgtaaacaagttaaaacatattcacaaagaagtagacaagcttgccttcttctagtttagttagctcttccacatcttcctcaatgttgattagagttgatcgtcgcaaccaatcttgtgtacaaataagagcttggaccatgaacggagttagagaggatctaaaatcatctaaaatccgcccacctgtactaaaaactgattcggatgcaaccgttgatatcggaattgccaacacatcacgagctatacatgccaatataggaaatctagattcattcactttccaccatgcaagaatatcaaatttgttgttgtcatcttcattgtcctcactaaggtatttgtcaatttcagatttggtaatgcatatggaaccactgccaaccttcatctttttagcaatcaacgatctcatcattcttccccctcttttttgagtttgatcttcattaacttctgccatcgaatcatcatttggagaatacatgcttctatattcttcaaacaaatcatagaaacattgcctcactgcattccaaacattttctcctttttcctcaccaaacatttccccaattgctaacttggtgtaattagatagcttgtaccttggatcaagagctgtggcaacaaagatgagcaagttcatgttctccttctccttcaacttgccctttcccctcccctcatttgcattctcattgtcattctcattgtcatgccaatttccccaatacttgttatacttatccttcattctcgtagccattgtttggcgcaaataatcgtcactatcagcccattgtcgtagcagcatcttcacttcaccaatctcatgaaagtactaattagttgtcatagttagttgagtggaaacacgaagagtgatatcataaaaatggccaagaaattcagccatcttttttgcattttcccaatcatcttcaagtggaattccataacctttgtctccacataactcaatagtgtaggttggatcatcttcctcatattttgcaaaaagctttctcataactgattgcactgtgtaagataagatatgttgaattccacctagtgcaaacatctagtttcaaaaaagcactggtttgtacattctcctcctctgcaattttcttaaactttgccaacctagaaggtgaattcttaataaacctaacagcagcccttacacgtttaactgagtcatccatttcttttaatccatcagaaacaatcaagttaagtatatgtgcagcacacctcatgtgaagaaacttgcccatagcaatgctagtttttttttattattcatttgtcttcgaacataatcaacaccagaatcattagagctagcattatcaactgtaattgtcatgattttagtaatcccccattcaaccaaacacctcataatgttttttccaatatcatcacctttatgacccttcactaagaaaaaactaataaccttcttgtgcaatttccaatcagaatctataaaatgtgctgttacagccatataactatcttgttgttgagaagtccaagcatcagttgtaagacaaactctttcacattgttgcttaaaaaaggttttgagctttgctttctcttcaaagtatgtagacacagtgtctctagtgagggttcttctagatggcacattccaacgtgggcaagcaattgacataaactttctaaagcctgccttttcctcagtagtgttgccggcggtcagtgctgattccttggtggcattaaggacctatattatagtggccacacagacacaaataaacatttgaagcaaaaatcactaaaaagaagagaacacagagacaaaatcaaaccatacttcattagaggactgctccgttggtgttgacataggactgctgtgtgcgaatggcgagcctggtggtgaactagcgagtggctgactgcctggtggtgcctggtggacgaggacgctggacgctaaacggtgggcgccggtggtggcacgcagtgccgcggtggtcggctagccgccaggcgcccaggcggacaggcagtgtcgcggtgactcgacagtggccagcggtggcacgactcgacagcggctagctagggttcggcgtggcgtctccgcgtctgggctctgggcgatgccacgatgggcgatgccgcgatggcgtattggcgtctgggcgatgccgcgatgcgtgatggcctgaatgcctaatgggccggccgatagggaatgggaaaatatgggatggcccatgtgcttccggttcggtttaaaccgaaattaaaaaccgaacaccgaaattagttcggtttctgcagattggtaaccgaaaaataatctggttttttcggttccggttttttggtttcggttcgagtttttccggtttcggtgttcggttttcggtttttatgcccagtccccattagcacataatcaggggtaaccaaccaacgactgatagggaagtgtatcacctaattagggtacctaatagggaaggaaacctcctaaatatggaaggaaataggttgtctaacatatagtattaaattgatgatttattgccaattatagaagccgacacaaattagcaacaattacctacaactgttggtctacaccattaaactttattatttcaagctcttatttttaccagccatgatttaatgatatacacatcctgtgattttcccaagaagtttagtgttctacaaatatatgaaaaaattaatcatggctaactttgtctatctatttataaagaggggcaaaatggtcattttactacaaaacaatatttttactgtacagttctcatcatgtagagtatagaagattttatagtaattttaagcacttacatgattttatatctattttgtaaaaaaatattggccacagtgtccaccagcaaatttgataagaaatataatgttgtctagtaaatctcactattttcagagtccaccagcaaaaacatatcattttcaatatcctgttgcaaattttccctattttgaaatgtgtttatttttatcatccaatatatatttctatacctgataagcttgcatcgtcgcatcattgaccgggggcccgtcgtcctcagagagcttcacctgaatatcgacaggcgtggagtagggcttgcagtcggacatgccagcccgctctaggatgtcgacaggcgtggagtagggcttgaggctatagagggagcggttaagccgacagaccagattcaggtgagctggctatagtagacagtctccgtcagagtgctatggaggaaagcattcttgacgtcgagctgatggatcgcctagtcccgcgagagggcgagggagaggacatcgcgaacggtggcgaacttgacgacggggctgaaggtctcgtcgtagtccactccgggtgctgggtgaagacccgaaggacccaacgggccttgtagcaatcgagggagccatctgaaggcagcttgtggccaaagagccacttgtcgacgttagtgcttggaggacacgtcactaggtcccaggtgtggttggccagcagggccgcgtactccatagcccaacaccagtgtgggtcagcgagggcgatgcgaacggaggaggggaccagggagacgtccggtggagtagcggtcgtatcagcggccagaatcagtcgatcgacgggccaaaggacacctgcgacgcgtcgagtcaccatcaggtgaatatgctcggggttgcagtgaatgccgaccgggtggaacacaggcggctcagagcgggccaccgggatgtcgggggtcgcgggcgtggccgactcacagtggtgataaacgacggtggggtcagcgaatcgggccgcattcttcgaggggcccgggtccgtgggcgttgagggaggggcgctcccgcggcggtggtagacgagggcagggtcgacgaagcgagtaacgctcatcgacagggccgcgcgtggcgcaggcggggtcgacggggctgcgtgtggcgcaggcatggtcgacggggctgcgcgtggcgctgacatggtcgacggggccacacgtggcacaagtagaagtgacggggccacgcgcgaaggcatcgaggccgtgcatggtgcgggtagaagggcgagcggaggtgatagagccacacgtggcgcaggcggggtcgatggggccgtgtgaggcactggaaagggtgcgagcgaaggcgttgaagccgcgtgtggcacgggcaacgacgcaatgcgaggtgcctggggtggatggagagccggatcagacttaatgagagagtcgagatcggagggtggagtggatccagcaaggggaagacatcttcgtcaaaaacaacgtgacgagagatgagtatgcggcgggagacgaggtcaaggcatcgatactccttgtggtcggaggagtaacccaggaagaggcagcgagtggagcgggatgctagcttatgggaggaagtgacagaagtgttgggatagcaggcacatccgaagacacgaaggtggtcgtaggagggggatgtgccatacagagcaaagtggggagtgggatggctcaccgccttcgaggggaggcggttgaggagatgggtggcggtgttcagggcctctacccagtagctggcagggagagacgcctgaaagaggaggcagcatatcatattggtggtggtgcgaatcatgcgtttggcccggccattctgggaagtggtgtaggggcacgagagacgcaactggacgtcatgggtgaggaagaaagagcgagaggcgttgtcgaactcgcggccatcatcacactggagggcacgaaccgggcaatggaactaggtcgagacccaggcgaagaagtgggtgagggtggtgaatgtgtcggacttcaggcgaagagggaaagtccaaagaaagtgagagaaatcgtctagaatgactagatagtatttttaaccagagaggctgaggacaggagaggtccagaaatcacaatggacaaggtcaaaaggctgagcatccctggacgtggaggtggaaaagggaagacgagagtgacgaccaagctgataagcatgacataggcgctcagaggaaccccgggaattggagatatttgagtggctggaaagctgagacatcacgtcaggtccagggtctccgagacgacgatgccagacaacagaggtagtggtagtagcaagagcatggggggaagctacgctggtgaggatagtggagggcaagtgaagagagtagagagggtcggagctgtcatagcgagcgagcacgacacgcaagggaatgtggcgtatggtgagcccccagtgatcgaactccatcgaacattggttgtcactagtgaagcgacgaaccgagagaaggggatgagtcagaccgggagcaataaggatgtcgttaaggtggaatggtcccggaagaaccgatgcacctactaaggtgaccgggagagtggacccattgcccacgacgatagagggaggatgtgagggatgtggaggataggagtgagataatgagctaacagtagtagtgtggaaggaggcgtcagagtcgaccacccaatcagtggtgggagagggaggtggtggcggcaaaggtacggtgtaagcggagagggctagaggaggtgccccgaccgaggcactaggaggggagggagatgacacgggctcgaccactagggatgcgatcacaacacgtgggaagactagcggtccaggcacatgacgacccgcttgagggtggagctcgacgcagtccggagaatagggttccaggctggatcaaaggacatgaacgtgccccggatgagctagccatcgtggagaagggcacacacaacaagttcggtggaaatgggcgaagccatggaaccggcgagggtggagacaacactggtagtagtagtgcaactgcgcgagtagccaggaggaggatggcaggcgaggggatgaggtgcgtcgaggaggggaggggaggccctgacaacgtgcgcgacagttgctgccgcgacggccgcgggatggcgaggaggccaagcagggttagtgtgccctgggggtggctagggcggtggtcgaaggggaggggaggccctgacgatgtggcgacggttgctgccgcgatggctgcgggatggcggggaggccaagcaggggtagtgtgccctgggggtggctagggcggtgggcgtaggaggccgggcggtgctgctgctgggataagaccgtcgcgaccgccggggacggggcgcagccgccgtggcacaggggggccggcgggcggcgactaggaggtgggaggggacattggcggctatgggcaaaggaggcgcggctctccgacgagctagtcagcctcgactcgagctggcgacgccggcaacgtctgaagacatggaggcggcggggaagtgggccgcgatggatagggagcgcggtggccgccgcgagctgttcgaccgcaacggggagggccgagacgagtgcgacgggctggagtcggggcggcggctggacggcggccgcgtggatccaagggcaccgatgactggggaatccgggcggacacaagaagggcacacgtaggccggcagtggggcatcggcggcgactggaaccttggagccgacggcgactggaaccttggagtcgatggctgtgtgggaagggaggggagagagaaaagtgtaacctagctttgataccatgagggaacccctaaccctaacaaggggttggatgatgtattaatagactgagttagttgggcctgacccattacacagggtgagaagttaaatacacggggtaaaccccaaaccctaaacgggtactctaacagtaattaggccaatcatgcctgccatatgtgacttggtaggcaaggatctctattgatttggtgctttttatatatcttagacgatccttgcatatattgtacaccccttgtacctctaccttcaatccattatagagcaactcatattttatcatggtattttgagacctaggttttccctaccactttcactttccttcctagccctgccgccatgccctagaagatccaatctgcaccatggccgactcggcactgttatcctccaaatgaagcgtgccctggacgaacaagccgtcaccgagtccgcttaggctaccgccgctaggaggagcaggcagccttgcttgaagcgctctccaaggcccaaggtcgtctctgccactcgtgtagttgacgttggaagagatccggatcacacaatgacaagggctaacacacccatagttgacacacgccctttgaacgcaacgaggaacgtagcggttcgataaaatgatctagagaccggttaagcaaaccgatattgatcctattcttcgcagtagattcccgaacatctcttgcgaagacctatcggggaggagcatgtggaggttgttctaggatcggcaaggccatctagaacgccgccatatcttgcatggagacatgacgaatatcaagatatagagtaacacagggataaaaggatagtagatgtattttgatctattgaatgttggataccttaattgccaatgaccgtctcatatatatagaagggaatggtcttatcccaataggaaacaactccaaaatacgtgcaacaagttttcaattttaaaaattgacttagaaacgaattggttcatagactagcaaaagtcggctatactgagtttcacggggaagccgaccactatagtcggccgaatagaggaagctagcctaggcgggttctaggggcaacctaatcagcattagatacacagcctggccgtgtaaagggggatggttgactttggaaagattacgccatttccttcctaggataattttgcgcgtcaacaatgttccacaatcacttttgatgatgtgttgcagtctagtactcaccacaatttcttatcttattccaaccttttgtatctagtttttgtcatattaatcaagaactgaggtagttatcatttttcataggggcgcctctttctttccccaagaataactggattctattccaatatatttggtcgaaaaaccaagtttttcttcctttgggaagatatcgaaaacatccaggttgttccaccaaaactagcaacagttggcagtcc

SEQ ID NO: 184 - DNA, 1705 bp, Zea mays
  Intron number 1 from transcript GRMZM2G071196_T02 (locus G RMZM2G071196) derived from phytozome v7.0 (chr-ID 4; pos 1 98327704 to 198329408 reverse strand)
gtcgtgtgggaggtgagatcataatcgcatgatcctggtgttgaaaattatcacggctgcactagtacagaatccaacgtgttctttagctgttgtctgttcagggtaaatgggtaatggcttggttgggtttcggttggggacattcggtttcgttttgatttcgagggggagaagcgtatgtatgtaaaaaatgagttgatttctgtgaggtgttatttacagtgaacagtgatttagatagattcggatctgtagctgttgttcggattcgagtattttttttaatggttaggttttattcgcacccctttataatctacggacgggacggctttattccaaatgcgcggttgtttcctgtagattaatcgagctttttatctgaaagtgacgagttttcagatgagttgaaaattaccggcataaatttgtctgatggtttctcaaaagcagcaaagaatccattattggagcattgctcatttatcgtctttacctttggttctaaactttgtttgttgttcaggccaggcgagattctttcctgtgatcctttggataacttttgtaccttcctttgaattgatctctttttattcgacgaatggtatcgcgttgctgctttcttgaacctgatgtgctcgtgctgtgaagcaattggttgggcctaagtgtagctgtcttattccattttttaagttccatcataatcaattcatcaaaatgtatttagtttcatcagtaagcaaccggtaaggaaaatcgattctatcacccattatgttgtgatccttatctcataagttgagtatagcagtgggagaatgtgaaattgacctatggctggcctcacacaattttagacctagctgacgtatgtaaggttgctgtcttgtgagtatatctgtacactttagtttagcacaagtcaaagacgtaaaggcatcctctctctaagttgcattgccaatcatgttcttcagaagacaataaaatgactatgcctataggttccttgattagaatgaggtacatttttttagttttgttggaacttagaattgggtgatgtgtctttgtttccatattgaggtttcagttttactctttaatattatttctcttttttttgtcttatgtataatgcccagagttcatattttacatttcacagtattcacgtgacagcattgcagatcgatttgcctgctgataggatttttcttgatgtaatgtaggaatatttcttagtttaaagatagccagtcgcattgtgaaacagacctacgcacttcgtattattgtgtgccatcattcctaagtttgctagttccattccatggatgattgggtgcccatgcgatatttttcctttttctttgcgtagatactgatttgctccttagtattctttgttgatgttttttcttttaatactgcaaaagcagtgaccaaataagatgcaacctgcagcgtctattgaaacttgaaactcttgtcaatcagcctatctcaatgcttttcagtgaacagtagaatacataacttcttctctagaaaattacaggcattactacctgattagaagaaaaaagtaccaatttatagtgcaataaaagttattacttgactactgtacaaaattgcttttttctttgtcactgcagagttttaactcaagtgacagcatcttctgtggtgt

SEQ ID NO: 185 - DNA, 7676 bp, Zea mays
  Intron number 9 from transcript GRMZM2G414387_T05 (locus G RMZM2G414387) derived from phytozome v7.0 (chr-ID 5; pos 5 2277558 to 52285233 reverse strand)
tgcccttgaggtatttgtttcttcaatctcatgcatatcttgtttgtattcatcacaccgcatgtgttactctttatgcctcctatgcaccagttcttaaactgtctgtcgagtttcttctgttctgctaataagaggacaaaattagtacccaagatgatagcttgattagttgatttgatattcttgagatgctactatacttctcacggtgatctgcatcttgttttatgcatcctatctttctattggagggcaggcttgcagtggtgactggtgagagctgtctatcactgagtccgagacgccactatgtgggagcctctggcatcctatcttcctattccaggaattagatcttaacttggggggggggggggagcgagatgtcgcctccccccatcgccccctccgcagctattccggccacccaaaatccatcaggttttccgccgcatctccgcgaatccttcaccctgcctctcggatccggctacccttgctccagattctccgtgcgatgggtctatcggcgttcttaatggcggtcgctcgcaggggagcgtggttactcctcggcctgccgcgggatctcgtggatccgcggcggggggtctgggtagcctctcgggcggctcgccagcgtcagcggcaggggtactgttttcgtccttgcaagcgccgtcttcggcggtggcgcgtctgtccccagtagacctcagccttcaagtctcccaacctgaagatggccaccacgacgtaccagcattttcggagcccatcttcaatgccgcggcggaagcccgcacatcgagattcagcaagcatgagaaggggagaggaaaggcaagtgaagggcattcaagctcaccaaccatgctgtcagcgagatcttctccagcgaatcaaaaccagaagcaaccagatctctccgatgcgcgttttgctactgctacctaggctggggaggatttaactcatggctgggaggtagtctgccttccctactggtggcgtaggcaaaggacatcaaatcagtattcaagccagctccaatcggccgacagagaggagagaagaaggaaattcatcaggcatgcagatgggaggtgtcttaattgttttgcccaagaccatagagtggcggtgtgcaccaaccgaacaagatgctggcgctgctttggagatgagcatagagctcctctctgccccaagcttaaaaggacatcctctcctctcaattcttcatgctccttttagccaaggccagtacctccccacccacggccgtcaagcaagctcaaccccacctcctaccttcgtgcgctcacggggtggtcgccgcccatggcttaccctggggacccgagggcacgtccagatctggagacctgtgcagtttcagcatccggcgacatcaagcatagtcgcgactccctggtggggcgggcagggtgtgtcagcttaatggcaatagccatggcacctctccgctccatgtggaggcgactctctgggatcagttaggcattcacaaggagaggctgcaggtcttgaagcatcacccgaagtagtacttgataattttctcagattctagagatcggcagagggtggttcgtcagggggccattccgcataggggccgcaccttcaacttcgaagcgtggactgagcaaaggtatggatcgctggctcgttgggagtttagggtgcgccttcgcattgagggtgtgcctattcatgcttggaaggagtcgtcgtgtcccaagttattggaaagctttgctcaatccattatgtagacgggcacacctgtcgtcaggagcgcactaggacttatgacgtgtgggcttggagtatcaacccaagtggtattgctaaggaagtgtggctaaccattactgacccagatgaattcccttcgtctgatttccaagtgcaccactcagcgcctacggggcttaagtttggtctttcatataagctgctaattcacgttgatgttgtggaggacctatctttcattgaagggcgtaacattcaggatcgcaaaaggcggcgcgagttcgagtggaattatggggttcctgattctttgggagagaaaagagagaaggttgtttaccaggatgcagggaggaagggaagataccaccggagggatgaggatagggaggatccgggccgtggaggtcgccatcttcggagcaggtcttggtgggatgggagaggctctcattgtcggggggctgttgatgactgctactccaacaacaacaagcatctttttaggggcagttcctcctatcgcagccgcgatctttcccaaaattcttggggacatggctcttggctttccaaccaggtggctgcggtaaaaccgcagcacatgggcacgtactcgttaaagtcttcaagcatcggcaagaacgtctcttttgcctcccccatcgcaactgttctaggtgcggcaaacacaggagacctgagggggccctctgtttttatttctaacacccctagtactgtctcttgtgcttttcatgacccaatgttggatgaagcacttctctcttctggtgttgtaggggggcacaactcttcggtgatgtgctgggagctgcagaattctgtggctcgggaggggagcgcggcgtcccccccaaccatgatggaagtggatggctctgacaagaggaccaacactgctgttcctgaaccatctttgcttccttctgaggtacaaccttctccatgcctagtggatttcatcagttcgataacaagaccagtttcccctcccctaattgcacaaacacctcacacaaacccttatagaactggtctgaacctgttttctcaagaaagcaatcactctgctccccatcatatccctacagacagcttgaaccatataccctctgatattgttgttgaaccagccttaccacaacctcatgtacatgaaacaaatgggtacagtcctttgcatattttgggatcagtctcagaaccaaccacacccctccaagatcagctgacaaaaacagttccattttctggaccttccacctccacacaaattccaaataaaacatctgcctacgctgtaacacgccatagtacacgactagcaaacaaagcaaaaagacgagacggtaaaggggcgattcagattgcccaagaactgcttgctcataagttaaaagatttggcccctaacgttgttgactcacataatgatttggtccaacagcttgtgcagcattttgatcaaccactgtccaaaggaaagattaaggccatcaagaccttgctggaaaatgggaagcagttgaagaagaaggtcaggggctccaaagtcgcgccggctgttctggcatgcccaactgcgctggtctaatggtggagctggctctttagggtcgtcatcctgtttttatccatgttaccgtttgctggagtgttgacaatggtagtgtgtcagggtctgttcccttttggtggttcaaaaatcaggccttcctacaagtgtgtggaacgtagtaaggtgtcagctatgggggagcaaaatcagtttctcccacccttgttgtcttgtttctgcccctggctttgtacttggtcttctgcggccagcctcatgggaattgagtcagtctatttggccttgttgatgttgcaacgattatctagtagtcaatttttctttaatgtcacaatcaaattgtaatgtgctatgctggaatgtgagaggtctaaatgacgctgccaagcgggctagtgtacgcaatatgattttctcatctggtgcaacaattgtttgtctgcaagaaactaagatcgctaattggactactacactgctttgtcaaattttggggccgagtcttgctgcccaatcagtggcgctaccggccactgggacctctgggggcattttgctggcagcccatgatcgttttttccaactccactccccgcataccactgatcacatagtctctgctactattacattactggctgatggcacagattggtccattataggggtctatgggccacagtcggatcaggacaagattctctttctcaatgagatcacccatcttaaatagatcatacacccgaaatggctcctcctaggtgacttcaatttgatttaccgtatgagcgacaaaaacaacacaagagttaatattcaaatgatgaaccgtttcaaacgagtaatagatggcttgcaattagtggaacaatgaggggtcgtcaatacacttggtcaaatgaacaggacacgcctactatgtctcgcatcgaccatgtattctgctctacagaatggcaggaccttttccccaattccgatctccaggctttggcgtccatgacttcagatcatgcccctttgctcctaagggggatgttaccttggatttctacaagggttttcgttttgaatcatattggacctccatgcccggcttcaaggaaatagtgcgaagcacttgggaccaaccagttcattcagacgacgccattctacgtttccatgtcaaaacgcgtcggacgactaaggcacttaagatttggcggaggcaaaatataggtaacatcccgctgcagttggcaatggtgcaagtaactctgctacatcttgagcgggcacaagaagacagacaactctcaggggaggaactagagttccgccactatcttaaagcaaaagcccttggattagcagtcatccaaaaagccagggccaagcaacattccagactctcgtggattcgccaaggggacacaaacacctctttcttccaaatacatgctacggtcagacgtaaaaaaattatatcaggaacatcaacactagctcaagaatgacattcactcaaaaagaaaaagaagaggcagcattctcacatttccagcatgttctgggggagagctctgttaggaccatggcttttaactggtcaaccctcgactacataccctattacctttcacatttggaagccccattcactgaccaagagatcactgacttaattaaggctttaccagcgagccgctccccaggccctgatggcttcattgggatcttctacaaaaactgttgggaaattatcaaggtcgacttgattaaggcattacaagatttccataatcataaaacctcaaagttacatctcgcaaatgaggcgcacattgttctgcttccaaagaaagagggagctacagagttcagtgagtttcggccaatcagtctgatcaacagtctggctaaaattattactaaggtgttggctgaccgtctggccccaatgcttgataagctcgtatccacctcacaaaatgctttcataaagaaacgctgcattcatgacaatttcctttacgtgcaaaatgttattcgtagtctccacaagaacaaaaaggcaactctttttattaaattggatatatcgaaagcttttgactctttgagctggccttaccttctagatgtcttgaaggccctgggttttggccaaaagtggagggattgggttgcggccatcttggctacatcatcgtctagactctagagttctagtcaacggtcgtccaagcaataagtttaaacatgctcgagggctgcggcaaggcgatccgctttcgcctatgttattcatcttggccattgatccccttcaaaaaatgattgagcaagcaacaagactaggttttttaaagccggtgctacccaaatcagcttgtttgcgttgctcgctttatgctgatgatgctggaattttcgccgatctgggccatacggagctgcaaaatttacgacaactcttgtcaattttcactaatttctcaggcctcaagtttaacctagcaaaaacggaaatctttccaattcgttgtcaatctgccacggtcagctcactcattcatctttttcccgggaggatctcgaccttccctggaaaaatacttgggtctacctttacacactagaaaacttcgacggattgaggtgcagcctctaattgataagattggtgctagactagccggttggaagggcaagctcctatcaaaagctggtagagaaaccctagtaaagaatgttctatcatctcaacctatctaccacttaacagtgttcccaccgcaaaaatgggtcattcagaggattgatcgtatcctgcgaagttttctttggaagggtgatggcccagaaaattcgagtggtggtcattgtctaatcaaatggcaagtcacaacgaggcccaagtctctgggaggccttgggatcttagatttagaacgcttcgcacgggcactacgtttgtgttggatgtggtacagctggaaaaatgaggacagagcctaggtgggtctggacattccctgtgataaaactgatcaggacttatttcacgcctctacggtggtcacagtgggtaatggcaataaggcattgttttggaaatccaattggatctctgggagggcacctcatcacattgcaccatctcttttcaaaaaaacgagacataagaatatcacggtcaataggggactagaggataatagatggatatccaatatctggccgattcaggaaggtactgaaattcaagaattgatggcactttgggaagccatcaatgacgttgaaagagacgttgcaaatgaagatcaaatattatggcgctggactgccaatggcgaatactctacccgtagcgcctaccaagctcagtttaatggaagcatgtctagaattaaaattgaagcaatatggaaggcaaaagcggagcctaaatgtcattttttcgcgtgacgctcctgcatgaaaagatcctcacagctaacaatttgcagaagaggggatgggatcacaaccctatttgtcctctttgtcacatagatccagaaactccgagtcatctgtgcaaagattgtagttactcaaaaagcatttggtggactttgttacattggaccaatctcaactctttagcaaacctaaaccaagatggccagatacatacttggtggagaagatgtagactcagaattgataaaccaagacgaaggttatttgacgggctagcggtctatttttggtggaatatatggaaagaaagaaataggagaatttttcaaaattccgggaatgatcaacttgtcgtcgcccatcaaattaaggaggatgtcttacaatacagtgcggctttctctatcttttgatcagagagttctctagttgtggtttcttagggtttttttttgttttttctttctttctctctcttctttttttttgtaatggttgtagttggaactttgttggccagtagtccctgtatttggttattctccttctttaaatatattcggcaatcctcttgccgtccttttgaaaaaaagatcttaacttggtaaaacccacaaaaaaactctgtaatttttttctatgtactatcaggtgcaaaatcgttctggtgagtggatatatgcaacgccgattcccggaacctttgtttgtaacatcggtgacatgctgaaggttttttttttcctggcttctttgcacgttcacttgcatctgattgttccacaacatcaggcttcttatatgtaatccttctgggttcaggtttggacaa

SEQ ID NO: 186 - DNA, 8932 bp, Zea mays
  Intron number 5 from transcript GRMZM2G388148_T01 (locus G RMZM2G388148) derived from phytozome v7.0 (chr-ID 5; pos 1 34195741 to 134204672)
gctgccaatactaaaccgtataacccaaactacaggtaggttgaaaggtatttaaatttttttaataacgcaaaagtggatcaaaataagctgtcctgtcaaggatatggaattactcaagtgcttagccaaccaacacaaaaggtgctctaggtcctttggtctacttcataaaaaggggaaaaactcgtctgatctagtgccatcctgacggcacagcctcttagagcaactccaagagcttctttatatcctttctttttttccgaacacgcagcgtatcattatgttaagaaaaaaataggtatagaaccattacaaacaacactaaaaagatccaagaccaatacccactagggatccaagaagaagaaaacatctaaactgaccaaaaccagccctaacccccaacaatctgaacctagccttcctcaggaaatatcacgtgcccgagccaaacccctgatcaaggaaacactcagtgagactccataaaaaacacactggttgcgtaggttccaaaagaccaagcacccaagatgatcaatgaattgaggccctgcctgacctccccttcaaccctggaatttgaatcagaccgccaatcatcaaaggaagcgactgtaggatgtgaagaaaagctatgcaaccgcaccccctttcttatcaataggaataagtttatcaagcgtgctcggaagaataataggaagggcatcaacactggaattgttttgggtgcttggttactttggaaacatagaaactccgttgtttttgaaggagctagcccaaaattgcgtgttattctgcagtccttcagggatgaacgtcacctttggtgctttgtgggagcaagatgtttgcgatctttagaaggtgtttttttttctcgaacatgcaggagatttgcacatctttataaaatagagaggagaaagaaaaaggtcttacaataaagaccctgctaggggcttttaggatcgctggatcgagttatttttttttctcgaaagcgcaggggaactgcgccttaaaatatattaagaagaggaaaaaggtctaaaatagaccaggttacaaacaataagctccttacggaggccagtacctcctataagtgaaagagtccaataaagccagactcaaaaaactactaaaatagaaacagcaggaatcagccattagttaaggaagctgccaaaaaagagaggcccttggccccagctaatgcccacagtcttctctcatcatcagcctgccgaaggatagaggggagactgggagtttgtccatcaaaaacgcatctgttacggtggttccagatcatccaggcccccaaagagatcagtgaattcagacctttcttgaccattccctgaacagtttcagaaatcatctcccaccaatccaggaaggaagtcaggcccggctggggggccaagatatccaacccgaactttctgagcagattataccagaaaagccttgcaaacacacatgagaccagcaggtgattaatagtttcaggttcctgatcacacaatggacaactgctaggatgattgagccccctttttgctaatctgtcagcagtccagcacctgttttgggccaccagccagaggaagaaatggcatttagatggagcccaagatttccaaaccctcttgtagtgtccaaatgcacatgatcccaggaagagacccttgtaagctgccttcgctgaatattttccatctggggctatgctaaagatgtgtctgtcttcaatgagggggtgcagctccaaaccagagagacagtcccagagcttgaaataatctgccagaactcccacagttagaccacctcgaatatcataaatccatctgttgtttgacaaggcctcatagaccgttctactcttagctatcttctttgggattacagaaaataggctcggggcaatggtcgagatgcttttgccttgcaaccagttatcagaccagaagagggtattatgtccattacctaccaccgagataaggactttactgaagaacgctctggctttacttgggacctgaataggaagccctgtccaaggtcttctagagtcagttttatgtagccacagccatcgcatcctgagggcccatccaagttccggtagactagagatacccagtccaccaagctgaagtgggcgacacaccttgcgccaagccaccaaacaatggccccctttagcttcttttcttcctctccaaagaaagccctttcttattttatctatagcatcaactgccgagtggggtatatcaattgccattgccagatacacagtcatacctgtgagcacatgttgcactagtattctcctgcctgctctggtcatcaaatcagctttccaattaggtagttgatcagaaaatttatcaacatacggctggaactgttgcttggacagcttgtgcaaggaaagaggaagtcccaagtacttgcaaggaaaagctgcgacctcacacggtagcagactttggacttccaagatagtttcttctgaacactgtatggggtagacattggatttttgcacattagttttgagaccagaggcactgccaaaaagctgcaagatatcaagagtgatggagatttcatccaccgtagggtgtaagaagagggctacatcatctgcataaatggatactctgtgaagttgtcttcttgctgctagctgctgcaataaacctgcctcttctgcctttataaataggtgtccaagaacatccatgaccaatatgaacagcattggtgacagtggatccccttgtctaagcccccttctatgctgaatttgttgaccaggaaacccgttgagcatgacttgtgtggtggatgaagcaagaagaccacaaaccatgtccctccagatctgtccaaacccaatctgctgcatgacatcaattaaaaagggccaggagaccgagtcaaaggccttggtgatgtcaagcttgagaagcaaccgagataatctttgttgatgaaacaatctagttgtctgttgcactaacatgaagttgtcctggatgaatcgccccttaatgaatgcactttgatttggggaaaccaattcattcagtcttggtgcaagtcggtttgcgagaattttcgtaatgagttttgcaatgctgtggaccaggctaattggcctgaaatccttaacttgctcagccccatctctttttggcaccatggtgatgtaggcagtgttaagtttccagaaattgctgaaatttctgctccaaaccgaagataccactgccataatatcacttttcacaatgttccagcacactttgaaaaaaagaccagtgaatccatccggtcccggggccttgtcagagggtaaccctttgatggtttccaggacctccttttctgtaaaaggggagtccaaggcagccaggttgtatctaggtaggccaagagctgccaggtcaattgttatatccctctgtccatcctgcccaataagatttttgtagaagaggtccactgctgcagctttctcactctgctcagatagaatgtgaccaccatcaactaacttggcaacaaaattcctcctcttgcgatgcctagcatgaatgtgaaaaaacttcgtattcgcatcaccttctcctaaccatgtgatcctagatctcagccttgccatagtgcgtttgaaagaagacagcagcagtgagtgttttttgagacagatcttaaaccagttttcagctggggagaggtctctttcgtcctgtgccatctcaaacctgtgaagcagttcttttgccaaggctaactgcaacctcacatggcccacctgtttgtcactccagctttgaagagatcttgctgttacccttagcttcaaatccagggtttggaatggacacctgatattgtgtaccgaattccaagcagcctgtaccacttccaggaaaccttccatttttggccagaaagcctcaaaatgaaagcgtttcttcccaggtttgttcccttgaagacccagcaggagcggacaatggtcagaatcatgtgatgccatgctctggaggagaacgtttgggaaacattgctcccaagacacagagcagaacactctatctagtttaactaaaacagggtttgcttgctggttggaccatgtgtactttcgcccatgtaatggaatttccttaagagcaatgtcattgattgtctgtcgaaaacgactcatcattgccctattaatattggaattgttcttatccgcagagcagtagatgagattaaagtccccagccaccatccaagggccatcacaagcatttctgatgtctctaagttcctggaggaactgaattttttccccctcaccctgaggtccatacacacaagtaagccaccaagcctgcccctctgccctacaaaactggaccgaaatactgtgattttgaaattttgtctgtcctgtgtgcccaatgtgtctcctccaagcaatcaaaataccaccacttgcccccacagatgggaggtacacatactcagaaaaatcagctcccaacatagacagaatgtttctcctagagatgttctgcatttttgtttcttgcaagcacaccacatcaacctgggaggagtccaccaattcttttattgagtcctgcctaacagaggaattcagccccctcacattccaaattaaaagttttccaggatccatagaaaacagataaaagccactacagaaaacaccaggaggccggggacctaacaaacaagtccaggaggaggggtccaaccaaagagggctgccaaagcttctacctggttatgggacaaaggttgcttgaaaatctttgcatacgcgtctagtgcttcctgggtagtaccattgtcatcagataagatatgcaaagctctcatagcctttttagtagacctattaccccaatctcgcatattaaactcaaccccagcccccgcaatgcgtcggctgcgcctaggagcagccacctgagaagattgtggggctgatgaggtattcatggcttgctttggagctggcagtatttcatcagctgctttactgatttttctgaggaattcttccttccctgataaagattggttcagaggtctcgagtccgagtgagaagtgttgtttgtctgaattatactggcctctgtctcttcattctgactgatttggaggggatgtgccttagttcttctgcgaaagtagaccttgagagcttttgttgcttcgttgtgtcggactgttactgccatcctcccagccattcccagcatctgtagaggcaggacagcacttggaaatgatgactcagggaaaccagaaactagttggggcgagactatcatgagggtgttcgtcttcagcggcccagaacacagttggggcgagacaggcaaggaattgcatgtctctagcggcccagccggctcatgaggcgagacaggaacaggcccagatgtctctagcgacccaaccaggcaacaggccggatctggcctgagaaaccttacaggtccattaatcacaaggcgggaagtcaccccgccagattcgtgcaccgcagagtagcagccttggggactgtttctcttctccatcgttacttgtcccgccacttcaaaatccggtgaaggtgcgccatcaatgtgaggagacgcctctggaagcgcttcagcatgaaggggctcctcggtcgtcagcggcattaattgcataacacgcagagtatctccagaattctccctcgaggcgtatggcggcgcgggcgcttcgaagtcgcggcccaaagacggctgcggggcctggcgaaggtgcagcgtcctcacctcggacgttggagacatatcagtgcccagtgttaaatgcagatctcgcccagcatctcccgctacttccttcaaggcgcatgactgcgcaggcgcctcgttgccgcggcctgacgacgactgtgggcccaatcgaagatgtaacggcctccgctggaccagagagccacctggacgtcgagggtggggatcttgagttccatttccgtcttcatcccctggggattttccgccagccacagatgaagtggggtccgctggtgtgatgcttgaacccgccctcagcacgctaacttgaatcttgtatgtgaggcatcttttctcaaacatctgcaacccaggctcaataatgtgaagaactgagtcacgttggagtttctccgggttaaaacaccaaactttgacgacaaacgaagatagatcttgcttgagcaaagtgacagggtgcacttcagctatcaagcaggagtcaatcagaatactttttgccgtagaaagtgcccaagcatgctccgggatccctctgatttccaagtctaccagccctgacattatcgaagatgaggcgtgagagcatctcgtccaccgcttgaatatcaggctgaatcgaggtcctcttagaatcttgccgccattaagcacccttgaagcagtatcttcgtcaggtaaaatcagaagaaaatcctctggcttggtgtgatgaatcttcatatcctccaacttgacgttaaaactgtgagcaacttcctcaagaatctcaggccccatcactaatggtctggttcccactattgtaacgaagagggctcttctcatatttgcttcttcacgagccatgtcatcactgaattcaagggtacaggaagaaagagccccccagttcctttcgccttgatcgccatcccactgaacaggggtctgtctaatcgacggaggtacctcatcctctgacgaggccgataacgcctggccaggggcgaccacagaccttgatgatccttttccatgtttggatcgtcttctctttcgtttgtaacggaggcttctatgtgactccccatcatcagccatcctagggggatcttccttcatcgcagcagcctcaggtctgctgatctggacccacaccgagcgacgcctacagggatcagcccgctgcgaggccactggcgagtcttcacgctgctccgaaaggcgctgccacacagagaccttcgattgttgtttttccaaacgttgccacacagtcttcttcctttgcacttcaaggcgacctggacacttggcagcctgatgcccaagcctgaggcaccggaaacatcacgtgggtcgacggcagacagcagccaggtggccggaggagaagcagttgaaacaccgtcctcggagaaccaccgggggctctcgacgagggagttgaacaccgcgaaactgcctcctcttactcctcaccacttgccatccgtcgtcgtcatgccggggaccagcccgccggccttgcaccacaggaagggaatcagccaccgccttcgccgagtagacaggcttcacacttggtgccgggggaggagccgcgggagccaagggatatgctaacagggcctccttataggactggggtgccagccaggagtcaccagatgatgagactggactagtatcactccaacgttgagcctttaggcggcccacatgtggagcgagagggacaccaagggagttttctgggttggtcgccggttccggggtggaggccggcgaggggcaggggtggtgggtggaggtgggagggttgggggcgtgggagggaggtgggggtggaggtggaggtggaagtggagaggccatccggatcgagttatttaggtcaaggtgttgtggacttgtggtaacttagctatcaaggtgtgtggtcaggtcttacattctgtgttttcatagttctcgctcagtcatttacttcatagtctccttacagctcgatccggagcaaggaggttaattttgtaacttgtaaggggccgtttttttcctctctcaatacaaacatgtgcagctctcctgtgtattcaaaaaaaaagataggaatagagattttggtaaaaaaaataccctccaacatggatctcctaatattgccatcctcctttctatattgctcgctagccaacaaagatagagagcaggattggctctctagagtgcacacaagatatagagaaactgttggatgatgaaaagatatatatagtggtttttattaaatggctctctaaatgatggtttagagagtgggtttaagaaagactcttggttatgcattggattataaaccctactgacctttcatatggcactacaagcaaacatttaattgcaatgccgctgttgcatcttgtgactttcccacagatttttcaaataaatcatctatggtaatctgcaaatgttgtacaaagtaatttttaggactaaaatctatattttttcgaacaataaaaagctatgtgccatttcattaagaagtgttgtgctaagcttttctagctacctctttcaccattcattggtttgcggatctctccgattcattcccaactttcatccaggaagcgatctcggtaacccacgataaatccaaatcctatcaaaacagctgttccaatccaatgaagatatctcaacatcaattgactattcttatcggaagcttagtctaaaccaagaaacaagtgtttttcaatcgctagtactctggcgaagggaggattcttcagagcgggatcaatggacaacagagatttcatagctacaaaggagatgtcaaaagaccaaacctgaacccccaaccagtacgttacaaacggagggtggagggaccaatcccaacccccccacccaccaaaactaaaaacaaccgaaaaaacagcaaacacacaaacatactataacgagcaattttgttctctctgtttattctatgtaccttctgatgagatgcagtgttttctcaggtctccactggcaaacaccatccacctcagtgagg

SEQ ID NO: 187 - DNA, 1085 bp, Zea mays
  Intron number 4 from transcript GRMZM2G101874_T01 (locus G RMZM2G101874) derived from phytozome v7.0 (chr-ID 6; pos 1 20881144 to 120882228 reverse strand)
tttctgctctcggagaaaaagctattgcaagaactgtaagtagttatatgcatgcttggaaaattcgtagcttgatttctgtctttggcaactctgaccccaaaagcatgctttgcgagagcagtcaacaaataccagtatatctctatgcatgatttagtgtgttattcatgacatggtatacctacttagtggaactagctgctttcttatatacccctattttactttgtgactgtttggatcattttattttggaggaactggaatctacttaatggactaggctatttgcctttgaatttgacattccacaactttccaaagtttagatataggactatcttaaattcatagaatgggagatgtaaattgattctatattaccatgctagtgcctctagctgagttgcttaggtggtttgagtaccactccttaggtcctaggttcgactccctgtgggagcgaatttttaggctgtgattaaaaaatttcactcgtctgtcccacgccaaagcacaggtctaaggtccggccccggttgcagtcgttctcacatgggctacggtgctgcagtgtatgggtgaggcagggttcaggggttttctcgatctgcgtgagaagatcttcttcgtaatataataccgtgggggaggtcttacccccgctgatcaagttcctcctttttcacttatagcacactctttggctcgctctcctacagctcataagttcttcccccgtatgaccaacaatagtatacaaacatattcattagcttaactgatccgtgcctaaattatgattattagaatggattttaattcgaaggatccaaacatgattttgtcattatattgtatgctcctttttggcgtttggtgtctacttatgaaactagctgcattatattctttgccatgaatgctttgtgtagcaaatttaatgttctagttcagaagtcatatgaagtcttactccaagtgtttagatttgaatctatttgctttgttgctgggcatacaattgagaatattcaatccgtgcagcctgagaagacaacagggacaatcaagcagcagct

SEQ ID NO: 188 - DNA, 1787 bp, Zea mays
  Intron number 2 from transcript GRMZM2G029184_T01 (locus G RMZM2G029184) derived from phytozome v7.0 (chr-ID 4; pos 6 8647602 to 68649388 reverse strand)
cgcggctgcgccgtcaccgcattcgtcctctcctggtgcgtgtcttaaaccctagacccgcacctaacccccgcatactttccttcttccttctttctctgatctgtatgtagcgtcatgggctgatgatacatgcctaggcctgtattggtccgtagatttggttcattttcggtacatttttttctcggtttggtagtaggcacatacgcttgaggttgaggattgcaaatctgaatctctttgtgaagtagtctccatggtggccttttgtcagcttcatttggaggcagataggttttttatgaaatttgaagatgtgggggctaagaggtttagtcgttttcagtagtactagttgctattgcttcgctaactgacaaactgttgtgttctatgcataattcagacacaacttatttatgttatcaggccttcttagcgaaaaaatagaatccactgcttatgggggtgtatgttagggattataatctgccccgattaacacttagttcaaaatttgttggattatataatctgggcagattataatcccaaacaaacaccccctatatttagtatgctataatagcagtaatgcacttattgatgaatgtattagccacataggcttgcagttgtttaccagtttcacctccgttagtgcaagagcagcacaagcgatttctccataattatttgaggatactgtaaatatagttttcaaatgctgctatgacttaatacattaacgaaattatattacttgaattcattctatgcataaatcaaactcatttggttgaattatatggtcctgtaacagcttattatgtgtccaaatggtgaatggcagtaaggctattatggatggatggattagcaacatagcctggtagttgtttaccagttttctctgttctattactgcaagaacagtggaagggctatgtagccctcacaatcacaagtgtagagcattttctacacaatcatttgataatactgtaaatgtagttccaaaatgctttgatggcttatacgttaataatggcaacacggtgttgtattctttgaattggttccatggacaagtggcactctgctggttgaattgtatggatctgtattcttcaggtcattgtgtcctaatagtgaatgtcttatatatcataccaattcacattgataagaaaagaataacgtcaattggtctaacattatgaaaacagttttttttctggggtaacacattccactagattgttcggtggctgatggtgcatccgattttatctctgctttagctttggactgcatattttcctcattttctaagatatttttgccctaaccgattgcttttgttagttaattaacacacctggtatcaacatgttaatgggtacctttgattgctctaggacagttgtggaaatcagtcggtggacattatcctctttttccatgcattggctactggatacaatttattgctcttcggcacacatttgctccagaatactaaattgtgtccgcagaatttttcccacaaaacatgccttcttcctagatcctggttgaaaaatctatgttacttttttttttgaaaattgggcacctcatggtacctgggtggttttattgataacttggcgaaattttcatcatcacattggtgctgttttctgagatcgaaaactgctaatccggaaataacttcgcccttccgttttcgccacttgttcgcagggcaacgtttctcatcgcagaagcctgcctcatag

SEQ ID NO: 189 - DNA, 4888 bp, Zea mays
  Intron number 2 from transcript GRMZM2G117388_T05 (locus G RMZM2G117388) derived from phytozome v7.0 (chr-ID 8; pos 1 09007138 to 109012025 reverse strand)
tcttcgcccgccgagtgagtcccttcgactcttacagcggtttcatctgattccaagcttcgcgatctcagattccgagacgtagatgttgtatggtagcccccgtgattcgggttcgggatcgctagaggaattcgagctgaactgttccgagtaatcgatggatcccatcatttttatcagaatagagtgggcttatccttgggttgccagagtcgaggtctgtggcggcggattcgtggtgccactttgatcccttaggcttccgcttcgaaattggtctggcatttgagctgatatgtccatgttcgtcggtgctgtatgttgctggactggtacagcgttacatacatacatatacatcggctttgtagtttgtactgcacctttgtactgtcacgaacacgagatgaagggttagttttcgctgttgataaatagtctttcaacctggaagtagagttgagtgaactatggcctttatcccaaaaaatttatagtacctgaattggtttgttcagttggagtaacagccccctcaggtctcatttggaataaagttttttttcctgaatctgcgtttttcctgtgttttttaactaattcctgtaagggcttctatgaaacacaagaattttatagaaatggtatagtaatttaacaggaattagttcaaaaacacatgaaaaacacaggattcagaaaattttccttgttccaaaggagccgtaaaatttctatatcattcctgtgaaattcctgcgttccaaaggagccctcaaactttgtaatcttcggctggaaggttggatggatgtgttggtgttgacaatatcgatatgtaatgtttacagattgttttcgttatcaattagttccatgattgttttgctgtatatttagagtcgtcagcaaaaaaaataattactggtttatgaataagggtgtttcaagccactttattaattagtttaatttgaaacgaagaactggagtgtgcatcacctgatgcatagagacagtttataaagtaataacattttgccacttcgttgttgtcgaaatctacaaaggagcctggtttttctttctccttttgcttttgcatagtgggctgaaaatataatatgtcaagaagacatccactttgatattctttgatgatagggcccttgataatactggcgatgcatttgccaatcaacaaaaggacttgactaaaaacgctggtgttgggagttagaatctgtagatctgggcatctgaagctgtcatcatttttgtactggctaaaatgatcaaaccagtttggcctgtttccttgaccctgtgactcttagctctgctaaattatttctatttgaatttgttaattgaggcatgatattctgatatgggcttttgtctttagttctttacacgtttggagccaatttatgcgttgtgattttagtagtccactcagtctttttacagcgtgccattcaccaaacccagtcgaagaggcaactacctcctgtctgctttgattgccgatttgactattagcagtctacgttgtgcacccttttgatctttgcctgttctaattatacattgtccaaaatcatgaaaactatattgtgaaacagctacttatgtcatttgtatgtgaataatatcaatcaataaatctattcaaagttagtggccagagttataaaatgttggcagttggcataggcattcaaacaactacaacgaagtcttttagtgccaaccaagttgaggtaggttagagttaaaaatccaatagaacccaagtcaaggttcggatacatggatagttgttttccatgcactcctattcaaggttaaatatttggatatattccatcctttcaagtctccttttactgtctcttccaatattaactttggttttcttcttcctctcttcctaatgctatcgcatcttaggatctcactgcgtattggcgcctctggaggtctctgttggaaatgttcaaatcatctcaaccaatgttggacaagtttttcttcaattggcgctatccttagcctatcacatatatcatcattccggaatcaattccttcttgtatgaccacagatccaacacaatatacgcgtttctgtaacacttatatgttgaacatgtcattttttagactaacattctgcaccatacaatatagcaagtctaatcgtcgtcctataaaacatcccttttagcttctgtggtatcctcttgtcatatagaacgtcagatgcttgacaccacttcatctaccctgctttgattctatggctaacatcttcttcaatatccctatctctttgtagcattgatcctaaatatctaaatgtgtcacttgaccttcggaactaacatctccttcctcatgtatagtagtgctgaaatcacatctcatatattctgttttatttctactgagtctaagccctttaggttctagagtctcctgccacaactctagtttcctatttactcctgctcgacttccatcaactagtactacatcgtttgcaaaaagcatacaccaagggaatccctttgtatgttccatgtgaccttattcatcactagggctgaatatcgagacagctcagctcgtccgagttcgagctagctcgttaagctagcgagccacaaagtcagctcgattcaactcgtttacgagctcgagctggttcgtttagctcgcaagcaagagtagaaaaaacaatatgtatataataataaatttctagttaattttaaactaatttaacaatagaaagtagtaattacactcatagtttcacagaccacattgatgtaacaccaaattaacacaactcatcactcatcaattcacaattcacacacatgttcatcggtttaacccacagttatattcacatagaccaatttaacaccatacctgggttctgatatggcgcgtcgctaagaggttacactccaacagattttttcggggtttatcttcattagaatggctaggtttaccgttggctcgccaagcatatcaaaaccctcctttactagggcttgtgacctgctatgttgaggcagcataggtggagttcattggcattcaaatgcatggtttttaaggcatcacttaagcggtaaggtgtttttgccaaccaaggtgtcacagtcgccttgaatttcggcgtaaggcgtccgccttagtctgagtgtcaccttatctctgcaaagcgcctgcaaggcatcgacttgtggatgtcttcgcctcggggtggatgtcttcgtctattggcagtggcgtccctcttggcagcaacgacccctccatgccttggccttctttctatagtcctcgcaagctccccaatggccctctcccctctctccgcagcagcacccgcgacaagacaaactcgtatgtgttcgaacatgtatcaaagttggggtacaatgagggtagaagaaggtgagcaaggttagaaagatggaaatgaatgcaatgaagaggtgaatccatatgatgacttgaacatgagtgatagtgatgaggtgaataagttgaaagatggcggagaagaaaatgtcatgcagttcccgacgagtttgatgatggctactaagagacgagtgttacacactactacatactagttctgttggactctattatgttgaacttgtactaatatttggtactattatccctatctatatatgagactattcctattatcctatattatcctatttttatatattactaaggtgtcgcctcgccttatgccttcatgcttaaaaggtaaaacgggggtcggtcgccttaactcgctttatcctcttaaaaactatgttcaaatgcaacatgtataagagaatagagaaaacatcagcagtgtttttaaggcgtcgcctaggcgtctaggcgctcaaagaatcctagccgccttgctcgcctaggcatcaaggtggtggtccaacgccccgcctcaccttaccgccttaagaacagtgaacatgagttatgtgcaaaaatgtccatgaatttatagtacaattgggagatgtattttttttcatggataacaattagaaagaaatggacaaccatgcaaactgttaacctagggatgaaaatggcaatgatatttcctgatattcatctgtcccgaaagggtttaaaccctacttgaacaatctgtatatgaatagttgaatacagacatttaatatccatgccatatccgagtccgaatactcaaagttggattttgatacatatatgccatacataccaatatccaacactatccatattggactccaaatcctagaaagaaatgactactggtattctgtatctgtaatatttgtatccaatctggtttcatccctatgtcaaccttttacccacctccacccctccacacacccataaaggcataccaccctcgaaattgtttttgttgtttgtgcaatctcgatgtatagctactggattctcatttgtccagttctcttcaaacttgcatcctgtatttccatgtgataaatatttattggtgtgtaatatataatctatgtgtagcgacttaatgaggcacagtgcaccgtcatacgtcactaacttggcataatatagcaaaactttacccttgttttgcttatatttgtaaatccttcgaatcttgatcatattacttgaactaatgcatcgttcattcatttactctttctgcttgtacatcacttgtaaatcatcattagtttatggagaactgagtcctttaggtttgaagctgtttagaatgtatgctcatttagttggctttttcaggtactacaaatcacttccacctataagcaaggcat

SEQ ID NO: 190 - DNA, 1913 bp, Zea mays
  Intron number 3 from transcript GRMZM2G100286_T02 (locus G RMZM2G100286) derived from phytozome v7.0 (chr-ID 10; pos 100129976 to 100131888 reverse strand)
gttgcagggtagttcagaaggtctgttctatgtttagtattttgtgtgtgtatatatatatatatattatgccatcaaagctttgaacaaaatatgtgatttgtctatgctttgtaccatttgtgcatgcacatgccatgttttgtacaactgtttacaaggtctcttttttcaaatataagatctgaatttaaattcttaattttattctgttgtttaaaacgaaattttatatgtttttttactgtttttcatataaatagatttagtcttcaacctacttagcacacatgaaaattctgcttgagagtagccataagaaagatttatttatataaagagggcaggggtctattggcttgtcatatgctgcttacaatggtggagctgtgcagtccttgatggcattgcagtttaaccacatacacatataccaaatttatttccccggtttccctgttaatgtaacaatttcgggcttgttctcccctagattgatgtcacattacttttcttagttagcaaattttggaattgcttgcattttctttccagaagagtgggcctggtgcagcggtagagcctaccgtctgtaaccggaaggtcccaggttcgagccccagcctttgcatattatgcgggtaaggcttgatgcttaaagataccctttcctagaccctacgacactgggtacacccttgctttttctttccaacgagtattgtgacctgctgctttcttcagtagcttgcaattagtttgtgtaaaccattaataacaaaatatgattttagtttgatgattgcatttattctgatgtataaatgctgccagtcaccttaatgatttaatcccttttattatttcgtcaggtttttgaagttacctttcaccattattttctcataaaatatatcatctgttcctgcaaaaccagtattttatgaaagcatttgaagttcatgtctaactagttatatacccgtgcgttgctacggaatcgacatgaatttttgtacaccaaaacacctgtattttgtaatacatgaaatttgacctttttcccaaaaagtgttttacttctggatggaggtagtatttgttacaattcttttactacagttctttattattttattagatttgtgtggataatgaaattttgaggcgttcttttgtttcatataaactttctttcactttggtttaaatgctcctttgttgcatgcacctaatgtttatatatgaagtgctcctgctgcaccaagtcatttcagtatgttggtctccactataggccaatatgttttatcatttctagattcgaatttctatgtttggcttgagttcaagtgacatgtattttattttaacatgctggatatttagttgacgccttgatggatacaaaacagttttcttttaaagttagtttgccaccctgttggggactgttacctttttcattgtggtgttatttttgtttctagttctagttatctgtaaccctagttgcaagtcctttggtagttctgtgcctcttaaattagtctcaaacagcctcttcattttacatgtgatactgttacggaagcttcatcaccaattatagtttgctttatctgatttatgtcctaaattactgaacttagtcctgtgtgttgcccacatttgcttgaatctccgtagtcctgttattgccatctatggcaaatcatccacaataaattgtcgtaatccttttgaaatccaatagtattagaaccacatgcatcattaatttttaatttctttttgttgatctcctgcactacgtccaatgaagtttagtctgtccccgtggtgctctattagataatttatgtttgttattaacaggttttggaggtagttgataaggatcgaaagattga

SEQ ID NO: 191 - DNA, 1158 bp, Zea mays
  Intron number 1 from transcript GRMZM2G125300_T02 (locus G RMZM2G125300) derived from phytozome v7.0 (chr-ID 5; pos 1 566996 to 1568153 reverse strand)
agccctagcacccgcgacgagcaggatctgcccaggtaaatcgtcttcaagccggatgcatgccggcagctagtttcttctctgtcccttattccccactccaagtgtttgtctggtcagtaggtaagattacggatggggatccagcacctaccgcacctgggctggttttctagtctggaaggagagcaccatgacacgctcgtgctggaatatagtgcgattttatgttcctgctacgttgcgactgctcatagaatatatgccaattttcatcttcctgctatgtccgtgtatcatgttttttgaaaaataatatctccatatccgcatccttctgataccgcccatatccatgcatacatatggtttgcttgctatatgcaagcgcctcgaacccggattgctatattttgatgatttcgtgtctctcatttgatctttttttaaagaataagttggtgccgtgattgtagatctaagatcaacgtggttgcaacctgtgttcaactaagacacatcgttcccagtttacttttttcttagcttttgtgcttgcaatcctgtgaagtgtgacgtaactaatggaatagtgtatcctgacaaataatgcatggtgaaacgttttttatccagattccttgaatcctctaaattgtgtttgtttattgttagaaatgaacttcatctaccaaacaggattcgaacatgcctttctttaccatgtttcgtgcaactatgcactgctaacatatcagtaccatggtttgcacctgctagaatatcagtttattaccgttttggtgcaatcgtgactgaggtggatggggttattgaacaacgtatttgaatatttgatgttttagctgcatggaagtattcattccaatccttctgttgaattgcaaagaattgcttaaatttgagatctgtatagttctgttttagttatgccttttcatttgagcctgaattagacttcagttgtttgcatagttatagttataaatatagaatagcttgcttgtccatcaattttgaattgttacagtactgaatgagtcctcagagtgcatagtgttgttctctttttatgtgcctgatagttggtcctcttgtatttcagttgctcttgcggtagttcccccaactgtcacc

SEQ ID NO: 192 - DNA, 4194 bp, Zea mays
  Intron number 2 from transcript GRMZM2G414387_T11 (locus G RMZM2G414387) derived from phytozome v7.0 (chr-ID 5; pos 5 2277711 to 52281904 reverse strand)
ggaagcagttgaagaagaaggtcaggggctccaaagtcgcgccggctgttctggcatgcccaactgcgctggtctaatggtggagctggctctttagggtcgtcatcctgtttttatccatgttaccgtttgctggagtgttgacaatggtagtgtgtcagggtctgttcccttttggtggttcaaaaatcaggccttcctacaagtgtgtggaacgtagtaaggtgtcagctatgggggagcaaaatcagtttctcccacccttgttgtcttgtttctgcccctggctttgtacttggtcttctgcggccagcctcatgggaattgagtcagtctatttggccttgttgatgttgcaacgattatctagtagtcaatttttctttaatgtcacaatcaaattgtaatgtgctatgctggaatgtgagaggtctaaatgacgctgccaagcgggctagtgtacgcaatatgattttctcatctggtgcaacaattgtttgtctgcaagaaactaagatcgctaattggactactacactgctttgtcaaattttggggccgagtcttgctgcccaatcagtggcgctaccggccactgggacctctgggggcattttgctggcagcccatgatcgttttttccaactccactccccgcataccactgatcacatagtctctgctactattacattactggctgatggcacagattggtccattataggggtctatgggccacagtcggatcaggacaagattctctttctcaatgagatcacccatcttaaatagatcatacacccgaaatggctcctcctaggtgacttcaatttgatttaccgtatgagcgacaaaaacaacacaagagttaatattcaaatgatgaaccgtttcaaacgagtaatagatggcttgcaattagtggaacaatgaggggtcgtcaatacacttggtcaaatgaacaggacacgcctactatgtctcgcatcgaccatgtattctgctctacagaatggcaggaccttttccccaattccgatctccaggctttggcgtccatgacttcagatcatgcccctttgctcctaagggggatgttaccttggatttctacaagggttttcgttttgaatcatattggacctccatgcccggcttcaaggaaatagtgcgaagcacttgggaccaaccagttcattcagacgacgccattctacgtttccatgtcaaaacgcgtcggacgactaaggcacttaagatttggcggaggcaaaatataggtaacatcccgctgcagttggcaatggtgcaagtaactctgctacatcttgagcgggcacaagaagacagacaactctcaggggaggaactagagttccgccactatcttaaagcaaaagcccttggattagcagtcatccaaaaagccagggccaagcaacattccagactctcgtggattcgccaaggggacacaaacacctctttcttccaaatacatgctacggtcagacgtaaaaaaattatatcaggaacatcaacactagctcaagaatgacattcactcaaaaagaaaaagaagaggcagcattctcacatttccagcatgttctgggggagagctctgttaggaccatggcttttaactggtcaaccctcgactacataccctattacctttcacatttggaagccccattcactgaccaagagatcactgacttaattaaggctttaccagcgagccgctccccaggccctgatggcttcattgggatcttctacaaaaactgttgggaaattatcaaggtcgacttgattaaggcattacaagatttccataatcataaaacctcaaagttacatctcgcaaatgaggcgcacattgttctgcttccaaagaaagagggagctacagagttcagtgagtttcggccaatcagtctgatcaacagtctggctaaaattattactaaggtgttggctgaccgtctggccccaatgcttgataagctcgtatccacctcacaaaatgctttcataaagaaacgctgcattcatgacaatttcctttacgtgcaaaatgttattcgtagtctccacaagaacaaaaaggcaactctttttattaaattggatatatcgaaagcttttgactctttgagctggccttaccttctagatgtcttgaaggccctgggttttggccaaaagtggagggattgggttgcggccatcttggctacatcatcgtctagactctagagttctagtcaacggtcgtccaagcaataagtttaaacatgctcgagggctgcggcaaggcgatccgctttcgcctatgttattcatcttggccattgatccccttcaaaaaatgattgagcaagcaacaagactaggttttttaaagccggtgctacccaaatcagcttgtttgcgttgctcgctttatgctgatgatgctggaattttcgccgatctgggccatacggagctgcaaaatttacgacaactcttgtcaattttcactaatttctcaggcctcaagtttaacctagcaaaaacggaaatctttccaattcgttgtcaatctgccacggtcagctcactcattcatctttttcccgggaggatctcgaccttccctggaaaaatacttgggtctacctttacacactagaaaacttcgacggattgaggtgcagcctctaattgataagattggtgctagactagccggttggaagggcaagctcctatcaaaagctggtagagaaaccctagtaaagaatgttctatcatctcaacctatctaccacttaacagtgttcccaccgcaaaaatgggtcattcagaggattgatcgtatcctgcgaagttttctttggaagggtgatggcccagaaaattcgagtggtggtcattgtctaatcaaatggcaagtcacaacgaggcccaagtctctgggaggccttgggatcttagatttagaacgcttcgcacgggcactacgtttgtgttggatgtggtacagctggaaaaatgaggacagagcctaggtgggtctggacattccctgtgataaaactgatcaggacttatttcacgcctctacggtggtcacagtgggtaatggcaataaggcattgttttggaaatccaattggatctctgggagggcacctcatcacattgcaccatctcttttcaaaaaaacgagacataagaatatcacggtcaataggggactagaggataatagatggatatccaatatctggccgattcaggaaggtactgaaattcaagaattgatggcactttgggaagccatcaatgacgttgaaagagacgttgcaaatgaagatcaaatattatggcgctggactgccaatggcgaatactctacccgtagcgcctaccaagctcagtttaatggaagcatgtctagaattaaaattgaagcaatatggaaggcaaaagcggagcctaaatgtcattttttcgcgtgacgctcctgcatgaaaagatcctcacagctaacaatttgcagaagaggggatgggatcacaaccctatttgtcctctttgtcacatagatccagaaactccgagtcatctgtgcaaagattgtagttactcaaaaagcatttggtggactttgttacattggaccaatctcaactctttagcaaacctaaaccaagatggccagatacatacttggtggagaagatgtagactcagaattgataaaccaagacgaaggttatttgacgggctagcggtctatttttggtggaatatatggaaagaaagaaataggagaatttttcaaaattccgggaatgatcaacttgtcgtcgcccatcaaattaaggaggatgtcttacaatacagtgcggctttctctatcttttgatcagagagttctctagttgtggtttcttagggtttttttttgttttttctttctttctctctcttctttttttttgtaatggttgtagttggaactttgttggccagtagtccctgtatttggttattctccttctttaaatatattcggcaatcctcttgccgtccttttgaaaaaaagatcttaacttggtaaaacccacaaaaaaactctgtaatttttttctatgtactatcaggtgcaaaatcgttctggtgagtggatat

SEQ ID NO: 193 - DNA, 1974 bp, Zea mays
  Intron number 1 from transcript GRMZM2G003963_T02 (locus G RMZM2G003963) derived from phytozome v7.0 (chr-ID 8; pos 1 69089292 to 169091265 reverse strand)
cggtcggacttcttgcgctccaagaactcggcgaggtaactgctctccacacgccctccctcttcccttttttcctgatcttttctctcgccttagctcctctcgtcgctgtgaattagaccctcccccccccccccccccccccccccaacatccacgatgctcctcgtggcggtttccctgattgattgatccgtggggatccagaaggcctgaattgatatgatctgggatcgattggcgtatttggcaagcgggctccgattgtctcgatttcgcacggggcagatctagttgttttttcgtaccgaatttattgggggaattgctggttcgcgagatgctaagcaattgagagatctgcttgactccggggtgggacttggagcatgtggaatggggttagctatgcgattgcgtttttttcccgatcaatattggacaagggcacgggcacgccttgttatccttacacgagtctgaaggtaacctgttgcgcgtggtttgtcatgtttagcttcggggttctagctcctgatttgtcaggatggcatgctgacactgcggagaatgctcatacaagacatctcttgctgcaaaattgacgaggatcaacagattagggataaggcgccaaagagaaggattagaagggagatagaatacattggcttgaagcatcacaatgatacagcaaatgtatcagcataatctgtatcaaactcctgtgtaggactgcgtgcattttgcactgtctaaataagaccatccatgcaggaactgaaatagcaaataaatccatggttacacttttgtggctcatcatgcctaaagcatacatcaattctgtcatattatatggtaacactaggtgcttcacaaactgttacggacttagggcccatttagcatagctctagctctgagatctatgctgggtttgtcgtttatagactaaattgaagtgatttaaatttatttattttaatctataatatacatgaaattagtatgagtcaagattcacttagcatgtctacatctctagatctaggatttcttagagctataagtgaccagctctaggaaatcctcttagcacgaacatggacttattccctttactaccaagtggcagcatgtattcacttcgcagtaacagctccagggctttcgttggtgctgatttatttgtttgtagataatagtagcgtgcctgttcatgaaattgcattgaagtgtttaaatcacaatgccataatgtgtttgcaaaatagcattgcattgtttaaaattacactatgataggctgtctttatatcctatcagatttatttatatgcataaaaaggtttatgtgtcgtctgtccatctagataatgaccttaagttccaggaagttattaatgcatatcgtgcagatctgtgtgtattcatctagcatgcctctgactgagtgttcctaggacatttcacgttatatggccagtaccacaaaatgtggttacaaccagttctatcgtgatgtttctcgtgttcttgacaaaattgttatatagttaatataaaatacttaagaatcaaagttaatgataaaacaagggtgttttcttttttttcttgaacatctctgtatttccttttctactatctagagtaaaactaatgtatgctacttgcatgcacacctacaaacctttattaaatactaattaattttccagttcttcgtatttcatttgtttgtgtgttgcgaagcggttggagttctttcaattatcaggtgacaaaatggttatgtttaatcatgcatgttatcttcctggccctctatgtttctttgaggcattcaactacttgtagtatcagggcatcacagatatgtatatatgtgttgatgttcgtcattcaagatcaaatacatcctgctaggtcattacttgctaatgtgcatctgattttgctgttgccagg

SEQ ID NO: 194 - DNA, 5387 bp, Zea mays
  Intron number 2 from transcript GRMZM2G148060_T01 (locus G RMZM2G148060) derived from phytozome v7.0 (chr-ID 9; pos 5 5348609 to 55353995 reverse strand)
ttggcacactggtcgataacctcacgtaccttcaggtcaggaagatcatccgccatcttgaccaaactactactctttgctttcaaaattatgagttattaaatgtatcattggtctattattttttgcccgtattttacttaggtctgtcaacaccgaaagcaaaaaaaaggatttataaaccttttaatggaaatatatcatgtgcaatcagttgtattggtgcaaccatgtaatcaagtgatctaacgtatatagtgaaaatccaacggtgaccgttttttagttggcgggggttaaatatgaaatagttattaggtttcatatggaagaagttaaataaacaattacagtcactgttggattttaattggatgcaccagatcgtttgattacacagtcgcaccagtatgattgattgcacaaaatatgttccccttttaagcgatatatctctaagttcataaccgtttgttgacggggcccacacacataagtgcaaatcaataaacactcatctactgcttaaatggaaaatcaatcactacaatatctcgcttggcctcaaaggccatcttccacgcttgtttcgtgcttgcatactccttatatgacatcacgactcctatgtgacactaggggtacacgtgctgaccatatatctactatccatataacttacacaaccactataggattccagagcttatcaatccaatatcgacaatgtccaagttctgatgcctattgttgtggattgacggccaagacttcatctccaccgagaatagcatagggtgtgtcccccaccgcccatagggaggtgcccccccccgcccccgaaccttttttggggggggcttcagtgcgtataggtgctcagcgggtgccatgcctaggggctttccctaagagatgtcgtggaaggaaggacaggatgtcacttctgatttgctcagccaccagcatgtacccctcaaccaacgggactccatagatcgtgacacaggcgcatcgtactgctcgccgattcaaagctagctgcctcaagctcatagtcatgcttgtccaacttcatgatctcactagctctggtgttgtagtagttctccgctccagcaccgacggttgcagcagagccaggcgtgtccatcagggtgcgcatttcgtggttcatcaagctcgatcgcactgatgataatggctcatggatgccctaaactagctcatctcattgtgaggaattttataggggcaacccatgctcacatttaataatgtttgtctcacatattaccatctgtgtgacaaagtcatgctactacgatcccaaataggatgagaacatgccttcctaggagcacttcaataagcttgacaacctatgctttggatcgtctatccgtactaaccgcctcttccaattgacgtggctacctttcacctccatggtacatgactaccaggagcatttcaattgggaactcctttaccatgttcccaaacatacttaggttttgacatcttcgtagggaaaaggttgatccatctatacctcttctttgagatgcccatgcaagaatgtattcgatacatcaagttgacgcaagatccaatctctagatacaacaacacataggacaaaacgaacagtagccattttaacagccatattgaacgtgtcatcataatcaatgccatatctatgtttaaaatcttttgccaccagtttagttttataaacgcacttgcatcctacaacatgacaacctttcataggagggattaaacaccatgtattatttttaacaagaccatcaaattctaaagccattgtagcttcccaatatttatttgctaatgcttcatcaattgaatttatttgttaatgctttaaaattgaattaggttcaccaattgtagttaaaaacaactttagaattgtattgtatggtgccctctttgtagatccaagtttgcataataccatattgagcccttacgataggacactgagcatcatcaactctgatatccagactatatcccatagaatctaaagccatgaaagatttgttgttttctactatagggattctgtagtctgtggtatgtctagatttgcaacagccacactggaatccacaatagatcgagccatagaaggtccatccatcgccagcttacatacaacaaaggtaggtcgcacatgcacgtcaatcaagcctagtgtgagtctagagatgttatagaggtggactgcaagtgagagtttttagcatcgttacgtggcataggaaacagagctggttcagtgcatcgattttgttgctctcaacatcgaatttggtaccaaatcctcctcagactcaaagtaattttcactttggacaattgatccttcctggagtcttatagcttcgctttgcaccaagagttctttggttcttcttgattgacatgcttagaaataggattagtattttaggtgaataggtattatatcaacctactcaagaatattctctatagcctatgcatgaatttatcaaagtaggatgaaggatttaaatttatgagtgaaggcaaactcctgcattttgacatgatttgagaaaagcaaaaatctcttcatcaaatataaattcatgaggtatataaacatgcccagtaggaatattaagagacttgtagcaattatgaagatcgataaatcctaagaaaacacactattttgatataaattgaagtttttgagcattgtatgggtgaagattggactagaaagcacacccaaaggtgcacaatgaggagtaatttagttgttgactatgcatacactccaagggagtaaaattttggattactttgctagaaagctaattaatcaaatatgcaacaccaagaaagtcttcatcctaatacttaacagacatagataaatgggagagaagggccaagccaactgcatctatatgacgatgatattattttttctgtgcatgaggacatgagatataataggagatgctagaaaagaatgagttaagttttcttattcccctccttggtttggttaattttatggcaagaaccttacaattaaaatgtcactctacaatagttcaaaactctttaaatttatgaaaaacttctaacataaattttatgagatgcactcaggtaaatttactataattattaacaaagcttcataatatttttgacctagatgcaacaaattctcacacactagtaatcttaggatatggcaactcatgactcttagattcttggcattgtattgcaaacttactcactcatagactcttgtgagcataacaaattattgttgctaacaacttgctcggcgatactaaaagatggatggccaaacttcctttattattaatactagaagcggatatattcctcctatgcatctttcttgaagcaaaattgttttagttttctaaaccttaatgagaaagaaagtgtgttatagtaaataaagatcaaattatcatatgtaagttgatgaatagagacaagttttttcttgaatttggaaatttatataacatcttgtagtatgaaactactaggagtagttaatgaagcatgggtagtacaactgatattcatacctgatccaatagtggtgtgaatttgatatccttcttgatatttgtttctgataacgagcttttctagctctctagtgatgtgatttgtggctccagaatctatgtactatcttggattagtcttataagaacatgtgatagaggcaactcattttttatttggggaaaatgttcatcaaatgtaataacactaagcagttgtatggtttttcttagggatgtttgacatggttttgctccactccagagcagccctactttaaaacatcaaggtggagcagctctgctccgtagtctaggttgctttcttataaccagtggtagtgtcgggtaaatacctttaaactccatgtctaggtttctttttaaggatttcaaagtagcaaaagaaataatccaaaatgttgtattgtatctctcgaaactccatagagtttgcaactctggacttggggtgtttggctgactctagccaattccctcttagagttttgtaatagagccatgccaaacactcccttaaagcaaccttggcagatgagttgctcctataacatatcatgattcaagttagagctgctagggtcacgacccctgctattatcgtgcctaaaaccgccttgtccacttatgcgtctatggatctcacctcgtcctcgagtagcaccatgtcctgagctcatggaattgatagatatactattagagatgaggctagcttgggtcttgaaattcagaaactgtccaataactatgattacctccttcttagtgcatataacaaagactaaggtgaggtagtcatcatcgggacctatgtgaatgtatgccaccaattctttatcttttagaggtcgaccaactcctgtcatcttatcaccctagggatttcatcttcttgaagtattcagaaatggatagatttatctttttggtatttactagggtcgatcgtacattgatggttctttctctcgattgataggcaaaggcactttagatatctgtccaggcttcagcaacggttctggcttcccaatctttatactccatattgatcacctcgatctctttttttgtcctcacccttttgagagattatggttgatagtgccttagtgtcaccgatgtagaagccaggtagctttgtgccacagataacaaccttaacttgtggatgctgaagcttatagttcaacttcgtcagcttctcggagacgagtaggccgaggagtggattcacggaggtagagaacgataaactctttatggctctgataccgtataaaagtatagagaagctaaaaagaattgtcgattgtccaaactcgggtctgcatgcattgtgtgttgatctgttggataagaaacaacatgtaatatatagtggtgtacgtatgtaagagacattttatagagttttagataacagtactaatttaaactagattttagtctatcttataaccgacaatgttgaaggacccgttatggcttactgtggcagctatcatacctcaacatttaatactttatatcttctcccattttgtgactactaagacatacgtggtgcagcgctctatctaattacaactcctcgtcctaaacaatagaacactctgatttatttgcattgacattttgcgtcacacaacgataatgagtcacttcctatgacacttgtatatccctcctatcaagcaattaaccaaagaaaaagttgcaggttcttggcct

SEQ ID NO: 195 - DNA, 14819 bp, Zea mays
  Intron number 7 from transcript GRMZM2G536486_T01 (locus G RMZM2G536486) derived from phytozome v7.0 (chr-ID 2; pos 1 02832997 to 102847815)
tcagcgtcttgcggcaaagcgcaatttagaaatcagtgagtattcatttcttccttttaagcctacagttattgctgccaagttaaataatgttgggattgtaggattacggggaggctacgctagcgcaaaacaaaattttcaaccccataaaaccaagaactactgcggttataggtcatggaattaccactagacgcgcagagcagcggaagacgtcttgatgtagacgaacgcgtcgagcagtgtcgtgcagtcatcggcgtccttcacgtcctcgcacggttcgtccaagtgctccagatgcagcacctccgaggtatccacacgtacagggaggaagcggagcgtactgaactgctaggttcgcgacggcggcatggcgagggcgagaggcgagcggctactcgtttgctggtggcgaattagggttagcctaacaacgcccccgcccctcattatataggcgttatgatgggcttctgacactgaggcccatcagtaaccctaaagcctagtctaatttcggatctaatccgagttaggcttcctcccccttaagtgtgtgaccctataagttcacgtacaaatagacatagcccgagtactcttacttggcccaataattgacagcggcctctagcaagacatgtcaactcctatgtgcacgtaaagatcatatcagacgaaccattgtaacattacgtacatgttgttccctttgtctcacgatatttggtctggctctaagatgacctctctttctcgatactgtgaaatggaatcctttcaatggttaactcttaaccctagcacggccatgcatttcttgatccaatcactcgaggggcccagagatatctctctcacaaagagagggacaaattccatcttgactggccatgcctcacagcatgcttcctgacaaacccaaaactacctttataactacccggttacggaatagcgtttgatagtccctaagtaagtcaattcacatcttgaaaacatgcgacaatctcaggtctaaggatacagtattcatgttgcaaaaagagaactatattacaatatctcacgttaggtcggtccagcctcatgtcatacatgcgcccacattattagtttaacatctccatgttcatgacttgtgaaatgtagtcatcaactaatacatatgctagtcatcgactctgactagggacatcatttagaataaccatataagtaaagaatctcacaaacaattcacataattgctaatcaatacaaggtgccttccatggatattcaattaagcaatatatatatatatcatggatacaaagaaatatgctcatctctatgattatctctagggcatatttctaacagtctcccacttgcactagagttaatctagaagatatctaatacccatagatctcatgtgtgcctcatgcttaggttgtggaagaggttttgtcaaaggatcagcaacattcaaatccgtatgtattttgcatatctttatctcaccccgcctaatgaattcccgtatgaggtgaaacttctgcagtacgtgtttgtttttctggtggttccttggctccttagcttgcgcaatagccccattgttatcacagtagaggtttaatggactagaagcattaggaaacacaccaagctcgatgaggaactttcttatccaaacaccttccttcacagattcagaagctgcaatgtactcggcttctgttgtagaatcagtcacagcctcctgtttggaactcttccaactaacagcaccaccatttattgtgaacacaaaacctgattgcgattttaactcgtctgggtcagtttggaagctagcatcggtgtaaccagttacaacgagctcctccttacccccatataccaggaacatatctttagtccttcttaagtacttaagaatgccttttaccgttgtctagtgatcctcacctggatcagcctggtacctactcgtagcacttatagcatatgaaacatctgggcgtgtacttatcatggcatacatgattgatccaattgctgaggcgtatggtaccttactcatgtgctcccgctcattagccgtcgcaggacattgcatctagctaaggtgtttaccatgtgacataggtaagaaacctttcttggactgttccatgttgaaccatttcaaaaccttctcaatgtacgtatcttgacttaatcctataagcctcttcgacctatctctatagatccttatgcccaaaatatatgctgcttcccctaagtccttcatagaaaaactctttttcagtgaagccttgacggactccagcataggaatgtcattcccaatcaataatatgtcatccacatacaagatcagaaatacaacagcgctcccactgtccttcttgtaaacacaagcttcttcttcattctgatgaaaaccaagcactttgaccacttcatcaaaacgaatgttccaactccgagatgcttgcttcaacccataaatggatttctgaagtttgcatatctttccagcgttgatcggatcgacaaaaccctcgggctgtatcatatacacgtcctcatctaggttttcattaaggaaagttgttttgacatccatctgccaaatctcataatcgaaatatgcggcaatagctagaatgatccgaatagatttaagcatcgctactggcgagaatgtcttgtcatagtcaactccttgaacttgttgaaaaccctttgcaacaagtcgagccttatagatgtgaacatttccatccatgtctttcttcttcttatagatccatttgcattctatgggtctaataccatcaggcgggtgaaccaagttgcaaacttgattttctcccatggaatctatctcggatctcatggcgacttgccatttctcggaatctgggtccatcatcgcttctgcatatgttggaggttcgtcgttgtctaacaacaacacttccccattgcccaacaatagcacttctcctcgtgcctcgcgaagccttgctgaccttcgtggttgtggtggtgattctcttgccatagacgtctcaacttgttctgctacattagcatcacttgttgaatcttgtcccactggctcatcctgaacttcttcaagatacaccttttgtttacttttctctcttttgagaaactctttctctaagaacacaccgttccgggcgacaaacactttgccctctaaccggtggtaaaagtaatatcctaaagtttcctttggatatcccacgaacatgcacttgtccgattttggagtgagtttatccgactgaagtcgcttgacgtaaacctcacaaccccaaatcttcagaaaagacaaactgggagtcttcccagtccacatctcatatggtgtcttaactacggacttagacggtaccctatttagtgtgaaagctgttgtttctagagcgtatccccaaaacgacaaaggtaggtccgactgactcatcattgatcgaaccatatccaataaagttcgattacgtcgctcagacacgccattcctctgaggcgttccaggcggcgtaagctgtggaacaattccacaactccttagatgattgctaaactcatgactcaaatattcacctccacgatccgatcgcagtgctttaattttcttgccacgctgattttctacttcattctgaaactctttgaacttttctaaggattcagacttgtgtttcattaagtagacatacccatatctactaaaatcatcagtgaaggttatgaagtattggaatcctcccctagctgtcgtactcattggtccgcacacatcagtatgtatgagttccaataaatctaatgtcctctccggtaaacccgtgaagggcgccttggtcatcttaccaagtaagcaagcttcacatgtctcgtatgattcaaaatcaaacgaagttaaaagcccatcagaatgaagcttcttcatgcgattctcacttatatgacccaaacgacagtgccacatgtaggtaggacttaaatcattaggccgaggccttttagcactaatattacagataggtgcatcatcaagatttaaaatgaataacccattcataatggatgcaaaagccacaaacatgccattcttagagatcacacaaccattgttttcactcgcaaatgaataaccatccttcatcaaacatgaaggagacataatgtttcgactcatactaggaactagataacaattatttaactccaaaataaatcctgatgggaggtggagttgcatcgtcccgacggtcaacgcagcaactcttgcattattgcctacccagaaatcaacttctcctcttttcacgcttctacttcttatcattccctgcatcgaattgcaaatatgggcaaccgatccggtatcaaatacccaagaattaatataagaatcagcaagaaaaatttctgtaatgtgaatagcaagtgtacctgctgcggctgtacccttaccgccgcgatccttaatagaggccaagtactgcttgcaattccttttcgagtgaccaagttctttgcaataaaagcactctgcatctgcagctggtccagccttgggcttttgatttggcttggatactgtatcctttgccttgcccttcttcttttgagatttacccttcttcttaaagttgggtttgttttggactgccatcacatggccgctgctgccagcgcttttctttatgttcccctctgctgttttcagcatgccacatagttcattgaggcccctctccgccccatgcatatggtagttcgtaatgaagtttccatagctgggcggaagagatgccaaaatgaagtcagtggccaactcttggcttattgggaagcctagcttctccaacctctgactgtaaccaaccattttgattacgtgtggcccaactgttgtaccttctgctagcttgcattccagaaaggctttggacacattgaacctttcagtcctagcctgagtctggaacatatccttgagcgccacgatcatatcgtgcgcctcatggtttgtctcaaactgcatctatagctcaggctccatgcaagcaagcattaggcaactcacttcaagattagcatccattgctttcttgtaagcggttttagctgcagcagttgcattttcactaggatcctctggcagtggggtgtctagaacgtcttcctttttttcagccctgagaacagttctcaggttacggatccaatccgtatagtttgttccatttaacttatccttttcaataattgatcgcaaagtaaatgttggtgtgctaggtgccatttatctacaacaaaataatgcaaaatacttagacaaaaatatccatgacagagtaaatcatattaaacatttaatagtctactcccactaaaatcaatatccctcgattgatacttagtgattcagaacccacaactaacaagtctactagtgagctttagcatcaccgctagaagacaaggtagatcggtaagcaactccttgataatcatatcatatatatgacttctgttgttgggtgacatctctatgtctcggctcccaaccttatgccccaaagtccttaaccattaagctgactttgtttaagttaaccaaccctctctgcagttcgtatccgatacaaacctatctagtcaaggaaaactggtggcaccctaatttcatagacccaccaccaattgtacaagacttatgatagtgcaaggtttggagaggcatttaagcttaaacatttatgagggatcgtcctacttatatcatcgcacgcaaggacatatatgcaatatgaacaagtagaacattaagaatggcattcacacaacagttgtgattcggtatggcttgctgtcacatggtgatcctcatctccaataatctgtccatcacgatgatctccatctccacgatataggtatgccatccttcaggtgatgagtccttcaagacctatctaacgtatgctggtaaagaaattacatatacgctttggatcatcacatgttgacacgcaggtcattacattaaatttggacaatacatgtggctccagccgtattgccctggtcacgacacgtaggtcatgaataattcattaatatgcatcatatacacacaatagccataccgatcacaagatgtcctgcaaaaacaggttagacaaacacgtttctatatgttcgccactacagcagatagccacgacagtccatgcatcgtatgtatggaaattccactggaaatctcatgcggttgatcaaatcaacccaaatccgagactttcgacccgaagaagattacacccatgacgtcgatctgttacgtcaatctgctggttgtgtacgcagttagccccgatggtgattccagccggtaggggcaagtcccgcacataacagagaaggacgaactaatctcttcagtcatatccgatgtaatctacttcaaccctttataaccaattgatctaatcaaaccgtgcatcaagtagatccatctcatgaacctagatccagacctaaaactacgcagaacctggcctctgataccactgtaggactactgcggttataggtcatggaattaccactagacgcgcagagcagctgaagacgtcttgatgtagacgaacgcgtcgagcagtgccgtgcagtcgtcggcgtccttcacgtcctcgcacggttcgtccaagtgctccagatgcagcacctccgaggtatccacacgtacagggaggaagcgccgcgtactgaactgctaggttcgcgatggcggcttggcgagggcgagaggcgagcggctactcgtttgctgatggcgaattagggttagcctaaccgcgcccccgcccctcattatataggcgttatggtgggcttctgacaccgaggcccatcagtaaccctaaagcccagtctaatttcggatctaatccgagttaggcttccttccccttaagtgtgtgaccctataggttcacgtacaaatagacatagcccgagtactcttacttggcccaataattgatagcggcctctagcaagacatgtcaactcctatgcgcacgtaaagatcatatcagacgaaccattgcaacattacgtacatgttgttccctttgtctcacgatatttggtctggctctaagctgacctctctttctcgatactatgaattggaatcatttcaatggttaactcttaaccctagcacggccatgcatttcttgatccaatcactcgaggggcccagagatatctctctcacaaagagagggacaaattccatcttgactgaccatgcctcacagcatgcttcctgacaaacccaaaactacctttataactacccagttacggaatagcatttgatagtccctaagtaagtcaattcacatcttgagaacatgcgacaatctcaggtctaaggatacagtattcatgttgcaaaaagagaactatattacaatatctcacgttaggtcggtccagcctcatgtcatacatgcgcccacattattagtttaacatctccatgttcatgacttgtgaaatgtagtcatcaactaatacatatgctagtcatcgactctgactagggacatcatttagaataaccatataagtaaagaatcccacaaacaattcacataattgctaatcaatacaaggtgccttccatggatattcaattaagcaatatatatatcatggatacaaagaaatatgctcatctctatgattatctctagggcatatttctaacagggattcacttgggcagaaacgataaagaggttcttacctcggctatttctattaagaatatgtaggtcgatcgactcatggcttctagcatttcatccccatccattcgtcgtgttgttttaaatgaagaagatgcaaagctcagcttccatgattttttatcactgccccctcttgcttgggttgcatgaactcgaacaaggaaaaaggaggtttcattttgagagtttttggacaagaatggagggttttatggaagaagtgcaacaatcttggttgcaacctttggagtgcttgtgccctctatagtgttttgctgggaaactaaagaggctgtccaagcatctgcattcttggagtcagaaaaaggtgggcaacataaaaatataggtgttgatggctaaagaaattcttcataagctggaaattgcaagagattccagatctctatccccacaagaagagtggctaagacaatgattaaaacatcattctttggccttggtttccctggagagaaccatagaccgcttgaggagtaggctgctgtggatgaaagaaggtgatgccaacactgaatattttcaccaacacgccagatataggaaaaagaagaattttattggaaaaatccaagtacagaatagattaatcgttgatcaaaaggagaaaaaggaggctgtttgggattttataattcactgcttggaatggtccctcctagagtttcagccctaaatctggaagcttttcatagatgtcctctgaacctccaagaacatgagcagatggtcactgaggaggaggtttggcgcaccatcaggtcgcttccttctaacaaggccccggggccagatgggtacacaggtagattttacaaaaaggtttggcctatcatcaaaatggattttatgtcagccttgaagaaaatttggcacggggatgcttctagattatatctgctcaactcagcctatgttactttgttgccaaagaagagtgaggccattgaggtgaaggatttcaggccaataagcctaattcacatttttgcaaaaattgttaccaagattttggctaatagacttgctcctaagctccctgacttggtctctgtgaatcaaagtgcgtttgtgaatggtagaagtatatatgataattttgtcatggtgcagcaaacagccaaggccatttatgggcaaaaagtttctagagtcttgttgaagttggacattggaaaagcttttgactctgtctcttggaccttcctttttgaggttcttagacatttgggttttggttaatggggagcctagggatattattcatcatagaagaggtcttaggcagggggaccccctgtcccctatgctctttatcattgttatggatgtcctcaactcgctgattctgaaggcacaagatctgggtttgttgcaacctcttctaaggcgcggtaggggccaacacatttccttatatgcagacgatgtggtgctgtttttaaagcctgaaagagatgagctcaatatgctgaaggaaatattaaggatttttggggaagctacaggtcttgtcacaaatatcaacaaatgtatcatcacacccatacattgtaatgagcagcaagttgacatgtcctaggagattttcccttgtaatgtgcagcagttcccctgtagatatttgggactgcctctatcagtaaagaagcttccaaagattgcttttcaagaacttattgacaaggtggctgacaaattgctagggtaaaaatctgccctgatcaccaatgctggaagactcacattggttaaggctgtcctcactgccattcctatatatcatcttcttgtccttctatgccctaaatgggttatcaaagccattgacaagattcgcaggggtttcctctagaagggcagaaaagatatcaagggaggccattgtgctattggatggacaagggtgtgtcgaccacttaagtttggtggcttgggtattcacaacctggaaatccttggttgggctcttgatgtgagatggctctggcttagaaaaacacaggtggagaggccatggactgagttcgacataaaagtacatcccaatgatgaagctctcttccaggcctcggttcactcttctgtgggggatggtgctacaaccctcttttggatggatagatggattcaaggacagtctattgcagttcttgccccttacctgatcagccgtattccaaggagggtctggacaggccgtacggtgcaggatgctcttgctgataatagctgggttcaggatatctctgggggtcttactgttgttgtcatcagggagttccttcttgtttgggatctgattcaagatgttcatttatagacaggagttcctgatgtccacatttgggtgccttgcgcttctggcctctattcctctaagacggcttataacagcttttggactggtacaacatcttttgaaccggctaaaagaacttggaagagttgggctcctccaaaatgtaaattcttcatttggctagcatcactcaaccggtgctggacggctgacagattggcccgacgaggtatggatcatcatgacaaatgcctcttttgcggtcaacgcgaagaaacagtccaacatattttgctctcttgtgtgttctctagaaacatttggtggcaggtgttgtgtaaagtcgggctgcaatacctggcgcctgggcctgaggacatgattttccaagattggtggagcaatgccgaaggccaggtatctaaagagaagaaaaaaggttttaacacgctggtaatccttgtggcttggtggctttggaagcatcgaaacacctatgtcttcgatggagcatccctgagcactagagatatcctgcagcacatccaggaggatgcaacgctgtggggtatggccggggctagagggctttggggcatttggccttaagactagcgggggcctgttgttgtgccatagatgagagatgagtatgtttctgtacttgtgttttcgacctctgtaaggagtcatttgtacccggtctgttctcatacctctttctctttcttaatataaattatacgcagctctcctgcgtgttttgagaaaaaaagaatgacattgatgaacatctttcacatgctattaagcgatgggatgaaaattctgagcatgatgatctagagtggggatatgaccttagtgttgttccacgccgtaagaaggcgaatcgctttacttatgcagggaggattcctcgtccttctgaaaaacccgtcacaccatctaaaattagtttaaaatgaagggaactttttggaattgcagaggtctcgctgacttggctaaacataattaccatgcatcgttatctaaaaatatcgactcgactttttagcgatctttgagacgggtagggatttttttctcagagtccactttgcgccatttaagtggtggtatatattttctttggcatactatgccacctagagggagatctggtggtatgattttaggtgtaaatccagctgttttagacgttggagctatcgatgagagggatcacaaaatttctccttagaaataaattagatgattttaaatggtccctttatgcagtgtacgacccggctcaggacaatctcaagaatgcttttttagcagagatggttaatgtagttggtgcggaattgaacccttttattatagggggagatttcaatataatgaggcaaccagaggataaaaataaagataacttcaatccccgatggcctaatctatttaatgttgtcatagattgtcttgagatgaaagaaattgaattaaagggtcgtcaatttacttggtcaaacaacttagaccctccaacatttgaaaaaactaaatagagtatttatgagtctcgattgggaactaaaataccctaatgccactgttgaagtgcttcatagatcacgctcggaccatacgccattattactcatcgacaagattgcctcacaatttggcactcggtctttgtttaaatttgagttaggatggcttattagggatgggttccatgatatggttgcgttgatttggcagcagcatacgaggggatattcagcgacggagaaatgtcaaggcaaaattagatccttgcgccaataccttcgaggctggtctaagatcttcgaaaggagaagtatcaacttactcggaagcttgatgagttggacaaaaaggtagagacttctcaattgtcacctaatgagttaacaatgaaaatttatatggaacaaaggcttactacaatattaagggaagaggaaatccgtctcttccaatgggcaaaagttaagcatcttcttgaaggggataataacactaaatacttccagttagtggccaatggaaaacatcaaaaacaaagaatttttagccttgaggatgatgagggtaactgtatagaagaaggagatctcaaacaccatatcactaattactataaaaccctatttgggaagacagaccacaactcagtaataatggaggaatcaattacttatgatatctcccaggttccggatattgaaaacgcgattctaactgaactattcactatggatgaggttcgcaagactgttttccaaatggaacgtaataaagctcctggtccggatggttttccggcggagttctatcagactttctgggaagtaataaaggatgatttactagccttgtttgtggattttcacaatgataccctgccagtttatagcttgaattttggggttattaatcttctacctaagaaatgtaatgcctcaaaaatccaggagtatggacctatttgcttacttaacgttagttttaagattattactaaattcctaacaaacagaataggggtggttgcagataagcttattaatccctcacagactgcgttcatgcctggtcgcaatatccttgaaggtgtaatcatgcttcacgagactattcatgagctgcaaaggaaaaaattgaatggcctaattctaaaacttgactttgaaaaagcctatgataaagtaaattggtcgttcctacaacaggctttgcgaatgaaaggtttctcaccgaaatggtgtgcttggattcaatctattgtttctaggggacatgtcgggattaaaattaatgatgaagttgggcctttctttactacacataagggccttcgacaaggtgatcccctttctcctattctctttaatatagttgtggatatgttggcgatactcttttcaagagcgaaggaagataaccaattcgcgggagtggttcctcacctaatggaagggggactttctatccttcaatatgcggacgatactattgtttctatggatcataacttggaacatgcgtgtaacgtgaaattacttctgaccgctttcgaacaaatgtcaggtttaaaaatcaactttcacaaaagcgagcttttttgctatggtttagctaaggagtatgatctaaattactctcgtctttttggttgcgggattggttcattacctttcaaatatcttgggattcctatgacccatcgtaggttacaaaatagtgaatggcatagtgttattgatagattaaaaaaatattaagttcctagaaaagtaaattactttcttctggcggacgtcttgtgctaattaattcagtatttagcagcctacccattttcatgatgtccttttttgaggtgccagcgggggtgttacaaaaattagatgccatttgttctcgcttctattgacaaggcgaccattcgaaaaagaaatatagactaacaaagtggaagactatttgtcaacctaaggagattagtggtttgggggttgccaacctggccattaagaatgattgtttacatagcaaatgctctttaagttactaaatgagaacggtaaatggcaggaaattctgaaaaataaatacttcggatccaaatcacttactcaattagtgagaaaatctagagactcgcatttctggtctggtctcatgaaaattaaagaacgtttcttgagcagggggaggttcgatgtaggtgacggtcaaatgactaggttctcggaggatagatggatcctcgataggccgcttaaggaccattgtctgtacctttttaatattgtgcgtaaaaagaatgttttagtcaaagatgttataaatggaaatatacccaacctatcatttcgtagatctattatcggagtgaagcaggttgagcaatgatttgaagtcgtctgactaatcgcgattagtcagtctagtcggttttagtcgaccgaccagggtattcgacccgattaggtcgactaatcgtccagttgtccgattagtcgtcgaccaagagcgattaatcgtccaattaagttgtggacgactagttaggctctggctggcggctggcctatttttgctttgggatggacgtctagttaagacccatttagtgtaacccttagggctttaggtaaacagggctaccggctgcttgctccaaattatctgctctactgtttcggcagctagtctctccttgcaccttgctcgcctctctcccctgttttggcggctgctcacctctctccttgcaccctgctcggcggctgctcacctctctccttgcaccttgctcggcggcagcggctcagtgctcaccatcctcggcgtcgtggcccagcaacttgcctacaccctgctcggtggcccagcaacctgcaacgagcatcggcaaggcagcaacatgagttcatcatctaacggtacatgcattgattcgttgatctgttgtctactctattccggtgttcccactcttgaattcctttcagcttcgttcaatttctttcgttctttctgaatgtgtagaggggggttggcaccgtgaacgtggagcagctgtt

SEQ ID NO: 196 - DNA, 19268 bp, Zea mays
  Intron number 3 from transcript GRMZM2G036752_T01 (locus G RMZM2G036752) derived from phytozome v7.0 (chr-ID 2; pos 2 09585320 to 209604587)
tcttcgggctgctcttaccccaccaccagtgcaaggtacgtggcgagcttaaattaactgtgcaccatgatccatgtagttcatgtttcaaacctgcgcgctttgggaactggtacacccccaaggaagttgagcatcatgttgcgccaccagatctttgggccgggatgcagtttgttcggcggattttttgtacttaagaatcgcggaacattcagcatgtgtgtcgtgtatcagtattaccagccacaacactaacagcactgccttgtttacacagcgccgcgggaaccgtgaccccgaccaccggcggcacaatgggaggagcgggaggcccagggaccttgacgcccgccgggacaggcgcaggcacagccggcactaccggcatggggactgcaggcactacgggtaccgggttcggcggcctaggaccagcaggcatggacacagcggcggcggcggcggggggcttgctcctcctcccagaggctgggctgtgcgctgccctcgtcgcgctcctcctctccgccatcgtgctcgcgtgacgccttcacatgacctcggaaacaacaacctactgcctgcatgctagtagtagtagaaagcgctgcccttttgggaggtgtatgtagttcaggagtactctgattatctatggagaaagggtgggaattattggggaaaaaaactaatgcatcccactagcgcctgcttcttgttcggtgccgcctgggcgctcatgggtcaaacagagcagaaccaccgctcatgggtcaaaaaaaaaacatgtgaaccaaacaggacgtcaggtagatgcgcaaagttgttgcaaaacctacaggtcccacgcccggggccggccagcgggcgtcgtacgacggcgtcctggatccagccgacagctgcgtgcgtgactagcgatgaatgatgcggtcacaggctgcccggctgtacaaagcgcagcatggtaccaatggagggccggcgggggcgctggttccgtgcggccgcacatggcgtcgcgcggcgagtagcatgattgacgggtactactacctgatgacggtgacggggccgggcgaattacggcgcggagtggtaatgacgcgcgcgcgcaagagcagagcacgcgtgctgctgcgcctgcgcgggagaagcgcggtgtcatgagtcatgacccgggcctgcataacaagtccagtcctgtgtttcctgagtcctgacgccgttgctccaccaaggggaaggtgaaaacagtctcggttgctagcttggcttgtgccgatggcggcgctgtctggatatcaacggcgagggaaaagggcaatgcccttgcaaactccaaataattttacattgcataatttacagtactggcaacagccgaaattgtcatgctcccatccactgcgtcccttgcattgcagtgctaccgtacagtacagttagtcctaactgaccaacaacctatcttctagtgtcgctgagaaccatcgccgagttcagcttcagccttccgcagcagcagcttggctgagcatagcgagttagcgactgtatccatcatccatggccaaacattccactttgtacagcctacccttcaaggatctgtgatctgctcagcggttcctgtaccgtttccgggcatatgaaattgagcgattaaatcggtacaacggtgttcacgactgaatgcacgaacagtgaagcatccagcaggatagtaatcatggtagcttacacgactactgacggctcggaaggagactggtctgacttgtctgacggctcggaaggagactggtctgacttgtctgacgtgtttcttgcgaggaattcaagaacatgttttgcggcctcccttggcttctccacgtgaggaatatggccacactgccggacctgcctcagaatagcgtctgggagttcctgatgcaacctctgcaagtgatgcagtaacagctagcgtgagcgtaatataatatctaacagggcacacactgatgctactttatgctactgttattgtgttgacacggcattagctagaatttcctcgctttttaaatgccagtacaacttcaaattggtgctccgcaaagcataacatgtcaacttacatatgctagtttgctgcttattattccatcatcctctccccacaggatcaggcatttatgcttcacctgtaaagagaaacaggaacatcattagtaatgcatctgttctactgaacccattctatttctttttcatgcctagctttgatccagaaaggtgggagctagcatccagatttcacactataaaatttatagtaatatacagtgacagtaatatacagtgtactgtaaagctatgatgcagctaaggctggtaatgggctctagatttcacactataaaatttaaggatcaaatcaaattaggattggactctatttctattcatttttaatctaaaattaattaaagaccctaacttattttgaagaaatatttggatcgtgatccattaccacccctagatgcaacatgcagcatcccttccatacactctaatcttggcaagagtatgacgaacaacagtgcaacagcctattggtgttttcacttagaacatggaatattcaaggtactgcagttctcactcaataggttttgttaatgacaaggaaacagttgaaagcccttatacggagaacaaaaatatatcttatcagatgtgcacttgcccttatcgtcatctacagaaaattttcagtaaaatgagcaaaagttaggaccatcgaagagtaaaatcaagggaacctaattcttaccaatacttgtttaaggggtatcccaacttataccatgggcttctacaggttgatgggacacacagtaagatggactctataagagcaaactttttcgggcaaggggctgggcaaaaacacaagtcgcacatggccaggtgggaaatgatgacaagaccaaaagatcaaggaggtccagggataattgacacaaaagtaatgaattgagtactactagttaaatggatttggaagattatgcatggctctaaggacacatgatataaaatttggcacgctaaatatatgccacaaaggaacttcaattctaaacacaaaagcaattcacggatgaactataaaaatagaaactttaacatccttggacagtgaaaattcataagcagagtctttaaagaaaagaacctgttttatttggtttatgacattataaccccctctaatcataaaatctactgtagcatcctcccaccagggaagtaggcaatgcagacggccaatctgaaattttaggggaatcatgtcaaaatgcctaacttcatatgctcaagacacagaggaacaggaaactaaaatagcttttgccgcttcctttcaaaaaaaaaaaaatagcttgaatagcctgtttgcaaaatttattagattagttaaggcaataattttgcactgttaaaattaggatgtcagacagagaaaaggaaaattggagtggcaggtaataattttattttcaatataattttagcatgaatcaggaaattttggattaatctgtttgctcccatctacaaaaacatgattattgtataagtagttccaacagagacactgttaccgccagtttcttacagcattggagaaagacagactttattggaagagaaagtgggcttctccctaattccaaaaggtagagaaaactactagagcagcaactaggacatgattttatcttattttcgcattccttttaaatctgaaagtgatccatagaggcttacttgcacccaatcaaagaattcatttggagtttttttaaatgccaatcttgttgctaaaaatcgcagtggaagactcttcaatataaacacctggggaagcaaagaaaacaatcagtttactccagtagtccagttgcccagtcaatacagacacacaccacaagatttctttcatccaattagagataataggtcaacatgaaacattcctcttaagtagcacaaccatcattatcgagaaaaaattagcacagccataaccaacaagtgataatattactaagcacctaatgaaaaatacggacattgcgacatccaaaataaaacatgtaacatgtaaaagaaaaacaaataagattagcgtggaaatcagaatgactcaccccagcatatgaaacaaatttaggcatcctggtcatatcttttgggccctcagagtatacacttgcaccaatgaagatcaatttcgagacctgtgaaaccaagcttaaattagctggaatataaaaactctcagacttgtaagatctgtcttgtatgaaggcttatcgcacggtagccaagcttcacataaaagaaagccctacagatacctgtgtactgctctgtagtctgcagtaaagaaatatagagaacaaaagtattttaagcatgtaccgcttcggggtagttgactgaaaaatcaatggcaacagcagcaccaaggctgggcccgactaacaccataggccttttgatgtaagatttccagaactacacataaaagttgtaaggatcacatcactgtaaccaagaaaaaaaaacagatcaatgtaaccattagatagtggcgtcagttcacgacaagaactgtctggtcttaattggctgaactgctgggtacagggagaaacggtgggtgcggtgtcatactctgtcgtactttttccttagcgaagtgacgtgtttgagaaataaatagggaagtggaaagtaaactggaagttctatattttatagcatgcctgacaaggacggttgttcagttactctcatgctaagttgctgaatcatgtactatagtgttaattaagttgctcagatcagctactatcagtgtcattctagcatttgccatattaaaatcagaaataagttcacgaaaggagaaggacacatcacgtggaaattagcacagggtacagcaccagcgatagtagtactttcatagtacctggtaaaaatgctcgcgtttggatgcaacatcacatggcggccgtgtttctacgaacgagacaagcaaagatattacaaggggcctacaaagtacgaaatcacaaccttaccaggtacagtaaccaaaccagatcacatggtgtgcaggatggggcgtacccaaatcagagaagccccacccaaggatgtccacagcccaagcctccaatccggcctcctcgagcaatgggtaggtgtatctccattctagaacagaactgtagacgatacattaaaatggtccacactgatagcagatagcagaaccaccgcatttcaatattgggacaggctcctcgagcaatgatgaccagctagcactaaaaacctgacctagttgagcaacgaactttgctgtgcattagaaatttggagcccacctgtcgaatccatgcagcagcacgaccggatcaccgtcctgttgctgcttgagcggcctcacacagctgctcgatatcgcgctacccgagaaactggtctgaagatgaagataggataagttcaggctcagccattgcgcatttgagcgtacgacagcacagtaaatcgggagaaatcggctcgcctggacgggcacgcgctcgattcgcttggccaggcggatggcagcgccgtcgcggatgcgctccaccgccccgggaaggaaggacgggaacccgccggtgctggtgcatctggcagtggcgccggccccgtccggggcggaggcggcgttggaagccgcaaccctgaggcggtacctggaccacgcggccagcggcagcgccggtacggaggaggaggtgaggagaggcggcatttggtcgggtttagtttagcggcgcgcctgcccgcgcgctggacggtctcgtggcctggagctgtgtgccatgcccactccgctgcacgggtgttatagggcgctaggacggtggaggccgcgtggcatcgtgtggtgccgcattgccatgccacggccacgggctaggcagatgtgattttttaacacgaacgagacgaaagagaatgggaaggaaagattcggcggaaacaaaaaaaatgcgagaaacacccaacttggggcaccctctctagagagggtttgagtgagtatatttgctctgtttggcacagcgggtgcttgttgaaaaagcagcttatctgagaagctggtgaaaagcagcttctgcttgttggctgcttttagtgtattctaagaagcagctgaactgataagctgctgcagaagctgcctgtttggcggaacctctgcttaaatttgtgaagaagctgaaaataagttgtgccaaacagggccattaagtcaaaatctttcgtcctttttaatccattagatataaaaataatgaacaaggctttggattacgagtcttcttaaagctagaaaaattgttcgcttctgattaaagtcaattgtttagactactgtgactataattgaaaaggacaaaaatattgtagaaccaatataaatcgatacggagagagtaatgattttaagaaataccatgctcttctaaatatcatccacgtatgtggatgatatttagaagagcatgttatttcttaaaatcattactccctctatactaaaatataattatttttagcttttttttatcaatattcaattaatgataataaataaagacatacatacaaattatatttataggtatatttataggttaattaatgaatgtacatttgatctaaaacgaacggagcttaacatgtctaccatagagaggtatagatcaggcgcggggtttccttcgatgacaccgagcacgaactgctcactgagtcgccggagacagcactattctcatatcgcaatgaccgtgatgagggaacaccatcaccacgtctcccacctcgatgaggctagcaagggggttatggtgtcgatgtcgtacaccaaataatgcaggttctttttctttaaacaccgtacctgtttgtgaatggtccattgctcttgacaacggcagttgtctttgacaatgctgcaacacgataaaatggtcatgtgatcagcacttattaacgaaggaagagtcagacagtaagagctagtgcgtcagcattgacacgcagcgaggaacatagcagaatgataaaactgatctctagagatcgattaaactcatgttgatcatatttatcgccatgtaaactcctaaacacctttcgaaggagactcgtcaggaagaaacacgtggaggttgttttatgattggcaaggacatctataacacggtaaaatctcgtagatagacacacaaatgaataatagatgtattatgattgattcctcatgtgatgctaggtaaacatttgataataatatatttatttgtcttaatgatttcttctcattatttagccttcatctataaaataaaatttgtaattacattatatttgatattcgaatcgatattcaaacagctggtttgatatggaccaaactttacccttgtgagtcgaaacgtcgttgcatgcttgccagacactgacgtcattgggggcgaccattccacccactggaatggctgaatagactgactggccattgattgattgatttgtgcatgcgacacgggtctttgggagggtactggaaaatgatggggagataacgactaatggtctgttggtttcagtcttatcttaaattatatataatttggattataataaaatagtataaaggtaaaatattaatttgaaaccgtaaataagctaaaataaattagtattgagtagtttatttcagtttatttatcattttcaaaataatattttaccctactagcatttcaccaaaatacagcttatataatttaggtgtcttaagaaaataactgctcttgtagacataagcaagttacacgatgatttaaatttttaatttacaagtgggctaaacagctgaaaattttaattattactctgttccaatttacaactcatttgacttttcaacattaagtttgatcaactcatcttaataaaaaaatataattattattaatttttattgtgatatggtttagcttataatatactttaaatatgttttttgtttttaatttttttttcataaatttttttaataagacgagccggccaatcttggtaaaaaataagtcaaatgaattataaattgagacgaagccagtagtaatgactggatatgttaaaattactaattatcatatatgttaaatttaatggaaaagaataattgtgtacttaagagtggcatttaagggattataattttgtaagaatagtacttaagatattgttattctgtaagaaaagcatttaggtgtcgtttaattcacatatttataatgtaatggataagtgataacgataaatcatgtttgttttagtcaaaacgtaattggataccacactgaaaaatgataccagactattcaaatttgttaccgctggtactcaagtgtaaacaattatcattaacatttacgttacatttcgtgaaccaaacataaccatagtaatttcgttattttatctagtccgtcagagtcaaagtagttgactacttgacggtggcatgaaatgttaagaaattgtatccgggtggtatagaatattttataacatttacgaagacagaataaagtattgaacaaagtcgtagagacataatgagaatttttccttaaggtcccatttgtttcctttcattttgaggaattagaatcttactattggaatagattatttttttagaatgtgacattccaccactttccaaagttatcatataagcctatctcaaattcatggggtgtgagatggaaattgattctatagatttacatgctatttttccgatgtacaacttatagcacactcttctacttgtttcgttataacatgaatgtagtatataactatctttctcatatgatttaagataatatacaaatatattacatatataaatatatgaacttaattagttttgtctaaattataattattaaaatggaattcaattccaacgaaacaaacggggcctaaaagtttgtgtgaactatgtcatcagtcctgcttcctatcaacctgtgggcattatcatctcgagttctcggcacatgtataggtgtacattcgggccgggcccaagcccgaaaaggcccatattgtttgaatttcggtttggtccgatccgtttgaatttcgggtcgtgacgggctcatttcatgcggtccgaaattataaaagaccgaaattcacattagggtccgaaattcattttttggtccgaaattcacatgagagccctaaattcaaaaaaacaaacaaataaaagataagacaaataattttgaacaaaagcaaacttaatatttgtattaaagttaccatagttatgcaatgactacctcgtttacaaatcattttgttagaaggaaaaagagtataatcatctctatacaaagttcgtctcgcccgaggcccccctcaagcaacgaacacaccttcggctcgcccgaggcccagtcttcgccaagaagcaaccttggcccgatcgccgcgccgaccgaccgaatcgcaggagcatttaatgcaaaggtggtctgacacctttatcgtgacgcgcgcccttcagtcaacagagccgaagtgaccgcagtcacttcgccgctcctctgaccggcctgacaaaaggacagtgccgcctgcgccgctccgactgctgcgccactcggcagagtgcggctgacagcagccaagtccggcctcgagcgccataggaagctccgcctcgcccgacccagggctcgaactcgggctcagccccggaagacgacgaactccgcttcgcccgaccccagggctcggactcgggctcagccccggaagacgacgaactccgcatcgcccgaccccagggctcggactcgggctcagccccggaagacgacgaactccgcttcgcccgaccccaggggctcggactcgacctcggccttggaagacagactcgacctcaacctcggaggagcctccacctcgcccaacccagggctcggaccgaccacgtcacaggaggcgccatcattaccctaccccaagctaactcaggctacggggagcaagaccggcgtctcatctggctcgccccggtaaacaagtaatgatggcgccccgcatgctctatgacgacggcgactctcagcccccttacggaagcaaggggacgtcagcaaggactcgatagccccaacagttgtccttccgccaggctccagcgctcctccgacggccacgacaccacacgaaccgggtgccaaaacctctccggctgccacgatggcatgtacttagggcactagctctcctccgctagacacgttaacacactgctacaccccccattgtacacctagatcctttccttacgcctataaaaggaaggttcagggccctcttacagagggttggccgcgcggggaaggacgggacggcgctcgcgtaagccgctcgctccctcccgcgtggacgcttgtaaccccctactgcaagcgcacccgacctgggcgcgggacaaacacgaaggccgcgggtttccccttttacgcctgtctccctccggcttcttccccccttcgcgctccgtctcgcgccgacccatctgggctggggcacgcggcgataatttactcgtcggtccagggaccccccgggttcgaaacgccgacagttggcgcgccaggtaggggcctgctgcgtgttgacgaacaacttcccgtcaagctccagatgggcagtctccagcaacctttccatcccgggacggtgctccgtttcgggagtcttgagttcatgtccctcgacggcagctacgacatgatactccttcccccgccgcgcgacaacgacaatggcgaccgacaacctgcccgccggcggcgaaatcgacgacgtcttccccacgtggtggaagaacaacattcaggcttgtcccgtcccctcccccgccgacggaggaggaggcggggcaaccaaggccaagcaggaggcggcacctcgtcggctgtcgagcgagtcgacggcgccggcgccccaacggggggcacgtcgggcatcgaccttgcgtctgagacgaagacgagcgccatctccccgcaacacgccaaccccaagcaaacggacgacgccagcacgctcgcgaaggacttgctgggcgtcaccctcgtacttgagacgacggtgcagtctgcccctgacgtgacttcgtcaccgctcgtcgaccaagaggtaccgaccgattcccatctcgtgccttttggattcggtctcgacctaccaagcgacttcgcttcggtggacgctctcatagaggcgagtccaaaccctctggggtatcgtatgtggtcaccctgggaccggctgacgaccgtctcgacctacaggccctcgggttccaaggaagatgacgagcccaacttctgttgggatttctccggacttggtaaccccagtgccatgcgggacttcatgactgcatgcgactactgcctttccgactgttccgacggtagccgcagcctcggcgacgaggactgcggcccaagtcgtgaatgtttccacgtcgatctagggggtcccggcgaaggcaaccatcttggtataccggagaacggtgatccccctaggcctgtgcctcgcgttgacatccttcgggagctagctatggtccccgtcccggcggggggtcatgacccacagctcgagaaaatccgcgagatgcaggccaggctcgacgagggagcaggaacacttgagccgttccgccgagacattgggcaggaatgggcgggccaacctccggtcggagaagtgcgtcacctaccccaaggcatccagcaccgcatcgccgacgatgtcagggtaaggccaccaccggtctccagtggggtcagccaaaacctggctgcagcggcaatacttctccgcgcgatgccggagccatctaccaccgaggggcggtgtatccagggagagctcaagaatctcctagaggatgccgcggtccgacgggccgaaagctctgcctcccgaaggcaggggtacccctcggaacatcgcgccgcgacttcccgattcatgcgggaagcctcggtccacaccgggcgcacgcgcaacacagcgcctgcggccccgggtcgcctcggcaacgagcatcatcaccacaaccgtcgagcccacctcgacaagaaggtgcgccgaggctaccaccccaggcgtgggggacgctatgacagcggggaggatcggagttcctcgcctgaaccacccgatccgcaggctttcagccaggccatacgacgggcgccgttcccgacccggttccgaaccccgactactatcacaaagtactcgggggagacgagaccggaactgtggctcgcggactatcggctggcctgccacctgggtggaacggacgatgacaacctcatcatctgcaacctccccctgttcctctccgacaccgctcgagcctggctggagcacctgcctctggggcagatctccaactaggacgacctggtccaagccttcgccggcaacttccagggcacgtacgtgcgccctggaaactcctgggatctccgaagctgccgccagcagccgggagagtctctccgggactacattcggcgattcttgaagcagcgcaccgagctgcccaacgtcaccgactcggatgtcatcggcgcgttcctcgctggcaccacctgccgcgacctggtgagcaagctgggccgcaagacccccaccagggccagcgagctgatggacatcgccaccaagttcgcctctggccaggaggcggttgaggccatcttcggaaggacaagcagccccagggccgcctaccggaagatgtccccgaggcgtaaactcagtgcggcaccaagaagaaaggcaagaagaagtcgcaagcgaaacgcgacgccgccgacgtggaccttgtcgccgccgccgagtacaagaaccctcggaaacctcccggaggtgccaatctctttgacaagatgctcaaggagtcgtgcccctatcatcaggggcccatcaagcacacccttgaggactgcgccatgcttcggtgccactttcacaaggtcgggccacccgcggagggtggcagggctcgcgacgacgataagaaggaagatcacaaggcaggagagttccccgaggtccacgactgctacatgatctacggtgggcgagtggcgaacgcctcggctcggcaccgcaagcaagagcgtcgggaggtctgctcggtaaaggtggcggcgccagcctacctagactggtccgacaagcccatcaccttcaaccaagacgaccattccgaccgtgtgccgagcccggggaattacccgctcgttgtcgaccccgtcatcgtcaacgtcaagctcaccaaggtcctcatggatggaggcagcagcctcaacatcatctacgccgagaccctcgggctcctgcagatcgatctatcctcggtccgggcaggcgctgcgccttttcacgggatcatccccgggaagcgcgtccaacccctcggacaactcgatctacccgtctgctttgggacaccctccaactttcgaagggagaccctcacgttcgaagtggtcgggtttcgaggaacctaccacacagtgctggggaggccatgctacgccaagttcatggtcgtccccaactacacctacctcaagctcaagatgtcgggccccaacggggtcatcatcgtcggccccacgtaccgacacgcgtacgaatgcgacgtggagtgcgtggagtacgtcgaggccctcgtcgaatccgaggccctcatcgccgacctggagagcctctctaagaaggcgccagacgtgaagcgccacgccggcaacttcgagccagcggagacggttaaatccgtctctctcgaccccagcaacgacgcctccaagcagatccggatcgactctgagctcgatcccaaataagaagcagtgctcgtcgactttctccgcgcaaacgctgacgtcttcgcgtggagtccctcggacatgtccggcataccgagggatgtcgccgagcactcgctggatatccgagctggagcctgacccgtgaagcagtctctgcgccaattcgacgaagaaaagcgcagagccataggcgaggagatccacaagctaatggcggcagggttcatcaaagaggtattccatcccgaatggcttgccaaccctgtgcttgtgagaaagaaaggagggaaatggcggatgtgtgtagactacactagtctaaacaaagcatgtccgaaagttccctaccctctgcctcgcatcgatcaaatcgtggattccactgctgggtgcgaaaccctgtctttcctcgatgcctactcagggtatcaccaaatcaggatgaaagagtccgaccaactcgcgacttctttcatcacacctttcggcatgtactgctatattaccatgtcgttcggtttgaggaatgcgggtgcgacataccaaaggtgcatgaaccacgtgttcggcgaacacattggccaaacggtcgaggcctacgtcgacgacatcgtagtcaagacgaggaaagcctccggcctcctttccgaccttggagcgatattccgatgtctcaaggcgaaaggcgtaaaactcaatcccgagaagtgtgtcttcggggtcccccgaggcatgctcttggggttcatcgtctccgagcggggcatcgaggccaacctggagaagatcgcggccatcagcagcatggggcccatcaaggacttgaaaggcgtacagagggtcacgggatgccttgcggctctgagccgtttcatttcgcgcctcggcgaaagaggcctgcctctgtaccgcctcttaaggaaggccgagtgcttcacttggacccctgaggccgaggaagccctcgggaacctgaaggcgctcctcacgaacgcgcccaccttggtgccccccgctgccggagaagccctcttgatctacgtcgccgctaccactcaggtggttagcgccgcgattgtggttgagagacgagaagaggggcatgcattgcccgtccagaggccagtctacctcatcagtgaggtactgtccgagaccaagatccgctacccacaaattcagaagctgttgtacgcgatgatcctaacgcagcggaagttgcgacactactttgagtctcatccggtaactgtggtgtcatccttccccctgggggagatcatccagtgccgagaggcctcgggcagaattgcaaagtgggcggtggaaatcatgggcgaaacgatctcgttcgcccctcggaaggccatcaagtcccaggtcttggcggactttgtggctgaatgggtcgacacccagctcccaacagctccgatccaaccggaactctggaccatgtttttcgacgggtcgctgatgaagacaggagcaggcgcaggcctgctcttcatctcgcccatcgggaagcacctacgctacgtgctacgcctccatttcccggcgtccaacaatgtggccgagtacgaggctctggtcaacgagttgcgcatcgccatcgagctaggggtccgacgcctcgacgctcgcggtgactcgcagctcgtcatcgaccaagtcatgaagaactcccactgccgcgacccgaagatggaagcctactgcgatgaggttcggcgcctggaagacaagttctacgggctcgagctcaaccacatcgcccgacgctacaacgagactgcagacgagctggctaaaatagcctcggggcgaacaacggttcccccagacgtcttctcccgagacctgcctcaaccctccgtcaagaccgacgacacacccgagcccgagaaggcctcggcccagcctgaggcaccctcggctcagtctgaggcaccctcggctcggcccgaggcaccctcggctcagcccaaggcaccctcggctcggcccgaggtaccctcggcccccgagggtgaggcactgcgcgtcgaggaggagcggagctggcccatgcctaatcgaaactagcagaccccgtacctgcaatatctccaccgaggagagctacccctcgaccgagccaaagctcggcggttggcgcggcgcgccaagtcgttcgtcttgctgggagacgggaaggagctctaccaccgcagcccctcaggcatcctccagcgatgcatttccatcgccgaaggccaggagctcttacaagagatacacttgggggcttgcggccatcacgcagcacctcgagcccttgttggaaacgccttccgacaaggcttctactggccgaccgcggtggccgacgccactagaattgtccgcacctgtcaagggtgtcaattctatgcaaggcagacccacctgcccgctcaggctctgcagaccatacccatcacctggtcgtttgctgtgtggggtctagacctcgtcgaccccttacagaaggcacccgggggctacacgcacctgttggtcgccatcgataaattctccaagtggatcgaggtccgacccctaaatagcatcaggtccgaacaggcggtggcgttcttcaccaacatcatccatcactttggggtcccgaactccatcatcaccgacaacggcatccagttcaccggcagaaagttcctggacttctgcgaggaccaccacatccgggtggactgggccgccgtggctcaccctatgacgaatgggcaagtagagcgtgccaacggcatgatcctgcaaggactcaagccgcggatctacaacgacctcaacaagttcggcaagcgatggatgaaggagctcccctcggtggtctggagtttgaggacaatgtcgagccgagccacgggcttcacaccgttctttctagtctatggggccgaggccatcttgcccacagacttagaatacggttccccgaggacgagggcctacggcgaccaaagcaatcaatctaatcgagaagactcactggaccaactggaagaggctcgggacatggccttactacactcggcgcggtaccagtagtccctgcaacgctaccacgcccgaggggttcggtcccgagacctccaggtgggcgacctggtgcttcggctgtgacaagacgcccgagggcagcacaagctcacgcctccctgggaagggccgttcgtcgtcgccaaggttctgaagcccggaacgtacaaggtagccaacagtcaaggcgaggtctacaacaacgcttggaacatccgacagctacgtcgcgtctacccttaagatgctttcaagtcgttcatacacctcggtcacatacaaagtctagtcatcaaggaagggtcagccttgcctcggcaaagcccgaccctccctcgggggctaaaaggggggaaccccctctgcgtcaaaattttcctcggaaaaagatcttttctgccagaatgtctttcgtgcttttcaactactttgaaagtggatcctgaaaacgacggagtacacgtaagtagtcaaggctgaccgagccgagggactcctacgcctccgggatacggatacctcactcatcaccttctgcgataagtaactcacgctcggataagtgattccgcggaccgaacaagtcttcacgctcgaaaactcctctgccgaaacgattttttgggccttctcgactacatcggtgacagaaccctatggacgagtaagagtgcacgtaagcggcaaggccgaccgagccgagggattcctacgcctccgggatacggatacctcactcgccaccttccgcgaaaagtaactctcgctcggacaagcaattctgttaccgacaaataagtccagatactcgagacaacaggaaaaggaacacagctttacaacacgacgacagtatgtttgggcctcggccgccgcagaaaacatacgcacactacaagataacccgatcctgtaggctcggatcttgacagttgaagggagcagcagcaccctcggcgtcaactacaccttcggcgaggtccggcctagcctcggacggcgacacggtcggaggacggcgctgcagaagaccatcgactacgcgtgcggctccggggcggactgcaactccatccatgagaccggggcgtgctacaaccccaacaccgtcccggcgcactgctcctgggccgccaacagctactaccagaacaacaaggccaagggcgccacctgcgacttcgccggcaccgccaccctcaccaccagcgacccgagtaagtggaaccaacgaacgatcatgcatgccgtgtagcattgttaagcttcaaggaatcgggttctgtacagggtaattaattttggctatcggtgtagcactgtagcctcgcctaataactaataataggaagaagaagaaaaaaaacaccaactttctgagcgaataactgtaaaataagatttgcaaagtgcaaagctgtttgcggtatatatgctttattattctcgaccctaaaagtaaaaccctatcatagtgtctactgggcagacattggcatcaaagtgcgtccaattttccccccgatttttccaaaagggaaagtaaactgtaacgcggtcttttgttttgttttatgactccaaactccaaagccagattccaatgtcttctatggtgtgtggtgtctgtgttctgctgcttccatgctcttcagtcttgtgacactgtccatttttaccacccattcagagtcctacctgtagtaccttatatgacctttgtgttccaaactttcaggctcttcgggctgctcttaccccaccaccagtgcaaggtacgtggcgagcttaaattaactgtgcaccatgatccatgtagttcatgtttcaaacctgcgcgctttgggaactggtacacccccaaggaagttgagcatcatgttgcgccaccagatctttgggccgggatgcagtttgttcggcggattttttgtacttaagaatcgcggaacattcagcatgtgtgtcgtgtatcagtattaccagccacaacactaacagcactgccttgtttacacagcgccgcgggaaccgtgaccccgaccaccggcggca

SEQ ID NO: 197 - DNA, 18124 bp, Zea mays
  Intron number 2 from transcript GRMZM2G528190_T01 (locus G RMZM2G528190) derived from phytozome v7.0 (chr-ID 2; pos 1 79166623 to 179184746 reverse strand)
gttctgatctaaggtgagggatcaaattttttttggtaatgctcttgctctgatcgaccagagttttttcttctgtttggtctattacacacgaaaatgttggttgtgaacaacattcaacagatattcattcagtctaaaatcttgttctttcgttggatatacgatagcctgaattcagtattattgaggcaagaagcgtcttttccctaccctttctactattgatgtttagtgtgatgatgggcatatattagtacataaatctaaaaactactaaactgatcgcttgtgctatgttatcaatgtcggtgttttggatccgaccgcacacccggggttgcccctcaaggtgttttaggagtaggacggtgtcgccgactgtagctaaatggttcatgccagatgcacgaggagcaatagacagtgtttacaggttcgggccgctttgagatgcgtaacaccctacgtcctggcgagtatgctttatgtaatgggttacaagggagctctctaaagctagaacgtagagagttggggtggatggctgagtagtgagatcgatcgtcttgaaggggtgccccctaggccttatatattcgaccgtggggcgatacatgcggatgagataacaaactgcacctaagagatagtgaactgattgagtctatcttcctatagttctaccgacttatcttcgcctagttccgttgtacggggctccggcgcgggaaagtcgaatcttctgttgtggttgcttgctcaacgttgtggggccgtccgggcttgcaccgatccggccttatgtcaatctgctttactgattgtttctccccaggcccatgaaggagtgtcacacccgggtttcggtgcaccaagacccgggcgcaaacataatcaccaggtgtgctgggaccaagtctcacacatatgatgaatcatggcacaagatcgaatgtcacatctttactatataataggagttctatacaaaataaataattacattataaggagacaacggtccagcaacacaaagttgactgggagacgacgacctaaatctctcacgaacacatcacagcatccttcatgcgcctcatcctgcggtacctgttcttgacctgtgggggggtgtgagacagcaagagtgagctcacatacgttcatcgctcaacaagttgtggggaataatgtgcatgaactcgccaaagatgggagctcacgtgaagtgtaaggcttactaaagaggatggttagagctgagcattgcttttaaagttggtcaaaattttattagcaattactaagtataagtaaataccaacccaattaaatagtagaacagaagtaacaacatcacctgcgatgcaatgcatatgacaaattgaatttaacttccataaattaatcatgtgagggtccgagctgctcatgaccgtgagcacggctagtataccagttttacactctgcagaggttgcacatctttacccacaagtcatgttacccatctgccaagggatcgcgacttcccatacacctctaccgaggaggcgaggcagggtaacactacgaggcctttacaaagttccactagcttcagaaaacccgctacagtttataggaagctccaatgcagggttcttgcctgaccgccaacgcagcaaaatcaaccaaggacctccctacactgaccactcccctactgcccttgcccctttcgggtaaggtagtcctccactagctttcctaattaatcagccaagggcgtccataaacccttgtggtagcactgttttcccgggtggtcgctccatgttccaattaacataatgatcttatcatgaacagtgatactaaacagataataaaagtgtgatcatgaataatgtatcttcatacccaaaaccacataaagcactagcaagtactaccaaaaaagttcagtggtaaacaaggtataaagataatcaaactagggtaacctattgggtcccatcaaaattaacctatgcagatcattatgattaattagaacatgagtgggtaaaaagaagtgatcaagggcacaacttgcctggggcttgagatttcaggtaccaacttgctcttcggatgacacgtgtcctcactgctagtcgtagcaatacaaacaaacatggcataggcaaaaattaacattacatcaaacataagtacaaactgaataataatgatctatgcgtcgtaacgagatcgtgggaacaagaatcgctaaattcggagttacggttatcaagttatgattttataaagatttaagtgttggacacaaaagaaattgagtgcataaattatacctttgtttcataataaaataaggttgccagatgataaacaatattattatgaatttatagcaacagtaataaattaattcggacctaagatgaattaaatatgaattatacaagtttctggaattatttttaaactaaaaatcaatttccctaatcatttctctatttttatctctctggactgcgcgtcaaattccagaaagatcaggggttatttagaaaaacattcccaagactcatgattcccccattgtggacggcgggttctaatctaaaggagggtggggtttcttttgcaaaatgacggcgggttctaatataaagcaatctaggtcgtttgatctgaaatctaaggccacgattaaatctgccctaatataaactggtgagctatggagaccattggatcaaagtcgaagggcccagatttggtacaacaagtgccaaccgcaccctcatctaagccctccactacgaatccaacggtcagggcagcccctacatctcagtcgcttaccccaaatcggaccgccaacgcttatcttcaacctcccaatcagagaacgcaccacaccttccaatttggatcggccggccagggacccttcttccccccgacgtcgacccccaccccacggtgcgaacacggcagtactccaagagagttctccgcagaacgccaaaggacgccgagctagcgcagccccaaacaacagggaaccgacgagttaagtttggtggccgagggcggctatactgtgcccggcggcgcccagcagcaaggaaaaatcggacacgtcaacgctggtgccgtgtacgtacagtaatgcccgccgagaggccctaccactagttcaagggttcatacctcgagttcgaacgagtcagcgattcatcgatgcaacagacccggtcacgacgctatcttgccgtagagttccgagcacgtaccgaagacctcgctcagtcccccggcgacttgcttcttctccctgcgtgtacacggatgcaatggaccttccaagccgatacccgaggtcggatcgacgacgtaggcaggggtggccatagcgacggtggcgaccaccgacgtgtcatctccctttctttcttccctctcagcggccatggcggtcgtgccactcggttcgtcaatggtggccaagggactagggcgacagggatttatactcctgatgaagaaaatcccgcggacatatcgcgatttgaacgaacggaactcgacgcagggaggggatttcgcccgccaggtttgcgttctgttggggaggaaacaactgtcaagtgggtcccggatggcagcgagatgagtgcgtcgcgggtccggcttcttgagggactgacgaatgggcccacgccacagtgaccgatgtgcgcaggtgatcgggcggtacgcgccttggctgaccggtggggccggttggtcattgacccagtgggcaggccattcggaaagaagacagcatgggccaaaataggtcgccatggcccatttaggttaggtttgtttttctccttttctttttctcattttctgtttcattttccatccttatttgtaaatttcaaatttttgaattcacatttgttggcacatctgtactgagactgactatttaatttgatcataccaaaatgtggtgaagttatttatttataaatctattttgtattgtataatatttctttccttccttctctattttaaatcctaatttcactgtgaggttcaatccacatctcaaatcattattatatttttattaaatttattgttactattatttaatgcacaaacaaactccaacatgatgcataattctatatctgtttattttgttatttggctagcttaattccttttacttgagcattcaaaagcatgagaaatccaaaaaggttttaaaaatctctaaagcacaatcttaaatttatttatttattttatttcattattatcatttttttctaccaattttgggctttacaaggagtgaccttacgatctattgggcccttgggcctttcgtgaggtcttttatccttccagtggacccaggggatatctgtcccccacaagcccccgatctttgggttgattttgagataatcgacccaaagatcctaggtccagcttgcggtctttgtttatgacaagaaatgctttccgggcagtttggtaaaaacgattgcttactgtctccttctgctttgatcactcgaaaactggagctttgtctcatactcatgccttggagatcggcatttcgtattgtaggaccctgaacttcattgggtgcaccggaggtgcacccaatgggtgtagcccccgagcttcgagtggattttggaaaataatccactcgaaggtcttcatcagaaatcatttttattttccacttgcactttggttggaggtcagccttgtctttaatcttgccttatgccttagaagttggcattgtcttgacttgaaatggtgattcatggggtgcaccgaaggtgtacccaatgggtgtagcccccgagctttgagtggatttttgaaaataacccactcgaaggtcttcatttcgtgtctttttgctgagagtcatcttttcttttttcgaatgccttagaagtcagcattatgtcatcgatattatgctttagaggtcagcatgtatctttgtcttttgcggccgagttcgtgatccgcccatatcttgctaggtagtgcaatttatttgctctgcgactgattggacgtttgatggacgttccctagctagtcttcacgtcgcttctgtcggtcagattttgtacttcaccggctatatttggctttccttttatccttactgatatctcatttttgtcttgaggtattcattgcatgccctgcacggatgtgatagttttgaaaaatatactgataattcctgggcgtccccccaatgggtgtgggcaagggacggcttggtacgctgagtgttttagccggctgcttctgagtagtaatgtgatgtgatggcaagtgtaatcatatcgcccgtgcagttgattggagtcccaatgggtgttgcgttgcgtgaaacggcgtcagccgcctgacgtatcttcagacgggttgttcagtatattgaatattttgcgactgttcagtgaccgtggtaggaggtgagcggttgccttcttcttctataaatagtgcatttgcccctctggttttttcacatctcttgctgttctccgctgcttgctttcttcctctcctttcatttccaccatgggcaagagcaacaaacgcaagcgcgagccgactcctccatcggaggacttcggcgactcggaatactcggaggaggagttctcctccgagtccgaggggtctccggctcccgtctctcccccggcgttgtctgacaattcagacgactcccaggggcttgccgcggaggtctggacttatatctgggccgtcgagcgctccgggctcgagggctcggatgagtcggagtactcctcggacgaggaggactcgtccgaggagggcggtggcggcgatggcggagacgacgacgacgacggaggcgacggtgacgacagcgatgatgacggtgacggcggcagcagcaggggcagcaccggcggcggcagcaacaagggcagcaacaaggccagtggctagatgtcactggtctttagatgttagtataggttagaagtagtataatgaaataatgtagtagtatttagtagtgtagagtagtatagtgtagcgtagtagtagttgtagtagcagtagggaagtatcaactcataatgagttgatttgtaagtactgtaacttccgttaatgaagaatgatttcgtttcctcctgtgtcgattattttgcttcgtagtcagttgatctctgtcgtgatatttattgtccgtgatgttctctatctgttatgtttgtggcataacttagagttcttgaatcattcctctgtttgccttatttgcgaagttgattcctctggaatagtaactgagtaactcgggcgtcatatcatcgcttttaggggtggtggccgagctatcattgtcaacatctacgcttttgagatagcgtccgggtgatgacgaaaccacgccagcgtcggaatgattgatgatcacgtcggcgctcttagaggtaacagccgagtgacttatgacgacgttggcgttttagaggtaactaccaagcgactgaaaacgacgtcggcgttttagaggtaactgccgagcgacttaagacgacgtcagcgttttagagataactgccgagcgactggtggtaacgtcggtgttttagaaataacagccgagttagaacgggctgcgtcggccactttgaggataatagccgagtgatgatgtggcataccggtgttttagaagtaaccgccgggtgatgacatggcacactggtgttttagaagtaaccgccgggtgctgactgggcgctttttggaaacggtatctgactcgggaatatcccataagtactgcgctttcagccgcctctgctttccgcgccctagttcttgctttcctgcctccagatcctctctgcaattcggctcctgatctgttcgccagtggagttgagatggcgcccaagcgaaaggcctcgagttcatccgctgcagtgttcttggcggatttgccacggggtcactgttctgacagaggatacccacgaatccgtgatttatgttccttttcttcttcgcggtctcgctcttcctatttctccctttttccgcggcctccttgatttctatcgtcttaatttgacccatctgaatcccaattccattctgcaaatttccatttacgttcatttatgcgaagcttttcttggcgtcctgccacattttggactgtggaagtacctgtatcactgtcgccctgggaaggccgggggcagcatcagctggttgggggtgctagtttggagatgcgccgtgggaggaagactgactatcttgaaatccctctcaaggatagtatcaagggatggcgcttggagtggtttattgttgagaaccacggaagttctctccccccacggtcggggagacagccggatgttcgcactccgagttggaccgagtcccccacggatcaggaggtagctgaggcaggggctttgctagctgaagttggactgctgaaggagaggggtctgactgcagaggctgtggttgctgattttgtcttcaagaacattcagtcgttgaaggacaaggcatatccggcttatctgtaccgaggtctagctgactcaactcgggtcaccaacagaagaattcccgctgtagatttggtgaaccgacttgagatgattcttagaggcaaggtatcaaatgttggtgccccagtggcatactcagcctggaacctgcccccttccaaggccttcactctttttgtgtcgaatccacccgtcgctgatggcggtttgggccttagagtgcgaccctctgccgaggaagttagcgctttggttgcctcgctcggggaaattcctgatgatgaacgacaggtccactttgaggtgcctttgaatcctagtgatgcagagataatgctatgcttgatatgctggctgaggactcttctgatgctgctcctgcagggacatcggtggtggcgcctctcccagaagctggtacaaccttggatattcagagacctgttagtgttcgcccgagacgcccttgccgagccaatcaacttgattctcctgctgacaagcagaaaaagaaaaagagacatcttcggcgagtatctagtttggatcgggacgttggtccttcggttcctactgctgaggaagtgcctgtgcctgaatttactgaccctgaccccaatgggtgtgctccatctgctgctgatcccaatgagggtgctccatctgctgctgatcccaatgggtgtgttgtttgtgttgctgatgaaaacgacggggaggaagaagatgaggtccctttgactcggaagaacagtcggcagtatgtcgccagtggggaaagtagtggagttccttctcctgctctgtctgccctcagtggtctacaagaattgtccctggcaaactttgatcagactcttgaagatatggttctagaggatctgttatcagagccagcggatgatggtgcgacggatgtttgtgctgatgtgctcgacgcccgggtttgggtcatcccgggcagcgtcccgcgcctcatcgaccttagagcgcggtcttgagggtcatgaaattgacttggatcgtcttgttcccatggaagtaactgagggaccctcagccttagaggcagctactgcagagaacttggtcctcaaggatggtgttgacacttacccagcccccgagggtgttgccggggatgattcggctcgggtgggaagcgcaagccactgcccagcccccgagggtactgccggagatgatccggctcaagtgggtagcgcaaactatggcccagcccccgagggtgtccgagcggggtctccctcttgtacttccatggatgttcacgcgggatctcctccacactctggttgcatggtggtagcccaagctttgggccagggagtcgctttagaggctagcgttcccgccgaccaagttttgggctctgttgatggcactgagttggttcctgctggttcattgcgagctgctttgggtggcgaccctatgccaagtcatcaattgatctctcacgatttgggagtcccttcgttcttctcccacctccaggtactatgatatattctagcctgacttttacaccgtacgaactactgtcattacactcatctgttctccatatcaggcattggtggacgggatggctaatcagctgaggttgcaaggttcttctgttccagaagaagcttcgtctctggcacgttggaatccggtgttgcttcaacatcgtgtctctgacttggaggcgacaaatgctggttagtgctttttttgctttccttcgtatgccttattgaactactttacactttgaccctttttgcttgattgtctctcgccagatatggctcggcagatttccgctcttgaagaaaaacattctgaaggtcaggccgaactggtccagcggtgttctgattttgagggaaagtattctcaaagccagactgagctggcccaggtctctgctgctctaaatgactctaacacgctgaactctactcttcgcgctcagcttgattctgaaagggtgacttatgaaactgtgccttgtattgctgtgtccttattgcttgcttgatgtttgaaggagttgattcttgtttgcaggaagaaaaacgtgcccttgttgcttctcgcgataatcttgacagactatatcgtgattctagcaactcgttgaccatcctggataggagtcatcgcttcaccatggaggagttagacaaccatcgctgtaagctgcaggaatccacggatgacatgatccgtctccggcagttgatatcggctaaggatgctgctatcaaagaactccgtggttccaagaagtccatcgcccaggagctagagaccgctcagttggctgtcaaagttgttgaagaaacttccattactctgagggcccagcgcgacagagccatggataaagccattcgcgtggggcggatcttgatgaggagacccggcgtggttgttcctgatgatataagggctgacgtgaacgctgctcctgattcctcaagtcgcccttcttcgtcagttgctcctgagaaagatattgcaaaatagagaaatatttgcgtgctttgagcgcgtggttatcatgatcggatattttgttagaggacaccagttcggcatttgaatgatattgttactctcctattgttttagaattcggcagtacgtaaatttgctggagtaaaatgttgtgtgatgattttgaaacttgtttacgggatatagaggtcacccctatatatgagtaatcgtaagcatgtgaaatcgccttaagtcgttgctgacttaaatcgattgcctttgttaatagggcatagtggtcatcccaagttaagtaagcgtgagcatgttgcaccgtcttaagtcgttgccgacttaagacgattgctccgttagctgggtatagtggtcaccccgaattaagtaagcgtgagcatgttgcaccgtcttaagtcgttgctgacttaagccgattgctccgttagcagggcatagtggtcaccccgagttaagtaagcgtgagcatgttgcaccgtcttaagtcgttgccgacttaagtcgattgctccgttagctgggtatagtggtcaccccgaattaagtaagcgcgagcatgttgcaccgtcttaagtcattgccgacttaagccgaatgctccgttaacagggcatagtggtcaccccgagttaagtaatcgcgagcatgttgcaacgtcttaagtcgttgccgacttaagccgattgctccgttagcagggcatagtggtcaccccgagttaagtaagcgcgagcatgttgcaccgtcttaagtcgttgccgacttaagccgattgctccgttagcagggcatagtggtcaccccgagttaagtaagcgcgagcatgttgcaccgtcttaagtcgttgccgacttaagccgattgctccgttagcagggcatagtggtcaccctgaattaagtaagcgcgagcatgttgcaccgtcttaagtcgttgccgacttaagctgattgctccgttagcagggcatagtggtcaccccgagttaaataagaatgtcggtcaatcatgaacgaactgagtattcttgaagccccttttttattgatgacatatttcccattttacggagtacattatcgtcccgatagcttttgaaatacagctaggggtaaaacttcctgaggtgttctatattccaggagttcccaatttctgtgccgtccatttgagtgagacgatatgatcccggccgagtgacttctactactatgaacggtccttcccatgaaggtgacaacttgtgtcgtccctcccccgttagaattcggcggaggatgagatcttccactgaaaaggatcgttgtcgcacggccttgtcgtgatagcgtcttagagtctgctggtatcgtgctgattgaattactgcattcagccgttcttcttcgagtacatcaatgtcctccagcctagtagcttcggcttctgctatgctttcgaagatcaaccttggcgccccaaacttgagatcagcgggtaataccgcctctgacccatagaccatgaagaaaggagtgtttccatgcagagctcgactaggttgggttcttaggctccaaacgacgtagggcaattcccttatccactttcctgcaaacttttcattcttatcgaagacctttttcctgagtgcctccaatatcatcctgttagctcgttcaacctgcccgttggctcttgggtgtgctactgaagcatacttgatttaaatgcttttttgctcgcaaatcgaagaactctgaacttgtgaagtttgatcctaggtcagttatgatattgttcggtatcctgaacctaaatattatgtcttgtatgaattccacagccttagctgaggttaaagaagcaatgggtttgaactctatccatttagtgaatttgtcgattgctaccagtacatgagtgtatcctccttgagctttcttgaaaggtccaataatatccagtccccagcatgcgaagggccaagttactggtatggtctgcagttgctgtgctggtagatgttgttgctttgacaagtactggcaagctttgcacctctgaactaactcggctgcgtcacttttcgctgttggccaatagaatcctgacctgaagaccttcccaactagcgtcttggatgctgcgtgtattccacattgcccagcatggacctcatctagaattcgcttcctagtagatgagagaatgcacttcatgaggacgcctgatgcaccccttctgtataatgtctccccaatgagtgtgtagtgagctgactgtctagcgatgcgctcggctgcatttttgttatctggttcctcttcattctttatatatctgatgatcggccttctccagtcatcagagtctgactctggttcattcacgatattacactcttctgcctgatccattgagatgcttggttgtggtatttcttgtacaaagactccaggtgggacctgagttcgactggaccctagcttggacagtacatcggctgctgtgtttcgatctctttctacgtgatgaaattccagaccttcaaatttatcttcttgttttcggacggcagtgcagtactttcccattgaatcgcttgaacaatctcattctttgtttatctggcttatgactaccaaagaatctccgtacaccatcagtctcttgatgcctagtgatatagcaatgttcagtccatgaattagggcttcatactcggctacgttgttggaggctggaaatagcaactggagggcatatttgaggtgctcgcctccaggtgcggtgaagagaattcccgcgcctgctccctgcagcctcagcgagccatcaaaatacattcgccatacttctgcagtttctgggttatctggtacttgttgttgagtccattctgatacgaagtcaaccagcgcttgagttttgatggcagtgcgaggtcgaaattcgatgtcatgagatcccagttcacaggcccacttggctattcgaccaatggcttccttgttgtgaagaatatcccctatcggaaaaccagtgactactatgactttgtggtcatcaaagtagtgacgtagcttgcgggcagttagaagtactgcatataatagcttctgaacttgaggatactttttctttgagggacccagaacttcactgatgaaataaacaggatgttgcactgggtaggtatgtccttcttcggcttgctcgactaccaacgcggtgctcaccacgtgagtcgtgcaagagatatacagcagcaagtcttcaactggttgagttgacgtggctcgccgcagcggcttcagcaccggtggtgttgtcaagaatttttttagtgcctctagggcttcctgtgcttctggagtccactgaaacttatccactttcttgagcagcttgtaaaatggtaaacctttttctcccagcctggatatgaatctgctcagggctgccatacatccggtaagttgctgaactttcttttgtgatcgtggtgcctccattttcatgatagcttcaatcttatccggattagcttcaattccccaatggctgacaataaacccgagtagctttcctgctggtaccccaaagacacatttttcgggattaagcttccatcgatatcgccgtagactgttgaaaaccagttgtaagtcttcgatgaagttttctgagttctctgttttgattaccacatcatctacataggcttccacacgcttgccccagtgatcggctaagcatgtttgaatggctctctgataagtcgctccagcgtttttgaggccaaacggcatggaggtatagcagaaagcaccgaacggagtgatgaacgctgtttttcctcgtcttcctttgccaagctaatctgatgatatccggaatagcagtccaggaaagacagcacagaacacccaacggtggagtctaccacctgatctatcctagggagcccaaagggatcctttggacaatgtttgttgaggttcgtatagtcgatgcacatgcgccaatccactttattctttttgagtacaagaacagggttggctaaccactcgggatgtaacacctctctaataaacccagccacgaccaagcgagccagctcagcgcgaatggcctctctcttgtcgggcgtgaagcgacgtagtttttgccggatcggcctcgcctggggataaaccttcagtttgtgctcggccagttctctcgggactcccggcatatccgcaggttgccacgcgaatacgtctcggttatcttgcagaaaatggacgagcgcgccttcctatttatcgtccaggctggagctgatgatggcagtcttgcgttcatcagcgaaccccaggttgatccttttggtttcttcagtcggccgcatggaggtcacaacttgagcttcatttgccggtggcgcaaggtcttcctcaggcttagagtttgccggcgttgaagaagttgccgacggtttggtggtaagggccgcctggatggccactcggaaacattctgcggtgccttggaagtcagcgcgcacagttatgattccttgtggtcctggcatcttcaatatcatgtacgtgtaatgcggaatggccatgaattttgccaatcccggcctcccgataatggcgttgtacccgtagtcgaagttcgccacttcgaacctcaggaactcggttctgtagttcttcggagttccgaaggtgacgggcatgtagatgtggcccaatgggtattccccttcagtcggcacaatgccgaagaaaggagtatctgactcgtggagctctttgaggtgaactcccaagccttggagtgttcgggggaaggtgacgttgatgctgctccccccgtccactaacaccttcttcaccctgctctctcggatcaccggatcgacgaggagcgggtatttgcctgggtggtcgaagttgagccattgatctgcccgagtgaaggtgatcgggtgctccgaccatcggtacgaagcgggaggaccggtggtcgccaccaatatctggcgatcgttgagcttttgttgtcttctgttctcctgcgatccgtgtccgccgaagatgacgttgacctccctgtcaacgcgcgggaaggctcctcctcctccctcctcctgctgctggggttgtcgtggttcttctggtcctccccgcggcggaggaggaggtagaggttggaagggtcggccgtgtccgacggagtgcttgaagtccctgcagttccgaagggtgtggcgcatgtccttgtggtacgggcactaggcgtcgaggatgtcgtccagcgtgcgctcgcctccgcgaggtcctccccgggcgcgagaggcaggtggtccggaagcgtgcacttcttcgcgaggtctcttctcccagcgtttgtcgggttgctggttcgcgtcacgtcgtggtgctgccggtgcggtctcttctgccgatgaggtcctgagctcgctcgtcggcggtgatgtagaggtcggcttcccggaacagctgctcggaggtagtcggcgccttctgcaatatggctcggacgaaggccgagccattggatcctctgtagaagtcctcgatcacgggcgcctctgtgacctcggggatacgatttctcatggtctggaaccttttgaggtacgaccggagagtttcgtcaccctggcgcttgatggatttgaggtcccatggttgcgctggtttgtcggagagggactgaaagttggcagtgaagcgtcgactgaagacgctccagtcattgatgcagtgtcggggtagatgtcgcagccattgtagtgcgtcttgcccgaggacaatgggtaagtatgcggtcatcacatcctcggacgctccggcggctcgagcggcggtggtgtagacaaccagccagccccctggatcctgcttaggttcatatttgtcgacattggataccttgaagttagggggccattgaatggccctaaggcatggagtaagggcagacactccacacgtgtcttcctgtcgtcggggatgatgtctgtcttggggaggggagtagttgttgtggttcctcgaccgtccccgggtagtaccgccagtcgaggccgtcgctgactcggttctggtggcctgactctgagctgggatgccatgatccctgtcgtactcttcccggcggtggatctcgttctcatgtcgtcgttcacgcgaagcattgatggagcttcgcgtgtcccggcgactattgatggcatgtcgcagatcgtttggcgggtgagcaagaggtagaagatggttggctgcctgggtaaacagtcgccgatagccctcggcgtcaggagtccgagggagtccgtcagctatccgagctagtacccctccaactacactcggcgtgttcatggctcgggtgaagtcgggattcaggttgcgcccaaagagtggattttcccgacgttgccttacatcatgctcggcttgttcctgagttcgtcggcgatcacgccgtcgggagttccttcattctctgaagacgcgttcctccggagtttctcctatctctgagacctcgtctcgcgagacaggctgctccggatcccgctctccggcctcgtgatgtcgtcggatgtttcggcgccgatttctccgtcgacgggactcccgctgaggtggttcttctcccggcgcggtcggctcatcgtcggagacggggggcaactccactctctcgatgaaaagaacgtcggggtagaatggtgcggctgtcgtggcgatcttctttccgttctcctttgagggcggaggcacggaaagaacgacttgcttcctctcggtctctttcttccttgcgatttgtgtccattctttcgtcggggaagtagacagtggagttctccgggtcagcgggccctcggcccctagcttgctgaaggcgatattttttcggagcgctggaggctgcccctttttctttccttactccgatattctcggagtttgttggaggagacttcttctttggcggatctgcaatgcgatgtagagttccctcttcatctgctacggatgagattgttccaaagcagaatacagatccgggacggagggtgatcttgcggtggaaggtgacggccattgagctagcttagatcgacgacacaccccctacctggcgcgccagctgccggtgttttgggtctgaccgcacacccggggttgcccctcaaggtgttttaggagtaggacggtgtcgtcgactgtagctaaatggttcgtgctagatgcacgaggagcaatagacagtgtttacaggttcgggccgctttgagatgcgtaacaccctacgtcctggcgagtatgctttatgtaatgggttacaagggagctctctaaagctagaacgtagagagttggggtggatggctgagtagtgagatcgatcgtcttgaaggggtgccccctaggccttatatattcgaccgtggggcgatacatgcggatgagataacaaactgcacctaagagatagtgaactgattgagtctatcttcctatagttctgccgacttatcttcgcctagttccgttgtacggggctccggcgcgggaaagtcggatcttctgttgtggttgcttgctcaacgttgtggggtcatccgggcttgcattgatccggccttatgtcaatctgctttactgattgttcctccccaggcccatgaaggagtgaccttacgatctattgggcccttgggcctttcatgaggtcttttatccttccagtggacccgggggatatctgtcccccacaatcaactaataggacaatcagatattatcaatagacaatgttaccatatatattggttttttgtaccagaagtaatcatcaagtgctgttgcgagtgcagcccctgcaaggccaatgttgagcagtactgcaacaag

SEQ ID NO: 198 - DNA, 16108 bp, Zea mays
  Intron number 4 from transcript GRMZM2G018447_T02 (locus G RMZM2G018447) derived from phytozome v7.0 (chr-ID 3; pos 9 3188176 to 93204283 reverse strand)
tccacacatctacagcaacgggcacatctgcttaggtaaaactgctctctaggcatcttgtctgatggggaacatttgtgtgtgactcccatgtttgataatgcttttcagtagctccatggctgcggcccaatgggaatgttctttgcgtgttgtaataatgttccatctagctgtcaggtgttactattctaattgttacaagaaagttgccaacttaggccctgtttgggacagctccagctccagaaaatttgttggagttagtggagcagatcattaggtgctccagaaaatcatggagctggagctgcaagtctttagaagatatttagataaatcattttgtttattatttagattaaaatacttttaaaattatttaaattgatattataaactataggtccacattggagctgaaacctagaactatcccaaacacccatttaagtgcttttatagtgctatatagtaggctcactactgagatgcccaaaaatacatttgcttttgttattagaggggtcttgattggatttccatatgcatatgaaatttccatgtgcaggggttttgtattcggccctctaaagttatcttaatgcttggatgctggtggcttgtctggttgtcccttatcttgcccatatcataagggtactgccaatgcatctgtaccagctagtcattagcacaatagtggcttaagtcttgttttgtatttatccttacatcatgagttataacttcttttcttctttaacaatctcatgagatttcttgcctctgaaattgattacttgagctgtctagatgctactctcgtttacgatttcacagattgttgtttgtctgtttgttagatttgtgagttgtgacaattgtgtattatatgaattgctaaacctccttttcttggtcatttatttttggagaatatattccatcatatatcgctttaacccgtggggaaaaaatcttgtctgccagacagtgttatagtactatgcatgtttgcgtaataaaagcagcctttttattttgcgcaaatgtattttgtcatattccttgatggaagtaaagaattctaaacatgaagaaaaagtaaattcagaattgccagcatccagttatgactgagttatgagcctggatatgaatgcctatcttattgtgctgatgtaggcagaatatagcaggggataatgtgttaggcagggaaacattttttttttctcggccaaggggagagacgtcaccctgaccttttcacttaagaagttgatgccgcgacttgaacccgggctggcccagcagaccgcttctttggcgtgtccggctgaccagttgcaccgtgagagtgttggctaggcaaggaaacatgttaggttggttgtcaccgcagatgtttcagcaaatttgcttcttggtttcttgctctaagtatatattatttcgaataacagaaagttaagggaacaagatacggtatacgcatatactatacaaaccataacatgcaaagtgactatgctgcatgtaaaattagatataggagtggctcattgatggacttgtttattttttagtaggagattcttgttcatctgtttctgtgttaaacggtgccatttactgtctcatttcttagacagattgtagctactaaatcttaactacaaattaagtgctggtaattgtaagtacaatcctgaatattaattatccttcataatggattaatggtatgctctgtatagcttagatcactgttttcagtgatcattagattattatgcgattaagccatgtattttctccaccttccgtttttagtagttcccttgccatagatgtcagtcctgttgtagcattgctattgtaggaattgagaattatgagctttgccattggagccatcactctacaacacctcaaaccccaacaattaaatggaatcgcaattgtctgttaaatctgtaaccgagtgccctgtctgaagtgaggtgaaaaggtgagaaacttagcgtgtgtttggttagcgggttgatgcgggtttgaacgggttcaacccacaacaacccgtgtttggttcaaaaaggctcgcgggttaggtttgttctgggtcgaaatacttcttgaaaatgtgggttatagtgatccctcaaaaacaagcgaaccatttcgacccacttcctctccaccctcccgtcacccatgccttatccactcgagaccagcacaggggcgcgccgccactgcaggcctgctgggacgagggacccctgtcacacccagttccggtgggcagaaccgagcgcatagcatatgtgtgccaagatccatttccacacatatgttgacgtcacaagtgtaatatatcaaaagacaatgcaataaagacgtaaagagagtatagtactttattacatcatctgaatcattgtatctttaacaagtattaacatcaaagtaagacggaattaaataacatgggtaatctcccataggaagatgactgacgcatcgttagacttaaaactcatcatcgtcatcagcaaagtctccagcatcaccctctgatcaaaatattagcaagggtgagctcacttatgatcggggctcagcaagtaggggaaaaattaatgcaagtttaacaaggtgaggctaaggttaagcagtaagccttttagttggtcaatattttattagaacacctgtcttactaataagtgtatatcccaagtattcccattaaacaaaggtataagaatatatcaaaaacacttaagtgaaaccacttaagcaaaccattggcagatcatcggatctccatttattgtccatctttaagttcaattatcatgtgaggagtccagactgctcttaaccgtgagcacgactgacatatcagttttacactcttcagaggtgacacatctttacccatgagtcgcgactcccttctagcctaggttgatcagacccgtattcacttccgaggtgaatggctagggtctcactacgaggcttttccctagagtcctcaatatgcaaatgttggaaatggtcaaactgcatagagcacatctaacgtaaccaacttatagtccagactgcagggtaaagctttgggaactatgcccgtatccaatctgcctgagcgagaaatataagcgcttgccagatgcccccgttccggtctaccacgaccagcacccaacataagacttccctagttatttagccaagggcgtcccgtaccaccctcatggtagcactgttttcctgggtggtcactccatgttccaattaatatacaataatcttgtttaaccatcgggttaacatcataatatcaatttcatttacggaacattaatatcataaacatgagtgacaattattaagttgagcggtagcatcaatttgcaaagcatagtattttcacagggtaatcaaggaatacagttggtaaatctagaaaatccttaattaggtaaatcccatcaaattatacagtatatccaaaaagtaaacattattatatgcattaattgggtacaaatagaatatgcagagggagaatctacttgccttgctcgaacgtgtcctgcgggtcgtcctcgaacatgttaggctcgtctacctcacagtccacttctagcatcgatttgcgtatcacacatacaaaagaatacgtacgccaaataaataaacatacacaatacatgggtaatcattcaccattacattcatcacacttatcacactcataaatacgtcttaactcgtaaatacttattaattcatttatgactattattgcgagtcataaatggtgaaattatgagtaggtgctataataatagttttaactagtattaatacgtattaacattctttatgaaaataaaggctaattattttctttaacactaataaatagactaatagattttattctttttatttctaacttgaattattgagtatagctaaaaatgaatcaactaacattaatattctaaaactcaacataaatcaccaattggttttttttaacataagcaggtttattttgacataaacaagtattttactaactctaagaattttagtgctatactcatgaacacatttattttggctagtaaaacctagtttcatacgactagtggtattttctcctttctttctaaaagaaagtattataaaaaataatcggatataaatcatctaaaatcctataatgtttatatggccatgaattctatatcatttactaattccattaaaatgaacctatgattgtaatcctccaaataatttccaaagttcattgtgaccaaaattaactataaaatttcctatctagtgtttttatcaccaacatgtgtctactaattttcgtcatacttctctctaatccgtcattctaaaagtcatcgcattgaataacatgaataatcacgatgaactgcttatcatatatatcttggcacacatatgctatgcgctcggttctgccccttggaaccgggtgtgacagaagtggtatcaaagctatgctgaccctaggtcgttagactagttagaaatggaaagcctagtttgttcaaaacttgctaatttcattcctacaaaattattttattagccttacctatttaaaatttcaactgagttgacatttctcttctagatggttcgtactcttcaaactacccgggtcgacaccaactacgtccctccgccacggcaaatccctgtctacccagtggtagtaaaggaagttccggtggatctccctagcattcgagtagagcatggagtcatcctcgaggacaactcggaggaacttcttcgacgcccaccccattggcagaatcactggccttcgcagctagatcatcgacctcagcaccgcctgcaccagccgttcaagctcctgcacccggaggcgacgacccagacgactctggggacgatgatgaggatgacgacgaggacgaggacgaagaggaacaagtcaacgaggaggccaactacgcccagcaggactacttcatggggttcggtcctgtcaccgaacattacgcatcaatgttcgagacagggcactcccccaacctgctgcaagacgtgctacatgcgttgggaacctacgtccgacccttgtacgagacaaggcgagtgagcgagcctccccgggcttgctactacatcactcgcattcacgtcagagtgatggatgcaggggatagggaattcaggactctgtctgctcatgagtccctgacaccgctatccacctacgctgcttcgggcagcgatgctgccagacggactctgtggtctctcagccacatctaccggcagcagctgcacgacacgaagttcaggcatctccctctgcgtctgagtggaggaagccagaccagcattgttccaggtgaagctggtgaggatcgcctcaacaccctagctggtgtggtggtcggtctcaacaccgacctggacagtgccaccctagatctctttagggtgcatttggaactggaggatgcccacgccaggattgtagcactggaaggccaacttcaaggacgtgatctgcctgaagcccaggtccccgccatgacgttgtcccctccccgtaagaggcttcgctatggggagcccggatccatcaccaggctgttctagaaattttaagttatgatgtaataagttagttctcgagtcagacgataaatactctcattttaagttatctctataataataacaaccatgtgatgttggttgctatgtttgagttggatttttgtttgagtgcaatgtttttatggaatgatggccataagagcatataaaaaaacataaacttaagatatttccctctattatctttattactcccaacttctctaagagttcactttcttaccaatcagatggtaaacgctcgccaaagacccaacaacaacacgaactagcgtggacaacagataccactaccaccaccgaaccctaacatggaacagttcatcgccgctcagatgcaacttttgcagggactcactgcatctgtgcagcatattcagcaaaatcagcagaatcagcaacaccagcagcaacagcagtatgcaccctcagctagagataagcaccaggattttatgagccatcactcgccaactttctctcacgcggttgatcctttggatgccgatgactggctcaaggtcattggaaagaagttagatatcaaccagtgcaacgaccgggataaggtcttgcacgcctcgggaagactcgagggttccgcgtccaattggtgggatgccttcacagcggcacacgccaatgctgatacaataacctggcaggagttccaagtgaactttcgcgctcatcatattatctcgagaattatgaaactgaagaagaatgagttccttttccttactcaagggaatatgactgtcagtgagtaccgtgatcgcttcactcagctttcacgctacgcccctgaggaagtggatatggatgagaagcgccaagagcgtttcttggaagaactgattggacctctgaactatcaactacagagtcatacctttcccaactttcagactctgctaaacaaggaaattgaccttgaaagcaaaagaagggaactgtctgaccataaaaggaaattccaaggtcagtccagcaggaacacccgcccgaacaacactcaaggttctcagttccgctctggaaatcaaggtggaaataattatcaagtgtaacgctctggacaacaaggccagaggaacaatcaaagccagaaccagcagaggaacaactctcagaccaaccagaggtctggtgggagttcacagaatcgtcaaggtggcgccgtgaacacgcagaccagaagcaacaacgcaccagtccaacctaatggctgttttaagtgcggtgagcttggccattatgctaacaactgccctaggcgcaaccatcagacacctcagaagaacaacaatcagaagaatgaccagaacacccatgctcgtggatctgcacagaacaggactccgcagaaccagagtagaggaagagtcaaccatgtgacagcagaaattgtgcctgaggatgtcgacgtagtgtatggtatatttcttgttaactccatacctgcatcagttttatttgactctgtagcatcgcattcatttataactgagttattcgtggaaaagcataacttaccaaagcaccctcttaagaagatgttacacattagttcaccaggaggtgacattgttacacatggggtgatattgttctttatgaatctcttcttccaaagtagattcaacttccataactgttgcttctatattattgagcatatcaaggttaagttgttccatttcccagcacaattcctgtgacatcaaatgagtagtgatgttgtttacttgacctttacggctcaaagcatcagccactacatttgctttttctgggtgatattgtatttccaaatcatagtctttgatcaactcaagcaatcttctctgtcttagattgagttctttctaagtgaatatatatttcaggcttttgtgatccgtgaagattttgcacttgtttccaatcatatagtgtctccaaattttcaaagcatgcactacgacagctagttccaaatcatgcgtaggataattcttctcatgcttcctcaactgtcttcaagcatatgctattacttttccttcttgcattagcacacttccaagtccaaggtgtgatgcatcgcaatacacatcaaatcccttgtaaatgtctgacattaccaatattggtgcagtggttaaccttttcttgagttcctcaaaacaattctggcatgcttcatcccacttgaactctttacctttctccaatagtgaggtaagaggtttcactaacttggaaaaaccttcaataaatcttctgtagtatcctgccaatccaagaaaatatctgatcttggacgcatcctttggttgcttccaatttagtatttcgcttatctttcctgggtccactttaattccaccatcagtaacaatatgtcctaagaaagcaacttccttcaaccaaaaatcacacttcgagaactttgcatacaattggttgtcacaaagcttttgtaggactagccttagatgatcttcatgtgtttcttcattaggagagtatatcagtatgtcgtcaatgaatacgaccacaaactgatccagatattccatgaattatttattcatcaagttcataaagtatgccagtgcattagttagtccaaacgatatgaccaaaaactcatataatccatatctcgtagtgaaggctgtcttgggtacatcttctgctcgaatttttaactgatgatatcccgaccttagatctttcttcgagaacatcttagctcccttcatctgatcgaataaatcttcaatccgaggtaatgggtatttattcttaatggttactttattcaaacttctataatcaagtaatcaacacacattcttctcgaaccatctttcttgctcacaaatagaacttcggctctccaaggggatgaacttggacgaatgaaacctttttctagtaattcttctatttgtttcttcagttcaactaaatctttgacatccattctataaggtctttttgagataggtgcagttccgggtaataattcaatagaaaactctatatcacggtcaggtggcatacctggtaattcctccggaaatacgtctgggtattcacacacagtggcggaggagccattatggctcagtgtggcatgagccataccttacttttaaaaagtctcatatattctactataacaacaaaacaagacatggtgtggtgtatgtgttgcctctattctagcagcaggttttgggttcgattcacaattcttgcagatttcattttttgagccataccacattttttctttgccctccgctactgttcacacactaccttgatattttccaagggcttttcttccaaatgattcaccactgtctttccttttgcatttgttggcttgcctgtgctaacttggattctttcaccttgtggacttgtcatcataattgttccgttggcacattgtatcactccatcacaacttttcaaccagtcgcatccaagaatcacatcgataccgttggatcctaagaccactaggttgactggaaaatctattccctgaatcttgagattaacatggagccatgagtgtgtggcctttatgtcacctcctggtgaactaatgtgtaacatctcattaagagggtgcttgggcaagttgtgtatttccacgaatgactcagttataaataaatgcgatgctctagagtcaaataaaactgatgcaggtatggagttaacaaggaacataccatacaccacgtcggcatccttaggcacagtttctgctgtcacatggttgactcttcctctactctggttctgcggagtcctgtactgtgcagatccacgagcaggggtgttctggtcattcctctgattgttgctcttctgatgtgtctgctggttgcgcctagggcagttgttagcataatggccaagctcaccgcacttgaaacagccattgggttggactggtgcgttgttgcttttggcctgcgtgttcatggcgccaccttgtcgagtctgcgaactaccaccagatctttggttggtctgagagttgttcttctgctggttctgactttgattattcctctagccttgttgtccagagcgttgcacttgataattatttccaccctaatttccagagcggaactgagaaccttgcgagttgtttgggcgggtggaacttccttttgtggttagacagttcccttcttttactttcaaggccaattgccttgttcaacaaagtctggaagttggggaaggtatgactctgcagctgatagttcagaggtccaatcagtccttccaagaaacgcttttggcgcttctcatctgtatccacttcctttgggacgtagcgtgaaagctgcgtgaagcgatcacggtactcactgacagtcatattcccttgagtaagggaaatgaactccttcttcagtttcataatccccgagggaatatgatgagtgcggaagttcacttggaactcctgccaagttattgtatctgcattgacgtgtgccgctgtgaaggcatcccaccaatcggatgcggctccctcgagtcttcccgaggcgtacaagaccttttcccggtcgttgcactgggtgatatccaacttttttccgataaccttgagccagtcatcggcattcaaaggatcaaccgcatgagagaacgttggcgggtgatggctcataaaatcccggtgcttatctctagccgggggtgcatactgctggtgttgctgattttgctgaatctgctgcacagatgcagtgagaccctgcagaagctgcagctgagcgacgatgaactgttccatgttagggttcggtgatggtggtggtatctgttaaccacgctggttcctgttgttgttgggtcctgaacgagcgttcaccatctgattggtcagagagtgaattttttagagaactgtgaagtaataaagattctagaggggaataatttaagtttatgttttttatatgctcttatgaccatcattccataagaccattgcactcaaacaaaattcaacttaaacatatcaaccgacaccatcacatggttgttattattataaagataactttaaaagagtattcatcgtctgacgcgagagctaacttattacaacataactgaaaatttttagagtagcctgttgatggatccgggctccccatagcgaagcctcttgcggggaggggacaatgccatggcgggaacctgggcttcaggcagatcccgtccttgaagtagggcttccagggctgcaatcttggcgtggtcatcctccagttccaaatgcaccctagagagatccagggtggcactgtccaggtcggtgttgagaccgaccaccataccagcaagtgtgttgagacgatcctcactagctccacctggaactatgctggtctggctttctccactcagacgcagagggagatgcctgaacctcgtgtcacgcagctgctgccggtaggtgtggctgagagaccacatagtctgtttggcaggatcgctgaccgaagcagcgtaggtggatagcggtgtcagggactcatgaacagacagagtcctgaatcccctatcccctgcatccatcatcctgacgtgaatgcgagtgatgtagtagcaagctcagggaggctcgctcactcgccttgtctggtacaagggtcggacgtaggtttctaacgcgtgcagcacgtcttgcagcaggttgggaaagtgccccgtctcgaacatcgatgtgtaatgttcggtgacaggcccaaaccccatgaagtagtcctgctgggcatagttggcctcttcgttgacgtgttcctcgtcattctcatcatcgtcgtccctagagtcgtctgggtcgtcacctccgggtgcaggagcttgaacgactggtgcagacggtgccgaggtcgaagacctagctacgaaggccagtgactgccaacggggtgggtgtcggcagaagttcctccgagctgtcttctagaatgactccatgctccactcgaatgcgagggatgtccattggaacttcctctactaccactgggtagacaaggatttgccgtggcggaggggcgtagctggtgttaaaccgggtggtttgaagggtacggactatctacaagagaaagtgtcaactcagttgaattttaaagaggtaagactgataaaataattttataagaatgaaattagcaagttttgaacaaacaaggctttccatttctaactagtctaacgacctagggtcagcatagctttgatatcacttctgtcacacctggttccggtgggcagaaccgagcgcataacatatgtgtgccaagatccatttccacacatatgttgacgtcacaagtgtaatatatcaaaagacaatgcaataaaagcgtaaagagagtagagtagtttattacatcatctgaatcattgtatctttaacaagtatcaacatcaaagtaagacggaattaaataacatgggtaatctcccacaggaagatgaccgacacatcgttagacttaaaactcatcatcgtcatcagcgaagtctccagcatcaccctctgatcaaaatattagcaagggtgagctcacttatgaacggggctcagcaagtgggggaaaaattaatgcaagtttaacaaggtgacgctaaggttaagcggtaagccttttagttggtcaatattttattagaacacctgtcttactaataagtgtatatcccaagtatttccattaaacaaaggtataagagtatatcaaaaacacttaagtgaaaccatttaagaaaaccattgacagataatcagatctcgatttattgtccatctttaagttcaattatcatgtgaggagtccaggctgctcttaaccgtgagcacggctgacatatcagttttacactctgcaaaggtgacacatctttatccatgagtcgcgatttccttctagcctaggttgatcagacccgtattcactttcgaggtgaatggctagggtctcactatgaggcttttccctagagtcctcaatatgcaaatgctggaaatggtcaaactgcatagagcacatctaacgtaaccaacttatagtccagactgcatagagtcctcaattattttctttaacactaataaatagactaattcatagtggtattttctcatttctttctaaaagaaagtattattaaaaataatcggatataaatcatctaaaatcctataatgtttatatggccatgaattctataccatttactaattccattaaaatgaacctatgattataatcctccaaataatttccaaagttcattgtgaccaaaattaactataaaatttcctatctagtgtttttatcaccaacatgtgtctactaattttcgtcatacttctctctaatccgtcattctaaaagtcatcgcatcgattaacatgaataatcacggtgaactacttatcgcatatatccaccaaaaattccatagcgcacatacgtatgaatttcgaatcacacatgctcatattacaacacaataaatatacaattcataaaccgaatcaaaaagtaatttcgaaaatacacaaatattttgggtcgtcttcaaccttgcgacgaacgacggatggcttgggcgtgcgtctaggcgaaggcttggtacgacgggtgcgtagctccggcgagtttcatgggctccggcgacagcgtggcgaactccggcgacggtggctcaaacgacgaggagcttgagagagagtagggggcgagctcgggtagggaggagggagagagaggagcttggtttttataggagggaggggagaggaaagggcgactggggagagatcaatgggcgccgacggttcttcatggattatcaatggcgtcggttacctcccaaggcgtcaatggagagggcaatggggagggagaaacgaacgcgcggggcacgtggtcttcaaggcgcggtcggcgtcggttcctggtcgcggcgcttgggctgcgcggggcatgcggcgtcgggcgctcggctggcggcgcggttcctggcgtcctggagcgcagggtaggggcggctgtggctcggtcgttccttgggtgcggtcggcctggcggcgcacgcgtaggatgaaaggcagagggcgcggggtggggagagagaaaggggagggaagggctggccgggtgggtcccacacgcaagagagagaagagggggagagggagaaaaggtggcggcggctgggtgagccaggcggagcggcggctggggtttgatgggcccctagtgggccttagggttatggtttcttttgtttttctttttttcctatttcttttctaaattcgaaatacatttttaaataactctaaaattcataataattataccaaaactatttataaataaaatatttatttttggactaataattattatattatttactaggattttcctataagaagaaatgctaataaatatccacaaatcaatcatgagtaatcaaaaattatttcaaatgcaaataaataacaaacacttgaataaaaaattattaccgtaattaccataaataactaaatgcattatttttagttgatggtttttatagtgttacaacccccgccggcctaaccttcgacgttaatcccccgctggcctgccctcaagcgtgctggcctccgttagcgccgtcagactcccccaccagcttgctgcacctcccaccgtcagtcccccgctggcctgctcttcgatgccggcgtgttctccagtaggcacaatccacgagccttgctagtgttgtagtcgaataggtaaaggtcaatgctcgtcatcgcctagacaagcctgctagtcatggctaatgttacatcactgaaatgcatcttgatgttgttgggatgttcctttaatgatgattgaaatgtagcagtgagacctcatcactaaaaaattatgacttggttaataatggctttaatttatgtatatcaaatattaaaatagtgtcagtttcatttattttgaatggtgttatcatattgaattgaagatatcatcatgagtgtggtaatatgatcaggaaagtgaccatattcagttcatccttcatcacgaaacaaacaagacatggtacagctccaaacccacttttaaccctgtaatcaaacaagaaactaggttcaacctgtcactaaaaaccaaacaaggaatgggtccgacccaacccagaaaaatgggttggctcctacccgacccatgtcgttccgaaaccaaacacatgtttaaatactccctctgattgcaaatataagtagtttaggacataggcaaggtgtacaaggtgaaactttgactattaatttctgtaacaataatttattttaaataggaaaatactccctgagtttcaaaatataaaactatttgacttttctagctacgttgattttgttatgtatctgagcatagtatatatctaaatgtatagcaaaagttaagtatcaataaaagctaaaacatcttataatttgaaattgcgggattatatgttatgagattacttttcatgatatatatcaggtaccactaaccttatgttgaaaaactatttacgttttagttattgttaatggttaaactaaaagaaattgacttaggactaacctaaaattattaacttatatttctgatcagagggagtagttttttacatacaagttatggagggaacatgattaagaaaaaatcgagcatcaaaataatgtttcatatggatttaaatatattggttgccatatatctcatgatttatggtaccgaatctagtgtgccagagaacaaattctatgttgatgtagccaatggatctgaaattcatgtagctgaaaaatctgtgcagcagcaccagtcgtcaccttagctttatacattagaaaatctgtactcagcatatagatatttgcattcacattttgagcatccttttggtctgtttccacaagttcgaccgtcggttcatttttctcagtttgcgaaatacatgaaaatatgaccttggagctccgttggccgttgggcatgtcctacaatttccattgtaatatctatagcctaaatggaagtatttagaccctttacggttgtgttttaagaatttactctcttctgtttccgattaatccattgtccacttattccatgagttttctgagatattgaatggaaggaaaacaatgttggtgtagccttgatggccatggactacagtttactgtatgatttgtgattatcggctttctgctgcctcttgtctgcagatattttgt

SEQ ID NO: 199 - DNA, 7635 bp, Zea mays
  Intron number 3 from transcript GRMZM2G558539_T01 (locus G RMZM2G558539) derived from phytozome v7.0 (chr-ID 6; pos 1 27778918 to 127786552 reverse strand)
gggaaaccgatctcaacgaggctcttacctcgcaggtgcgtgtgatgttcctgcactgctctccacatgactagtttgctgtgcgaataccttactgcctactactgcctaagaataattcagttcaggttcagcctggacatcatgtaatgtccccctagttccatttgttcgatgcactggcttctctcagcactcaatttcgtaagtaagagtagaatacaccatccatgaggattgttgtatgtgatttgatgttatgcccatgttgattgtttttctgttgatgctttttcccaatggtgcaatgataacgctatccttagaagtctcttctttttttacaaaaggaagagcaaaaatatcagggctgtacaactatgctagataaaaaaactggccacacactttgctatgctgaaactgtttggtgttattctagtggttgtttcgcctttggtgcagtgcacattgcaaagcggcaagttgaggcttttgatcatttatataatgtttgtcaatttctccgggctcattaatttattgtttaaggtcccattctatgtcaatctaccgctgcacttgcgtacttctcttctaatattgttcttttcaactacatgcttgtcttgaacaagtaccatggccatagaaacaaattcttatatctgtacttgttgagggtcccagtagtgtatggtgctactattatactttgaattgttgcctccacatttcttccattcagtgaattctttttttctgcatttttttactctgcaaggtgtggggaagggggtgattagttatagttcagagtcattttcagaactgttgcctatcccagcttgccaagaattaaaaggccttgttgttatattttactggaggtataatttcctaaagtaagttcaattcaatataacactaggtgaatgcccgtgctttgctacggagtaaacatgttataataacatatattaaaatttaaaggtaccattatactaattaccattttatgtttttgttatcatctttcaaatgttaagaattgtacataccttaaaaaccttacacatcgaacaaatccatcacgtgcattaaaatgcaatgcacctggacgaaggattataaatttcgaagccactggctatttcatagttaagctatctccaacagatctcctatctcgtccactatttcatcctctatttcaaacttcactctgcaaacagagtcaaacaatgtcatctacagtttcacatcccctattttacactacccgttggagactgtgtagatttttacggaaggattatgctgctaactgaccaaactcagcactctgaacaattgaggtcgatgagcacatgggcgagcgtaagtgcggtggcgacgagcatgatcctcatgcaaaccgttctgagtgtgttctgggtcgtgttgtgcatcttgtgttggcatttgagaatacatgtgtcttgtgtttgctagagtgaaagggagaaatgggggtatttttctttggcaaagagagtttataattgcactggtgcaagatgaatgtgttttttgttcataaactggtaaccacaacaaaccagatggagctggttaagctttctataaatgccaggctgaggtttagccttgttcaaaaatacaagataaattatgacatagaattccatcatttaattgctataccatggaacattcctaaatccttcttagaggcacgggagcttcaaatgtcaatgttttcacacagaagctacaaagtggctataggaaaagagccttcatctaagaaacatagactgaaatcccaggaaccactaacttcataaggcccaaaaggaccattttctcctgaagataatagcttcacataattcatcataaaactcatcaatttagcatcctctaggctgcaagattcctttaatagttgagtgtttcatatatctttattatctatttgccaagcatcatcttcaagcaaaatttgaaatgccttaatccccgatgaccacctgcctgtggatcagcaaaacatcttgtcagccagtaaatcaatagctgagcgccagcagagatacacgcagatgcaaatttaactataaactaagtgccagaggaggttcctagatctagcgttgtacatctcctcggtctcgacagtgatgagggcttcacctgggtgagcattcagagcagtaacggccttgaggtgcagtggtggatgtgccatgtgcctgggaggccccgcacaagcatgatggtttgccactatagtttttcatgtaaaaagaattaagatatgcagttttattcacatttgcactccggcgaagcaagctaattataccacacaaacctgataggggttttgtagtgattctagttaatttcaaggagaatttagatcaatagccaaacagtttcactcattcttgccaagtgattctattttcaatggacaaacatttctagagagaatcaggatcgataacgtttcaaggagaatatagatccataaaaagcactcttggacagaatcacactttattcatgtttaaaatctcgaaaacttgggatttaaaaagattttgaaaaaactttaatgtttagttcatgaatcatttaatgtaagaacaaaattgaatcaattaaatgatattcgattgaacgatgaactatttatagttcatgcctaattacctatgcaaaattctagtattaatggtagaacagacagaggtggatggctactgctttttttaacaatattcataaaagaaacttcctgaaagattcttatgtctgttactgctagtgtttggatgacatacaaaacttgttcgggtttaatattctgcaaatttggatgcaattgggtgattgcaatctggaggggtttagcataaggctgatgttttgctccaaagaacaaactacctccaaatgattaaaaaacccagttcatacataattaatataaagaagcctaccaagttgtgaaattgctgatctcctgttcttctcacatcaaccctcatctacccccctccaagctgtatgtctaaccaatttctacttcctacaacaccagaggtttagtttttcccatcaggtttcatttgtcatataaataaactatgaatcatcaaacaagacagtatcaatgcaggtgaggtgagtgccagttaaataattcccttaaatccgtgtcctaagtgccggtactgttctggaataaactaaacagtgaagaaccgttaaactatcagtataaacagttctctttaagtaaattcccttaaatttgtgtcctaagtgtcggtactgttctggaataaactaaacagtgaagaagcaataaaatatcagtctaaacaattttcttttctttccctggatattcagatagcactctccacatgttgcaggccagtatatgccatgattatgagtttctgactcagcttcctacgtcgttgtagttgtggcaggtaaactgtgggttatttgctgccaataaaagaattagttgccataaaacaacctgatcaacagacaagaacgccctgctcagagatggtatgtttagcactggaacatcatttgaactggtagttgatcgttaaaagaatgtatcgaaacaattcgtttatcaagaaggatgaatcattgcagaattgatcagccactgaatccggaaatgaaaaaatatatgtaattctgtggtttcttattgagcagaagagctatgttacctttactgggaaagtccccggtgggaatttggtggtgagcagcacgcggagccagcgcacggcgcacacatggcaggccaggatgtctagcaacgacaggaatttgtcgacgctcagggggaagtcctccgtgagccacaccgacggccgcaacgtcttcaccatctcctcctccttccacttggctccacccatcgtcgtcgtccctaggtgccggccgaagataccgtcctcgccgcgcctcaccgatgcacatgacagcagccgccgtggcacgtccacactgttcctccgcctctgtggggtccccaagtgcgaaggcagccccgccacgctgcgtcggccggatcgagggcgaggctagcgtggtgttgggtgcgggggcatcgtgtctaatcgtcccccgtggcaacgattttggtgttgccgagctcccgcatcgtgagtgcctcctgtgacgcgaggatagcggcgtgttagtaacaacagtgattatgaaaacagtgattatgaagggcatcgtgagtaacaacacagtaaacaatgattatgaatcaagctagtagatatatagggtgaaccaagaaccgtcaagtatgagcatgtttccagggatagccaaatgttatcaaatccttgtacaataaaaacatacaaatcaaacgagtagatattatgtgcgaacctgtatggcatactttttggtgttctctgactcacgcttgttgtggcaaggccacgtttgttgtaggactttatccttcatatctttaaactctttatctttagacttcaatgatccatctttctcaagaagcagcttcaaaaggtcctcctttgataggtctaggtcttctgaatctgaatcagaaaatgcaattcgtttagttctcctcttcccgttagacttggatacataatcaagtgaacctgcttcctatgccttctcggttctaggcacattattggcttcacttgaagcttcagtacttgctccaacacttctattaacctcatcatatctgtgtttgtttgtaaaatgcatagttaagtttactctaaattaaacatatatttgcaaaatgcatacagaaacagatggatgaaacaaaaaatcatagctaaaatgaaaaggttgccatttactgctacccagcatatttcggatgcctcaaggtcaggctcacctcacctgtcagtgacaaaagttagcatgacttcgactgcagagaaatcgatccctactcacccaagaagctgagtactaccgattttaggttggtctgcatgaagatagaaggaggttgtgcaaaacaaaatatatatccataatttaatttagcaaacattgttactaagctctatgtagattgtgcacggagctgacgaatgtacagctagggcaacaacgtgagagaagacaccgactgttcatccaccatgaaaagaccatcataaaatcatccccttaaatcatcctttgcctcaagaatcaagaaattattacgcaacatctccattccatcggtatggcatgtaccaatgatctttagaagcattcttactccgccgtctttccatgaaggtgtcaagctttcctgcctcctacgagtaatgaacacaaattgtaagaaccaagacaaatatccagcattcaaaaagaacccctaataaaccttgtaagctttaccttgagctcattgtacttgttcatcagcttgctttcacgaagttcagctggttaaggaaagaaaaggggagtaacgatcaggttgaggaacaagtagtaaccatttgatcaaatatagacagtaaaagatagaatggacaatggcaaataatttttattggcgcaagtgtgcacagaaaagtgattacccctatcttcagaacttggtctatgtctcttatcacgaaacgaacgatgcctggtatctcttataggggaatacctcccatggggtgcgtgtcttctctcagacctgactctaaagtcatgatatctataataatcccttctccctacaaacaggaaggtggaagatttacccaaaaacattatgccattaaacaacaaaagttagatggagctgcatagatacaaggcaacacagaaacacattaagcttaccacaatcttgagccatatggttattcaattagctacaagaattagagggtccacaataacactaaaccatagaccataaacatagatgagccattgaaggtggaagggtcgtcagggcggtggtctcccgacgtgggtcacgtggtgggctcctagcgcttgcggcatcccctctgccgccggctatcccagcgccgtccatcgtccccagcaccgcacgctgagaggagggccaagaagaggtcgctgctgcgtcagactccgtcgcagaccttcatgacataccgcaccagtgccacgacaacggcaagcaacagacaacgagggatcaagaatcggagcacccatcgagaaagcagagcaagaggagtagacgagaaacaaaaaaggggaaatcgtcacctcttgcgctcgaccttgtgggggacgaggtaggcggagctgtaggcgcctggtcgatctggtcggcctgcctgtctagggtttcgagagccagtgctatggagaagcaggcaggcacacggaggacgggtcaccgccgtcgcggtcgcctcagccgtgtgaggcgacaaactcctccctccgcggcacggcccggcgccaccggccccgtatcagcagcgccatcgacggcaccacgacgggcgccaccagtaccagcaaaagggccaccgccgaggaagactctacctcctcctccattggcgcacgggcgactccagtgggtagggctggggcagggatccggatctggcagcgcaacgagggggagaggaggaggtggcgtaggggcgcggacgcgcggtgcgagatcaggggcgcggacgcgcggaggcagaacactctattgtgcacgcctacactccgttcttaaggagtagtagggatttgaaagatatatattttttgcctgttttgttatagttgcaacttaactaacatagcttttctgatattaatattgttgtttagttttcatgttattgtgcaatgcaagcacttgtaattataagaatccttatcacttctggaagtgtgtattagctttgcattgattcttagatcattatgatgcagaggtatacaccatgcaacatagggtttgtcagagacctaataaggtggaaggagtctagaaaaaggattagattgtagagtgtagactgggttggattggttgtactcttttcttgcttgatatctggggtcttaagtcctagtatatataagatcagtcttaagtaactaaactgtctgattgatgtcatctcaaatatctaagcattgccctggttctggggaaaagaaacaactgtcaagggcttgaaataaataaattatttgcttgatagtgatgaagcattttcaatccttggtgttgacacaatcctatagccatgtggatactattcacaagcctcagtgcagtgcatgacatgcctttacatgatgtggatatcatccactagataatacgtgtatgatactgattaatgaggttcaacggtggtttcagtattctacatgtgctattcagttgatatttattatatatatctaactataaatatactccttgaacaactacaattgtaatatactccaattatcattttttttcttttttatttcttttgtcactgttcattatctttattcatcatcttcattcacttttctcatgtcaaatgggaactgcaatccttataggtgcgccgccttgcc

SEQ ID NO: 200 - DNA, 855 bp, Zea mays
  Intron number 6 from transcript GRMZM2G385507_T01 (locus G RMZM2G385507) derived from phytozome v7.0 (chr-ID 8; pos 1 8875887 to 18876741)
gtcctggagcactgcacgaggatcacatcagcacggttagtgaaatccacatctcctaaatgattccagcttacgcttattattattaaaggttcaatttggcgtgcagctgtctttgatttggtgctctgatttcttctacgttgtatgaaattttttgtgttgccataagctttcttttatacgagtcatgtaccattgattcagattctgtagaactgttccaaaaattcagttattaagagacagactaggaaaaggtagaaatatttgtactttagggtgatagaatgcaattactgattgtagtttgactgctcatgaactgtgctgttttaccaaacaaattgaaagataaaccaaatcttatattgcaagccatgtcctacaaaaagatgaaaacaatggtacataatttactagagtatattttcttggtccttcctccttttgtcggttcatatggagtacacccagaaataagtatacatagtctttttgatacatcaatgttagtctttttaaattcttaaattatgaaactactaaatgttgaacgctttaagttttccaaaagtttgaacaggatatacatatagtgttatcggtgagaaccaccaaatctttgatctagaaggtgacagtggaaggctcattattctgtctgaccaagacagcgagaagcagttttgacagtggttctgacgaggatgaaccagaagatgtaatttatttgtggattcatatgttgcacttgtttcttgattcatgcacctttgatagctgttctttctcaaacataatttgttcgtaaaaataggaagaatccagtggcagttctgattctgagtccga

SEQ ID NO: 201 - DNA, 3840 bp, Zea mays
  Intron number 3 from transcript GRMZM2G106950_T01 (locus G RMZM2G106950) derived from phytozome v7.0 (chr-ID 7; pos 8 2329351 to 82333190 reverse strand)
acagctctcgtcgaggtcaattaccttcttcctacgctgtcgccgttctttctttctttctttctttttttacgcacgtttttcacggtcaacttgttctttatatacatccgatccagtgccaaccgtttcgtttggaaacagaggatgtagtgggatttttatacaaatccagtcaaacgtcgaaacattatatatatatatatatatatatatatatattaacaataagttattagttagcgataagacagaggatgtagtgggatttttacctccgttttattttcatgtttgcacatatgcctatctttttttaagtgaacttgcagtctatctttattccgttataagctcctaacgatgttgactcaggagtcaggacaaaaaaaacatccatatctttacatcatttccccctccttttatctactatatttgcaaattcacccttatactgggagtaaagtttggagtataattgtgacataaattctgaaattcaatacttcaaattagaatttaaaagtagttggagattaatgaaaataaactaaattgacattaaattttggtagaattgaccctttatatacatccgatccagtgccaactgtttcgtttggaaacaggggatgtagtgggatttttatacaaatccagtcaaacgttgaaacattatatatattttaacaataagttattagttagcgataagacagaggatgtagtgggatttttacctccggttttttttcatgtttgcacatatgcctatcttttttaagtgaacttgcagtctatccttatttcgttatcagctcctaacgatgtttgactcaggccacaaaaaaacatccatatctttacatcatttccccctatttttatctactatatgcaaattcaccctcatactgggagtaaagtttggagtataattgtgacataaattctgaaattcaatacttcaacttagaatttagaaatagttgcagattaatgaaaataaactgaattgacattaaattttggtagaattgaccttttaattataattttgaaaatattttatataaaacatgcagattatcattaaaacgtgcgtttgttgtatataaaatgctcctcggtttagttcattcttatatagaatgtttatcaaaatgctcctcgatttagttcatttgtatataaaatgttcccaaaattattatcaaactttaatatcgaattcacttttttgtgaagtttgaaatatttccaaattcgttgggatattaatttttaaaaaaatcatggataggtttatgtcacaattatattcctaacttttatatgaaaattgaggaaaatttgtaacggcgaaaaggtgtgaacgtcttttttacgggctgaactaaaaattttaagtgttaatataaggggatatatgggtaaactgcatgttcgtttttttataaaagaagagatatacgtgtgcaaactaacttttaaaaactagggtgaaaacatgtttgcatcatcgaatagtggtgacgaccatataactttttttcatgatacacatatactccctccggtacaggtttacaggtcgttctggccacgaagcgttctgcaccaaaagaagtcgtggcacacgcgcccaagcgattcttcctattctttcctttgatacccctaattaattgcagcgattaattgcagcgctcttcgttttctcctccatcgcgcgccaacaggcggtaccgcgcgtacaggaactcgcgaaaaacagacgcgcgccaacgaaacaatgaaaaacccacggtaaaaagaccgaaacgatgaaaaaatgtgcgcccaaaactcacggaacaaaaaaaaagaccgcggcaaaaacaagcagccacggagaatcgatactgagacctgctacttagcagatgctggcaatagccaatcggctaaagaagttttgttgatttcaatccacttgccaccacggtttacaaaaccgttctggatgtaaaaaccgcccccaccggtaacggtttaccaacggtaaaccggtaaaaaccggtaaaaaccgaccggtttgatcaattcaaatcaatttgaatttgaaccggtttaccggcaaaaaccggtgaaaaaccggcgaaaaaccgctctaaaccgccggttaatcgcgaaacaaatcggttttgctgttttttacaaaaaaatggaaaattttgacaagatttatttgtagtttgctcaattcacattgcacagtaaatattaattgatccacacgacatgtgtttaccaaaataacatataacatacatatgcaaccacaaactccagttctcatgcaacaaacaatcagtgaacttcgcaatactcaaatacaagttcttttacatctcttcaacgaggcaacgacacgcaggttgacttatttcacaatactcacatgtttatctcgagtcataatgatagtactcaggcatgttggaaggatcgtgatattgttctaatccgttagcgatagtgataggtctatacaaaatatatgagatacatagcgagaaaacaagatcggtaaataaatatttatccacaaagcaaaaaaaacatattggtatgtgtgttcggtgtttgtgtattgcatgtgcacctaaccaagtgttagacttttctcctgatcagcaaatcttatgaacacatatagaagaactggaactaaggattctagattgagtcttgtctagatagatagttattagaagaactgaaactacttgatttatggattccatcttgatcaggaaatgaaatcgaaattgaccactaaatgtctaaactggacttgagctattggtttatcttcacatataacatataacatctttacatataacatataacagtaaacaacactaatatacctaaattgaccactaaatactcagttttggtattaaatccgatttttcggcaaaaattggcggtttaccgatctcaaataacggttttcgggttttatgatttttttcaaatttttgaatttagaatgaattttgaaagaaaaaccggtggtttaccgaaaccgcaccccagcggtttcggtaaaccgaccggtttaccgccggtttctaccggttttgtaaaccttgcttgccaccctatatgagggtaaaaatggaaaaattactccaattaatgactccttggtagactaaatctggtcttaaacgacttctaaacctgcacagtagattcctacctcgcatgtgggcctcctagtaggatgttggtttgtaataattctcgctgcatgcgatctaatcttgtgtgcacggggcaaaacgacatgctagctactagctagcagtagcagaggctgcaaatggcaagtggcccaatggcgcctagctagcatgacgaatctatcttgtctggcctgagagagaagcagttttctgtaaatatcggatagaggtagatggggtcaggtgtccatgtgttgcgcgtcgtggagcaattagtagtaggtagagtaatataaaggaaaaaaaaaagacatgcatgagacactcacttgttatggacacgcatgcatgcacacatagtacatatggacaaagaatgaacatgcatcagtggcccgaatggatgattgatatcatcaagacattctgcccacccgtcatcatcatctcgacccgtcctatcttgggttgctctctgctagctgcacgtacgagccctgacacaccatatatatatatatatatatatatatatatatatatatatatatatatatatatatatatgctgaactttttacctgcacgtaggttc

SEQ ID NO: 202 - DNA, 5541 bp, Zea mays
  Intron number 1 from transcript GRMZM2G143086_T01 (locus G RMZM2G143086) derived from phytozome v7.0 (chr-ID 1; pos 6 6170294 to 66175834)
ctgcagcacaattcctctcctggaagcagcgcaaggtctttccttcctcccttacccccaataaagcttcgcctacttcttttaccatcaatttagggttcgatctagtttcctgtccgtcgggccagtagctggattagatttgtatctctagggatttcccgtttactaagctgaacaagtagatgtgattttgatttgctggattaagcttcattcgcgtggcaaatatgcgacacgtttacgacgccagcggatttactctgacaattcatcgttatagaagcacgagaatacattccatttcatttatccgtttaggttgcctaaataatcgtgaaatcttgtgatacacagaatagttcgtacttctgtttcttaccagatatgcatacaaatacagatagatggggaactgttaattgaaacgggaaacatatatcatattcgtaacaaacgaacacaagtgtctaaatagccatcccagtttaagctggttgttttttcagttattgaataattacagtttctgtttaatttattcattcttgttttgattatatattgatattctaaactgtgtggtcatctttaagggaggcagtgttactgttttattgtaaccttaccaagaatgaggagctattattgtttcattcttatcttcatcttcacaattcacattgcgtgtgtttgcctgtttctgtttggttgtgcgtcccgtggtagcctggctcactacatgcgttgactgggcctctaaatgtatccagttgcccgcatggagatggttgagcacgcatgcatcggtgcagattatgtatttgcggaagtctttaacctgcacctggggatacgcgtgaaagcggcgtatgtgctgggccatgctcgcgtgagcccggctgcatggacgcaggcttccaattaccaccattcttattgctcaagtaccaaataggcttgccaaatttgtgcactatatttcaatctatactggaagcatacatttttcaaacactgtatattcctgtacacagtccttatggtcttttctggctctggctattgatgtccatgctaagtgtagggagaattttgttattgtcataccctgaggttatgttgtcatctggcagttcactgcttgagccatgacatgtctctatgtaactctcttagtgacgctccatatcagaacccgagcatggtgttaaatgggcaagggttgattcaacatccctttggtgacgcgtcgtgttgtgatttgggcacgatgttatataaggatcgagtcgctgcttccttagttgtgtgctacgtcgctacatcggcgcccgagtgtagtaaaaatgtgcaagggtctttacatcaccaacaggtgcgaagggtaaggaagctagtcggactaactgagatccatttaggtagttggaatgtagcatcatttacaggtaagttaagagagttagttgagacatcgactaggaggcgtgtaaaatatcttatgcattcaagagactaaatgaaagggtcaaaaggcgaaggaggtgaacaatactggcttcaagctttgatacatagggacggctgcaaatagaaatgtagtaagagttttgattgataagagcctagtgtgtggtggatgtgagaagacaaggagaaagattatcttagtgaagcttgtcgtggatgatttagtcttgaacgtaattagcacgtatgccccctaagtaggccaagatgaaagtgctaagggcctttttgtgaagacttagataacatgattagagctatacctattagcgagaagcttttcataggagatctcaatgggcatgtaggtacaacaaatgcaggtttcaaggcggttcatggaggttttgggtatggtagtaggaattaggagggagaggaagtcttggactttgtggtagtttttgataggttgatagccaacactttctttaggaagagtgaatatcatttagtgatctgtagggcaaacactctagttagattgactttgtcttcacaagaaaagaagataaacgagcatgcttggattgcatggcaaggtgatacctgggtagtgtgttgtctctcaacataaacttatggtggctttttcaggtgtgtccgtagggataaataagccaaaattacgaaaacaaagtggtggaaactgaaaggagagaccttagaagtcttaaggaaagggccatcaaagaggacacttggaaggaagaagatgacacatacacatgtgagaagatggcaacctgaaaggagagaccttagaagtcttaaggaaatggccatcaaagaggacacttggaaggaagaagatgacacagacacatgtgggaagatggcaacttgcattcagaaggtagcctcaaaggcgtgtggagcaactaaagggagtggaggcaaagctaaaggtatttggtggtgtaacgaggaagttcaaagtgctactaaggagaagaaagaatgcttatatacatttgtaccatgacaagtgtgtggacaacatagagaagtataaggtagcaaaggagaccgcaaaacaacttgtaaatgtggtaaagggtaggacgtatgaggatctttatcaacatttgagtatgaaggaaggagagaatgacatatgtataatagctagggttcgtgagagagagaagggactttaaataagtcaaatgcattaaggatgaaacagagcacctcttggtggaggatgagatcagacatagatggtaaagtatttgagaatttgttcattatgtagaatgaggacataaccttttagggggatgattcttttgatgacaccaatatgcgctttatgcgtaggatccaaaattcagaggttagataaccattgaaaaggatgaaaggggtaaggcgatggaccttgatggtatctcaattgtggcatggagatgcctcagggcaatggtggacctaggtttctcatatagggtgcaccacaacaaatttttcatatacaattatgggtggcttgaccgtcacaattgtagagagatgtagatgcggaaaactcagcttcactcagaacagaaagaaaaatgagatcaaaacaactatgaacttcagccaataaagtagaaataatcatcaaaagcaaccccttttaattgagagccattttagaaatatcttaaacataaagaacaaaaacagtacaaggttcaaagtttacagtagatgacagaacagagtaaactagccggcttgtggacaagcaaatggacgtataccaaagaagaagaaaaatccgcttaaacaaaggaaaccaacaaatacgtcatgtacctttcaagcactccactacgtgctagtagcagtagtaatatgtgtgcggtgccgcggtgcgtgtgccactcctagtactgacgcgaatgatatggatgccatgactgcccttgacaaatttacttagtagtactctggtattagaaaatgatcagtgttcctacctgtaacactcagttctttctatgagcaagatgagaatccccgctggtattggcctctggtggctggggggggcatagcggctaggacgctaggcgttgtacgtgaacgcgacgctgtctggtagctaggcgagacgagatacgacggaggcatgaatcgtggtgcgcgcggccggggcgaggtctagatgggctgggctgcggcttagggtgtgccatggcccacctagaccctcctgtgggtccgcctttgccttggggatatagatatagtatggctaaccaagttgtttaaccatatctttcgtttgaataagatgcgtgatgagtggaggagaattatatttgtacgaatctacaagaataatggagatattcaaaattttactaatcaccgaagaattaaattgatgaaccatactatgaagctatgagagagagagagagagttaccgagcattgcctgtccgagaggaataacgaggatctttatgaaccaatttggttttatgcccggaaggtcaaccatgaaaaccattttattaataagacaagtgatgtagtatagagaacataagaaggacctacacatggttttcattaactcggagaaggcttatgatataataccaagaagtgttatgcggtgggtttgaacaaacatgaagttccaacaaagtacgttggactcattaaggacatgtacaacaatgttgtgactagtgttcgaacgagtgatgcagacacaaatcacactattagaatatgactacatcaagagtcaagtttgagcacttaccttttttgctttggtgatggatgaggtcataaagggacatacaaggggatacccttggtgtattacaaacgatgtagtggtagttgatgaaagttgggtatgagtaaatagaaaagtggagttgtggtaggagactttagagtccaaaggtttttagactcaatagaactaaaccaaatatatgagttgtgacttcggaactactacacatgaataaggagatgttagtttggaaggtcaagcagtgcataggaaggataccgttcggtatttaggatcaatgctatagagagatggggatattgatgatgatgttagtcatagaatcaaagtagggtggatgaagtggtatcaagcatttggtgttctatgtgataagagggtggcacaaaagctaaaaggcaagttttatgacgacgattagacttgctatattgtatgttgtatgtgcagaatgttggtctacaaaaagacaacatatttagcagataagtgttgggaaaatgcttatattgcattagatttatggccatacgagaagtgatcgaatttagaactataatatacgtgataggctagaggtagcaccaattgaagaaaatcttatccaatatcggttgagatggtttggatatgtcaacagaaaactctagaggcaccagtgtgtagtgggatcctaagcaaggatagcaatgggaagggaagcaggggaagtccaaagttgacatgggaagagataggaaaaggatactctcaaagatgaaatatacccaaagaattttccttatatttgatctctcagcactatctacacatgggggagaactttgacttgtgatttatgttgggtctcaactctaacttaccctaacttgcttgggactaaaaggttgtttttgttgttgttgattatcaggtactaggaactaggaagttacaacctccattggctaactttttctacacccacatgtagatactgtactgtacaaatgtatcccaccatttttagatcaattatggcgcccttggttgctgttattcattctgtcatgtgtatcaggtgcaagctagggaatatttggttcgttctcttttgatgtaatttgtttgttccaagcagcataattaaatacatagtgattttgaagcattctttttagttagtcggtgctctgatgtggtgtttaaaacttttttttatctgatgctttgttggtggtgttcctgaccagtagg

SEQ ID NO: 203 - DNA, 1294 bp, Zea mays
  Intron number 2 from transcript GRMZM2G086943_T03 (locus G RMZM2G086943) derived from phytozome v7.0 (chr-ID 8; pos 9 5648881 to 95650174 reverse strand)
aagtggaccagccgcctcaagtgcaacctctactagtacgatccgcctcctctctcccttgaccccctcaccgactcaagtgcctaattgcctactgtacctttcactgtccccgtctcgtgctaatccacgatctgcccaggactcgcttactgtattcaatttgaagggtttcggtatgattttctgtcatcgatccatggattggccacttcgatttggatttgtgggcatctagtgtcgattctgctggatcaggcgcatatttcagcccttgtttcattctcatggttcacatactggcatataatgtcaagcctaagaaaatgtacgctgctcataagtgtaagcattatatttagtcccagaaagtcaggtcgtggttaaatgagttgcacaggaggacacggtctggctgtgggttagccgtttttaaaattttgattgatgaattggtagtttcatgatacggatcatcagactgagtactcagtagccatctgtatagaattctgcagcctcagattgtctactggcttacatatgctagattagggccctgtttgtttcggcttctggcagccaaacgcgtcgcttctcagcccgcttatgtgagaaccgattctttgaaaatcgcccaaatcaacgtgaatgcaaaataaaccgagtcgacaggaggaatctgccgcttcctaaaccctaaactgtacaaacccctttatcttcctccacacctatgtcccgggatatccggattcttgggacgtctagattatctaggaattcagattatcagaaaagttgtcccaaacaggccctaggatatgttggaataagcttaattcttccagatatttacatatgttgagtggcttactcttggggcaagaaatttgtgtatgtgcatataaattatgcacaaaagtgtcagtaactcggtatcaatgttttaaggcgtcgcctaggcgtctaggcgcccaaaaatcctaggcgcctagcgccttgctcgcctaggcgtcggctaggcatccaggcggcggtccaacgccttgtcttgccttatgctttaagaaccatggtcagtattagagctttaactttgtgtaggtcatgtaaagcatgatacacaagattttttttctttttgttactctagatctagacgcattcagcttagagagacgtatagcgcactagccaacttagaaggtcgcatagttttcattactttgtgttgagaattaatttattgattttgatttgcagctacaggacaaactatttcatcttgatc

SEQ ID NO: 204 - DNA, 9438 bp, Zea mays
  Intron number 1 from transcript GRMZM2G001212_T01 (locus G RMZM2G001212) derived from phytozome v7.0 (chr-ID 2; pos 8 253460 to 8262897 reverse strand)
tgttcaagcagcctggtactgatagtcgcctagagggggggtgaatagggcgaaactgaaatttacaaatataaacacaactacaagccgagttagcgttagaaatgagtccgagagagggcgtgaaaacaaatcgcaagcgaataatgaagtgagacacgtggatttgttttaccgaggttcggttctctcaaacctactctccgttgaggaggccacaaaggccgggtctctttcaacccttccctctctcaaacggtccctcggaccgagtgagcttctcttctcaaatcacttgggaatcaaacttcccgcaaggaccaccacacaattggtgtctcttgcctcaattacaagtgagtgtttgaccacaagaaagaatgccaaagaaaagaagcgatccaagcgcaagagctcaaatgaacactacaaatcactctctctagtcactaaggctttgtgtggagttgggagaggatttgatctcttttggtgtgctttgcaatgaatgctagctcttgtatagtggttggaagatggaaaacttggatgacttgaatgtggggtggttgggggtatttatagccccaaccaccaaactagccgtttggtggaggttgtctgtcgtatggtgcaccggacagtccggtgtacaccggacatgtccggtgcgccagccacgtcaccaaaccctttgggattcgaccgttggagctctgtcttctgtgcccaccttgatgtccggtgcacaccagacatgtactgttcaatgtccggtgtgccggcgcgcgcgtgcctggcttctgcgcgcttctggcgcgcattaaatgcgctgcaggtagccgttggcgccgaaatagccgttgctccggagttacaccggacagtccggtgtacaccggacagtccggtgaattatagcggagcagccgctctggtttcccgaagctggcgagttcctgaggccgctcttccttggagcaccggacactgtccggtgtacaccggacagtccggtgaattatagcgcgagtgcctctagaaattcccgaaggcgacgagttcaagttggagtcctctggtgcaccggacagtccggtgccccagaccagaggtgacttcggttgtccctttgctcctttgttgaacccaatacttggtcattttattggctgagtgtgaaccttttacacctgtataatctatacactagggcaaactagttagtccaattatttgtgttgggcaatttaaccaccaaaatcaattaggaaaataggtgtaagcctaattccctttcaatctccccctttttggtgattgatgccaacacaaaccaaagcaagtatagaaatgcataattgaactagtttgcataatgtaagtgcaaaggttgcttggaattgagccaatataaatacttacaagatatgcatgaattgttcctttgtttttaacattttggaccacacttgcaccacatgttttgtttttgcaaaatcttttgtaaatccttttcaaagttcttttgcaaatagtcaaaggtaaatgaataagattttgaaaggcattttcaagatttgaaattttctccccctgtttcaaatgcttttcctttgactaaacaaaactccccctaaatgagatcctcctcttagtgttcaagagggttttgatatattatgttagaaatactgctttctcccccttttgaacacaataagataccaattgaaaatactctttgaaaaactaagtttttgaaatgggtgtgcggtccttttgctttgggctctcatactctctccccctttggcatgaatcgccaaaaacggaatcattagagccctttttagaactttctccccctttggacataaataaataagtgaagattgtaccaaagaaggagtccttttgcttggtgctcatgctttctcccccaagaatggagagttgcttgaagtgacggcgaaggaagaattacggagtggaagcctttgtctttgccgaagactccaattccctttcaatacacctatgacttggtttgaaatagacttgaaaaacacattagtcatagtatatgaaagagacacgatcaaaggtatgtaaatgagctatgtgtgcaatttaacaaaagaagttcctagaatcaagaatatttagctcatgcctaagtttgttaaaagtttgttcatcaagaggcttggtaaagatatcagctaattgatctttagtattaatgtaagaaatctcgatatctcccttttgttggtgatcccttaaaaagtgataccgaatggctatgtgcttagtgcggctatgctcgacgggattatccgccattttgattgcactctcattatcaaatagcaaagagactttggttagtttgtaaccgtagtcccgcagggtttgcctcatccaaagcaattgcgcgcaacaatggcctacggcaatatactcggcttcggcggtagaaagagcgactgaattttgcttctttgaagcccaagacaccaaggatcttcccaagaactggcaagtccccgatgtgctctttctattgattttacaccccgcccaatcggcatccgaataaccaatcaaatcaaatgtggatcccttaggataccaaagcccaaacttaggagtgtaagccaaatatctcaagattcgttttacggccgtaaggtgagcttccttagggtcggcttggaatcttgcacacatgcatacagaaagcataatatccggtcgagatgcacataaatagagtagagaacctatcatcgaccggtataccttttgatccacggacttacctcccgtgtcgaggtcgagatgcccattagttcccatgggtgtcttgatgggcttggcatccttcatcccaaacttgtttagaatgtcttgagtatactttgtttggctaatgaaggtgccctcttggagttgctttacttgaaatcccaagaagtacttcaactcccccatcatagacatctcaaacttttgtgtcatgatcctactaaattcttcacatgtagactcgttagtagacccaaatataatatcatcaacataaatttggcatacaaacaagtcattttcaagagttttagtgaatagagtaggatcggtctttccgactttgaatccattagtggtaaggaaatctctaaggcattcataccatgctcttggggcttgcttgagcccataaagcgccttagagagtttataaacatggttagggtactcactatcttcaaagccgggaggttgctcaacatagacctcttccttgatcggtccattgaggaaggcacttttcacgtccatttgataaagcttaaagccatggtaagtagcataggccaataatatgcgaattgactcaagcctagctacgggtgcataggtttcaccgaaatccaaaccttcaacttgggagtatcctttggccacaagtcgagctttgttccttgtcaccacaccatgctcatcttgcttgttgcggaaaacccatttggttcctacaacattttgattaggacgtggaactaaatgccatacctcattcctagtgaagttgttgagctcctcttgcatcgccaccacccaatccgaatcttggagtgcttcctctaccctctgtggctcaatagaggaaacaaaagagtaatgctcacaaaaatgtgcaacacgagatctagtagttacccccttatgaatgtcgccgaggatggtgtcgacggggtgatctcgttggattgcttggtggactcttgggtgtggcggcctttgctcttcatcctccttgtcttgatcatttgtatctcccccttgatcattgccgtcatcttgaggtggctcatttgcttgatcttctacttcatcaacttgagcttcatcctcattttgagtcggtggagatacttgcgtggaggaggatggttgatcttgtgcatttggaggctcttcggattccttaggacacacatccccaacatgttccttagtgcgatgcacggagcctcttcaatacctatctcatcaagatcaacttgctctacttgagagccgttagtttcatcaaacacaatgtcacaagaaacttcaacttgtccagtggacttgttaaagactctatatgcccttgtgtttgaatcatatcctagtaaaaagccttctacagtcttaggagcaaatttagattttctacctctcttaacaagaataaaacatttgccaccaaagactctaaaatatgaaatattgggctttttaccggttaggagttcatatgatgtcttcttgaggattcagtgaagatataatcgattgatggcgtagcaagcggtgttgactgcctcggcccaaaaccgatccgaagtcttgtactcatcaagcatggttcttgccatgtccagtagagttcgattcttcctctccactacaccattttgttgtggcgtgtagggagaagagaactcatgcttgatgccctcctcctcaaggaagccttcgatttgagagttcttgaactccgtcccgttgtcgcttctaattttcttgatccttaagccaaactcgttttgagctcgtctcaagaatccctttaaggtttcttgggtttgagatttctcctgcaaaaagaacacccaagtgaagcgagaataatcatccactattacaagacaatacttactcccgccgatgcttatgtaagcaatcgtgccgaatagatccatgtggagcagctcaagcgacctgtcggtcgtcatgatgttcttgtgtggatgatgggcaccaacttgctttcctgcttggcatgcgctacaaatcctgtctttctcaaaatgaacatttgttagtcctaaaatgtgttctccctttagaagcttatgaagattcttcatcccaacatgggctagtcgacggtgccagagccaacccatgttagtcttggcaattaagcatgtgtcgagtccagctctatcaaaatctactaagtatagttgaccctctaacacacccttaaatgctattgaatcatcacttcttctaaagacagtgacacctacatcagtaaagagacagttgtagcccattttgcataattgagatacggaaagcatattgtaatctaaagaatctacaagaaaaacattggaaatggaatggtcaggggatatagctattttaccaagacctttgaccaaaccttgatttccatccccgaatgtgattgctcgttggggatcttggtttttctcgtaggaggagaacatcttcttctccccctgtcatgtggtttgtgcacccgctgtcgagtatccaacttgagcccccagatgcataaacctacaaaacaattttagttcttgactttaggtacccaaacggttttgggtcctttggcattagaaacaagaactttgggaacccaaacacaagttttggagcttttgtgtttgtccccaacatatttggcaacgaccttgccggatttgttagtcaaaacatatgatgcatcaaaagtcttaaatgaaatgctatgttcatttgatgcactaggagttttctttttaggcaacttagcatgggttggtcgcctagaactagatgtctcacccttatacataaatgcatgattagggccagagtgagacttcctagaatgaattctcctaattttgtcctcaggatagccagcagggtataaaatgtaaccctcgttatcctgatgcatgggagccttgcccttaacaaaatttgacaatcttttaggaggggcattaagtttgacattgtctcccctttggaagccaatgccatccttgatgccagggcgtctcccattataaagcatgctacgagcaaatttaaatttttcattctctaagttatgctcggcaattttagcatctaactttgctatgtgatcattttgttgtttaattaaagacatgtgatcatgaatagcattaatatcaacatctctacatctagtacaaatagatacatgctcaacgatagatgtagagggtttgcaagattttaattctacaaccttagcatgtaatatatcgttctcacttctaaggttagaaatagtaacattgcaaacatcaaaaactttagccttagcaagcaattttccattttcgaatataaggctagcaagagaaacattcaactcatcaatcctagcaagtaaatcatcatcattatttctagaattggtagttgaaacattacaaacatgagaatcaaccttagctaacaaattagcattttcatttctaaggttgtctattgtctcatggcaagtgcttagctcgctagataatttttcacatttctcaatttctagagcataagcatttttaaccttaacatgcttcttattttctttaataaggaagtcctcttgggtgtccaagagatcatccttttcatgaatggcactaatcaattcattaagtttctctttttgttgcatgttgaggttggcaaaaagagagcgcaagttatcttcctcatcactaacattttcatcactagaggattcatatttagtggaggatttagatttaaccttcttctttttgccgtcctttgccatgaggcacttgtggccgacgttggggaagagaagtcctttggagacggcgatgttggcggcgtcctcgtcgtcggaggagttgctagagctttcgtcggagtcccattcccgacaaacatgggcatcgccgcccctcttcttgtagtatttcttctcctttcttctcctcttcttgtcgtcgccccggtcactgtcactggatataggacattttgcaataaaatgaccgggcttaccacatttgtagcaaaccttcttggagcggggcttgtagtctttccccctcctttgtttgaggatttggcagaagctcttgatgacgagcgccatttcctcattgtcgagcttggaggcgtcgattggttgtctacttggtgtagactcctccttcttctcctccgttgccttgaatgcaaccggttgagcttcggacgtggagggatcatcaagctcgttgatcttcctcgagccttcgatcatgcactcaaaacttacaaaattcccgattacttcctcgagagtcattagtgtatatctagggttgccacgaattaattgaacttgattagggttaagaaaaataagtgatcttaaaataaccttaaccatttcgtggtcatcccatttcttgctcccgaggttgcgcacttgattcaccaaggtcttgagccggttgtacatgttttgtggctcctcccctttgcgaagccggaaccgaccgagctccccctcgatcgtctcccgcttggtgatctttgtgagctcatctccttcgtgtgcggttttgagcacatcccaaacctccttggcgctcttcaacccttgcactttgttatactcctctctacttagagaagcgaggagtattgttgttgcttgagagttgaagtgctcgatttgggccacttgatcctcatcatagtcttcatcccctacagatggtacctgtgcaccaaactcaacaacatcccatatacttttgtggagtgaggttagatgaaatcgcattaaatcactccacctagcgtaatcttcaccatcaaatgttggtggtttgcctaatgggatggaaagtaaaggtgtatgtttagaaatgcgagggtagcgtaggggaatcttactatacttcttgcgctcttggcgcttagaagtgacggacgtcgcgtcggagccggaggtggatgtcgatgaagaatcggtctcgtagtagaccaccttcctcatcctctttttcttgtccccactccgatgcggcttgtgggaagaggatttctccttcttctctttgtggtgtgaagaagctttcttctccttccctttggaggagtcattcttcttctccttcctcttggtacgggactcttccggtgaagtgctcccgtggcttgtagtgggcttttcgccggtctccatctccttcttggcgtgatctcccgacatcactttgatcggttaggctctaatgaagcaccgggctttgataccaattgatagtcgcctagaggggggtgaatagggcgaaactgaaatttacaaatataaacacaactacaagccaggttagcgttagaaatgagtccgagagagggcgtgaaaacaaatagcaagcgaataatgaagtgagacacgtggatttgttttaccgaggttcggttctctcaaacctactccccgttgaggaggccacaaaggccgggtctctttcaacccttccctctctcaaacggtccctcggaccgagtgagcttctcttctcaaatcacttgggaatcaaacttcccgcaaggaccaccacacaattggtgtctcttgcctcaattacaagtgagtgtttgatcacaagaaagaatgccaaagaaaagaagcgatccaagcgcaagagctcaaatgaacactacaaatcactctctctagtcactaaggctttgtgtggagttgggagaggatttgatctcttttggtatgctttgcaatgaatgctagctcttgtatagtggttggaagctggaaaacttggatgacttgaatgtggggtggttgggggtatttatagccccaaccaccaaactagccgtttggtggaggctgtctgtcgtatggtgcaccggacagtccgatgtacaccggacatgtccggtgcgccagccacgtcaccaaacccgttgggattcgaccgttggagctctgtcttctgggcccgccttgatgtccggtgcacaccggacatgtactgttcaatgtccggtgtgccggcgcgcgcgtgcctggcttctgcgcgcattaaatgcgctgcaggtagccgttggcgccgaaatagccgttgctccggagttacaccggacagtccggtgtacaccggacagtccggtgaattatagcggagcagccgctctggtttcccgaagctggcgagttcctgaggccgctcttccttggagcaccggacactgtccggtgtacaccggacagtccggtgaattatagcgcgagtgcctctggaaattcccgaaggcgacgagttcaagttggagtcctctggtgcaccggacactgtctggtgtacaccggacagtccggtgccccagaccagaggtgccttcggttgtccctttgctcctttgttgaacccaatacttggtcattttattggctgagtgtgaaccttttacacctgtataatctatacactagggcaaactagttagtccaattatttgtgttgggcaatttaaccaccaaaatcaattaggaaaataggtgtaagcctaattccctttcaggtaccctctacgtccagcgcg

SEQ ID NO: 205 - DNA, 2543 bp, Zea mays
  Intron number 2 from transcript GRMZM2G095209_T01 (locus G RMZM2G095209) derived from phytozome v7.0 (chr-ID 2; pos 4 895029 to 4897571 reverse strand)
ctcatcaaagaaaggcatcaagagccttccaggtacaaaatacaaccgcttcaaataaaataaaaattcggagcttatttagacatacacgtattcttctcaattttaaataaactagcaagttgatccacacaaatagcatgggtatagtttgcttagcaagttttcttctcatcttggtgatctctattagcgataaaaaccactttcttagctctcttatatatttaaattcgagatgatcttgcttcttctgttatgattctatggtttccttttctgtgtagtatcgtttagttcatcacaatgctttccatatcttgaggccctccattaggagcctgtcaccatcttttagttccctgcaatcatgagttaccctatagtagacaactttttctgatgtcactgtgaagtttaaacatgtgttacaactcaagttaagtgcaaaaggagaagtctatttttctacaagagtgtaatatgctttagaagtaagtcatgtgaccacgaacaaaacaaacctaagacaatgactaagaaatattttttctacacatttaagtgtctagaaaattttgaaatggatgtcacatgctacatctagcttactgtattccttgactccttgagtttattttggtaggcttaattgctataatagcactaagtgctggttttggcctactattttcaattcttggtgtttccaacatcatcaataaactcaagcaaagaagggcaaaacttctaagacaaaagtttttcaagagaaaccatggtttgcttctacaacagttaatatcttcaaataaagatatagctgaaaggatgaagatttttagctttgaagaactagagcaagcaaccaacatgtttgaccagaatcgcatcattggtgatggaggtcatggaacagtctacaaaggtatcttatctgatcaacgtgttgttgccatcaagaagtccagagtagtggtccaaagggaaattgaccagttcataaatgaggttgttatactttcacagactaaccatagaaatgtggtaacactctttggttgttgtcttgagactgaggttcctttactagtttacgagttcatatcgaataggaccctatcctaccatcttcatggacaatatgaaaatcctctgtcatggaatgatagactaaggattgcactggaaactgcaagggcaatcgcatatctacactctgcagcttccatatcagtgttccatagagatatcaaatctgcaaatatactgctcaccgatacgttaacagcaaaagtgtcagattttggagcttcaaggtcaatttcaatagatgaaactggaatacataccgccatccaaggaacccatggttaccttgatcctgaatattattacactagtcgactcaccgagaagagtgatgtttatagctttggtgtaatcttagcagagctactaacaaggattaaaccggtattctctactcattcatcagagggcaaaagcctagcatcacacttcgtgtctgtgataaaagactgtagtttgttggatattctagatccacaaattgttgaagagggaagggctaaagatgccgaggctgttgcaaggcttgcggaagtatgcttaagcttgaaaggtgaagaaaggcctacaatgaggcaagttgagataacacttgaagatgtgctaggtccaaatgtccattcgagctgtcgagtttcaaggacaagtcaaggtgctcttaaagaccagacacagaaccaaaacaaaggcaatgaaggaactagactatacagtttggagaaagagttcatacagtcatctgaaattccaagatgatattttgcttttgtgggttcatatcttgtttagtaattttgagtgccattttgcacgcttggcgtcaattataaacctagagatatagccttgtgcacctccacaatattatggttgatgtagaactaataagctataccagtaaataattgaacttttggttatagtctgcttaggtggtgtatggtgttcattttgttatgtatccagtatcttgtcttgtggatgtgcaaatgtcacacgcaaagggagacagaaggacccgcgtcatattttatccaccttgatttgcactgttatgctatcctacttgactgtgttgagttattgattcctgtaaattgatgcaggacttaatgctgtaattgaatcgaagtaaaatcttggcctcttgcccaggagatggtcattcagagataaatcacaccagcgtagtcttatacggttaaaaaaagaaaaaaaatgcatcacccaaaatcaaaatgatatttttttagttttaaatgataaaaatacggcgtatgttgaaacgaacctgaaaaaaaatagaggaagaaggggtctttctttttttcttctcatccacagcctcaatatcatcaaagatattgggtccgactccatgttgaagtgagtattttaaaatttaatgttttgtattttttaggcgacggcccattaacaacgagacgttt

SEQ ID NO: 206 - DNA, 8348 bp, Zea mays
  Intron number 3 from transcript GRMZM2G349603_T02 (locus G RMZM2G349603) derived from phytozome v7.0 (chr-ID 3; pos 1 88898640 to 188906987)
aatcatacattgtcaaaagggtatgtttcctatttattctgtaaacctaagattgttattgtagcattgaaaaacaaagggaagacaagcagtgttattgatatgatcctaatgcctggagccctgggataaactttgtgttctcttaagtcactagccagcttctttattcatgagtccttggcttcacatgctgctgcaaacctgcagtgataatgtcttttgttataattatatattaatgcatggaaagccaagcctgtgacaatcatgcaccatacagtctgacaattgttacatttaaacatgatagtcattgtttctgtatgcctgtcagatatacatcgtgtctgtatgcctgtcagatatacatgaaaatgtttctacactacagctatggtattaactgtctatctaccaagaatcttcacagttcacacctcatttgtacatggtttttgtccattactacagttttccaacaatgatttgtcatgctccatagaagtttgagttagctggcttgttcttgttcttagaccacagttcttgattatattattttgagtgaagtccatttgactaccctgaacttgtagttaagtctgaactctcaaatcttaaatcctctaacttttgttaccccctgcaggagttaaaagtggttttgagccacacatccctttttagtccaaaaacaaattaggtaaagactatataaggaataaggttttaaacaatgaaaataccttcaggactaaaaaatcgaaaacattctagagatatactggacaggcccgggcggaggcatgtgcggccggtgcccacgaacagggccccaatcctccaaggcccctaaaataatagtcaccaatagtttaaccagtacacagttcagtaattagctcagtaaggaaaataaatcaactaatctctaagcaaatcttcttctcatgagtcaaatcagttgtttgtatggtgtctttgtctttgatcacgactacatctccatttaaacataaatgtcgttcaagatttcattttaaagaataatactatccaagtaaaattatacaatacaaaattgaatatacaactagacacaactcttaatataatatttttatcatattattatagcctatattagtatagttctagtttatagattgatattccggaattttgtacagggtcttagattttactggcccgaccctgatactggactatataaaaaaactcggtcgtggagggaaagaccacccttccggtattgtattaagaagagaccgaaacatggtcccgactaataaaatctccaaaccctggcccccatcactagtgggccgtcaccgaccactctgcaacggcccagccggagggtggcgcgcaggacgtaacccgggagcgggcgggacacagtgtggggatttttttaaccaagcccgaaattcgcccccaagggggatcgaacccgggacctggaggtgctacttggaagtcttaaccattacgctagaggccctctcgcgatatactggactatgagaaaactagaataaaatatttggagctcatgaaaatatctctgaaagcttcaaaaaatcggatttatctctacaaataaaattcatagaactttttaatcgacgtctaaacacatttggaaaaactttcaacaataaaaatacgattcgcaaccagaagaataaatgcaacagccattattgtgtgttgcattcatgctggtttttttttctcgaacacgtgggagaaccacgcatcaatatatattaagaagataagaaaaagggtctagaaaagacccagtacaaaggtgcccaggaagcacccaaaaaaaaaaaactacaaccaaacctgcctaagagcagcagcccctccaagaccccataataaagcctcatcatggatggacagcaaaattgcgtgaatgtttggggaagcattgtcaaacacacacgcatttctatgcttccaaatctgccaagctactaaaattacaatagagttgaaaccttttttcttatgcttagacacctgtctttctgcctcactccaccaatcttgaaaccctgtagcatcagacgtgggagcaagatgttgcaaacctagcctgcttagtgttgtaaaccaaacttccctcgtaaaaacacaatccaccagcaagtgatgcactgactcatcctgctgatcacacaagggacaactatctgggtgatccattccatgacgtgccagtcgatcagccgtccaacatcggttgagagatgcaagccaaatgaaatacttgcagcgcgggggggcccaagtcttccagattcttgtagcaggctcaaaggttgttgcaccaccatggaagcgcaaataagcagagctggcggaatacagccccgaggaggatggcaaccaccgatgttgatcctccacattagggtacagttgcacctcttggagtaaatcccaaaccaataaaaattcaaacagcacctgcgccgtaaggcttccagagatatcatgcacccaaccattggctgttaaggcggcttggacagatctgcgccgtcttatattcgcgggcacccgatttattagagcgggggcaatctggagcaaagattggccctgaagccatttatctgtccagaagagagtgtttgccccattaccaaccaccgaacacacagaggctgcgaagagagctgaagcaaatctgtgcacctttattttaaaatctgcccaaggcctagctggttcagttttctggagccaaagccatctcaaatttaaagaccatcccataacttccaaattgtgaattcccaacccaccaagagagaggggacgacagaccttggccacccaacgacacaatgtcctcctctaatgtcagttcttcctttccaaagaaaacccctgcgaatcttgtctattgccttgattacccaccttggacattgcaaagcaattagatgataaatgggaatagcagtgagcacagctttaaccaaagttgcccttccggccaggttaagattagcagctttccagccaggaagctttgctgccaccttatcaataagctccagaaaggatcttctagggagctttttaacagagagaggaagacctagatatttacatggaaaaggaacaacattgcagagtaacatctgtcgagcagcagcaatgatatgctcgttgcactgaataggtgtcatactgcacttatttatgtttgtaatcagccctgatgccttgccaaacaccctcaacagctccttgaccacactcagctcatttctgttaggctgaacaaataatacaacatcatcggcgtaaagagagacccgctggccccctccccttcttaataaaggtcccaagagcccaacctcatttgctttctgaaaaagagagttcagcacatccattactaatataaagagcattggggagagaggatctccctgccgcaggccttgctggtgacaaatgagatctcctggttccccattaactagcactcgagtagaggaggaacacaatagcttagcaattaaattacgccagaatagaccaaatcccacatgttccagaacttcaaggaggaaaggccacgaaactgagtcgaaggccttgccaatgtctaacttcagcaagattctaggaattttctgcctgtgaatcgcttttgcagtttctctaaccatcataaaattgtcatgaatacttcttcccttgatgaatgcactctgattgggggagaccaaagtagggaggattgcagcaagcctattggccagaatcttggtgagaatcttggcaaaactgtgaattaaactaatcggtctgaagtcttttacctccatagcctcagccttttttggtaagagagtcacatacgccgagttaaggagataaagcttggaagagtccccctggagaattactgacagggctgccaagaaatcccctttgacaaccgtccaggcacacttataaaaacgcccagtaaaaccatctgggcccggggctttgtccgaaggaatagacttgatagtattccagacctcttcttcactaaatccatgatccagcacttcaagattgctggctggtcggtggaagactcccaaattgagggtaaattccctagaagcagcaaccccaaggagattattgtaaaaattccaaacagcatgtttcttttctgcttgatcaaccacgatccgatcctctactttcagtttgccaataaaattttttctctttctataccttgaatggtgatgaaaataagcagtgttagcatcgccctccttcaaccagttcagaccactcctatgtctggccattgttctctctaatgatgccagccccaaagagtggtgttttagtttacgacgcagccattcttcatgataggagagatctcttgaatctctagcaacttccagcctatgcagaatctcattagtcattaccagctgccgtttaacatgcccaacccttttgctactccaagattggaggtgtttagatagcctttttaatttatctgccatccgctgcaaaggacaaaccgctgcaattggttgacaccaggaattttctacctctgtcatgaaaccttccaacttagtccaaaaactttcaaaatgaaaacgacgtttgccttgagtgaactcgtgcaaacccaccaccaggggacagtgatcagagattgaggaagaggaactttgcatcaaacaatcaggaaatagatcctcccagtccctggaatagaaaaatctgtcaagacgcacaagggtgggggatgacctttcgttggaccacgtgaatttccttcccaaaagcgggagctcaactaactgcagatcattgataatcctctggaatctccccatcatggccctatcaaggttgttgttatttttgtcttcagcccgatagattagattaaaatcccccccaactgcccatggcccaacacaaacagaccggaccatgcggagctcctgcagaaactgcaactttttttcatcagattgtggtccataaactccagtaaaccaccagggaaggttactatcatgattgaactgaactgaaattgaaaattcatccacccttgtctggagagcagagcacaccgaccctttccacgcaagcagaatacccccccgagtgccaatggctggtagaaaggtgaactgatcaaacacatttccaaggagggagaagaccataaatctggaaatagattccttcttcgtttcttgcaaacacactatgtcggggcgagtagactcaaccatcatacgcacagcatccctcctagctttcctattaagacctctgacgttccaaatgaggatttttgacagattcattgataacagaaatacaaccaacataatgtgaggctacagcaggccatcaagcacacgtttcaatgcttaactccctaagcaaaggaacatccaagcattcttgcacattatctgggaccgaccatccaaacaaagctgccagggccttgatgtgagagttggaaaggggtttgtcaaacagctgtccaaattcctccagcatttcatcagtcacagccacctgtgagtttgtgacgttcaacttcaacatgagctccgcctggacttgtctgactgttgaatttaagccttcccttttctttgacaagcgactactgcgacgtgggacaaaatctggcggaagctgtttagttcttcttttttgaattggaggttgcggaagcaagcagtcaatgtctcttgtgatattagccaccagtttcataacgggggtcgcctcctccaactgagaagaaacaccagcaggtgccagatccaaaactggtgccgacaccaccatctgggatgaaaccggtgcaggtatctgaagtctgccctttttcaatcttgagtacaccttcagtctggggctctcaaggacctgagcatcaagtgacattccagcgggagagttcctgtccgcctccgacgtcccaaccaaagattgagttgaggtcagccgggggaccaactcgatcccgacattgaaactgttgcggggcgaaacgatcttggtcagcctctgcaacccgacaaacctctgtcggggagagcccgacccaagcgatttcagcgacccagccaaccttgtccacatgggccccccgtgcccatccatctgcggctgttgcacaactggagcatcaacagcacaacccacagagccaacctttgcgcagactgtcccgggacctgtgcccatgtctgctgccgtgagttccatctggacagccaacacctccctggcaggaacggctaccatgctcccagtgtgtgcttcggctcctgagctgaccgccatcattcccccagagtgcgcctcggttcctatgtcggccgccagcattctcccaatgtgcgcctcggttcctgtgcctgccgccaaccatgaaggagaatggaccgcacgtcccattgaagaggccatctcctcgactcccgccacagaattaaccgccagccgccgcacagggggaggcacctccttgacccccgcagcaaccagcagtaaagggagggggcaatgcagccgtcgcacctcctcgatccccgcagcaaggtcctcctcgggctcctgcgccaatcgtcagcgataaaggagatccgtccagcaggcgcgttggggaggccaccacctcgattcctgcagccgggcccgctgccgagagggcacagcgctggaccgcagcaccacgaccaccagacgttgactgtcccctcgggcccagacgctggaaaattgggcgctgatgccgcccgccgtccggacgtggagaattggagtcgtccgaatgcctcccgccgccatcctcatgccgatcccgtccatcagccgcaggggaatgagctggaggggggtcgaaattcgtcggaaccatcacagcagtaacagccacctcaatatcataggaaagacatcttttctcctgcacatccgtccccggctcaacaatgaggagcttcatcggccgagggaacaaatctgtgttcaaacaccatgcacgaagcctgaaggaagacagatcattcttcaatgacgtgctcggatgaatgtctgtgataatgcaagagtcacggagcagatactccaccgtagaacgatcccatgcgtgggctgggatgccatgaacctcgacttccaccagtgctggcaacctagccgcctcagcatgagccaaccgcgaccaccgtctgcatctcatgttcttgtttgggaagttttcaaatgtgtttaggcatcgatttgaatgttttgggactttttccacttttctagaattcaatccaatgatggaacttttcataaagagttccaaacattttatttgggtgactcttgtcttaatatacctccattatttttctctgttctattaaggattgaagatatttcatggtttgaaaatattatctagcgtttactgggtttgtttttgaactagaaaaggaccacatggttcaacaccacttctaactgctgtgtgtggggggggggggggtagtttgtctggttttggaaggacgtaagatttatgaattttgagttgtacaacatatctagtatacaaacgattagagtgccaacataaaatcttgtccaacagatccatcatctacgaccaagtgtaattccacctccgctcagactattttctaaagaacccttgctttttcacataagggcttgttcggttattttcaatccatatggattgaaggggattgatatggattggaggggattttgacttattagggattgaaactccctcaatccccctcaatccatatggattggggtagaaccgaacaagccctaatagggtgtgcaaccctcaggtaggattgtattcagccgtagatggtggaataattgtttacacactagatacattgcctttcagtgggggtgggggggtcttcaggttcggagataaataggttgatgaaagcactccagtccattattcatattcgttcacacaagattcggcaaataggttgaccgtttttttgttagttccttgatatttattttgttttagcagtttaaatatttggtttgctgcttagtcatttgaaggtaatgcttcaagcatatggcatatttctgagttctggccttatttattatattattagtccccttgtttattattgtttcttactggtttgggatgaatctgtgctttctcaggttaggaaactggaggcgtacatcatcagttattg

SEQ ID NO: 207 - DNA, 8568 bp, Zea mays
  Intron number 5 from transcript GRMZM2G353107_T01 (locus G RMZM2G353107) derived from phytozome v7.0 (chr-ID 8; pos 9 4654496 to 94663063 reverse strand)
gaattaacggatacaaggtacccttgaataatgcatacgtatcttaatttaagtaatttattttaatttatttctaaataatgcttcgttcatcaaacacacaaggctaagtagtctatcaaactatatcggccccttttctatgtaactattttgtaacaatacctacatagtccatagttaaaaatcatatgttctatgaaacagtaaggaacaataatattctatgcatcaactggcccaacatcatacaaactaccattagactatttataggtgagttcaagcatttgttaggcaattaatgacataagttggcattctttctttcattaagcatggtaggtggggttatgcatccataactcctcgacactataattcatatatcaaatgttaatcagcttacacaatatttgtagtatattggttcaaaacttgtgatattctaaatataaaatttcattaccattttctagatataccttttctttgtgtttgatgctcatgattgctcaaattattttcatcaccatacctgcaatttgattttaatacaagaatgctaaagtaatttcttctagtgcaaacatattattttctttaaatcacatcaggattatccataaaataagtataaaaatctatactaaaccagacatctctttttactcttttggtcgtgtgagctattctgtcacaaagaaataataaaaaatgagctaatatttttttgtggtgcattgttaatagtgttgttatagggcataatacaagtaatgttagtttgtctagcaaattaaaaaaaccatatgtatcatatgctcaagaggagtggcaacatacaagcgcaaaatgacatacttcaaagacaaggatcatgaaggtaattgagagcacctaggggggtgaataggtgatcctataaaaatcaacactaaatggcaaaaacttggattatgaaatgttagtgaaatcaaaaccaaggtgctatgtctagatagaagtagatgacttttcacttaattgctcttcacaaagtgagtgttaaacttagagcaattatcaagtgagtagaagaagagagaatcgcacacgaataacaacaggtgacacaacgatttttatcccgtggttcagccaagtagaacacttacctacttccacgttgtggtgtcccaatggacgagggttgcactcaatccctttcaagcgatccaatgatccacttgaataccacaattttcttccttatagcagatgtttccctttgtgaggaatttccacaagttggagcctctcacccttacaatattgatcacaatgaaaaccacaagagtaagggagggaaagaaacaaacgcaagagctagagttgcagcaacgacacgcacacaagtcaagaaacgagcacacaaacgcagtgtagcgagtttacaactcataagttcacaaatctcaatcacaatgatccggatgcgtgcttgcggagtctacgcgtcttaggaagttcaatggaggcttggtgttctgctccatgcgcctaggggtcccttttatatcctcaaggtagctaggagccgttggatctccatttggtaggcaattcttgccttctatccgttggcgcaccggacagtccggtgcaccaccggacatgaacaatgcacaatttctttccttctttggcgaagccgaccgttgaaccctcagtccacttggcacaccggacactgtccggtgcacaccgaacagtctggtgcgacctagtgaccgttggcgcgggccatgcgtcgctcgtcgattgcgcatcgatcgcgctgccaaccgttggcacgagcgttgttggctcactggatagtccggtgaattttagtcacagcgccctcggcgattcccgagagcagcgagttcatcgctgagacagcctgggcaccggacagtctggtgcaccgcaggctggtgcaagtctggctggacttagccaaacttctccaatccaatctcatttgatttgacaaggttcctagcacctagaggaatatgttagtacgagaaacaattcactaaggctagagtcatacctcgattcttgatttgcatctctttaacacttagcacgtatcaacaaaaacaatatgtgttgggcatctaatcaccaaaacatttatagaaatggcccaagggcacatttccctttcagtaatcaaaccaataaggggcaaaattaaggttgattgccaaataaaaaaactgcattgttgtaactactgtacccatgagcatgcaaatgattctgaacattcaaagataatctacataacttaatttgcacagaggttaaataaaatttggtgtgataaatatgtgaaagtgagtttcacttcatgtgatagaatcatgtgtcactaacaaacaaagggttatatgttcttactggtatatagttgtaggcatgatcacaacactaaccaacatctatgaagcaataatggagtcaaaatccacataacctctatatggaactttaaattttatagcatcatcgacatcactggataatggcaaattcccttaagctccaaatgcatggtttctcctgactatgttagagtgaaaaacaataaaagaaggtggttacatttttgtttagaattggtcattaatgagttccatgtgggggtggtggacaatagagaagttaggaagaagtgtggcccaatggtgggtgttgatattggagggtggactatgacaacttagttgctccgttaaaaaggaatgatgactgtggtgttccaaaccttgcttcgacaagtaaatttctgtgtgcgtgttccgggctccagacagtgtgcgaggtgggcttaagatttataatggtttgggcagaacatcattatatccagtcatcggtagcttgcgctattgacacaattgctgatcaatactcgtagtaggggttacaagcaagagagagagagagggaggagaggctcctaaatctctttgtggtggacaaggcggaggtaagggctatagagtggtgtcctaactaagtcctgacttggcgttggggctccgacctctaggtcctcgtcggtctgttgtctttgcgtcttggtgtgcgtctggacgtcttctcatatctccgtctccccttttatcctggggaccgacttcctccttttataggccatggagggggtcgactagtcgtggcttccttatgaaggagtcaccaggcgatggtaaaatcgagcattctaccacagggtgaagccacacgcacccgtcggcccgtggtcgtttggttgtctcacattctttatagccatcacgagcagcatggggcctgagtgtcatcattcgagctacactgacccttggcctccatagcctagggctctgcgtggcttgttgtgccatgcaagcggcctgcgcactcaggcctaattctgataggtcatgagtgcgacgtagggcggtgggtgcactggtcataaatgcaccacggtctgagggggtcataggtcatgagaccgttgtaacttgaggggctcgtaggccatgtgtgggaggtggaccggtgcctcagtcatggctcggtgccaggcgcagttactgcgaccagtcacttatggtgggtcagtctcgggcagggtgagggatccactcgagtgctttcccttcggttcagccaaaccccctatctggttccgctaatcctgtccccgggcttggtggtgcgaggttcgtttgggggcgggtgcttctagggtagacgtttccttcctcctctagttgaccaacgggtcccagttaccagaggcttttccctagtgcgctcgctgactggtagtccccagggatcggggatcttatccacgacaatgaccctatcaaatgtatgaaggtttaatccaagagggttaggggtgaaccaatactagacatactacaaaataactagtagttccaacctaaagtttatatactaattctacttacccaaacacaagacattttgcatcctataactaatcttgtgaactagcatatgctacatagataaaggtaaaggtacacaactaaaaccataaatccgttaagtaaaagatagagtgaggaagcatgaactctcaagactaagcaaagtaaattgtggtattggttatcataaagcaactccaaaatcacatacaactcaacaaagatatcctctatgtcactagtccatcatttaataacaatattgagctttcaacaaatgatcctagcaactaggacaagtcataagagttagtgaggctcaccacttggtgctgttgactctcttgatcactaggatatcatccactatgaccttctcataaagggatctcctcattctaaacatggtgttgtttgtccacaccaaatttagaaggatgtagaggcaccatgaatcaaaggcttgaatatgtcatgattataagaacacttaagcaagctcattacatatcacaagttaaggcctagtcaattactaaatctagcaccagtacaagcctctaatattaccttgaagtttgcatttttggaggagtataaattgaccaaagcaagttagctagcgtcaaatatgtgtttgctacaatcatctattggtatgatgataaaaatgaccatgaaattattctatgagtataactagacgctgctctaataacctttctatgaacactagacgacaaaagtgcaatccataaaagatatacacatgatattttgttcagtttcattggttgttttattaatggattagcacataactttttcacctgtcccaaattaagtagtgagatagtattttaggaggttgagttttggtattttgtccatgactttttactctgagccccattttgatgaccttatagtctatgaaaaagttgtgaaatggctaacaaaaatatgcataagacacttgaagcatgttagtgtcgtttccttctcaacattcattaacatatgatcatgattatcttgaggaggttggacattatctatgtattgtgttcatagtgtccacttccttattgagcctccctatgtcttgatgatctcgttctctttttcataatgaagacattgcatgtttctagtataacttttatcaatgtctacttcctttcaaagggctatatcaaaagtggttaaaacatcaaacttacaaacatgaacgaaacaaaaggtagattcatgcatgcatagcaaaggttttcttttagtgttaaatctcgcaaagtttggatttaatatccttgttctcattaactaacaattttaatttgtaaagaacaaagataaagttcaatgttacggatgccttacacagtagtgcattttcatccagagtgatctcatatgtagaatacatgatagagttcaaggttatggatgtctagtctagttaacttgatatatttttcccaactgtacaagatataacataatgcttgcattcacatcgtttgaaatgagcacttttaatattaacaattgaattagtttacctatttttgtatatccatataaatgagttatagattcacatggtacttatcaccactttaacaagtaccaatcttcttgcatcatggtgcatcaaagccacattaccagttggctatctaatagaggtagcaactaaaacttagttaacttcaagagtatcaaagtcaatcccatataagtgcacaaaatattatgtattgcacacaacactatgtattgcatgtcatccatatcacctaacatttattgggttagtcatgtggttttcccaaaccctcaaagttccaatagaccaccatatataaagtaatcaatcaccaatataaaaacatagtggttgtggttatacttgagccaaatatggatttacacatactcttgccaagtgcttcgcttactaggatgaacaccgctatgtgcactacataaatcttttcttgaattggataaaaagtatcaccttctctaattaattgtcaatgaaaatggataatttactaaaatggtggataaaaatgattcccccacctatataaaactagagaagtacaaaaacaaaaaatgtcactatcacctcaggagccatagtgaccaccatactcaatagtggaagttgggggatgtagttgtggatagtaggtagtgcatatcggttgtgtagtgtggcacaatgttgttgagctagtcctaaaatacctcacatatataggatgtacatgaagcctagctcctttagtcatagtggctagtggttgcttcaaggttccaatgcagtgatgtgaactatatcctacaactgaagtattacacattcatgtacaataccactcccttctcaagcacatacaaattgatttgagtggcataaaaatcagaaattctaaagatgaaagtttgtttagatgtatagataaggagggagggaacatacataatggattcaaggtcaccaaatggcatctatagtcttgcttaggtgtgaggtataggcctatcatctggttccattaatttgcaaaagtggaaataacgggaacactcagatatagacaccctagagttgtcatggctcttggcattattagcaaaccactagtgtgcttcttcattaggatcattgtaacaccatgtgtccaaaatctccttatattgtcaatctactcatgtggaataggcctgcaagcatgtagcacctctcttgcacttttgtccttgctttgtgtaaaagggttaggtcggaggagctacatttcgaatgacaaggaatataagcctaccctcatcttcctaaactttcaaggtggtactaaatccaccaactataactcctcatgtgctgcttgggccacatgggacaatcttagaactactatgggcttctaataggccggggtgttacattaacccccttaagggccaatgctcaggactatccattgatacacaaattgcagggacatgcaacaatggttgatgctcgaattctatatgtaacccctcacatccaaaaactacttatatgacctagcttctcatatggaacatgcctacatatgcgtagcacctatcacacttttgaccttgcttcatatcaaagggttaccccgaaggtgatatgtttggaacaagaaggattataagttgacctttagcctccttcacttctaaggtgatactgaaccactaaccacaaccatacatgtgccatatgggccaacaacacaactattaaaggcttgtacaggctagggtgttttaaccacataggatgtgggaggtagaagagacatcatggtgggactatagtagtggagagtggataccaattgagagatattgagcaatgattgacaaagaggcatacgcagagaattgtatatttagggtctactaaatagtcttggcctctatcctagtgttggtctgcttaagaggcaacctctaaaatgggcactgttttcataggaaggcctcttaaatttactacctattgaaattattatgttttcatagtggactttggctattgtgccctagattgtatgaggtagtacatcaaaaagttcacctttgaaaataaatttcaaattctactaaaattgttttttgtagtagtggcaatttattccctttatttttgtctagttaagaaagattagttcattggaagtctatgtttaataatccaagtagttattgtggcgagctaacccattcaatgaaatatatgccatggcaaatgtcatatgaagggccgcatttaatgaaattgaatgccttatatatgtcgtagtgcaaaactagactagtttgtatcaaaaatatgaaacacttgtttacatgccctatgttctctcagctatgattcacatggagttgtccttatcaacaacctttgttctactagtcccaactctgtctatttgtccttgctatcttttaaagcaatctatcagttttcgatgaactcaatggatacattgttttcgtattctatttcattaaacaatatatacacagataccttatgcaaatgtacactcacatgtgccaaccataccacaataagcaccttcaaactactgaaccgcgaaaactcaaagttcgagaaatcactataagcacatgacctttgatgaccactttacctgtcatcacaagaatatatagcattgttaatcttgcaatgaatctatgaaaatacaagcattcatgctaagataaggatttgaacatgggtggacaagttcctcccaaagaaccttatcatcctttcatggattggaaaagaatggaaatcaaactaaacttttggtcttgcttttgcctaccttaaactagaagtatatgtaaaagcaagacaaatgttgacaattgtatgatgtatatgtaggtatgtatatatacccacacattatacattatatccaatagcattaataatgtaatgattcatttggtacttatttcatggcaatacaaggctaactctttttaatggcaggttttc

SEQ ID NO: 208 - DNA, 13950 bp, Zea mays
  Intron number 2 from transcript GRMZM2G069382_T01 (locus G RMZM2G069382) derived from phytozome v7.0 (chr-ID 10; pos 3571286 to 3585235 reverse strand)
tcgtactgaagtatctcataaaaagaaaagaaaaggtaggaaaaaatctcgctctgtttcaaaatgaagggtgtttttttgtaatacccaacttggaatttataagaaataatatataaaaaaagagagaagttatttcctttatatatgtgtgttatctctatctatcatcacatgtgaacaccataattaaaaaaacagataattaataataaaaagatacactactaaatcattgcatcatgctgaatattttatttgtgtgtgcatttttgtgacaatattataataatgtaaaaataaatatgttaaatatccaaatggggatttaaatcctaaaataatcctagaattaagaaaagagagaaggaaaagattatacaaaatagagaaaataagtttgaattcaaactcaggtatgaagctcacaaacaagtttaaattcaaaatggagatttaaaagtgaaaagaaaagaaaaagaaaaaaagaaaaaaaaagaaaactgctgctgggccgctagcctcgcttttggcccacccacagaatcgctctgcgcggcccaccctacctgcgatctcgcgcgcgctggcaactctctgccacgtgggccccagtggtcagtcacaccataacaacgagcgctactctctggtgactaacaggccgacccctttagtcatccccgtccgtgcgtcaacggagtccgcggattgcgcggcttcgctccccggagaagacgcgggctacatccttatccctcctccacgttcgtgacccgaccataagacccgggaacctggctcctctttctctccttcccccagaccacccacgcggcgtccccaagtgagagaaaagcgtcaccttcgctaccaggttggacgggaccgtagctgttgaagaagagtgttgtcgcgacgagttggcacggagcatctctgggattcatcgggcgaccctgtgagacgaaggaattggcgtagtgcggaaaggaagtggggattcgatcgtcgcggccaaaacttcgccgccgggccgccattcgtggtggggaaccccctaccgccgaccgattcactggtacgacctccagatagcttctattggttgccagctcgatgtagcacctatccggggttaggatcgtgtgacacggcgtcggattgcccctctccggcgagagatcgccgtgatttcgggcggcacccgccgtcgctggcggagtgattggggaggttaccgtggaccattggatgcactttgcgcggccccgattaggagatggattgcgtttcactttgaaacaatctgaaccgcagatccgtagatgggtggaggaaatgggttgtcacgtattttaagatctccaccgtagatagctgatcgtgcggtgaatgatcgcgtacctttcgcttatggagatctaatctggaccccaggtttcagatcgggtggctcagatcgcttgataccccttcagccctggagttttattaaagagcccctgaaatttcagaatatcaacccgccgtcctatgcgctgttccttgagccttaggaattttacccagaggcccctgcctttctcagatttagtgcgcccgggccagagttcataataaatggataaataaaatctgaaaatgatttttatgagaaaaagaattgctagaacttataaaattgatagaaaattcatctctggtccaaattaatccattccactttctaaatttttttaattttattatctatcacttagagcctctgttttgtcatgaaaacagtaagaaatttaatctctcacttaatccattttaaacatataaaacctttgaaaattcataacttaaaatctataactccaaaaattatgattcctgttcgtaggattttattttaatatgtagaatattgctgtgtattttgttcacatgcttggtgtgatgttaattttcccctgtatattgtgcttgtttgtattgtggcgagtagaagagcccgttgctgaggatcctggtgagtagcagatagaagtagctgagcaggagctcattgaaggcaagttgtgcccttgaccactttttacccaataatgttctttaatatcatttattcaagtataggttaattttgatgggacccaataggttaccctagactgtttatctcattaccttgtttacccctgaatcacttgggtagtttgctattgctttacatggatttgggataattatttatcatatctatgttccagttattttgttattctatttatgttcatgtcaagatcattaatgttaattggaacatagagcttaacttgagaaacacgtgccaccacaagggtttatggacgcccttggctgattaattagggaaagctagtggaaggactacctttacccgaaaggggcaaggggcagtaggggagtggtcagtgtagggaggtccttgggttgattttgctgcgatggcggtcaggcaagaaccctgcattggagcttcctataaactgtagtgggttttctgaagctagtggaactttgtaaagcctcgtagtgttaccctgtctcgcctcctcggtagaggtgtatgggaagtcgcgatcccttggcagatgagtaacatgacttgtgggtaaagggtaccacctctgcagagtgtaaaactggtatactagccgagctcacggtcatgagcagctcaggactctctgatgattaaattatggaacctaaactcaatttgtcatttgcatttgcatgggtttattattaattttgttctctattattttattatggtttggtatttacttacacttagtaattgctaataaaattttgaccaactacttaaaagcaatgctcagctttaaccattctctttgataagccttacactccatgagctcccacctttgatgagttcatgtcacattattccccatgacttgttgagcgatgaacgtatgtgagctcactcttgctgtctcaccccccccacaggagaagaacaagtggttcaggaggagccacaaggcgaggagtatgatctgatctaggtggcgtttctcagttgacattggcgccgacgatccttagttcgttttatatttattattttattttgtaataagtcttccgctatgtaatgagtactctgatgttttatgacatttatctctatacactctgttattatatatgttgtcttcttggcgcatgtatgagatgcacctggctttgttccttaaagccgggtgtgacagaagtggtatcagaggaaatgttgactgtaggacgaaacctagatagaaatggacaaacccttacctacttaccttactctgattcattctatacttatcttatcttgatcctatctcaccttctactgttctactctgatcattcttaccttttctactctaagacaagatggatttcacaccatggaatcctacatctacgaactctttaagagataggggacctaagacaaaaataaaaaaactattttctctattaaaaaaatgttggttgattgttctgatgataaatgcttgatttgcttctttgattgattgaaacattatagtcgggcatcttagcatgtaccaccataagataatgtattagcgttagtaggtgacacactaatctacttagctaataaatcctgcaaagtaacatgattcgtaattacatgccttgtctacagccttcctttcttaccctgtatttctaacccagatgggctacccctatagtgttagaagagagcactatagacgtgatccttggtatgtcatggttaagaaaggcaaaggcagtttatacactgtgctaaaggaaccatagaactcaccagttccaaaggagaaagatttgaagttggaattgcagtaactaccgccaccagaatagcgtcattcttagtagatgggaagttgttggtgtcaacattcgtgtggtgagagattttctggatgtcttccgagaagagttatcagagatgccactagatatggaagttgagttggtcattgatctcttacctgggactgctcctatttctaaacggccatacaagatgtccgtagaagaactaaaggaatttaagaagcaattaacagagttacaagagactgggtacattcgtccgagttcctcaccttgggggagcaccagttctatttatacagaagaaagaaggatcgcaagggatgtgtgtggattataggtcccttaacgatgtcactgtggagaacaagtattcattaccccgccttgaagatttatttgatcagataagaggtgcaagagtattctcgaagattgatctccgatcgagttatcatcaaatgaagattaggccatcggatattcccaagacgaatttctcgacccgatatggtttatatgagttcatcgttatgtcagttggactaactaatgcaccagctattttatggatctgaagaataaggtgttcataatatggacaaattcgtcgtagtgttcatcgacgatattcttatttattccaagagtgatagtgatcatgaggaacatctgtgattggtactacggaagttgtgagataatcaactctacgccaagtacagtaaatgcgagttttggattgacaaggtgccattccttggacatatcaattcgaatggagggatattagtggatcctgctaaagttaaggagatagtggcgtggagtatacccactacagttatagagattcagagtttcttgggacttgcaggatattatcgaagatttattgaaggattttctaagatcactaagcctatgacctcgcttctggagaagggccaagaatttaagtgggacgagaagtgccaagacagctttgatcaattgaaggaaagattgatgtcgccaccagtattggttatgccagatctacagaagggatttgatatttattgtgatgcatgtggccaaggcttagtatgtgtgatcatgcaggaaggacatgtgattgcctatgcttcttgtcagttgcgcaaaaatgaattgaactaccccactcatgacttagaactagcatgcgtagtgcatgcgcttaagatatggaggcattatatcatggggaccaagtgtcaagtatacacggatcataagtgtttgaagtatatattcactcggaaggaccgcatccttaggcaacgccattggttggagtttattaaggattatgatttggatattccctatcacccgggcaaggcaaatttggttgcagatgccttgagtcaaaaggagcatgttcattcagctgttgttgcctagctacccgataagattgttgaggatttcaggagacttaacttggggatagttgctcacactgaaggagttattattgatgtggaacctaccttggagcaagaaatctgcaacgaacaaattggtgatgctaagatataagagattaaggatctaattacttgaggtcgaggtccggaattcacggaagatgaacaaggcactgtgtggttcaaggataggatatgtgttcctgatattgaaagcctttgtgagactgttttaaaggaggcctatgactcggattattctattcatcctggtagtacctagatgtatcaggatttgaaaaggaagtattggtggtatggattaaagagagatgtggctacatgtggttaagtgtgatgtgtgtcaaagagttaaagctgaacaccagaggccagctggactaccgcatccaataaaggtactcgactggaagttggaagagattggtattgatttcattactggattgtctcgcaccccgaaaggacatgattcgatatgggtgattgtggatagacagaccaaagtggctcatttcattccagtcaagactacttataagggatctcaattggtagagttatatatgactcgtattgtgtgtttacatggagtaccaaagaagatcgttttggataagaagatcacagtttaccccagattttggaaaagttttcatgagtaaatggatatgaagttgaaatttagttcagcctatcaccctcagactgatggacagactgaaaggactaatcaagtattggaagatatgttgagagcttgtgcccttcagcatggaggaagttgggataaaagtctaccttatgctgagttttcatataacaatagctatcaggccagtctgaagatgtcaccttttgaggctttatatgggaggaagtgcatgactcctctatattgggatcagactggaaaaagacagttctttgggcctgaattgattcaagaagcagaagaacaagtccgtataattcgggagaatttgagggtagctcaaaccaggcaaaagagctacgcagataatagaagaagaccactggaatttgaggaaggagattatgtgtacctcaaggtgtcaccacttcgtggaatgaggagattcaaagtaaagggcgaattgtcacctcactatattggaccattcttgatctttaggcgagttggtgagatggcataccaactcgagctacctgctagtctatcggatgtgcataacgtgttccacgtatctcaacttaagaagtgtctccgtgtccctgaggaacagttaccaatggaagagctcagtgttcaaggtgatttgacttacacggagtatccgatcaagattcttgatactttgactcgagttacaagaaataaggtaataaagatgtgcaaagtacaatggagtcaccatggcgaagatgaagcaacatgggaaagagaagaagagcttcgcatagattttccccaccttttccctcgttcttcctaaatctcgaggacgagattatttttaagggggtaggatttgtaatacccaacttgtaatttgtaagaaataatatataaaaaaagagagagaagttatttcctttatatatgtgtgttatctctatctatcatcacatgtgaacaccataattaaaaaaacagataattaataataaaaagatacgctactaaatcattgcatcatgctgaatattttatttgtgtgtgcatttttgtgacaatattataataatgtaaaaagaaatatgttaaatatccaaatggggatttaaatcctaaaataatcctagaattaagaaaagagagaaggaaaagattatacaaaatagagaaaataagtttgaattcaaactcaggtatgaagctcacaaacaagtttgaattcaaaatggagatttaaaagtgaaaagaaaagaaaatgaaaaaaaaaagaaaaaaagaaaactgctgctgagccgctagcctcgcttttggcccacccacagaatcgctctgcgcggcccaccctacctgcgatctcgcgcgcgctggcaactctctgctacgtgggccccagtggtcagtcacaccataacaacgagcgctactctctggtgactaacaggccggcccctttagtcatccccgtccgtgcgtcaatggagtccgcggattgcgcggcttcgctccccggagaagacgcgggctacatccttatccctcccccacgttcgtgacccggccataagacccgggaacccgactcctctttctctccttcccccagaccacccacgcggcgtccccaagtgagagaaaagcgtcaccgtcgctaccaagttggtcgggaccgtagctgttgaagaagagtgttgccacgacgacttggcacggagcatctctgggattcatcgggcgaccctgtgagacgaaggaattggcgtattgcggaaaggaagtggggattcgatcgtcgcggccaaaacttcgccgccgggccgccattcgtggtggggaaccccctaccgccgaccgattcactggtacgacctccagatagcttctattggttgccagctcgatgtagcacctatccggggttaggatcgtgtgacacggcgtcggattgcccctctccggcgagagatcgccgtgatttcgggcggcaccgccgtcgctggcagagtgattggggaggttaccgtggaccattggatgcactttgcgcggccccgattaggagatggatagcgtttcactttgaaacaatctgaaccgcagatccgtagatgggtggaggaaatgggttgtcacgtattttaagatctccaccgtagatagctgatcgtgcggtgaatgatcgcgtaccgtttcgcttatggagatctaatctggaccccaggtttcagatcgggtggctcagatcgcttgataccccttcagccctggagttttattaaagagcccctgaaatttcagaatatcaacccgccgtcctatgcgctgttccctgagccttaggaattttaccccgaggcccctgcctttctcagatttagtgcgcccaggccagagttcataataaatggataaataaaatctaaaaatgatttttatgagaaaaagaattgctagaacttataaaattgatagaaaattcatctctggtccaaattaatcaattccactttctaaaattttgtaattttattatctatcacttagagcctctgttttgtcatgaaaacagtaagaaatttaatctctcacttaatccattttaaacatataaaacctttgaaaattcataacttaaaatctataactccaaaaattatgattcctgttcgtaggattttattttaatatgtagaatattgttgtgtattttgttcacatgcttggtgtgatgttaatttccccctgtatattgtgcttgtttgtattgtggcgagtagaagagcccgttgctgaggatcccggtgagcagcagatagaagtagctgagcaggagctcattgaaggcaagttgtgcccttgaccacttttacccaataatgttctttaatatcatttattcatgcataggttaattttgatgggacccaataggttaccctagactgtttatctcattaccttgtttacccctgaatcacttgggtagtttgctattgctttacatggatttgggataattatttatcatatctatgttccagttattttgttattctatttatgttcatgtcaagatcattaatgttaattggaacatagagcttaacttgagaaacacgtgccaccacaagggtttatggacgcccttggctgattaattaggaaagctagtggaggactaccttacccgaaaggggcaagggcagtaggggagtggtcagtgtagggaggtccttggttgattttgctgcgatggcggtcaggcaagaaccctgcattggagcttcctataaactgtagcgggttttctgaagctagtggaactttgtaaaggcctcgtagtgttaccctgcctcgcctcctcggtagaggtgtatgggaagtcgcgatcccttggcagatgggtaacatgacttgtgggtaaagggtaccacctctacagagtgtaaaactggtatactagccgagctcacggtcatgagcagctcaggactctctgatgattaaattatggaacctaaactcaatttgtcatttgcatttgcatgggtttattattaattttgttctctattattttattatggtttggtatttacttacacttagtaattgttaataaaattttgaccaactatttaaaagcaatgctcagctttaaccattctctttgataagccttacactccatgagctcccacctttgatgagttcatgtcacattattccccacgacttgttgagcgatgaacgtatgtgagctcactcttgctgtctcacaccccccacaggagaagaacaagtggttcaggaggagccacaaggcgaggagtatgatctgatctaggtggcgtttctcagttgacattggcgccgacgatccttagttcgttttatatttattattttattttgtaataagtcttccgctatgtaataagtactctgatgttttatgacatttatctctatacactctgttattatatatgttgtcttcttgacgcatgtatgagatgcacctggctttgttccttaaagccgggtgtgacatttttggaacagcaatgggtttagagaccccaagaaatttaggttcatttcagatttgtctaaagaactgaacctctcttttattgcgatttcggagacagtacgtaaatcgttcaccgaaccttcccttcgcaatttatgtggaggtaaattttttttgtggcactataaacaacctgagggacgctctggtggtttgttattgggtgttgatttggacatttatgatattggggctatagaagaaggagatttttttgttaaattcactttgtgcaataaaaatgattgcttcaagtgggctttgacattggtctatggcccggctcaattagaaaaaagagatgtttttatctgaattggttcgcatgggcaaccatgagacactgcctcttgtgattggtggtgattttaatatcttaagattctctagcgaaaaaaataaagacaattttgatcatcggtggtcatttctttttaatgtcgttattgatggtctatgtcttaaggaactagagatgactggtcgccaattcacttgggcaaataacctcgaaagacctaagtatgaaaagttggatagaatcctggtaaccacagagtgggatcaaaaatatcctttgtcttctgtgagggccctaagccgtgacatttccgaccatactcctctattactgaattctggggaaccaaactctagttcctcccaacattcttttaagttcgagcttgtttggcttctgagggtcgagttctacgatatggttagagaacttcggtcatacgagtctaggggtcagtcacctatggagaattggcaagctaaaattaggaagcttaggcatcacttaagagggtgggcaaaaaatgtaagtggggcgtacaaaaaagaaaagaaaggaattttgaacagtttggatgtgttggataaaaaagcagaagtatctgttttgtcagcgcaagagcttgacttaaaacaattcttgcaaaatagacttgcagaattactaagagaagaggaggttaaatggtatcaaagagccaatactaagggtttgttacaaggtgatgctaatacaaaatattttcacttagtggcaagtggtaaacatagaaagtcgagaatttatcatcttaaaaatggggaccaggttatagaatgtaatgcacttttgaaagagcatatcacttcctactataaaggtctttttggtccacctgaagcatctgggcgtcttttgactcgtctgtaatgaatgatatcccgcaagtatctctggatgagaattcatatctaacgacagtgtttactgaaaacgacattagagaagcaattttccagatggaacacaataaggccccggggccagatggctttccggcggaattttatcaggtgttctggaatgttataaaaaatgatttgttggctttgtttgatgctttccataagggggagttacctctttttagacttaattttggccacattattctcgtgcattaaagtaaagatgctatgtctattcaacattatagacctatttctttactaaatgttagttttaagatctttaccaaagtacttacaaatcgagtatcgggggtagcaagtaaggtaataggcccttcccagacaacttttataccaggcaggaatatcatggaaggggtagtggttctacatgagactattcacgagctgcgtagaaaaaaggattgtggggtgattttgaagatttactttgagaaagcttatgataagatcaaatggccttttgtacaacaaacattacgtatgaaaggtttttccgaaaagtggtgttcctggattaattaagtcacaacaggtggtcatgttggcattaaaatgaatgaccatattggtgcaagtttccagacttataaaggtttacgccagggggaccctctttctcctattttattcaatatagttgcagacatgcttgctattttggtaaatagagcaaaagaggagggtcaattcgaaggactcatcccgcatttagtggatggaggtttatccattctgcaatatgcggatgacaccgtcctttttttgcaacatgacttagcaaaagcggcaaatttaaagctcttattgataactttcgaacaagtttcagggttaaagataaattatcataaaagtgagctttttggttttggtttgactgaggaggaagaaacactctatctctctctatttagatgccaaaaggcggctttcctttcagatacttggggatcccagtgcattatagaaagttaagtaatagtgattggaaaaccatagagataaagtttgaaaagaaattgagcagctggaagggaaaacttatgtcggtaggtggccggttagtcttgatttattctgttctcacaagcttagttatgtttatgttgtctttttttgaagtgcctaagggtgtactggaaaaaataaactactatcgctctaggttcttctggcaaggagatcatcataaaaaaagtatagacttgcacgttgggatattctttgtcaaccaaaagaccaagggggtctaggtattcagaacatagaggttcaaaataagtgtttgcttggtaaatggttatttaaattgattaatgaggacggtctatggcagaatttacttaggaacaaatacctcaaatcttgtaccttgtcaaaggtaggtagaaaacctggtgactctcatttttggtctgggctactgaaagttaaagaccaattctttggtcttggttcctttattcttaaagatgggaagcagattagattttgggaggacacgtggacgggtaaacaacctctaatgataaaatttccgtccttatataatatagctcgtaaaaaaagtgatacgggtggcgaaatgttttttaataggattccctctaaacatctctttccgcagagctctagtggggtggtaatctttttacgtcggaatagattggtcttgagtatagctcatactcctctctccactgggagagatgagttcaaatggaattagtcaacctcgatagggaaaacggtccgttcgatgtacaatgctcttaataataatcccaagctattctaatccaaaccgctctggaagttgaaaatacctctgaataagatctttatgtggaatcaaattagaggggtagctctcccgaaaggcaatctagctaagagcagatggcagggaagtcaaaaatgtgtgtcatgtcattcgatggtatctctacatcactttcttatcaaaaacacgacgctagaatctattggaggcttttatattgttgttttggtttaagtaccccgagatcatttaaacatatttttggatcttggttgcatggggtgcacctcaaagttaaaaatttgattattacaggtgttgcagctttatgttgggctatctggataagtcggaatgacttagtgtttaacaaaacaccgatggttacttatttgcaggttctgtttcgggcgacccataggcttaggttttggggatatttgcagagggttgaagaccaggagataatcaaggagacgtgtcgacggatcgaagtcgcatctatgcaatttttttcttattttggttggagttttacgaacaggattacatattgaggttatattatgtctgttgggtgtcatgtttattttaatgtttgtggtgtaagattgcactctatgttgggagtgttgatcttttgatgttagtttgtttgtaaggttgtaccctcctttcatagaggacaaagccagaacctggtttccattatctaaaaaagattagaagatgataatgtgacagaaatacc

SEQ ID NO: 209 - DNA, 1798 bp, Zea mays
  Intron number 2 from transcript GRMZM2G144387_T01 (locus G RMZM2G144387) derived from phytozome v7.0 (chr-ID 1; pos 2 05090984 to 205092781)
aggtactctttctcccatcgcatccgctttgttgtgcatcagttctttgcgatagaaatgccggtttcgtgtagttgtcttgtccactgccatggtaggatttggtcctacaggggacctttgcagctgaatcgtgccttagtagatcaatgtcttatgtatttgttttatttttcgtttgattattgtaggctatgttatcgatctaaggatgataagaaatctagcagcagcggtctttccagtctaggtctgctaggcttcggttagctctcaattcatatggattgagtgagattggatgggtttaaatcctaaacaagtcaaatttcttcttaattttttccaattccatctaattttttcaatcccattcaatccatgggtaacgggattaactgaacaagtcctaacggggcggttgttgcctttttttttggggggagggggttggcggattctgatttgtgctgggtgtaaatgggtggaaacttgtttgcttcgtcatggatcgggatgggttgggtgcatgggtttacaagaaacgggagctgggacaggttggcgtgtgcaggggaaatagggcggggatcgggccgccgctacggtggacggcggcgaggttgagctgtgtggcgttactggtgccaacgacccccccccccccccgcccgaaacccagagtggcagtgctctgcgtgtgggtcaccacactggacaagagggttagtatgaggagcgcaggctggcgccggagaggatgcacttgtcactcgtctcgtctacaggctgccgccagccttgatatgctgccgctggcaacttgcatagaaggcgaggagcactgatgttaaacccttattctgtgcatttccatcagtgatttgtttaacctatctgctgcagctctgtttacttgatccatttgtctgctgcatcactctctgcactggttctgtttttctgaatccatgttgctgcagtctgttttgttctttttgactatttttcaccggattagtggtggatttggaaagcgaggtgtgactgtgttcaatggaagtgatcacatggtttccaccacagctcacgagctctttcctacaacaaatatatgcaggatttaatgctggctggccgatgctaatggccatcgagtttggcttttctgtgacattttctgttgttttatgaagaaacatgtttttaacaaatggtgagaaagtcaaatttgtatcctaccatccccaattgctgctgtgttaccagtggatggattttggatgcctcactcatcaatttctattcgtgttcatctggattacttttctccatgagttagaacagcccggtgatggacctttcagcgacctgacagcatcacttagcatgtgccatgggtttaatccgagggtttgtggtaggtttgatttagcttttcgggtacacttgggctacaacatttgactcattggctatgggttggggtgggttacaccttattagcaggcctatccaatgtgattatctgggagttagggtccagctgttagtttgttcacataatgaaaatatttgtgcgatagattcaggttgttgtcttgatatatgagatagattcacttagtttgtttattatgattgattattctgcagttttttcattctacaattctccctattgacaggaataattagaattctagagtagtgttcccatccagactgactatttttgtcaaattaattttattgtactgaaattattgcagtaagttgcagtctgagtctgtcaagg

SEQ ID NO: 210 - DNA, 18684 bp, Zea mays
  Intron number 3 from transcript GRMZM2G020920_T04 (locus G RMZM2G020920) derived from phytozome v7.0 (chr-ID 4; pos 4 9092015 to 49110698)
tcaagtgattccaaatcaaaaccctcctggtccaggtactatacacagcaaatgcaacaccatgcttctttttttgtgctatcaatgtatttatttctcaaaaaatgagtgcaggcatgatattcggggcataggtaagttttccatgttaggagtgtttacttatcaatggtggaatgcatgtttttttattttcacttgcttcctaatatgtttgtaatgatggagtagtatagggatcataataagggcctacacatgtttttcattgatttggagaaggcttacaacaattacaaaggaatgttatgtggtgggctttggataaacacaaagtttcaacgaagtatgttggactcattaaggacatgaacaacaatgctgtagtgttcgaacaagcgacagagacacatatgactttccaataccaaagatcgacttagacgccttacctttttgccttagtgatagataaggtcacaagggacatacaaggagaaatcccttggtgcatgctttttgcggatgatatagtgttagttgatgaaagtcgggcatgagtaaatataaaactagagttgtggcaggagactctaaagtccaaagggtttagactttagacttagtagagctaaaatcgaatatatgagatgtaactttggcactactacacacgatgaaggagatgttagtttggaaggtcaagtagttcccaagaagggtaccttttgatatttaggatcaataatgcagagagatgatgatattgatgaagattttagccatagaattaaagagggtggatggagtggcgtcacacatttggcattgcagaagttgaaatcaaggttttaaagtcggctagtcgactctagtcgcctgagcaccgataaggtgattaatcgcgattagtcgacgatttgctcgattagtcgagcctagtcgtcctatagccgttcacctataacaagaccatatttgtgtgtatatatcgatcattgttattaaaacatcgcttaaacatcgtttaagcgtcgtttaaacgacaaaacatgattaagagttgaaacgtccaaacgttttaccaaaatggagtagaacgcccgtttcacgcatttaaacgccgcttaaacgtcctctgagcattttaaggcgttttacttgcatttaggacgttctactcgtcgtgggcttttcctttcctaggccaaaagatggaaaaccctaagttcctaacgcctaagccttccaggcggtccatcccaacagccagttcctatgttttaggctctatttttatgttgctcacaatcactgagtcacagtgaatcattcttttaggtcttgatattgatgagttggatgatggttactgatcatagatacaagttataacttgtgtggttgaacttgttgaacttgatctgtttccttttatgctatttggtttgtgaactcaagtactcaacttatgtatgaacttattctatatttgaagtgctatgtcaagtctgaaaagacgtttcaacgtttaaatgttaaaaggtggttcataacgttttaacgttttaccgctttaataaccatgatatcaatatatatgaatatatatagctacagctgcctagctagactgcaaaactgcatgaattgtacccgtgtgactgccatcgttctggggttggggcaacacaaattctaggaaggtgacttcaacattattacgccacctcctattctcatctgcagtggcacaataatcaagtgaagaacaactcaagaggaggccaaggcgggcacaatactgctcagtaagtgaacaaagaacattgaacaaccaaaatatcagagcaattactgtctgaagaggtcctcaatcctcttctcgatctctgaattctaaacagaggagtggtcggctacttgcctgttcagtcgctgaacagacaacagaggaggacgagagtgcgctggagggggccctctgcagactacaaccgccgcgtgatggagggggcgctgctgctgctcgaacagagggtcgccagagcacaacagggcgacaggagaggagggcggcatcgctggagaaggggtggcgacgctggagaaggggtggctgcgttggggaagagcgcacacacaacagtgcgtaccatattggtacaggcaagggcgtaggacaaaacaatgtttgtggtgtatacagatggtgggctgacgcacataatataagccggattagtggcccaaaacaggtataactagtcgaccataacccctagtcggatgactaatcgcgattagtcggcgactaggacgactaatcgctacctagtcgctctagtcgagtatgagaccctaatcgagctcggactagcgataaggccgactaatcgcgattaggcggacgcctttaaaaccttggttgaaagacaagttttataagatgataattagacatgctatgttgtatggtgcacaatgttggcatataaaaagacgacatatccaatagataagtgttgcaggaatacatatgttgtgttggatttgtggtcacataagaaggcaaccagaatgattttatatgtgataggctaggggtagcatcaattgaaaaaacttgtccaacaccatttgagaatggttggacatgcgaaaggggctctaactgagttggttaggtggtataagtagcactcctcaggtcttgcgtttggctccctatgggagcgaattcaggtgggggttaaaaagtcccttcgtctgtcccatgccaaagcactggtctaatggccgaccctcgtcgcagtcattctcacatgggctacagtgtcgctgtgtatgggtgggcaggggtttgggcattttctttacctgcgtgagaaggtcttcttaatgtaatgcttggggggtgtcttactccccgcaggtcgagttttttgatgggttggacatggccaacagagacctagaggcaccagtgtatagtgggattttaaggctgtgtctagcagatcgtgtatatggccgtgtaaacactgttttgtacttgtagataacactttttatagagtagactttgaaataggggatgggagatgagataggagagctgctggagacagcataaggcacaaagagcggcaggggaaggccgaagttgacataagagtagtaaaaggagacatgaacgatggaatattattggacaatgaaaccctaattcattgatagacttcatgattacaagtatgacctatattctacccctaatgggctaggctttaggtccataacacacacacaagtagtctaacaccgtccataatcaaaactttagccacaacagatgctgagactggaccgaaagtccgagaacgaggagggaagaccattagtgaaaatgttgacaaactgcgggctcgttgggacagatgaacacaaacatccccgatagccacgcgttgaaggacgaattaaagatcaatctcaacattctttgtgcattggtcctagatggggttgacagagaggtaaacgacgctgatgttgacaagcatactcgtggagagagggttgtgaagatcctggaggagctggcatagccaactcacctcagccaccccattagcaatagtccagcctcatcaatagagcgggagaccacgagctgacgcttggaggaccaatagatgaagttgtctccaaggaacattgcatagccggagtgtggtaggaagggaatgagacatatcgagtgaatgtccgaaggtgatcatagcattcgttaaggcctcgaataaggttgaggacaagcgtgccatcaaaaatgacctccctaaggtcacaaagggagttccccatgccctttatctggcggcagtacttggtgacagagaggtctttctggaggaaggtcttgaaggcgacgttgaggtggagagcatgaacctcgcggttgtcgaggaactactacttgatggcaacctaggcttggcgggaagtaccaccacacttgtgaatgatgtcctggagctcaatagtgaccatctcgaggatctacgagaggaccacactatccatccattgtcaggaggggatagtgagggacaccgtgttggtggggacgtggtcatcaaggacttagcgctgtagcgtgatgaggatgaggttgtgctagcaggtgtaggtggaggaagccaggttaaggaggactgggacgagggagtggatgttctaaacacctgtcgcttcgtacaccgaaggggagtcgaccattgagtactccagggggatcaaggcagggagagttaattaaatggcgctcaacctcgacaagttgctgggcgtgagcatttgctgtggtgtgtctgtgctcttaggcgagggttgtgacccgttcttgctcccgggtagttgccacagcggccttaacattcgtgagggccgcgaacatgactgagggctgcatccatggtggagtgggtagttgcgacatcggaatggggaggagcagttgacggaggcgcataaggcgaggagggccaatatggggtgttcgggacgatgggaatgtcgcccaggccactagtgtcatcgaggctgtgcctaggacagtcgcgcctaggccagaggcgaccaggctgacgacgcctaggccagttgcgaccaggcccatgacagtgagccttgtgcctaggccggcccctcgcctggtgggatccaggccaacacccgtaggggcagggatgggtgacctggtggttggatgagcagggggagtcgacggcggcagttgcccaggccctagcggtggtgacaccgtggtgatggggtcgacgacggggaagagaggagcagcggccacgaaagcccaacaacgtgggagaggagaggggagccagtagggggaggagctttggcaatgggggtttgactggttgtggcgggcgccagtccctggccgcggtcgctaggggaggagggggagacctttggctagaataacatattggacaatgaaaccctaatttattgataggccacaagattgctagtattagtatggcatatattctacccttaacgggctgggcgttaagtccataacacatacagtctaacaaatataaccaaagatttcacattgaataggagtgcatggaaaatagatatcaatgtgtctaaaccttgacttgtggtttttgttgggtttcaactctagcctacgccaacttgcttgggacaaaaggctttgttgttgttgttgtttattggtctcaacatcaacattgccttttagtcccaagcaagttggggtaggctagagttgaaacccaacaagaagtcaccaaaaagagaaagagagagaaagtggaggggaaaagcttttgagagcactaaaagggaaaaggcctaatcacggttcggacatgtggataacttctttccaagcacttctatccaaacacaactcctttgggatattccagtccttcaagtcccttttgattgcctcctcccatgtcaagtttggtcgccctctacctctcttcacattattgtcccgtcttatgatgcctctgtgcaccggtgcctctgagggtctccggtggacatgcctaaaccatctcaaccggtgttgaataaacttttcttcaattggcgctacttctagccgattgtgtatgccatcgtttctcactcggttcaatcttgtgtgcccacataaccaacgcaacatacgcatctctgcgacacttagttgttggatatgctgtctcttagtaggccaacactcagccccatataacatagtaggcctaatcgtcgtcctgtagaacttgcctttcaacttttgtggcactctcttgtcacataggactcccatgcttgatgccatttcatccaccccgctttgatcctatggctaacatcttcatcaatatcactatctctctgtagcatcgatccgaaattatggaaggtgtcctttggtactacctggtctcccaagcttacatctctatcctcactaattgtagtaccaaagtcacatctcatatactcgattttggtcctgctaattctaaatccttgactctagggtctgacgccataaatccaactttctatttactccttctcggctttcatctactagaattacatcgtcagcgaaaagcatacaccaagggatattttcttgtgtatccctcgtgacctcatctatcactaaggcaaatagataagggctcaaagctgaacctagatgtagtcctatgttaatcgggaaaacatttgtatcaccatcagttgttcggacgctagtcacaaccttgtcatacatgtccttgatgagcgtaacatactttgttgggactttatgcttatctaatgcccaccacatgagatccctaggtattttatcgtaggcctttttcaagttgataaaaaccatgtgcaagtccttctgctccttataccgctccatgacctttcttattaagaaaattgcttccatggttgaccttccaggtatgaatccaaattggttcatggtgatatgcgtcattcctctcaggcgatgctcaataactctctcccatagcttcatattgtggcaaatgagcttaatccctcgatagttggtacatctttgaatatctcccttgttcttgaagagtggtactaatgtacttttccactctgtttgatgtcttgtcctttcaccaagagttgatccatctcatccttaatgcatttaacttggttgaggtccttcgtcttccttttccgaatcctagtcattttatagacatccttatccctttcctttgtacttagtcttcggtaaaaggtcatcataggcttgaccctttgcctcactcacagctcgctttgcagttttctttgccaccttatacttctctatgttgaccgcgctcctgtaacactctttcttctttattgccttttgaacgtcctcggtccaccaccaagtatctttaggttcacctctgctccctttggttattcgaaacacctctgacgccaccttcctaatacaagttgccatcttcacccacatgttctttgctttttcgggccaagcgccctccacaaaaactctttccttaaaaacttcggatgtctcccctttgagtttcttttttttttctcgaaagcgcaggagagctacgcatcattatattaagtagaaggaaaagagggtccaaaatagaccatagtacaaaagacctccccagaggggataaaaaaaccaaagaaaaaagaagagaaaaaacaaaaacaaacagttcctgataaacaaaaccagcccatcagcgataaaccaggcagctaggtgcccctctgatggttgcggcaagaaaggagagacccttagctcctgccatttcccacaattgatgttcctcccttgcctgacaaagagctgcagaaacactaggggagattccatcaaagacaattcgattccgatgattccaaataatccaggctcccaaggcaataagggagttgacacccttcataatcatatctccagagccattgtcaatcatctcccaccaacccgtaaaagacaccgtactaggtgtaggagctagattttgtagtctgaaaatgcacatcagccggaaccagaattctctcgcaaaaacacgagaaaccaaaatgtgatccaaaatttcagactcttggtcacaaagtggacatttctccggatgatcaagtcctctctttgccaacctatctgctgtccagcatttatttagcaccgatagccagaggaagaagtggcatttagagaaggcccaagttttccaaactctttcatagtgaccgaaatgcacagacccgatgaacaacccatcatatgcagccttagcagaataagtcccatttgcaacaatactaaaagtatgtttatcttctatgtctggcagcagctcaaaatctgaaattaaattccaaagatgaagataatccaataatactcccaccgagagtgatcctgtgatatcaacaatccatcttctatctgtcaatgcttcctgaaccgtccttctgttagtgatttttttcggaatgatatcaaataatctaggaaccaaatctgcaattttctgcccatgaatccatttatcagtccagaacaaagtattagccccattaccaacctttgaagtcaacaccatcgagaagaaagcccttgctttatctggaacctggataggaaggctgcaccaaggtcggttaggctcagtcttttggagccaaagccatctcatgcgcagggcccagataagttctttaagactagaaatgccaagactgcctagctgtaggggtctttagactctgccctaggccaccaggcagtgaccacctctggcctccttgcgccctctccaaaggaaacttcttctaattttatcaatggccttgatagcccaagggggaatattttaccgccatagcaagataaataagcattccggtaagcacatgctgaacttgcactttacggcctgctcttgtcgtcaaatctactttccagcccggtagttgatcagtaattctatccacaataggctgcacctgatccttggtgagatttttcagggacagaggcagccccaggtatttacacggaaaggttgagatgccacaagggagaagatcctgaaccatttccaactccacacccccacactgaatgggataaacattagacttttgttcgttgttgcggagacctgaagcttccccaaatagatgtaagatatctagagttatagcaatatccgctgccgaagggtgtaagaaaagtgccacatcatctgcatacatagatacccgatgcagaggttttctgggggaaagatccaagagcagaccagcgtgttcagctttagaaaacagtagaccaagaacatccataactagaataccctttgagtttccaccacttcatcctcgcaattttggcttgtttatccctatgggcacggatccgaaaatggaagtcaaccaccacaagattatgttggggcacaacatcctctccaggtatcaccttacaatccaaacatgcttgtttatcttctctccttgtgagaatgaagttaatctagctcgaacaatggccactgctaaaagtcaccaaatgagaatctctctttctgaagaaagtgttggctatcactaggttgtaggctacaacgaagtccaaaatatcttcttgattcctaccaccatacccgaaactgatggaataagtcttgagcatctagaggacagcctgcttttgactgtcctctgtagtcctttagcatctagaggacagcttgactgtcctctgtagtctctttagcatctagaggacaacagtcgctttttgactgtcctctgtagtcgctttagcatctagaggacagcagtcgcttttgactgtcctctgtagtctctttagcatctagaggacaatcctgttgtatagtgtgtgtgagaaggtgtggtagtgcagcccctagggttataaatatgtgtccccaacccctctaagggtatggcattgtgtagagtttgaggaaataaacagaaaattgccccaactcatagtgtcatcctcttgatgagagttagagtccctctacttacagaaacctccatgagccagctcataacctgcatttgttgaacctacatgaccattgagatctcctcctatgaaaagcttctcattggtgggtattgctctgaccatgccatctaagtcttcccagaacttactcttctcgctcttttttttctcgaaaaacacatgactgcatttcagatatatattaagaagagggaaacaagggtctaaagtgtcccaaaaaacaacgcactccttatggaggctagtaacacccgtacatggaaggatccataaaaaaacacactccctacaacaacctatgcagggggaagccaaaaaggagagccctttggctccagcaatttcccagcttctttcctcatctgcttgctccagaattagaggaaggctgatacctccataaaaatggctctattgcgatgcttccaaatcatccaagatcttaaaatgacgagggagtcaagacctttcttgaccagaccatttactcctcgctctcactgagaccaacctgaggggcatatgcacttataatgttcaagactacatccccaaaacaagtttgagtaggataatcctatctccctgtcttttgatatccaccactccatccttgaggctcttatcaatcaatatacctactccatttttgtttgccactgttcctgaggacaaagcttgaaactagtgttctccacctccttcgctttttgccccttccattttgtctcctggacacataggatattaacacacctcctgcttgctgtatcgactatctctcttagcttacctgtaagggaccctgcgttccaactatctacacggatcctagtcggctcaactagcttccttacccctcgcacccgttgggacagatgtgaagacccttgcacatttgtcactacactcgggcgccgatgtagcgcgccactaaggaagcgatgacccggttcttgctcacttgacatagcgcgccaccaagggggtggcggcccggcccttgcccatttaacaccatactcgggttccgatatggcgcatcactaagagggctatgccccaacggttttctattgggtttcatctctatttgagtggctaagttttttttatagctggctcgccatgcctaacgcaaccctccttgtacctggacttgggaccagactatgctaacatatgctgagcaaaattattattgctaaagttcattggccatcataatatattgcatgcttggatgccataattttaggaaagttctgtgtgaagtaactgtagttttaaataagacaggcatgcaaagccgtcgtttacaaaaggggaacatatcaggtgtacatagccctttggtgcacatggtccacatattaacacaactatccatcccagatccaacatcatctcacatcttttccttcgtgcacagagcgaggtggtggtggagggtgttctttgcaaaacatacatgacaacaagggaaggtgtggaagattgttagatctatgatggatggtcgtgattgaatatgtaaaggtccatgtacacctttttttttatcgaacgcgcaggagaactgcgcatcttatatattaagaaaaaggagatagaggtctaaaatagacccagtacaagctgccaaaacatacattaaaaaagaagaaaaaataataggggggtgggtatccagacaacccccagccccaccagcacctaaggccacagtctcctaagatctcttgcccctgccaagccccaccgaacagcatcctcatgaatatgctgcatgataatgctgatgttgggggatgcaccatcaaacacacattcatttctatgcttccatagccaccaagccaccagaatcactagggaattaaatcctcttttctgattttttggcacctggcactcagcttctctccaccagtcttggaaagccgttgttgtcaatcctggagtcaggcgatgcagccctaccttgtgcaaagtctgccaccaagtgtctctggcaaacacacaagccaccaagatatgctgaactgtttcctcctgctggtcacaaagggggcaccttacaggatgcacgagacctcgtctgcttaatctatccgctgtccagcaacgatttagagaagccaaccaaatgaagaatttacaccttgggggggcccaacttttccaaattctagtagccggctcaaaagagactgaaccagccataaaacgatcatatgccgatttagtggaataatctccagatgcagacggggaccatctatgcacatcaggaatccccggatgtaactgaaaaccttgcactaggtcccaaattactagaaagtcgatgataatctgggctgacaggctgccagatatgtcattaacccatctattgtttaccaaggcttcttgcacagatctgcttttcttgattctcactgtaatatggctgaccaaagtgggggcaagggcagatattgattgcccatgaatccagcgatcagtccagaacagggttcgagagccatcacctacagtagtgtggaccgaggcagagaaaagagctttgacattggaatgaaccttgaacaagaaatctgcccagggcctttctggttgagtttttttgagccaaagccatcttagatttagagcccatccaagaacttcaaggttatggatacccaggccacccatgcttagtggtctgcaaactcttgcccaaccaacagagcagtgaccacctctgatatcttttctgcctttccacaagaagcccctccgaattttgtcaatagccttgatcacccatttagggcattgaagcactataaggtgatggataggaatggctgtgagcactgatttaaccaaggtcaaccggcctgctgtgtgaatgagggcagatttccatccagatagtttatcagctatcttgtcaatgagttctagaaaagtatttttgggaagtttcttgactgaaaggggtaaacccaggtatttgaatggaaaagccacctcagtacaaggaaaaaactcctgcgcagccaccatgtcttgttcctcacaatgaatgggcgtcatactgcatttgctcacatttgtaacaagtcctgaagcatctccaaagattcgcagaatttctttgaccacactgagttcttctctacttggctgcaagaacatcaccacgtcatcagcatatagagagatacgttgcccatttcctcttcttaacactggttgtaaaagactcaattcctgggctcttaaaacaagagaattcagcacatccataacaataataaataacattggggatagaggatccccctgccttagccccctatgatgatgaatgatttcccctggctctccattaaccagcaccctagttgaggaagaaaggagcatcttggaaatgatattacaccatacagaaccaaaaccaaggtgcgttaacacctcaaggaggaaaggccacgaaaccgaatcaaaggcttttccaatatccaatttcagaagaattctaggaacccgctgcttctgaacagccttggccgtctgctgaaccagaatgaaattgtcatggatgcatcttccttttataaaagcgctttgatttgctgacactatctcaggaagtctggaggccaatctgttagccagaatctttgtaacaatttttgcaaagctgtgaattaaactgatgggcctgaaatctttgacttccaatgcttcagctttcttgggcagtagagtcacataagctgtgttaagaagatgaagtttggatacatcaccttgtagcaccctatttaacgcctccataacatcatctttgatgattggccaagatattttataaaattttccggtgtatccatccggccctggagctttgtcagcagggagagttttaattgctgcccagacctcctccatagagaaattttgatcaagagcagaaaggtccagggtaggacgatgaaattcttccaaatttaaagttgactccctgggggctgctgtcccaagtaacttgttatagaaatcccagattacctctttcttttcctgctgctcagaaattactctgttatcaaccatcagttttccaatgaagtttttctttttcctgtgtctggcgtggtgatgaaaataggcagtgttggcatctccttctttcagccagtgcagtccacttcttactcgggcaacagttctttccaaggaggctaatgccaaagagtggtgcttaagggagcgacggagccattcctcagagggagacaaatttcttacgtcacgagcgatttccagcctgtgaaggatctcatttgccatcagaatctgctgcttaatgttgcccacttttttctgactccaggcttgaaggtgcctagcaagcctttttagcttgtcatggaaccgctgcaaggggcagcagacttccagaggttgtgaccaagaattttccacctcttccatgaacccctctaatctgatccagaaactttcaaaatgaaatcttctttttccttggacgagatcatgtagccccaatagtaatggacaatgatcagaaatctgggatgcagagctctgcaggagacaattcggaaacatgtcctcccattctgctgtacagaaaatccgatccaggcgaaccaaagtaggtgaggcccgttcattggaccaggtgaacttcctacctgaaaggggcagttcctttagaagcaagtcattaagcagccgcctaaaccttcccatcatagctctatcaagattgtcattgctcttgtcctcagctctatatattaggttgaagtccccaccaatcatccacggaccgaggcactgtgatcgaatcaggcgcagctcattaagaaattgaattttatgctcatcgagttggggaccataaacacccgtaaaccaccaagccacaccatcctgctgctggaattgagcagagactgaaaaattgtctattctagtttggagcatcttgcacaccaaaatcctccaagccaaaataattcccccccgcgtaccagccgccggaagaacaacatactcttcaaaatcagaacctaacagagagagaatcatatgccgagaaatggacgctttctttgtttcttgcaaacagacaatatcaggcttagtgttatcaatcgcaacacgcactgagtctcttcttgccttattgttcagaccccttacattccaaaacaaaacctttgaaggatccatcggaaaaaaccaaataaaaccactaggtgctgtaagagcagcaaccttactcaaggtcttctgggccttgcccggcgatacacaacacattaacaggttcaaagacatctgggactgtccatccaaagagggctgacagtgctttgatatgagcttcagagagtgaatttttgaacaagttgccataagcttcaagggctttaggactaaacaactctccatcgcaaggcacatccaggcttcttatcaggtcagcttgaatctgtctgtgtgcagcatttgttttattatctcgctttgccaggcgactgcttctgcgtgggatgaagtcagatggaagttgcttggatcgtcttctgtgggggagtggtggagggagcagaccatccaccttcctggttactttgtcaacaaaagcttggactgcatttccaatatcattctgttcttgaggagaagaggcttgatttggctgaagggcttgaatgagtggggaatcctgagaatcatacttttgcctcctgttatcagctgtcctcctagtataaacttttagggacgtactgccctggccagttaaatttttattctgggctgcaactaaactgagggcccaagcaggctctggaggggacgaaatttggacgctcagttccagcgacccagcaatggtatgctggggcgaaaccaacgcaccagattccagcggcccatccaaaacagaaatgtccagcagataattacgcaggagtgagtggggcgaaaccggcccaggaaccatcagcggcccagacagctggggcgaggtttgcctggcccattccagcggcccaaccacttcaactgccaggagtgcctcattactgttgggcggctgtacgcgtgccccagacgtgaggcccgaggcagcctcgggacggaaacggttttttgcttcggcttcacccccgtagctctttaccccaacagccgccggccagaacccgtcccccgagagagccggcaactcaggaacaggaaggggcgctgaaaagacttcatcgtccaaagcagaaacctggaccgtcgctgcctcttcggatcttgttgcccttggaacctgaaccgtcactgtcacagcagatcttggcgcctcgggtgcaacgcttgtgccgtgattagcagagcccctaccacagtcattcacaggagcaagagggcccagacgttggtggatgggtcccctctgaaggtcttctcgccggcgtcgagggggtggagcctcaggacggcgacgatcgccatcttcgtgcctgttgtcgttgccaggaggaggaggtggaggggtcccatcagacagtggcttctcgactggggtgacagtcacttcaatactgtaggataaacaccgtttcacatgatccgctggcgttggctcaacaatgaccagattcatggcacgttgaagcttttctaactcgcaacaccaagcccgaagcctgaaggatgaaaaatctcttttcatggaagaatccgggtgcacatctgtgatccaacaggaattaccaagtagcagttcagctgtggaccgcccccaagcgtgcaacggaatcccttgtatctcgatgtcgaccagcgacggcaatgcggctgccgttgcatgagccagccttgtccagcgcttgaactgaatatgaaactgaggccctctgagaactcttcctccattgagcacctttgttgcagcctcctcatccgaaagaatcaggatgaagtcctccgggaaggtctgatgaatggacatggaatctgcctcgatctcaaaacttcgtgccacttcttcaatgacttcagagcctaacacctctggccttgtaccaatgatcgtgacaaacaaagcacggcaaaacgccgcctcttctcgtgccatgtcggaggaaaaatccaacacacaagaaggcctggcaaccaagttgtgagtggccgttgccggacgaacgtcgtcttctccaactgaaccggagggatgcttcacttgcgggtctgcccgacccccttttccgcgacgccttttcctcttatggggtatgtcactgccatccgccatggccagaggaggaggtacctctgaagacactggaggggagagacgacgccagaccggaagcttcgttggattcaactgagttgaattcgcctgagttggagccaaggcccgaccaccgccttccatggcaatacgctgccaaaccgaggtgcgaggcgtccgcgaacccagtctctccttgagcggcttcttctctttcttgaagtgagtaggacactgtgccacgcgatggcccagatgtaggcacccaaaacagcgagggggtctacgacacgccgccacgaagtgagaggtcgacaggcacttatagcacttgcctcggagatccacaggggacctacgacgaagctcacgctcaacctgccgagaccgcctgcgttccacgagctgccacccttcttcgtccctgctgtgttgagtagcaggacagcgctctgctactggagcagaggactgacgtaaagcctctagctttaggtcgtgaaccaccgggaatttctgcaccgccgggggacaggccgccttgatgggtcccttgataaccgcctcaagaaaggttgtcggagcctgggtaggtgaagaggagcagcgagtgccaaggcctccctgacaggacccccccgacgacgaggcaggggaggtgtcaatccaccgccgaagcttcggacgtcccgcctgaggaaggtagagtgacgccccacctgagggagctgctgctggagtggacaccggctccggagtggacaccggcagagggctgttggagacgccgtgagggcgggagatggggaggggctgggaggggtggggaggctccatagtcgcttggtccatgtacacctgatatgctcccttacaaaagtggagtatctaaaacttcaaaagactgtatttttagcaagtcatgagtggagtatctcagatttcaacaaggctaaaattttaactataccatgtcttggaaaactagaagattcattccatttgaacacccaatagctttccaatattttttcacaaaaccacagtagttttgcaatactcagaaatcacttcgcagcaagggctttagatgtttttatcgtaaaagggcattatatcattatatgttattcttcacccaaaaatgtaggcctttttagctttctcataagtcaaaatagaaaaatgcaccaacatctgcaacatcaaatcaaattaattcaccatgagatatgtctctagtgcatttattttgtattatagattgtatatgttaatatatttttatctaaactggatcaaagttatagaagttctaggacaaaagtacaaaactaaaaaccatacattttggaacgggggaatgtttattaattattggggtgtaaagtgatgcacatgcattataaattaccactgtagttcagatgtgaatcaatcacttagtttcttattggttgcagtatacttgccattttctctctttacttcagaatgcagaatctcactgtcaattttatgtgtaatatgctgcattgagtgcttctgcatcttttttacaattaaagtaagcattccttgccttaacattcatacggtaatattttctaataaaacagcacctggccttcctccacaagttagtaatccagca

SEQ ID NO: 211 - DNA, 2135 bp, Zea mays
  Intron number 1 from transcript GRMZM2G012140_T01 (locus G RMZM2G012140) derived from phytozome v7.0 (chr-ID 9; pos 1 26720837 to 126722971 reverse strand)
ggaacggaacggaacggaagaagcctcagctcgaggtacgtacgtgctcatgcatgcttattcccgtttatagttgtggaaccaggatcgctcctgctctgttttcccattaactaaactcgatcagcttgcactgcgctgcggctgcgccttcgttcatcgttcgacgatctctcccccggccggtgctgcaacccaacccgtgcgtgcactgccagccagcgctgctggtcagagcactacactggccgcttgccttgcccaaccgcaaaaccaaatcagagatgaatctttactaatcttctctcccggtagcagtcaccgtgcatgctggcaagcaggacagcaccttccatcagatccttcgcctgtcatcttctccattccatacccataatataggcgacgcgacaggtcactgctcacaaactaccgtcggatttaggtgttttagctcaccaaccacctggattagacgacggacgtggggggtccatgttagcacctaggaaggggggatcgggagaggaaggtgctcggctgggaagaacacttggagaagaagggagcagggcgtcgtttcctttttatcccttagctacaactccacactactgactagcccccattcacttacacggcccactcaggcccagttactcggacgttaccgtgcttcttcctgttgagacgtccttcgtcagcttgcttctctgtcgtctgcttttccttcaatccgctcgcatccagattctgttgagccgcgtggtgctgacagtccagcctgtgtgtgagtgacagccaccggtacttgtgcgctccccttccacagtttgacgacacttgggcgatgctctcggccgacgacactgacaacaggagagtgtgcaaagcatatcagcagcgagcgagtcccggtcccggattcgcatctcaattatttccttccttccgcttccgcttccgctgcgacgtcgcacacactgcgcgcgttgatagtgagacaccctgctgttggacagttccacctctgcacagaagaactcgaaacctctgcaacctaacatccctatgattgagccttgacacgctgtcacggtagactgattagtctttaatggtagcactgttttggcgtcatacgactctctacaaaaactgctccgctctctccgcttcaaatcataatcaatcttataggggtagtatatttgtgaacggagtgagtagtatgttttatggtaaacatactttggcggcataaatgcttatgttattctgtgaaaggaattttggtcaaatgatgatgttattcatttgcttaaaaaaatcccagctctcaagtgtcaaccagttttgagttttatcagatatttatataaaaaatactaacaactacgagtatgcgtgtttggtggcataaatgtttgctgttattctatgaaattgttgtactttttttttggttttaaacctaggcttgggttcttttggggtggagggagtgcaacttttctagtttttttacaacctctacaaaaaaaaaatacaacacaatgaataataccaaattctcaatgaaattatgttttccaagctcatgtatttgaacttgtagatgttagtattacttctaagaaataaaaaaaaagttagaaaaagtttgacccaatttaagtcaattctcaaataaactataggcttagacgaagaaaatgtaaaagtacatgcatatgtcgaaaaagtacttttatgcggttggtatatgccttcagaacgtaaatattactccataagttccaagatacatgaaattttaattttgctttaggtcagactcttctaatttgatcaatgtttaggaaaaaaatatattaatatctgaaatgccaaaaaaaaacatgtgtacatgtttcgtgttaaattcaacaaaaaaactcatttcattctgtagtagatactggtgtattctcttatatttttattggttaatgagttttgagacaaaacaaaaaactattgtatattattcagcacaaggtttatatatttatttgtctttgcattaaactctgaaaccgtcggggctgatgatttcagttatcggaggagtcgctagcaccacaacacagggc

SEQ ID NO: 212 - DNA, 17738 bp, Zea mays
  Intron number 1 from transcript GRMZM2G143056_T01 (locus G RMZM2G143056) derived from phytozome v7.0 (chr-ID 5; pos 1 21330662 to 121348399 reverse strand)
cgccgccgattgttgtcgctctgcctcctggcctcgttgcgcctcccccgcgaggtggtggcccaggctcaatgtcacacctggatttcggggcaccaagacccgggcgcgaacataatcaccaggtgtgctgggaccaagtctcacacatatgatgaatcatggcacaagatcgaatgtcacatctttactacttaacatgaattctatacaaaataaataattacattataaggagacaacggtccagcaacccaaagttgactgggagacgacgacctagacctctcacgaacacatcacagcatcctccatgcgcctcatcctgtggtacctgttcttgacttgtgggggggtgtgagacagcaagagtgagctcacatatgttcatcgctcaacaagttgtggggaataatgtgcatgatctcgccaaaggtgggagctcacgtgaagtgtaaggcttaccaaagaggatggttagagctgaacattgcttttaaagttggtcaaaattttattagcagttactaagtataagtaaataccaacccaattaagaaaagtaataacatcacctgcaatgcaatgcaaatgacaaattgaatttagttccataattaatcatgtgagggtccgagctgctcatgaccgtgagcacggctagtataccagttttacactctgcagaggttgcgcatttttacccacaagtcatgttacccatctaccaagggatcgcgactccccatacacctctaccgaggaggtgaggcagggtaacactacgaggcctttacaaagttccactagcttcagaaaacccgctacagtttataggaagctccaatgcagggatccctcgcatgatcgccatcgcagcaaaatcatcccaaggacctccctacactgaccactcccctactgcccttgcccctttcgggtaaggtagtcttccactagctttcctaattaatcagccaagggcgtccataaacccttgtggtagcactgttttcccgggtggtcgctccatgttccaattaacataatgatcttatcatgaacagtaataataaacagataataaaagtgtgatcatgaataatgtatctgttgggaccatgcttcgtcgccgaaggtcctgcaaaaagaaacagcttcggctgaagctgcttgaacatgatgccgaagataccgttcacgaagcttcggaactacaacatatccgaagacgaaggatcgaaccgacttaaagataaaatgaccttttagccttcaatgatctgagtcattgttgtaaacttttatgaggggcataattgtaattcttcatttgctgtgtcctgtgcctataaatagtgaacagtattcctttactgttcacgcattcctgtaattgctaacgcatcactcgggaattattgcttgtcaaggcaaaggtataaatgtatttaaacgttgtattcaaacatcttaaattcacataataatgtatgtgaataagatcatttgtttttcaatacatttatctttaatgtttcatgttttaactttactttatgttatctttataagtttaattacgaaggtgaaaccttcgtaatactatgttcgtgaccttcgtccaaagttcattaaatccttatggagataatgtttcggcggacgaagggtattgatatttaacattttatgttgccttgttcttaattcatagcatttgagagcaagtcccaacattggcgcccacctccggtgaactcacttccacttttttgagctcatggcttcgttcaacattcaagctggagctgcttcggctccaaagttggtactcccgataacaggcggttcatgctcagagccagccaacaagaagcagaaaaaggaggcatagagaagggtacaacatgtcagagtgcaaggacccttcatcaagtcaagatggtctcacattccaattaccttctcccaagaggatctttcaactcaaggattacccacacaacgatgctatggattatctctttgtgtgaatcaaaggatttctggtccataatgttttggttgatacaggcagcgcagctgatatcatatttgctaaagccttcagacagatgcaagagcctgaagataaaattcatgatgccacacatcccctctgcggcttcggaggaaggcagattgtagcactcggcaaaatcacaatgtcagtgaccttcgggtttatcaacaacacaaggactgaacaagttgtgtttgatattgttgacatggaatacccttacaatgcaatcattggtcgtggtactctcaatgccttcgaagcaattcttcatccagcttatctttgcatgaagataccttcggaccaagggcccattgctattcatggaagtctggaagctgccagaagggccgaaggaaattggacagactcaaaagcaatccataatatagatggagctgaagcttgtgagcaatacaagttcagaagggaaaaagctgcttcggctgatcagccgaagcccatgctcttatgtgaggacatagaagagcagaaggtgttattgggatctcaactgtccgaagaacaagagaaaaccttgataaggtttctgttcaacaacaaagatgtttttgcttggtcagctaatgatctttgcggggttaacagggatgtcattgagcactcgctcaatgttgatccatccttcagaccaagaaagcaaaggcttcggaagatgtctgatgataaagccgaaggtgctcggaacgaagtgaaaagactcctcagtgccggagttatcagagaagtaaaatatctagaatggttggctaacactgttatggtaaagaaggccaatggtaaatggagaatgtctatcgattttactgatctcaacaaggcctgtccgaaggacgagtttccattgccaaggatagattccttagtcaatgcagcagcttcatcagagcttatgagtctgctggattgctattcaggctatcaccaaatctggatgaagaaggaggatgaactgaaaaccagcttcataacccccagtggaacatattgttaccttcggatgcctgaggggcttaagaatgccagaggaagttttagcagaatgacagcgaaggtcctccattctcagataggcaggaatgtgctaacttatgttgatgatatcatttgtaaaaagcatgaagcaagataatcacattgctgatctgcaggagaccttcgcttatttttagacaagctaggtttaaagctgaatccggaaaaatgtgtcttcggagtgaagaaggggaaatttcttggttgcctagtttcaacaaagggcattgaggctaatccaagcaaaatcgaagctatacttcgaatggaaccaccaagtacaaagaagggggctcaaagattgacaggaaggctggcatctctcaacagattcatatctagatcagcagagagaaatttaccatttttcgaagtgctgaagtcagccgaagtttttcaatggggaccagtccagcagagagccttcgaagaactgaagcaatatttgatagatctaacaacactaactccaccaacgccaggggctcctttgttattatatgtggcagcttcgcactcagcggtaagtgcagcacttgtccaggagaagcttgaaggccaagccaagaaacatgccccaatatattttgtatccgaagttcttagtttatcaaagaaaaattatacagaattggagaaaatactgtatgctgttttgatggcctccaggaagcttcgtcattattttcaagcttacaacataattgttccttcttcacaacctttgaaggatattataagaaaccgagaagctactggaaggattggaaaatgggctgcagagctcaatgaattttgtattgattttgtccacagatcttcgattcaatcccaagcgttggcagacttcattgctgactggacgtcaggggctcaggaggaagaaatgaataaagatgccgaagcatggacagtgttttgcgatgggtcttggggaaccttcggagcaggagcagctgctgtgttggtttcaccttccaaagttaaaacttgttatgcggcgagacttgatttcagttgtacaaacaatattgctgaatacgaagctctgctcttgggtcttcggaagttaaaggcaatggggatcagaagggccattcttaaaactgattcccaagttatttctggtcatgttgacaagagctataaagcaagagatccgaagcttgaaaatatctagatacagtccgaaggatcgaggtttcctttgaaggattctctgttaaaaatattcctcgtggagaaaatgaatatgctgatctattggccaagtcagcagcacaggggctgcctttaccttcggaagtattttttgaaacaataaaagcaccttcggtcgagcttcttgaaagagcggtcctcaatatatcccctgtctatagtgaagattggagaactgaaatcatctctttccttcagggtaattttctttcagacgacgaagcttaaaacaaaagaatagaagcaagagctcgactatatgtcataatagaaggggagctatacaagcgaggggtctgttccccattgctcaagtgtttatccagatccgaaggtatagaattaatgaaggaaatacacgcaggcctgtgtggatctcacattggatctaggcctttgcttgggaaagttttttgtcaaggattttattggccaaaggcagcttcggatgcagcggatttagtccaaaagtgcgaaggttgtcagaaatgtgcaagagatcaaaaacaaccttcgtctttaactcaattaatacaacccacttggccgttgcaaaggtggggccttgatttactaggtccattaccaccagcacagggaaacttaagatatgttgtagtggcagtagaatatttttccaagtggattgaggcaaagccactagccacaataacttcggttactattcaaaagtttttctggcaaaatattgtttgtcgctttggagtgccgaaggcccattactgtggatattgggacacagtttgattctgaagctttcagagaattttgtgatcaaattggcacgaagatccattttgtatcagttcgacatccggagtcaaacggacttgtcgaacgagctaacgggatcataatgacaggaataacaggctttacacctttcaaagtggtgtggagccataacacaaccatgtcaagatcaacaggctttacacctttcaaactattgtttggggatgaagcaataaccccggaagaggccaaagcaggatcaataagaacggtaacttcggcagaaggtgaagacgaagctgattgctctgtggaaaaagatgctatagaagggatcagacttcaggctgtggaaaacatcaataaatatcaagccgaaacaataaaatggcgagacagaaaggttaagctgaagaatattgaaccaggacatctggtccttcgaagagtagctaaccctgagacagttggcaaattacagctgaagtgggaaggaccttttttggtagtatcttcgtcaagacccggttcctatagattgaaggatatggacggaaacgacatccctaggtcatggaatgcggatgagcttcggcgatattaagtttaatttgatgtaattttttctatttcttttttgtggcacccttttcctttccaaagggggagaaaggtttttaatggggccacaacttgtaatttttctttccttatttcggttctataaaggtgatatcccccaaaaaatgtaaatgtaaaataccaagggaaaagaaaagaaagcagggagaagttcaaaagtcgttcctaagggaatgcagagcttacagcgaaaagtcaacgctgattccgccgaaagtaaaaggcgaagaagctcctaagggaggcttgcaacgaaaagtcaacgttgattccgctgaaagtaaaaggcgaagaagctcctaagggaggcttacagcgaaaagtcaacgctgatacactgaaaagtaaacgatgaagctgaaaagtgaaaagatttgaatcattctcaatattcatctccacaatacatttcatcatgtcatttgcattcataaacattcatttatacatatatagaatcatcatcacatcacacattcgacaatgaggagagactttgaaaaaggaaaattttttatgcttcgttatgtacgaaaagaagggaaggtgtttttcgccttcgactcaaaaaagaagtttcgtccacaacaaagcagattgtacacagacagcggaaacaaaatatattacaaggtatgtacaaatttacatgagtttttccataataatattacaaaagtctttccagaatttttgcaggaaagaatattgcagcaactatcaagcttcagcttcatcatgcttcagcttcgttatacttcagcttccttatacttcagcttcgtcatcctacgaatattaaagaacagaataagaaaggtgcaaatttcaaggagaaggtaaaagtaacaaatataagcttcttaccggcttaagatgacttcgagcttcgtcacccgccattttccgcccgccatttacccaaatctgggtcataaatctatttccgatacttcgagctaggcttggaatatctatcagatctgatgatgataagctgaagttaggcctattaacaatctttccatgcgtgcagccagccttcagaaaagcggtagctgtgtcccgagaagctaccagggcgcagaagtcagcatggccaccaataacttcatcaagagcgtcaacctcgccttcaatatattctaatgtgctgggtttcagctgaaggtgtaaatttttcagagctggctccaatagaatgaaacacgtccttcagccactgcacgcatcggctgccgaagcttagacatttctcttgaagctccttcaaggatttttgcaaatttgaattcttttccatcttagttttaagacttgcttcaagctatttcttctcctgctcagatttttctagttgtttgagcaattcatcctttaaactgttattctcggcttggacctcagccaaggagccttccatagactgaataacaaagtctttcttctctaatgcaccttcgtgttccttagtcatcattttaaggtcctggatggtgaagtccttcttttcagaacagcttcataatcttcaactttttcttccaaatctttgatgatagttttggtcttctcttcttcgagatcttgttgcatttttagaactttactcaatagtatactctgccaaaacaatcttcgtcagtaaatgacctaaaacataaataaaacaataataataaaatttgttaccttaaaattagcataaagcaggcttccggcgatatggtgtcgttgatatctgcagaggtcagcttctagtttcggtaggccaacgcttttggagagggttctaacaactttagcctcggtgcggttccgaaggcatcttaacttcccttcgttgaccccaccaaataacgtagcccctggcttatacccgcaagatatggcatattttttcaactcttccttttcggaaactgttagctcttgtccaagcaagtcttgaaagttaaaactttcttcttctgaagtgtcatcgatctgctcctttcccttcccagttgcagtggttaccgcagccacagcagcttcttcctcagccattttcaggagaatattgtcaataacttcaagggtagtttccagattcgaaccttccgtgatcccagcttcggccccagcagcttcggcgtcgccggtttcagcttcggtggtctccactctagaagcttcggctgcggcgccttcggcttcagcggtctcgacaaaagccatttttgacactgttgccggtggcggcgtctgatgaatcacatctgctatttgaataattcttcgttttttcggcagtacaggactttcttctgccaaagctgctttgtccctctgaaaaaacttcgtcagttccggcgccagcggacttagcttgacagccaagggttcagtcattaccttcataatctcttctactttggcagtagaaggtgtcgcaggagtttcttcttgaaccaatgcttccggttccggagatgcagttctcctttttcttgcagcagccaccttcggctcagggatcaactcttcagaagtttcctttttctttttggccactttggtgctttcttcgtcaacagcgctggcgattcttttcctcttcgggcctccaccatctccgcccaatcgaccatagttaggatattcaaagcctataacatcaagtactctgtttagccttcgtttcggccgggtgccgaaggctgctgtcatcaattggtcctcctttttagagtaatttccaagaatctctgtgctcattatttcgattgtttcgagccattcttggcaggatgccttaaagtatttcttgaatttatagtgatagggtaaccggacaagctccccctctttcttctctcctttaagcttcggcatagcccattccttcatagttggaaatactttgaaagccagaaattcctacaccaaatccctagtgccaatgtgctctgcaataattctgaattcagccaacgccgtttgggttggaccttctggtgtcatattgcactgaggtcgggtttctccgaagattagttcaagcggactctgcacaagcttctccttgtcgtcatcaaccttgacgtagaaccattccgatttccagcctgccagccacttgcttcgatagctgatcacagcaaattttgtagttttccgatatgcaaagttgtaacaaccaaaattttcatgtagcccatcctttctggccttagtttggtagtgtagctcgtgtactcggcagaaaccttcggcaaatggctccactgcttggcttcggagagcccaaatataaacactaagcctaacaatagcgttaggagttagctggtgaaaatagatccgaaatttcttcagcacattggcaatcatcctgttcagaggaaatctcagaccaactttgaggaaactcttaaaaatcactatttcatctttttgtggcttcggggtaatctcttctccaccaaagcgaatcatcttcttctcatcttcgctgaagtagcctgacttcaccatctttgggaaatcagccttcgagatagtcgactttccgaactccaggtgactaggtttgctcggtactgcgatattgtaatcatcgtcagtaccagcctcctcaatatctgcttgttctgcttcagcagcagggatgtcttctgatgtcatcaatccagttcgcttcattgcttcagagataggaacagtttccgcaccttcggcttcgtcttcctcgcgctcaactctagtagtagagcgcactctggccatttaattttgaatttcttgaaaaatttcttgaaaaataatagccttcttttccgaagctattcttctgacgaagcaaattctaaattggagcttcgtttgaatgcgaaagttaagcttcggctatggttgaaaattttggcagcaaaacagtgcaatagcaatgaatgctgtggtaacttcacacctacccgtctgtttatatagtgttgcaggtaagaaggtgaatcgtcaggatttttacaccaggcaaacagttgctcgcacccgctgaacggtgggccgcaaaaacaagaacagtgaatctgcatggtgggaccgctacacacttgaaagctgtatcgtttctcgacaacgagctcagggaaggtgtttttcggaccttcggcttcctgaagcctaagagacttttttcacggatcaagctcgttacgaaaaacgatctagcaccgtgaaggggctactgttgggaccatgcttcgtcgccgaaggtcctgcaaaaagaaacagcttcagctgacgctgcttgaacatgatgccgaagataccgttcacgaagcttcggaactacagcatatccgaagacgaaggatcgaaccgacttaaagataaaatgaccttttagccttcaatgatctgagtcattgttgtaaacttttatgaggggcataattgtaattcttcatgagctgtgtcctgcgcctataaatagtgaacagtattcctttactgttcacgcatttctgtaattgctaacgcatcactcgggaattattgcttgtcaaggcaaaggtataaatgtatttaaacgttgtattcaaacatcttaaattcacataataatgtatgtgaataagatcatttgtttttcaatacatttatatttaatgtttcatgttttaactttactttatgttatctttataagtttaattacgaaggtgaaaccttcgtaatactatgttcgtgaccttcgtctgaagttcattaaatccttatggagataatgtttcggcggacgaagggtattgatatttaacattttatgttgccttgttcttaattcatagcatttgagagcaagtccccaacagtatcttcatacccaaaaccacataaagcactagcaagtacaacccaaaaagatcagtggtaaacaaggtataaagatagacaaactagggtaacctattgggtcccatcaaaattaacctatgcagatcattatgattaatcagaacatggctgggtaaaaagaagtgatcaagggcacaacttgcctgggacttgagattctaggtaccaacttgctcttcagatgacacgtgtcctcaccgctaaacgtagcaatacagacatacatgtataggcaaaattaacatcacaccaaacataagaaaaaatatataataataatctacacattaaaataagattctaggaacatgaatcattaattttggagttatagattttaagttatgaatttctgaagattttatgtgttttgtacaagattaaataggatataaattttattgtgattttcatgtcaaaacagtggtactaaatgataaacaataatattacaaaattatagaaactggaatggaccaatttgaacttaatatgtagtttctatgaattatacaagtttctagcatttattttcacattaaaattcattttctaattttttactggattttctacttttctggactgggcatcaaaaacagaggaacacaggggcctaagtcacaattttgttaagactcaggcaatccagaggtggactgcgggtttattctcatattttacagggtttcatgtgtaaaacgtctacggcgaaggggtatggtgtatccctggccgcaggatcggatagcgatggtccagattaaattgcacatctccgcaaaccggtacggctcgggatccttggattataaatgaacgacctagattttatgaggcttgatctgctccaaattgtccgatctgagatccatgcacccgcttggatcccacgaagcggtacccatttctaatctacgccgtcgaattccaaaacagcggtcatcgtgccacccccacctccagccagggacggcggcggcgctccaagcagagtggcggcgccatggccggcaatagccgccaagcacccaaaaccgcaatactctaatctaattagtgctacacgtccaagaggttaaggcgaagactactggatatgacttactggtggttgtgacggaggcaagctcgaccacggcgtggcacggatcactggcacacgcaaagcaccatcgacgaacacggcgagcccagtggtgttcttcgtccgaggagtccacgcgcgcaaaacccgcggccacggaaaccctccccgattgctccaaggtcaccaaaggcgtcgaaggtagagagcgacgacgacggcagctccttttccccccgctaggtgagcagtccacggtgggcggactgggttccagggggcgcaacatcgaccaggggtttgatcacgattgtccatggtggttagttctccatcctctctgttcggccgtgcaggcaataatgctagcaccgaccggattcccccaatttcttcgcgcggcgccccccgatttctctcaccaatgctctgctccgagaagggggaatgctgattcgtccagccagggacgtatcttataggaccgaggagcgcctggccggatcgggatcccgctatccccggcgtaccggaggggagctgaccgacccgcttcaagcggccgaagtccaagcggcgagatcgacatcttgttacggccgaggtccgcggagtccgtcctgatccatagcagagaaatcggtcggctgtttgaagaggacgaagctgaccactggggtcccacaggtccgtgactgagggaagcgcatgcgtgaggtggctgaggggctggaagtggggcccaggcgccggtgtcacgtgcaggtgcgcggtggaaggaaggagccggatgggccgagggggcgtagtagctgggccgcgaaggggaagagatttgggccggctatggaagtttcagcccaaacactgatttgatcttttcttttcttttatatattttctgttttgttttcaaatcccaattttaagtattcaaaccaaattcaaattttattttgaatttcagattccaaaaatcaaacataatcccgatgggaatttagactctactgtttggattatttctttatttttataaagtatatattcttgcctttccattcattttctattctatatttttttaatttataaattgagaagaagaagaaatgcattaccaaaaattatcatcaagagatcaaccatcctttatctatttattgattacttaactattttaatacactctcggttgattataaatagaaagggtcctaatgaagttcttaaagggtttttcccaagaattttggaattgctatcctaaatatatatatttatttatttcgttatcctttttttgtaccaattttgggccttacaaatcctaccccccttaacaaaaatctcgtcctcgagatttgtaagataagggatatacagagattggttgtaatatagcttttagtttctagttggtaccaaaatcaagagatttttttatacaaatgagtaggtgattaggaaggcatgggtatatatgtacaaccaccaaatgtgtaaaaatgtctttaaagcatggataagcttgggtaggacatagtagggtaaggaaggactccataatgcatagtggatcttgattcctttggaagtatggcttgattcttattattcctcaacgagtttgatctccttctcgagtcttggtgtcttcatccgggtttgggacaagaggttaagatagatctgtaggcaacagatgggtagagggtttagtaggtagctatatgctagatgtgattagttatgtaacctgttttgtaggtcaagttgttgggtgtggccgagttgatctaagtcactaatttaggcgtatgtgaattaggagtatggccttatcttttgtaacagcattaagtaactcaatctagcttagatcataatagattagatagaatccagattaggttggtatgactagattaaactagttaagattagatagatctaccagggtaggataaatattattaggatatgctagaatcttttaagaaggatggacattgtttaggctagatattttaatgagtgataatctaagttgattagttatcttatgatttttttatttatatttatgcctatatgtatatgcagatgtaattgtggacattactccacaactcatcacactcaatcaaagatccaaatcagacatgtatcataagaacaaacattcaagcatacaaatatttacaaaaatacttttgattttgttcctattaataggtctcctattcctaaaggtcacttttaggtacaggatttcaaggtgtgaaatccacatttgtctttagaaggaaaaggtacgaataatcagagtaaagcgaaatgagatgagaaaaagattaagaaaagtttagaaagaataagagtagcagaggtaagtagacaatggttgtccagttcaatctaggtttcatcctacagtcaacattcctctgataccacttctgtcacacccggatttcggggcaccaagacccgggcgcgaacataatcaccaggtgtgctgggaccaagtctcatacatatgatgaatcatggcacaagatcgaatgtcacatctttactacttaacaggaattctatacaaaataaataattacattataaggagacaacagtccagcaacccaaagttgactgggaggcgatggcctagacctctcatgaacatatcgcagcatcctccatgcgcctcatcctgtggtacctgttcctgacctgtgggggtgtgagacagcaagagtgagctcacatacgttcatcgctcaacaagttgtggggaataatgtgcatgaactcgccaaaggtgggagctcacgtgaagtgtaaggcttaccaaagaggatggttagagctgagcattgcttttaaagttggtcaaaattttattagcagttactaagtataagtaaataccaacccaattaagaaaagtaataacatcacctgcgatgcaatgcatatgacaaattgaatttagttccataaattaatcatgtgagggtccgagctgctcatgaccgtgagcacggctagtataccagttttacactctgcagaggttgcgcatctttacccacaagtcatgttacccatctgccaagggatcgcgactccccatacacctctaccgaggaggcgaggcggggtaacactacgaggcctttacaaagttccactagcttcaaaaaacccgctacagtttataggaagctccaatgcagggatccctcgcatgatcgccatcgcagcaaaatcatcccaaggacctccctacactgaccactcccctactgcccttgcccctttcgggtaaggtagtcttccactagctttcctaattaatcagccaagggcgtccataaacccttgtggtagcactgttttctcgggtggtcgctccatgttccaattaacataatgatcttatcatgaatagtaataataaacagataataaaagtgtgatcatgaataatgtatcttcatacccaaaaccacataaagaactagcaagtactacccaaaaagttcagtggtaaacaaggtataaagatagacaaactagggtaacctattgggtcccatcaaaattaacctatgcagatcattatgattaatcagaacatggctaggtaaaaagaagtgatcaagggcacaacttgcctgagacttgagattccaggtaccaacttgctcttcagatgacacgtgtcctcaccgctaaacgtagcaatacagacatacatgtataggcaaaattaacatcacaccaaacataagaacaaaatatataataataatctacacattaaaataagattctaggaacatgaatcattaattttggagttatagattttaagttatgaatttctgaagattttatgtgttttgtacaagattaaataggatataaattttattgtgattttcatgtcaaagcagtggtactaaatgataaacaataatattacaaaattatagaaactggaatggaccaatttgaacttaatatgtagtttctatgaattatacaagtttctagcatttattttaacattaaaattcattttctaatttcttttacttgattttctacttctctggactgggcatcaaaaacagaggaacacaggggcctaagtcacaatttccttaagactcaggcaatccagaggtggactgcgggtttattctcatattttacagggtttcatgtgtaaaacgtctacggcgaaggggtatggtggatccctggccgcaggatcggatagcgatggtccagattaaattgcacatctccgcaaatcggtacggctcgggatccttggattataaatgaacgacctagattttatgaggcttgatctgctccaaaccgtccgatctgagatccatgcacccgcttggatcccacgaagcggtacccatttctaatctacgtcgtcgaattccaaaacagcggtcatcgtgccaccccccacctccatccagggacggcgacggcgtcccaagcagagtggcggcgccatggccggcaatagccgccaagcacccaaagccgcaatactctaatctaattagtgctacacgtccaagaggttaaggcgaagactactggacatgacttactggtggttgtgacggaggcaagctcgaccacggcgtggcacggatcactggcacacgcaaagcaccatcgacgaacacagcgagcccagtggtgttcttcgtccgaggagtccacgcgcgtaaaacccgcggccacggaaaccctccccgattgctccaaggtcaccaaaggcgtcgaaggtagggagcgatgacgacggcagctccttttccccccgctgggcgagcagtgcacggtgggcggactgggttctagggggcgcaacatcgaccaggggttcgatcacgattgtccatggtggtcagttctccatcctctctgttcggccgtgcaggcaataatgctagcatcgaccggattcccccaatttcttcgcgcggcgccccccgatttctctcaccaatgctttgctccgagaagggggaatgctgatttgtccagccagggacgtatcttataggaccgaggagcgcctggccggatcgggatcccgctatccccggcgtaccggatgggagctgaccgacccgcttcaagcggccgaagtccaagcggcgagatcggcatcttgttatggccgaggtccgcggagtccgtcctgatccatagcagagaaatcggtcggctgtttgaagaggacgaagctgaccactggggtcccacacgtccgtgactgagggaagcgcgtgcgtgaggtggctgaggggctggacagtggggcctaggcaccagtgtcacgtgcaggtgcgcggtggaaggaaggagccagatgggccgagggggcgcagtagttgggccgcgaaggggaagagatactgggccgactatggaagtttcagcccaaacactgatttgatcttttcttttcttttatatattttctgttttgttttcaaatcccaattttaagtattcaaaccaaattcaaattttattttgaatttcagattccaaaaatcaaacataatcccgatgggaatttagactctactgtttggattatttatttatttttataaagtatatattcttgcctttccattcattttctattctatatttttttaatttataaattgagaagaagaagaaatgtattaccaaaaattatcatcaagagatcaaccatcctttatctatttattgattacttaactaatttaatacactctcggttgattataaattgaaagggtcctaatgaagttcttaaagggtttttttccaagaattttggaattgctatcctaaatatatatatttatttatttcgttatacttttttgtaccaattttgggccttacactcaacgaggcggccatcctcgccattgccgtgggagggtgcgt

SEQ ID NO: 213 - DNA, 8392 bp, Zea mays
  Intron number 3 from transcript GRMZM2G032962_T01 (locus G RMZM2G032962) derived from phytozome v7.0 (chr-ID 1; pos 2 77142261 to 277150652)
cgctaggcatctcagttgaaggtggtgaggtatgcgctgttcttatggatacactcaacccgtcacttgctgattgtaaaaaaactatttgctgctagctttttttcattcatattgattttatatgttttgcctagtacaaacactgttggcccttgtctcttttaatcataaaaagtaaaacccccagtgttttagagttttatgaacagctatgggtagcttctgcaattgcatgcagatgtgtactcgaactagatttttttgtgcgccctaccagccaaaatttcgagcgttttgtaggatagtgccatcacatgtcacttttatgacttttccaaataaaaattgatacacattgctcaagtgaaataagaattctatggttatgtacacaattgtcactgtttcgttcagctgcaaatcatttgcacaaagagtacagcagagatagggggtgacaatgatacagcgatgtgagtatggagataaaaaaggcttttctaccttagattgtctgtaaatatgttgaacctcaaaacggtcaaatgagtcactgcaaaatttagtctttgatcataattagatttttaatcccatgtcaaacagatcaacaagtttaggtacagggtgtaaacagtaaaaaaagttatatatcgctcaagaaaagcttacccagtaatgaaaacaacatatgcagctttagctctagtaatgatctccaagggtctccaaaactgtaaatatccaaccaggctgctgtggatgcgctcaaagcaatctttggtatgatacatcctaaagtccaaatgctattgcattaagatcatcctcagttggaacaactctagcggacctgaaatgtgagatcatttggcttaaagtccctgattaacaaaatattgtgtatcattatatgatgtcctcatggatctttggtcgatttgcatgatttgaagcccctgtggatcctaggtcgattgaatcggaggtggagttcctccagatccttacaccgttgcaattttcattcaatataccactctacatttggagcacactcttacgacaaagttgctaaacacatccacctttttcttttgatatgcactacatccacatgttcacacaatacataacacaacatattttcagttttattcgtagagctacattttttctaagcaagcaaacacggttctattttaaggggcttgcattatacttagcagttagcactacagctagaaatcaaaattgacctcacaagcgaactctgcacaaggaagaacaaaaggtatatatgatgaggaatcaagtggtttaaaattttggaattgtctctatattgcccatgagtttatgaggcaaacaaagcaaccaagaaatgaaggaactgattgcttacattaaagaagttagacaatggaagagaccaccgagatgcctaaaatgtccatttatcaatatatatgcactatcttgtcccattttattttcaaaaaagttgtgtgtacaaagacgtttttatctatgtatcggcactgtcaaacaaaacatcagaatagctagatgctgttaaatcctgattaatcaaatgcagcattacttattgaaccataggtacatgtgttctgctttgataaatctatgtttatatgttacaaagtatagacactactgaatgtaaacttctacttgccggcatgccttgctagagacgaagaagatgatccctggaccactcaaacacacagaactcaacacaaactagactaggacaccaaactgcacccctgtgataggtgtattctattgatatgtttgtgtacataattacaaatgcttagaagaaaactagccaatctgctatcaattagctaagaaagggaactaatcaatcagctatcaattagctaagaaaataagctaaccaatcagctagcaaaattagctaagagagaaaaataatgaatcaactaagaaggaaacaaataaaccgagctggattatgcacacaaaatatatttttctgtcgtaactgacctagttcagatggaaatagggtgtgtttggtttggcttttggctttggcttttgccccctaaaagccaaaagccaaaccaaagggctgaagcagctttttctaaaagccgacttcctcgcagtgcaaaattgaaagcacccctcgacctgcttttagtggcttccggatggaactgtgaaaacatatatcgaagaacttttaacgacttttagtggtttcgaccaaacagtttttagttttttaacagctcacagcccacaacagcttttttcacagctcacatcccacaacaacttttttcacagccacaacctaaccaaacagacccatagtctatgcataaaaaataaggtgatcttcagaaaaatcaaaatatattaaaacattgaccagcctgtactcctgcagaacattcatagcttatctctgagaggcagcatcctgctctgctaaaatgcaagcctcctatgcagtttacagttcttattctacatgcattgacctttaagactgcagaaacagaaactgtaccagaaatattgcttgtcccttcctgcttttatggcagaaatattttcggaccagaaacattgcatgcattcttggttcatattttttccccaaatgttcatcctgaaacaaaggaacacaaacattttcgtaggtttttttctcttgcttcaagagaaacttcaagatctgtaaagaacatcaagtcatcaagcactaaaccaataatgcatgcaacccatggttattaaagtggtaaaacgttataaaccaactttttaacttttaaacgtttaaacgaatgttgaaacgtcttttcagacttgacatagaaattcaaatatagaataagttcacacataagttgagttcacacataagccttcgtgactgatctttgagctggtcttgcggagtggccgcagaggtgagcgcagcgcagaggccgacggtctacgacgcagtgggaagtggctgggacccctcactcccagtcccagccgcagaggtgattcactgtgaggggcagcgagggcagcgaatggatctgggccgctgagggcagcggcagcaagtggatgcggcggcgcactggagcttggccgggcaagtggatgcagcggcagcaagtgggcactggagcatggccgggcaagtggatgcagcggcagcaagtgggcactaggcagtggcacggcggcgcactagcctgtgggcggactggcggagggaggaggggggccggcggcgtacctgggggcaggagggcggtcgcactgtcataggcgcggctggacggccggtcggcagatctccagcgctgcgctggctgaggagtgaggaggcgcggtctgcagtcgcagccgtggctgggcagcctccagtgctggttcgaagagaaagcgagtagccgagtacctaaagcccaggaaggcccactagtaactagaacgtcctcagaacatctaaaacgacataaaacgtgtttcagacgtttaaacgacgattaaacgtccaaaacggatgttctacgctgttttgttagaacgttttaatttctaatcacgttttaccgcttaaacgacgcttaaacgtcgtttaagcgacgttttaataaccatgatgcaaccacagttcactgcttgcacatgagtgttttttttaaaaaaactcgatagggcagtccccgggcattatattaagaaaaagacctcacgcaggtcgagacaacccccgaacccctgccccacccatacacagcggcaccgtagcccatgtgagaacacgatcgcgaccgggactgggccttagacctgtgctttggcatgagatagacaaggagatttttttaaccacagcctgaaattcactccacgggagtcgaacccaggacatgaggagtgctactcaggccacctaaccaactcggtttagaaacagccaattcttggaacacaagacatgaagacagtgtagctcaaaattttgccaacgccataggcagcaggtatagtgagcaatgaaatatccatgtataactcaatattgagcaagcttacctgcaaataaagctcgacactaacacacgaacacatctgttcaacttctattataattagcacaaagctgaaaacagtggcagtccaggaaagatggtgaactccgcacacctatgaagatctcaccaccaccaccaccacagcttgttagtaccaagcaagttggggtagggtatagttgaaacccgacagaaaccacaagttaagtttcaggcacatggatagttgttcttcatgcactccaattcaaggctaaatctttgggtatattctattcttttaagtctccttttattgcatcttcccatgtcaaattcggtctttgcctgcctctctttccattgctatcgctccttaggatcccactatgcacaacatttggaattctctgttagacctgtccaaaccatctcagctggtgttagacaagcttggtgccgccctagcctataacatctatcatagttcctggctcgatcccttcttgtatagccacaaatccaacacaacatatacttgtctgccgaaccaacattctgtatcatgtaacatagcgggtctaatcgctgtcctataaaacttgcattttagttccgtggtacccttttgtcacatagaatgctagatacttgatgccactttatgcaccatgctttgattctatggttaacatcttcatcaatattctcgtttctccgtagcattgatcctaaataccgaaagacgtccttttggatactacttgaccttccaaactaacatctcctaattcatctgtagtgctgaagtcacatcatctcatattcgtttttagttgtattgagtcaaaaacctttggactctatagtctcccgccacaacaccattttcctatttactcgcactgcatcgttcgcaaaaagcatacaccaagagatatcccctttatatgccccttatgacctcatctattaccaatgcaaaaaggtgaagggttcaatgctggcccttgatattctgattaggaagtcatcactagtcacaacattgttgtacaggtccacaacattgttgtacatgtccttaatgagtctagcgtacttcattggagtctagcatacttcgttggaactttatgattgttcaaagccaccatataacatttcttgctattatgtcatgagcatgttagtgaaaagtgaaaaccatgtgtaggtccttcttcctatactgctccatcacttgtcttattaagaaaacgacttccatggttgatcttttgagcatgaaaccaaatttattcatagagatccttgttatttctcttagaagatgttcgataactcgtccacatagcttcatagtatggctcatcaacttaattccctggtaattagtacaactttgaatatatcccttatacttgtccactcacccgacattttattttgttcgaccaaaagatatggttgaaacaacttggttagccatagctatgttcccaaggctccatgcctcaattgggataccatcaggtcccatcgtcatacctattttatcaattccaatgcctctctaaatgtagattcttggatactatgcacaaaattcatattggtctcatcaaaattgtctatgtttgatctcattctccttcactaagagatttcccatttcatatttaacacacttaacttagctgaagttccttgtttttctctcacggaccctacccatcctacatatgtcctcctctctttccttcgtactcaaacgttggtaaagatcctcatacaccctaccctttgccacaagctcgctttgtggtcttctttgctatcttgtacttctctaagttgtccacactcatgtcatggtacaaatgtctatagcatttttttcttcttaatagccctttgaacttcctcattccaccactaagtatctttagcttggtcctcgtttcccttggttttgctatacacatttgaggccagctttcgaatgcaggatgacatcttctcccacatgctgcctgtgtcatcttccttccaagtgccctctttgatggttctttccttgaagacttctgatgttttctctttcagttttcaccactgtttttttctcgaatgcgaaggagaactgcactccattatatattaagctgaaaaagggtaggtcttaagaagaccaatacaagaggtttccctacgaaggccagtagcaagcatacataaaaaaagtccatcaaaaaaggacagcaaccaaaggaaaaccaaaaagtccttaattctcagctaatggtgctgccaaatgggaaagacccttggcaccagcaatctcccattttttcctttcctcatcaacaactctaagactcatgttaacattcgtaacgactcctatgcaagcagtccttatgtgcaagcgtgcaagcaaaccatctgatccattagattacgatccaaccataaatacgaccatggtttgttagaggtttttttataaagattattgagctggtggtggaaggatttaagtgttaaatgtgacctacggttggatcacaatctaatggatcagattgtttgcttgcacgcttgcacgcttgcacagtagtcgttgccgttaacattagggttgcagccaccaaagacacatttatttctacggttttcactactttgttctcacaatattggattgtttatccctatgggcacgcacctgaaaacgaaagaccgccagtccgccaccacaaacttatgttgagagacaacaccctcctcgatatcaccttgcaattcaagcatgcttggccactattataatcactaaatgggattctctctttctaaaggaagtgttggctaaaagctattgcaaagtccaagacttcctctccctcctgatttctacactatacctaaaacctccacaaacagcctcaaaacctgcacttgttatatctacatgtccattgagatctctccctataaagagtttctcactaagtataactctaacggtctaaccatgtcatctaagtctttctagaaagtttcttaccactctcatcgtggcgactttgggggcatacacactaattacattcaagaccaaatcacccaagacaagcttgactaagataaacctatctccttgtcttctcacctgcaacatatcgtttttaagtcttttatcaatcaaaactcctactccatttttatttgcaattgtggctatgtaccaaagtttgaggccattgttgtccttcgtattgtgatcctttcatttagtcttgttgtccaccacctttgtcttttaacccttctatttggtctctttggtgcataagatatttatatgtctcctattcgttgtctcaactaacactcttaacttacatgtaacgatcctacattttaactatctaaacgaatcttagttggttcaactagctttttacccttcacacctttgatgatgggaagatccttgcatattttttcactacacccggatgccgccgcaacgttactaagaaagcagcaatccagcctcgctcgcttgatatcatgcccagatcacgacacggcacatcatcgaggggtgccgatctggccctttcccatttaacaacatactcaagttctgatattgtgcatccctaaaagggttaggctatctcaagcagccttacctatcccacctatttcaaaccgcagtttatgccgcctacaatgcaaaacggccatatacacagtctgctggacacaaccgtacacacctcaacggatttttttccgggttttgtctccattagaattgttaggtttaatgttggctcatcaaacctatcaccggcataggtggagttagctatggatctctcaccatgaagaacaaattgggtagtgcaacagattgttgggctaaatttattcaatgaactcaacttttgggtagtgaagatcagtggctacctgtaccttataaacccgtgttctggttcaatgaactcaattttttttccagagactaatttataagctttctgctcggcacatagaagagatttaggaatgcctgtaacataatactcctctgtcccaaattaaaattcgttttaggagttttgtatgtgtctagattcatcttcatccatatgaatatagacataaaaccaagagttaaaacaaatactaatttgagatagagggagtagttaatttgatgacattacttatctttttcaggttaaagccttcaagcaagctcttctgaaattcca

SEQ ID NO: 214 - DNA, 6444 bp, Zea mays
  Intron number 2 from transcript GRMZM2G098335_T01 (locus G RMZM2G098335) derived from phytozome v7.0 (chr-ID 3; pos 1 2025651 to 12032094)
ggtgcgtccctccttcgtccttctttctaacttatttttgcactatatttattactggtgaagttaatttaggcattgtcgcttgacattgatgcctctatccgcgaatttggtctatgttattaagtacgccgataaatatgatgtacaagacgcagaatgcgtcggcgcggcgtgtcttcttttctgtatgtttctcaatgctggatctgtgttggttattattgctaaaaccttagcttttatgtcagttagggtccctttgctagggcttacaaaaggctctggctttggcttctgaagaaatcataccaaacggggtaaaaagaaaaccggtttctcactgaaaccaccaaggagccggagcccaaaatattaacttgcaccagctcctctaaaaaatgctctacgaaacccttttgtcaaatatctttctacaaagtgttctggctctaccagagaagtgtaagtaccgtgtgattgtggctagggttcctgagaaattactggtgaagggggggggggattaggtgaaggattatgggcctcgttattgggcctttagtcatttgtactagtataaatactaccttttgtactgagacaatcatcaaataatcagaaataccagatccacacatttcttacctgttccaactcacctgggaactgacgctcgcaagaactcaccggagttcttctgtcaatctgctcacgacgaggaaggcgagcgtcctccgtccaggggctgtgacaagaagctactccaggagaggagctaaatctgatgccattttaggacctggagccctagcaaactttcccttagtgttcctaggcggcatttgccttgtgacacgcagagcacagcttagaatttggtctagcaaattgccagatttattgtccgaggaaaaacttaccaagtttgagtcaagtgctatgcaatgcattgtttttttttgacgaaggggcatagccccctatttcattaggaaataggtaaagagtcattacagaccaccatgatggagagcaacccatcaccaaaagtagtaactagtggaactaacctctacaatctaacaaggatatgcaaagatcagactccactagcacccaaccagaaagctccacagtttttaagccaagcttatttacaaaggccacaggccaaaggcagtaacccagctaaaaccaacctagatgcaactaacccaccaacataacatccaaaagaacttgagctacgatgaccaccagaaggagcatgaagtgccaaaaggagtcttcaaacagtaatgcgacggtccctcggacaccatccaaaggccctgctcatcgcctcacttgctatccttctgataagttgacttccttgtaccaccatcttttttttccttctctttctgtcgaataacccaagaatccaaccaaaagcaacagagaaatattatgttagccgggtcaagaataatcttttcaccaaaaaaacaatcatttctggttctccaaatagcccaaaacaaagcaccacaaccaaagatcaataagtttgaaattctgtctttaggcttattcatcctagtcaagctggtcattggggacttggttctcaatgttatcagcgcgtatgctcctcaagtaggccttaatgagaactcaaagagggagttctgggaaggcctggaggacatggttagtagtgtgccagttggcgagaagctcttcataggaggagatctcaatggccatgtgggtacatctagcaccagtttcgagggtgtgcatggaggcttcgactttgggactaggaatcaagaaggagaggaaatcctgaactttgccctagcctatgacatgtttatagcaaacactttctttaggaagaggacatcccacctggtgaccttcagtagtggccaacacactagccagattgatttcgtcctcttgagaaaagaggacaggcatgcctgcttagattgcaaggttatacctggagagtgtgtggtaacccaacataagcttgtcgtagctgacttccgttttaagattcgtttacaacggaataagcataacaaggtcactagaacaaagtggtggaagcttaaaggggatgtggcccaaactttcaaggagagagttatcgaggagggcccttgggcagaagagggagactcaaatatcatgtggaggaagatggcgatgtgcatccgaaagatagcttcagaagagtttgggctgagtcaaggaaacagaagggaagttaaagacacttggtggtggaacgaagatgtccaaaaggctatcaaggagaagaaagattgctacaaacgcttacatcatgacaagtgtgcagaaaacatagagaagtataggatagcgaagaagtctgcaaagcgagcggttagtagagcccggggtcaagcctttgacaacctttatcaacggttggacacaaagcagggagaaaaggatatctataggatggccaagattcgtgaaaggaagacaagggatgtcaaccaagtcaaatgcatcaagaatgaagcaaaccaactattagtgaagaatgaagagatcaagaatagatggaaggagtacttcaacaaattgttcaatggagggaatgagagttctacaatagaattggacgaaccattcgatgacaacaacaggggttttgtgcgaaggatacaagaatatgaagttaaggaggcgctaaaaaggatgaaggtaggaaaggcgatgggccctgatggtatccctatcgaggtatggagatgccttggagacatagcgatagtatggctgactaagcttttcaacaccatctttcggacaaacagaatgcccgacgagtggcggcggagtacattagtaccaatcttcaagaacaaaggagatgttcaaagttgtactaattaccgtggaattaaactcatgagccatacaatgaagctatgggagagagtcattgaacaccgcctgcgaaagctgacgagcgtgacccaaaatcagtttggtttcatgcccgggagatcaactatggaggccattttcttactaagacaacttatggagagattcagagaacaaaagaaagacctgcatatggtcttcatagacttggagaaggcttatgacaaagtacccaggagtgtaatgtggtgggccttggaaaaacacaaagtagcaacaaagtacattaatcttattaaagatatgtacactaatgttgtgacaagtgtccgaacaagtgatggggacaccgatgactttccaattaacataggactacatcaagggtcggctttgagcccttatcttttcgctttggtgatagatgaggtcacaagggacatacaaggagatataccgtggtgtatgctttttgccgatgatgtggtacttattgaggagagtaggagtggtgtttcgcaaaagttggaattgtggagacagacgctggaagcaaaaggttttaggcttagtaggtctaaaacggagtatatgaagtgtgatttcagtgccatggggtatgaagatggcgatgttagtcttgatgggcaagtggtacccaagaaagacacttttcgttacttaggatcaatgcttcagaaggatggagacatcgatgaggatgtcagtcatagaattaaagctggatggttgaagtggcggcaagcggcgggtgtcttatgcgacccccgggtgccacacaaactaaaaggcaaattctacaggacagcaatccggccggctatgttgtatggagcagaatgttggcccactaaaagacgacatgtccaacaactgtgtgtggcagagatgcgtatgttgcgctggatatgtggccacacaaggagagaccgagtccggaatgatgacatacgagagagagtaggagtggcgccaattgaggagaagcttatgcaacatcgtttgagatggtttggacatatccaacgaagacctgaagaggcaccagtgcatatcggaataattaggcgtcccgagaatgtgaagagaggtagaggtcgaccaaccttgacgtggacagaggcagtgaagagggacctgaaggagtggaatattgataaagagctcgccgtggataggaaggggtggaagtgtgcaattcacgtgccagaaccgtgatttatagttccgcttttcctccttaatcgtttgaccttttcttgtgcccatttagaccttgctggttcttgtgggttttatctcttttatgtgttcccccgtttcgtcgttttcggttctcctttgcctttgtttcccctgttttctttgggggttgagctctgaggttttcatacggggtttcatctctagcctaccccaacgtgcttgggacaaaaggctttgttgttgttgttgtaggcttattcatccatctgtcacaaatttcatcaatgttttttggaatggaatccagatttaacgcaatttgaatcactctccacacaaatctagcaatagagcatttaaagaacaaattatcaatcgattccagaccaccacaaaaacagcattcattagatcccttccaatttctttttttcaagttatcttttgtaagaattttatttcttatcaccaaccaaaagaagactttaattttctgtggtaacttagatttccacagaaatctgtagggaaccttaatttgatcaatagaatttttcttatacaaagaatttacagtgaatcctttgttgcctaaaccccatttcagtttatcttcttgatctgtcagagtgcaattagagcataaagcaactaggtcatcatacaacacctgaaggtcaccggtcattcttcttctgaaagagagtgcttcaaaatttgaagacaaaactttattaaccgtaacatctttatctagagccaaatcaaacaggataggaaagttcacagcaagaggaccgtcaccaatccaacaatttttccagaaactagttcgacaatcattaccaacaaccatcttacaatacttaaataaagtttctctgagacttaggagttttttccaaaactgagagtcattctgtctttgtttaactgagataaggggttttcccttaatatattttgcacttttgcagaaatgatattttgccataaaccatttgaattttccaagttccacagccattttgttaacagagcatcgttcatatatcccagattcaaaacacctaaacctcctagacttttaggagaacagaccgtattccagttgaccaaatgcattttcttcgtttgagagccgccttgccacaagagtcttttcctgaacaggtccaacttcctaataacagatttaggaagttgaccaaatgcattgttgttattacatggctatcatgctctggctgaccacaggcaggcaactacttccacttggggtttgcctgagaaccatggttttcaaggtgtcacctaggcgcctaggcgctcaaaaatcatgggcgtccctgttccctaactgaaaataaaaaaaatcagaaagagaccgggaggggggcaaccaacaagccccagcagctgccaatccccgatagctcttgcttgtagaactcacgcttgtcaattgaggcgtgatagatctcgacctggacagaagctcagttatctgagagcgcacgactcaatgagggcctgagaagaagcagggaggaggagcagaggagttgctggcagcatcacgctcaaggagaataaggaaggagttcaggagacctataggctatagggctataggcaagtcgggggatggtaatttaggttggctagtggactggggcagccccttaagtctcctgccctctttctcctttttcttttttttttccttccttcatgctgctgccttcctgtttctcagattggtatacatcaccttgcgagtgtgtaggtgtcaccttaggtgattagaaggtggtccatcaccatgtctttccttattgccttaagaaccatgttgagaactgtttggggttccggaatttagttgtatgaatatttgacttgcaatctcctgtattcaaagtattcattagagatgcagaaaaggaaagataatcatccgttgctgatcttcatgttgtcacggaaagataatcatctgttgccttaaatttaagtataggagtttggataggggtacagggtaatcttggagatgctcttagtcagtgtattctgatatttctttattggatacataacttaagctcaattaacatctttatatgtgatttatttgattcatcaatgctacttttttgttaaaacatacaatgatacaaaagctttccatttcaagtttctgcatcagtgtattgtttgaggcaacactaaccaagctttattttgtttccagccatagcaacagttgtgaccgtggcagaaattctg

SEQ ID NO: 215 - DNA, 1793 bp, Zea mays
  Intron number 5 from transcript GRMZM2G138040_T01 (locus G RMZM2G138040) derived from phytozome v7.0 (chr-ID 2; pos 9 1483521 to 91485313)
tccctctcattggtgttgtcgttgaactagttgtacattggtatggctgcaaattgagagagaaagacctggaaacagtgatgcagcatgttcacacgaagatggcaacaatggtaacatttgcattggtcctgtaaataaggtaaattgagggctaagattgcttgttgaaccttataaaaggaggtgtagttttatttatcctattcttgctgcagccatcacaaggtcagatgctagcaactttaatagatttatttactctcttagaagaaaaggccaagatgtttgagattttagtgcttcatttaactttcagcttgtgttgtcttagcttactatggcattaacccactactctcctgaattgtcatgtgatctgtatcatgtattcatgaaaaatgcattttatactacaagcacttgtggttttgataactatatccagttatgaaatccacaaccctttgttgtatcatgtattcatgaaaaatgcattttatgctacaagcacttgtggttttgctaactatatccagttatgcaatccacaaccctttgtaatagtgtaggattatgccaaacaagacattggttgaatgatatgttcaaactattcaaatgttttctctttgtaacagtttgtgatattggaatgatatgttcaatccacagtcctttgtttgggatggatttctttatcttgactcttgagtatagtgtatttctgactatcatttgtcaattttgttgacttttatgctcataacttgagaaacttttattataagtgtacactgtgttttattttttaatgttgtttgactgattactgtaaggaatcttgtgtaggtattgaatatgcttgcttgatggactaaagatccaaactcgaataccttctaacttcataagttcatatcccacgagtctgattacttgtggcttgctgaagatgacatgaagatgcaggtgattattgcttgtttgtggcttatttccttttacttagttaacttcctattaggcagctactgcaccaacaaacctgtcaacatagagagaggcttgttctgtaaacctactaatccaggactcatgaggataagaaagcaaggatgtcatggatacaatatttgtgtggcaacaatattagacattgtactcttttcttttcaaattataaccattctcttctttttaaattttaagtcgttccaatatttttagatatataacaaaaactatacatttgaatagtatgtctagagcatgtatacttgagtgaccaatgagcattgaattttactgcatatgatggatttattcaatatgtaatgcttttaaggtatgcaatttttttttagtttttaaaagatgtttacaacaacataaaatggcagttagtattctttgaattttaatatatcttatattagaatatgttcactgcatagcaaggcacggacattcaccttgtgtacacaacatgagactattgatttgaaatctaaacttcagtccaaggttcttttactaataatgttcttccattttttgtatttgggccccttttgcagtacatattcttcaacatacaatattcatggtttggttactgacctttcaccaaattttctgttgcatccttcctgtaattctacttgatagaaatagtatgcatgttcattagatggctataggcaaactacttgtgttttatgctttccttgttgacattaaagccaaccaactttgatgatgtactttgacaggaagctaaaattgaaaag

SEQ ID NO: 216 - DNA, 13015 bp, Zea mays
  Intron number 6 from transcript GRMZM2G094595_T04 (locus G RMZM2G094595) derived from phytozome v7.0 (chr-ID 8; pos 1 37205706 to 137218720 reverse strand)
atcttgcatccctgaaggaaaagcttgagcaagaggtatgcaaaatacccaactccaagtttggcgtcaatctgacagctataactgttaactgtgcgaaagtgaaagtgtgaaacaattcttttttagctaaaataattcgcggtgaaccaaaacaagcatgagcaattagtattttagtcttactagatatatgctgtgtgttgcaccaaggtcacgattttttagactgaacttcaataatcggacgtcggacgcgtaagctccaaggacttaatattagacgtggacatgtggatccggtctttgtaccgaaaccaaataggatgtggatgcataagctcagtgtggatgatgattcatattagacacgaatgtgtgattaaggattgagatttggtatcatcaggtagacgatgacagtatggtctttttaggtgtatagatatagcagagaacttagaagggtaggtctgatgcagtggtgagagatgtcttactgagtcataggttcgaaatagtctctccacatttgtgaggaaggcttgcctcaatttatccatttctcagatcccactcgtgggaggctgggagccttcacaactgggtttgtcccttttctagatatagcggagaacttgtagaaaggtcatgtgaattagtttgagtcttatcattgacatccatttttagatttggctagatcttgtgctggaagagaatagaattggtggaatagtagttgtatcacattaggcctcatgggttgattatgtagagtgcataggactaacatctcacgtgggtagacaatgtggcactatttctatttactctaacaccccccttgcagtcacagcggggtcggcactgaggctagggcagactgacaagctaacatctcccacaatcataatgatgtgatcaggaagacgttgatgagtcctcatgcatgacagttaccctttgcgctgatgtcacgatagctgaacatgaggtggaggagttggggtcgaggataaccgtggtcaacgtagcaattgaggtagccaatgtcaaggcagccacacatgaagtcatgagtgcaaagaggcgtcgtggtgatgacaaagacgcgttgaagcagttgtcgtgtagggggcaatgtcgaggtcgacacaatcagggtcgttgaggacatagacgcaagacgatgaagcaatcgaggtagacgaggtgaaaatggagggtcaatgccaaagtcaatgcagttgagccgcatgaaccgaggcatgtgttgggcttaccagacctagcaacgtgttggggatgaaagcatgtactactattgtcaatactgattgtacaaggtagaaggcccttaccatgcatcaacgccttagggactagcagagatctcaatgatggttgtgatgagcagaacaatagagtagaaggtcctgacgtaccccgtagtggttggaatagacaaagtaggtagagaaaagatgacgatgctaaagatgttgtgctggacaagaagctttgtggtggtagacgagtctaagccaaaggcaagtagtccaagcgaagacgtctgcccaacgacagtggtccgaatgcaaggtacgatggtggtgacagtgctcgatgtaggtggtgaactcaaatagcttgacaaacaccttgtacaaatggattgcacaacaaagattgtgtagcaaagctatcaatgcataggtcatggcgatgtagacgcaacgacgaagcagatacacgggtggcggtgctgtgacccaacgaggcaacacaacagtagccttgttgctcaaagaagatgcgtgtagtactcgacgatggacatcacaagagcctggtggatcgtacacaattggttgtacaaaccgagtatgtgcgaggtggaatgatgattgcagaagtcgggcagaagcatcacaatcaatggtgacaatgatgaattgacaatgtagacttgtggatagggtgaccgagaagcgatgcgggaaggcaccccctaggcattgcataccctgtcaggctgcatagtcgaagatgtagatattggtgtagttgatactagagtaggtacacgcgaggtcgacgagctgtgggcaacttaatctcaatcaatgatcgagcaaacccaagaaaaggtatgagcaaaagcaacaccagattagaactagtgatggcggaggacgacaaggtagcccaacgagaggtgtcctctagcaacacacgcgacatggcccactagcaagtgccctttgcggatataatggatcttgacagtgtaggagggagcggtggtgcagagatgacgtgggtcgatggcgtggtgggttggtaacggtggcggaacgtcgatgtgcatggttggggcgcacctggccctactcgccaccacaatggagcagggagccagggacagtttacggctagtcccggttaccacaacagctgcacgaggacaaggcatggccgacaacggggatctagacgaaggctgcgtgtggagaagaggtagacaatttgctgttgtgacccacgctagaatgacgacaaggttggcaaatcaataggatccagtgcctaaatggtggtgctgcctccagcggaaatcaatctctcgagggcgtgcgatgcggaaggtgtggtggctatgtctaggggctaaacctagacttgtgataggatgtaggagaatagaattggtgaaatattggttgggttgcataaatgcagtgtctcatgggctaatcatatagagtatataggactaaacctcacgtggttagagaatgtggtactattcctatttactctaatactccctccgtcccaaaatatagttctttgtaaccctctttatattcgaatgtgttgggtctatgcttcgtcgccgaaggtcttgtagaaagaagtggtcctcggctgaagctgttagcataagatagccgaagggtcctcttcgtgaagcttcagcattacaaaccgacttaaacatagaatgaccttttagtccataaaggtctgagtcaatgttgtaagcttttataaggggcatacttgtaatttctcacaggctgcgtcctgtgcctataaatagtgaacaatattccgttactgttcacgcattctggtaattgcaatcgcatctctcggaattcaacctttgccaaggcataggtatcattgtatttaatgattcaatatattaagtaaatataatataatgcatctgtgatttattcattcatattataccttttattttacgttatcttacagtgtctattgaaagtttattacgaaggtttaacttcgtaattattctctcatcaaccttcgtccaagactcattatcctcaagggaataatgtttcacggacgaaggacgttaacatttaacactttatgttgccttgttcttaattcatagcgtttgagaacaagtccccaacattggcgcccacctccggtgaactcacttccactttttgagctgatggcttcgttcaacgaccaagctggagctgcttcggacccgaagctggtgctcccgatcacaggtggctcgtcctcagagccagctaacaagaaacaaaagaaggaagcacagagaagggtacagcatgttggggtgcaaggaccctttatcaagtcaagatggtctcacattcctattaccttctcccaagaggaccttcagctcaaagattacccacacaacgatgccatggttatctcttgtgttatcaaaggatttctggtccacaatgtcttggttgacacaggcagtgcagctgacattatatttgctaaggccttcagacaaatgcaagagccagaagataagatccatgatgctacacatcctctctgtggcttcggaggaagacagattgtagcactgggcaagatcaccatgtcagtgaccttcgggttcatcaacaacactagaactgagcaagttgtgtttgacattgttgacatggaatacccttacaatgcaattattggtcgtggtaccctcaatgccttcgaagcaatccttcatcctgcctatctttgcatgaagataccttcggatcagggacccattgctatccatggaagtcaggaagctgcaagaagggccgaaggcaattggactgactcaaaagcaatccataacatagatggagctgaagcttgtgaacagtacaaattcagaagggagaaagcagcttcagcagatcagccgaagcctatgctcttatgtgaggacatagcagagcagaaggtgctgttaggatctcaattatccgaagagcaggagaaaaccttgataaggtttttgttcaataacaaagatgtttttgcatggtcagccaatgatctctgcggagttaatagagatgttattgagcactcgctcaatgtcgatccatccttcagacccagaaagcaaaggcttcggaaaatgtcagatgataaggccgaaggtgctcgcaacgaagtcaaaagactcctcagtgcaggagttatcagagaagtgaagtacccagaatggctagctaacactgttatggtaaaaaaggccaatgacaagtgacgaatgtgcatcgattttacagatcttaacaaggcttgtccgaaggatgaatttccactaccaagaatagactctttagttgatgcagcagcttcttcagagctcatgagtctgttagactgttattcaggctatcaccaaatttggatgaagaaggaagatgagccgaagactagcttcataactccaagtggcacatattgctatcttcggatgcctgaggggctcaaaaacgctggagggagtttcaaccgaatgactgcgaaggttctccaatctcaaataggcagaaatgtgctaacttatgttgatgacatcattgtaaaaagcacgaagcaggagaatcatattgctgatctgcaggagaccttcgccagtttcaggcaagcgggcttaaagttaaatccagaaaaatgcgtcttcggagtaaagaaggggaaatttcttggatgcttggtttcaacaaagggaattgaagctaatccaagtaaaattgaagctatacttcggatggagccaccaactacaaagaagggggctcaaagattgacaggaagattggcatctcttaatagattcatatccagatcagcagagagaaacttaccattcttcgaagtgctgaagtcagctgaagtctttcaatgaggaccaatccagcagaaggcttttgaagagctgaaacagtatttgatagatctaacaacattgactccaccaatgccaggggcttctttattattatatgtggcagcttcgcactcagcggtaagtgcagcgcttgtccaggagaagcttgatgttcaagtcaagaggcaggccccaatatattttgtttccgaggttcttagtttatcaaagaaaaattatacagagttggagaaggtactgtatgctgtcttgatggcctccaggaagcttcggcactatttccaagcttacaacataattgttccttcttcacaacctctgaaggatattatgaggaaccgagaagctactggaaggattggaaaatgggctgcagagctcaatgaattttgtattgaatatgttcatagatcttcgattcagtcccaggcgttggcagacttcattgctgactggacgccaggggctcaggaggaagaaacgaataaagacaacgaagcatggacagtgttttgtgatggatcttggggaaccttcggagcaggagcggctgctgtgttggtttcaccttccagagtcaaaacttgttatgcggcaaagcttgattttagttgcacaaataacattgccgagtacgaagcattgcttctaggtcttcggaagttaaaagcaatgagaatcagaagggccatacttaaaactgattcccaggttgtttcgggtcatattgacaagagttgcaaggctaaggatccgaagcttgaaaaatatctggatatggttcgaagagttgaagcttccttcgaagggttttctgtcaaaaatatccctcgaggacaaaatgagcatgctgatttgctagctaagtcagcagcacagaggctgcctttaccttcggatgtgttcttcgaaacaataaaagcaccttcggtggaacttcttgaaagagcagttctcaacatatctcctgtttatagcgaggattggagaactgagatcatctcttaccttcaggggaaattcctttcagatgacgaagcttataacaggaggatagaggcaagagctcgttcatatgtcatgatagaaggagagttgtacaagcatggagtttgtgctccactactcaagtgtttatccagaaccgaaggtatagagttgatgaaagaaatacatgcaggcctctgtggatctcacattggatccaggccgttacttggaaaaattttccgccaaggattttattggccgaaggcagcttcggatgcagcggaattagttcaaaagtgcgaaggttgtcagaaatgtgcacgagatcaaaaacaaccttcgtccctaacacaactcatacaacccatttggccattgcaaaggtggggccttgacttgttaggtccgttaccaccggctcaagggaacctaagatatgttgtagtggcggtggaatatttttctaaatggattgaggcaaagcctctagctacaataacttcggccaccgtccaaaagtttttctggcagaatattgtttgtcgtttcggggtaccaaaggctatcactgtggataatggaacacagtttgactccgaagcctttagggatttctgtgatcaaattggtacgaagatccattttgcatcagtcagacatccggagtcaaatggactcgttgaaagagccaatggcattataatgacaggaataatgaagtcaatcttcaatcaaccaaggggaaagtggccagatcagttaaccaaagtggtgtggagccataatacaacagcatcaaggtctacaggctttatcccattcaagttattattcggtgacgaagcaataactccagaagaagctaaaaccggatcaataagggtagtagcttcggcagcatcaggctccgaagctgattattctgtggaaaaagatgctttagaagggatcaggttgcaagccgtggaaaacatcaacaaatatcaagccgaaacaattaaatggcgagatagaaaggttcggctaaagaatattgagccaggacacttggtgcttcggagagtggccaacccagaaacagtgggcaagttgcagttgaaatgggatggacctttcttagtagcatcttcgtcaagacccggttcatacagattgaaggatatggacggcaacgacattcctaggtcttggaatgcggatgagcttcggcgatattatgtataactcgatgtaatttttcatattttttatttttctttcatggcacccttttcctttccgaagggggagaaaggtttttaatggggccagcacatgtaatttccttttttagttctataagagcaaaatccctcaaggaatgtaaatgtaaaagctgagaatgcaccatcgagtgccaaaaagtaaaggcgaagaagctccaaagtcgttcctaagggaatgcagagcttacagcgaaaagtcaacgctgattccgccaaaagtaaaggcgaagaagctccaaagtcgttcctaagggaatgcagagcttacagcgaaaagtcaacgctgattccgccaaaagtaaagacgaagaagctccaaagtcgttcctaagggaatgcagagcttacagcgaaaagtcaacgctgattccgccaaaagtaaaggcgaaggagctccaaagtcgttcctaagggaatgcagagctggggtgcgattgtttttaagaaaattatggctatgaatatggcttcggatacgtgtttggccattcatttgcacatcacattacatcatagcatttgcattcataaacattcatctaggcatatgtaggataatcatcttcatggcataaatggttgcttcggcaaaaagaggaaaaagaaggggaagaaagagcttcgtgtacaaaaaggagagcttcggaaataaggaaaatgttgttttctatgcttcgctgcgtacgaaaagaagggaaggtgttttttcgccttcggctcaaaagaaaatttcgtccacatcaaagcatttctcatacatcaatggaaggataaggatatataacaaggtatgaacagaattcattaaagacaagttttagttacatttacaaagttatctcaaaagtttctcaagtattgtctacagtctactatctaatctccaaggagcttcggcttcggcgtcattttttgatcttcggcttcggcttcatcatcctacatgagtaaggtcgttgtaagtcaaaatcaagcttacaggaaaaggtaagcacaaggtatggtttcttactggttcaaggtggctacgagcttcgtctccagccttttctcgcccaccttttgtccatatcatttttacaaatctattcgagatacttcgggcgagatcaggaatgtcatccaggattgatggtgataaagtgaaatttggcctattgacaatctttccatgatcgcagccagccttcaggaaagctgcagcagtgcctcgagaagccacccaggcacagaagtcaccatgcccagctatgacttcgtcgagctcgtcaatctccccctcaatatgttcgaaggttttcggtagatcttcagctgagggggtgaatttttcactgctggctccaactgagtgaaaaatctttcttaatcgttgaatgtatttgttgctaaatcccaagcatttttcttgaagacttgtcagtagctttctcaaatctgaattttgttgagcttcggcttcaagttttgcattaagatcttgtttttctcgttcgaactgctcagactggcggagaagcttcgtgttcagttctgatatttttgcttcagcttccgccaataaaccttcggttgcatggagctcaaagttctttttctcgaaagcatctgattgctcccttattctgctttctaaattttcaattataacttcgtgctttttatcttcaaaatcttgctgcatttgcaaggctttgctcaacagcatactctgcgcgaaaacaaccttcgttagacatgttttcattatcagaaacaataaaagttaagggaaaagtagttcaccttgaagttggaataaaataaactaccaacgatatgttgtcgtcggtagcggctgatgtctgtttctagcttcggaaagccgatactcttggacagagtaccgataaccttggctccggtatgatctcgaatacaatctagcttttcatcatcaacgcctccgaagaggagcgccccgggtttgtatccgcatgatttagcgtactctctaagtttatctatttcagcttttgatagttgttcttcaaccaaattctggaacataaaggtttcgttctccgaagcttcatcagcaatttctttccctttctccgacgctacggtcgcggcctcttcggcggcggtggtagcttcttctgcagccatgtcttctgcagccatgtctagcagcatttggtcaatgtgttcaattgtgctctctaggttcaaatcttcagctgaggcagcttcggcagctgcggcctccgaaggtgcaatttcaatatctgtcccctctgcagccgctggtgttttctgggctggagctcttggcggcgtcttgtcaattacctctgtcacagtgataattctttgtttctttgccttgattgttttcttcgatttttcaggctccttgtccttctgaaaaaactttgtcagttcagggcccagtggacttagcttcgcaggtaaggattcagtcattaccttcagaatttcctcaacaacagcagcagaaggtgatgcgggggtttcttctgcttcggatatttgttgcttcggagaagaagccttcctcttcttcggatttttcttctttaatggttctttttcttcattcatggcctcagttatcctttttcttttttggcccccagcacctttgttcagattttcataatcagggtaatcaaagcccaaggcgtccaacactcgatttagccttcgcttcgggcgggtgccgaaggccgcggtcatcaattgatcttcttttttggagtagttcccaagtatttcgttgcacattacttcaattgtttccagccactcttggcaaggtgttttaaagtatttcttaaatttgaaatagtaaggcaaacgcacaagttcaccttctttctttttccccttcaacttcggcatttcccattcctttaaactaggaaaaactttgaaggccaaaaactcctgaaccaggtcccttgtgctgatatgctctgcaataattctgaattcattcattgcttttttgtgttggaccttcgggtgtcatatcgcagcgaggacgggtttctccgaagattaattcgagtggactctgcacaagcttttccttgtcgtcatcaaccttgacatagaaccactctgatttctagcctgctgcccatttgcttcggtaactaattacaggaaactttgtagttttccgataggcgaagttataacaaccaaaattgtcgtgtaatccatcttttctagccttcgtttgataatgcaactcgtgaacccggcaaaagctgtccgcaaatggttccactgcttggcttcggagtgcccagatataaacagtaagcctaacgatagcgttaggggtcagccggtgaaaatagataccgaacctattcagtacctctgcaataatcccatgtagggggaaccttaatccagcctttagaaagcttttgaaaataacaatttcatccttctccggctttggggtagtctcttctcccccgaagcgcaatagcttcttctgattttcagtaaaaaagcccgattttaccatcttggacagatcggccttcgaaacagtagatttcccaaagtccaagtggctgggtttgcttggcatggcaatacgatagtcatcttcgggatcagtttcctcaatatcttcttcctctgcttcagcgattgcttgttctgcatcatcactaggaatcttttccgaagtcactagcccggatcgttgcatggcttcggagatagggacggtctccgaagcttcagtttcgtccccctcacgctcaaccctggcggtagaacggactctggccatttaactatgaacttgtaaaactttaatactttctttctccgaagcaggcttcaagctggagcttcgttcgattccgacagacaagcttcggcgacggttaaaaattttggcagcaaaacagtgcaaatagcaatgaatgctgtggtaacttcacacctactcgtctgtttatatagtgctgcaggtaagaaggcgaagcgccagaatttttacaccaggcggacacccgctcgcactcgctgcgtggtggaccgcagagactgaacagtaactctgcaaggtggggccgctacacgctgggagattgaatcgtttctcgacaacgagctcagggaaggtgttttttagaccttcggcgatccgaagcttaagagacttttttcacggatcaagctcgttacgaaaaacgatctagcaccgcgaaaggggctactgttgggtctatgcttcgtcgccgaaggtcttgtagaaagaagtggtcctcggctgaagctgttagcataagatagccgaagggtcctcttcgtgaagcttcggcattacaaaccgacttaaacatagaatgaccttttagtccataaaggtctgagtcaatgttgtaagcttttataaggggcatacttgtaatttctcacaggctgcgtcctgtgcctataaatagtgaacagtattccgttactgttcacgcattctggtaattgcaatcgcatctctcggaattcaacctttgccaaggcatatgtatcattgtatttaatgattcaatatattaagtaaatataatataatgcatctgtgatttattcattcatattataccttttattttacgttatcttacagtgtctattgaaagtttattacgaaggtttaacttcgtaattattctctcatcaaccttcgtccaagactcattatcctcaagggaataatgtttcacggacgaaggacgttaacatttaacactttatgttgccttgttcttaattcatagcgtttgagaacaagtccccaacagaatgaatgataatgaatgtactgtactgaacatacattcattaattaatctataaatgtagtttgcatgtattttaggacggagggagtagtttctaattggttgtgacttgtgaattcctcacattatcacctatcagccacctgatatgtcatatcgtattctgttgaatatctcatcatttaggcaaaagagaatcttggcatggctatggtctacactcttgtttcatcagccaaagagtggctaagtgagatatatggtcagaatggtggtgacgaggaacctgaagaaactgaagcagaagaggaggtatacacctattcagttgtctgttctgcattttcttttctgtgaactttaggaagtgggttcaactgtagcaagtggagactttgaattggctacggtttgtgaaattaatccagtcttgttctggtatggttggtttctcaatctgagaccaccttccggtggttttgtttagaatcctgctggatgctgcatttttggaatttagtgcttgatttgttgtgtcctactgagccacttaggcaatcaaatttcaaattacatattgtatcatgctatcatggattatttccctttcagcgagtacaatttataactgatgaaaagtatttgctccgcatgctaggttattataccac

SEQ ID NO: 217 - DNA, 2720 bp, Zea mays
  Intron number 1 from transcript GRMZM2G435393_T01 (locus G RMZM2G435393) derived from phytozome v7.0 (chr-ID 3; pos 4 6454896 to 46457615)
cctcactagcctcaaagacaagctcaagaggatctgtaagtatctaaccgtgtgttttggttacgacagccatctatcaatgtatcagacgtcttatctcatccgtatagttttgacggataaataaagacaacactaagatagtctaatgtcatgtttggtttctttagtctaggaactaaagtttagttaagagactaaagtttagttcataacatgtttggttctagaggctaaaaatagtaagaatatactaaatgactcataagaagactaaaatgacctttaacattctcttgctattagtacaattgaactaaatgaggggtaaatatggacttaatatggtttagtcccttttagcacatatatgaaggactaaagactaaattattttagtccatattttagttctagtgtttggcaaaaaagggactaaatgagactaaaaactacagactaatctttagtccctctaaccaaacaccccctaactagtccttattactaatcatgaaataaacaatcttatctaagaaaatattctatgtcatccggtcttattattataaccaaacatatcttaaggatccctttagtttagctttgcaccttaggtgccgtttggtccactaaatataacgtaaatgataatgataatgattcacacttgaatactgacggtaacaagtttaaataggcaggtattcatttctagcgtggtacctgattacggttgacttaaacaaacataatttaacgttattgattacccattattttaccaatatatgaaccaaactacatgttttagaatctagatttaattgaaagggctacatatggggaagagattttaaaacacagtaattcatttagcaatccctatgatcccagattaacgagcaaattacatatttgatattttctttctttttataaattatatgttcgatcttttctctttcttttattcacattgcttctttgtattacttatataatgtcactttttatattattaaatattttgtactatataaatatattttgtattagttatataatatcacattttatttaaaacaactatatcggaaatgaaaaaatctttttaaaattatcatcaacgtagctatctgtatctatctgatcaattaacatataagtaatattacacgatgtcataaacataaccgatatctctcttataaaaccacaacagtttcggccaaacaactttcagctatagctgatagctagaatcaaatttctaggaataaatgaaccataaggaccctaagtcgttataaccttgtcaaacagacaaagcataattatagagaaactataaatattattttattatataaatttgattaaatttaggatgcttcagccgtcaaagaaaaggtgaaaattatctatgacacactgacaaaagagtggttttagttgtggatactgaaaatagcactatttattagaaagacaccaagaaatgttggtaattatcaatgacataaatgatttttttaaccactacagtgtgccgatgataatcaccaatgtttctcggtgtgttcgtgataaatagtgttatttctagtgtcctatgctaaaacagataattttctcaagaaaaaattagaatgactcggagggagtgtataattgtgcatgcaattttatttgttacctttcttgataagctactaaaaccaatttatcttgtaatgaatatattctaggccatggatcaacacaacacccaccaacatatttgtattaaataaggacgagcagtatgaaggttggttgaagcatatatctaaatatctaatataaggtcaattacactcaattatagtcacaactctagttcacgtgtaatcaaaacaaatgccaccagcgcacagcctatttttagaggaggcatatgccagtatttgttgcacagacgtgacgtttttctagacatgaatgtttcccagtgttttcattttgggaggaagacaaacaaatggtctccatccattagtgattatttccagagaaagacagtaattccgatataaattttgtgtttatccgagactatattaaaaattacagattatctctacttttatatttctttactacttcctctgttattttttattttcttttgtacagtcgcaacacatcatctccaacaatgactcaaattggtgcttcaaattaaaatataaggctttagactggaaaaattactccaacagtgtctcatttcataaaatttggtcaaaaaattatagagaaccttctcaaatgtctcaaatatactacaccgtagtatgctatactataatctagacttgatattttacgttgtagcggaatgttttgttagtaccctaaattttataaaatatactcaattttaaattatagggtatttttttaggccacgttgttggacatgatctaatagttaatttttaatgcaactagaagtaggcgggactgataaaatatccgcctccattttctagagaaggatatttttttggtagagacgagcatttgcttgattgccgatgtgaccatttaatagagacggtccctagatgtgtttgtctctattatctttccttcatcagtcggtgcaatatacattaatggatcgttttttttctccaggccacaaaacagcaatcaagaaacgctacttccac

SEQ ID NO: 218 - DNA, 2564 bp, Zea mays
  Intron number 3 from transcript GRMZM2G393669_T01 (locus G RMZM2G393669) derived from phytozome v7.0 (chr-ID 4; pos 8 6594022 to 86596585 reverse strand)
ttcgtggctgcgaaacgaggtaatcccgtcaggccgtcacagaaagcaagcacgcgctctcatgtgcatctcgctgcaaggacagcgccgagtttttttatagttgttttcagcctttctttacctaacgagctaaaataaagcaagtttaactatggagtccattaacacaggctgtcaaaagggaaggatgaaaacgatcgtatatacgaaaacgattgccaaccagtcagaaatttagccgatttcataattaggtcctatttagatcttcctggcttaatatttgcagtatacggtaaataattaactaacaaaaactagctatgatatgtttggacacttgactaatacatgtctttttctatttatatgatctattagcacctattaacaaggtcaaacggctaatggacaaacagtttgctagctgtccaattaacaattagctaatttgttagtcggcctgtttagatgttaagtgctaaaattagctggacaggctcttaatctatttattggtgacttacaatatgatgttgatagatatttaaattcaaatttcaagtacaaatgtctttatagaaatgatacgattatgaggcccggttatgggattttcggttacggttccatctcaagggacatatagctaaaaacagtagcttttcatagctccaattcactctagtgaatcttgttggatatatatacatgaaagcatatagtccttaaaatagtttaagtggttaatgacagcaagtttattatgacaaatgtatatcttatatacactgattaaagttgggttaaaataatgatggttgtttgagtaatagatggttttcatgcccgtgagtatggatcctgcttcgaatttgaaagggtagatggtaatgttaaggctgaattagttttctgtgatgattcgagctaagagacacttagagtagtttaggactttgtttttcttttgaccatagtataaaggaggtttaaactagtatcttgatctagataagtctaacgagtttagtgtggtacacactagttgtatgtagctttaggtaacttagatcttgaaatttgatatattgatagagtaaataataaagtttatttattgatttgttttaaataaaattcattacttttgatagtttgattatataatggttatatgaaaaaaataattacacatcagttttctcttaaaattaaggttgttcgaacacgagaaactagttagctattgataattagttttttataattatatagatctagcaaatagtttggtgaattattaactaaatgttcaactaagaaatatttttcttgttaaacaaaattagcatatagcagctaaaagttgtgaccaattagacaatcttcaaccatatcctctatattcctttatatccactttactaatttctctaaaacattcccttctctatatctcatttttctccaatagagagatttatctgtatttcgtcctctatacgttaaatacccatattagagatatattttgctctagaattttaaaagaatgtatttgtcatatactcaaatgtcttatacacattttagttttgcttaatctactatcaaaagtaaaacaatgattaaaagaatagagaagagaaaagagtctatatctataaaggaaaaaggttgcattctctatatttaattatggtttgaagaaaaccattagagcatttagatctaaggcctcgttctaatcctctaaacctagtagtcagaagctgaaattagctaagaagtttacaatagatcagctgatagaccatctggtgattgggatcatggcggccaccactaatccctgtgcgacatggacttcacaggttgtttcttgaggtgatccttctcctcccccttttccctccctggtcttcgtggatattctagtatggatctggagaggttggatttcagccgggtatcatctttgaagattttgtgcgtcttcggttttgctcacctgtgtcccctccgcgggatgattcctcttcggccttcattttggtggtttcctttggaagatgcattttcaatctttagtctcaatcagtgggttttctgcggcaagcctctgtgggtggttctggtaatgacttttgtgtctctcagcttgcggatcgtgtctttatatagattctcagtttcttccaagatggtgggatttcacatttacaatattataataattgatcgcccagagttcagggcctctttccgcctatggaattttggtggacctaattgggtgtcggaattcagaaattatttgaaggaagaatcgagttggaagtttatttggggtaaaaaatctatttcatatgccgatgcagttaggagtccttccctctcgggagcaaatgctctccctgtcctcaggaagaatttttctaagttgcgatgtgaggatgatgctcttactagtggcaggacctcaatcttcaatacattgtcttactattcctcatcgtgcaggtttggctcctcgagctttcggaattcttttgtgc

SEQ ID NO: 219 - DNA, 1704 bp, Zea mays
  Intron number 1 from transcript GRMZM2G094871_T01 (locus G RMZM2G094871) derived from phytozome v7.0 (chr-ID 4; pos 1 18897810 to 118899513 reverse strand)
ataaggtaagttcttcgccactgttgaacacatctgttgctatattagaatatgtatgtacctgattctggttgtagtccaagacagcatataagtagcttatatgactgatacgaagactagaagactattgatccatgaaatagtttatttggtggagataatttgttatgagaattgatggatggattatgattaataccgaaccattaacttgaaacatcacagctaatgaatataatattcatgtacaagtatcaaggaaaacaagataattgtgattcataatttacgtctatattgtaaaggtgataacagcctgtattctctgcaattattttcatgaacgttgatttgcatggtcttatggatgaacttgcttttaaagtgggtgtaaggtgataagagtataagcacaaatagtacagaattattggcattacaacataatgaacaattaatgaatggtagagtttaaaccttcctttcttttgaggactatttttggtagatcattttgaaaggtgaaagaatgcagtatttgtgcagggagttttttcaccattattatattgggagtatgtttagataatttccaaaaatttagcactctattggggtcgttgttgtatgggatctactactgtctgctatgatcatgtctctggggctttgtaatattattttttctttccttgaactatggcagcataggagatatcttagcaaagccttcacttgtgaaagatggattcattagtgacattcagtttctcacactggtctcaaaatcagaaaaacattccagattttcacaatgattaatgccaatctaatcagtgcataatatgatcgtaattactacccagtaaggaagtgcccctcatgtagggggtgtactaaagaggcacctggcaatgtggtactgtggctgactatggctgatgactgaaattggtattattttctagggttttttagatatatgccattatgaaaaccgagatttctaatgatgtcattataattcgtgataccggtggttgccattattaattcaaaaaattgggtccatgccattatctatgcttcacgcgtagaggacttgcctaaaaagacaaaaatgccctcaccaaagcttaaatatttttttatacttctttggataccatcatacgtagctttctttgtccacctttttccagaatggaagtcatggccctctatagctaagtacctatcatactgcccatggtgttcacacccagaaacccaaattgcacggttctattatcatggagtaggggatattaaattgcacctctctgttcattttcaaattgatgtaacgccattttccgatgggaaagaacacgagggtacaattattgtgatgcatagaaaacaagctactaaaatgactagtggctaggcactcactttctgcgtttaagatgacaaggtagtaaaatgactagtggctacgcagggtgtgttcactcttctcttcctgcattccttcaaacaacgagccagttgtcatagttgatggcgttttattgtgttgacatcactagatttcgatgagaagctacagctcatgactatacttgtctttccaggaagtgtctaaccatgtttttttcttcttcttggtgtgaaaatacagagggcctcccaatttgctgatcgcgcggcatatct

SEQ ID NO: 220 - DNA, 686 bp, Zea mays
  Intron number 14 from transcript GRMZM2G034362_T02 (locus GRMZM2G034362) derived from phytozome v7.0 (chr-ID 5; pos 215709394 to 215710079)
cgagtgagttttatacagtaaagtttacaattctcaccaggtgcatgctatcccaagcattgttgtcactgagatcgcaccttgtggtcttacatgctccattccctccttctagttctagtacatgaggggttacttgttaagtcttctttgatgatgtgcttgaaaaggctgttggtcataccattttctgttgaaatgtataagtgggttgtctaccttcttccgatagcttaagcttttgggttgaactggttagtgtgttcactctaacatggaccaagagctggttagtgtgttcactctaacatggtaccagagccaaagtttttttagtatgaatcctgacagaggctttatttgtgcctctgcccccttcattttcacgtttgtgcctttctctctggctgtatgtgaatgagggtgttgaagtgttataagtagattgcctaccttctcttaatagcttaagcttttgggttgaacttattagtgcgtccacttaacattttctataatcgttgcataatttctgtgataataaccaaacttatttgaaattagagggttgtcttatcctcttaacagtaaaatgtgtagatttgtaaatttacttatatagaatacatgatgtatgtattcttgttttctgcaggctgatctcgaggaaactaaatcacaagaaa

SEQ ID NO: 221 - DNA, 18847 bp, Zea mays
  Intron number 10 from transcript GRMZM2G075942_T02 (locus GRMZM2G075942) derived from phytozome v7.0 (chr-ID 4; pos 186855509 to 186874355)
gtcctaccagacggccgtcttgtatacgtgtaagtattttgatatgttttactagaaagctcattcaacatacattctactggattcgtgtaagtcgaacgcctactgcgttggattccattgttctcttgcgaagttacttgatgacgtcagtacactgaaattggaaagtgacagtggcatcttgttcataattattttacaaagtagttggatcaatgtgccatcacatccagttattcttatttttttctcaaaccacgttggagatctgtttggtgtcatttcattcaacaacaacaaagccatcaacaatacaccctaaacaagtatgtaccctatattcaagggagattcccctcctctatccctccagcaatgtcctctaaacgatactctaaatatagagtatgttgttcagacttcagagtatgttgttcggtcctctatatatagagattctctctcctctcctctatcctttttaatattttaaacaacaaattaagcaaaactaaaatatgtattaaacatttaagggtatgagtgtatgacatagttgttaaagtggtaaagtgaggtaaggcgactgaccccctttttaccttttaaatgataaggcgtaaggcaaggctacgccttaaatatagttaaaattagaaaaatattgatattttatttaggataaaaacattaatgaagaagagaaaaagataaagaaaagaaaaaactagctcctagtctataaatcagcccaaaagcccactagcccattaaatctaggttaagcccacttcctctccctctctcctaatcctctccctatgtctcctcacagctgcacaactccctcctcccagccgccgctcccagctgcttcttcctctctccccgctggcgtttctctccccgctggttctttctctcctgtgtcggcgccgccgttgtgctggaaccgctggagtcgccgcgcgccgctggtagaggagtcaccgccatgccatgaggaaccactgctccgctgctagagcagccgttgtgccgttgctagagccaccgccaacctctcccactcgccttaggtactggagtaaggcgaccaggatgccttacgccgctgggacgccttaccgcctagacgacgccttaacacctatggtgtatgacaaatttgtatgtaccaaaaaatacctttaatataggtatttatgtatagaggacgagatttaaagcacgctactgcctgctaagatgaatgagatgtataggatgaaatctttcagaggaaactataaatgagggatatataggacgaatatagaggacactgccggagacaaccttagttccaagcaagttgaggtagattagagttgaaacccaacaaaaaccgcaagtctatgtttagacacatagatagctatttttcatgcacttctattcaaggctacttatttaggtatattcttatccttttacagtctctttttagtgtctcttactctcttccactatcaatttcggtcttttcatagttgttttcctgttgctatcgcgctttaggatcccactacatactgttgcatcaggaggtattcgttggacatgtccaaactatctcaaacagtgttgggcaatttttcttcaattggtgctacccctagcctatcatgtatatcatcgctctagactcaatctgtcacacccggttttagaaggcaaaccgaatgcgaaccatgtacgtgccaggatcagtaattcacgtacacagcgattacataaatgactcatcatagcacaatgcttcgaattacaataaagagtaaggaataatattacagactagagccatttacataatataaatcaaagtacacagaatcgaaacgtagccaacgtaaacaacccaccacaggcagctgactgggggaggtcgctagcctaatccttgaactcgtcgatgtcctggaactcctggagatccgcctcgacaccgttctccttctttatttgagcatagatttcaccaaaggcaacctggtgttttgtgaaagcaagggtcagtacacatcaacgtactcagcaaatgtcctgtttggctgtagtggactagctttatgtggagttaagtcaagcagttgcttttagttggtcaggttattattactagtagaaagccaggttttagcgttaacccaagttattaacccaaagtaccctttccaaacggaaagaataccacttaccattaccatagtcataaacatcgtccttgtcaccacctgtaatccaaacatctctgatccagtatctctaatcaatggagctcccttggccgctcataaccgcgagcacggctgatatatcagtttcataacactcggcagagattgcgcactttacccacaagccgtgattccctcttgcctcgggccgatcaaacccttaaacactaccaaggtgaataggcagggtctcactacgtagcctttacaaagatttcctggggctgtagccgcccgttaggtttcctaaatgcaccgcactcctccccaaggggcgaaccaaccttggcagagcgagccgcatacaccgagccccattaacggcacgacggcgaagcgaactacaccccagttcctcgaattactcagctaagggcgtcccactccaccctcatggttgcactgttttcccgggcggtcatctaacgcacaggtccttacggagaggcattcgagaaaccgctcgagccccctaaagtatcaccagtccaacatcataatcataatgacaacatcgtatcataagtgttcacatcatgttaattgattagagtaaagcaatagcatgaatctaaccatagtaacccaaaaggtaatcaaggacaaggtaaatagaaagctagtcaatccttatgttgttcatagtatgcgggacagtgaattataaagtaaatgggacataatgggtcagaggacacttgccttcaccaaacagatgctcagggtcttcgatctcgtggaactcgaagaactgggtcatttggtcgtcgaagcttgatcttcaattcctcgaagctcagaaacgaaccacgatctaatcgcaatgcgacgcgaagacgaacaggcacaagcaaacaaacatatacatatgcataagaacattacaccatacaagataaaatgttataaaagcgagcaatataaaatagagagcacctctactgttacgcgaggaaaagaaccacgatagttgaagctacggtcgaggggttagcgcgtttacgttaaacaagtactaattagaacatccaattcaacataattatattaattgatattaatcaaatgtaaattaatactgctacttagttttgactaacttactattttaatagttgacagttaagcaagtatcttaatgaatatgagcgattctaagcgaggcgaattaacgacgcacgacgtgcaaacacgatgtgcgcaacgcgcggacacaaacgacttagcgcgcggacaacacgcgatacgcgcgaacggcatgcggcaaggcgtgcgacacacgcgaacggcacacgacaacgcgtgcgaacaacacgcgcgacactcgcgaacgacacgcgacgatgtgcgcgaaacagcaccgcggcacgcgcggaccgacatgcgaaactaataaataaacaacgtgattaaactaaataattattaataaataacatttcagttaaggttaatcatattggtgactaattataaatgcgcaaatcgaattcctaaattaggtttttaaattgaaatgtcgttctagtagccactggttaaacaaatgtttaactaaattaaataaaatgtgtaaaaaatgggataaatatttctaaattaagataattttaatacgaatctaacgcaacttgaattgatcgaatcggatttaaaacgcaaaagttatgaatgttttaaaccatactgtaattcgcgcggactaaatttacgagactgccatcgtcttcttctcatcttcttcctcccatccatggaagagagaggagggggttgcgcaggggaggtcgggtcgagctggccgggggcgggcgcggccgcacggggcacgaggggcgcgaccaccgccgccggagaggggcgcacgggcgcgggagcacgagaacgcgggcgccgccggggaggggcgccgccgccggggaaggtgaggggagagtgagggtggccctgcgtggacgggaacacaaagaaacgaagaaaccctaggtacaacaatggaggttctcaccagggaagaagaccctcgccggagccgagaggaaatccgtcgattgccggagattcggggatccaatcgacgaaccgaacgcgctgcgacgaagccctcgacgagacgaacgcagcggtaccctcggattccgcagacgatgcacggattggaagtaattgctcgccggagttgtcgccagagttggaaccgcctcgaacttcggcgagcaataccgggagctagggattggatttggagaaaacgtttcgtgttctagaacgggctcgacgagatgaagccggacatgtatatatatctagggtttggatgagatgaaaattcggttaaaattcggattttactatttttaaaattcagaaaaagcctagaaatccatattttgtgctcaaaatattataaatgctttcaaaaattccagaaaatttcctataaatgttttggcacctaatgaactaaaaaaacatagttagaatttctaaaaacatttttatgttcctcaaataaatagattttggttttcggaaaatagaaaaatattccgaaaaatatgaaaatttaccgagcgcttctataagatatgttaacatgtttcaaacacattttgcacttagaaacaccatgcaacggcataaatgcaacaaccaaagtgcctctagggctcattccactaggtttacgctaatataaaacaaaataattccacatttttagggaaaagagaaaggaaagcgaagaactgagagagtaacacctgaatttggtggatattagaaaagaaattttatacccccaaattcagggtgttacaaatctaacccccttaacagaatctcgtcctcgagattcaagaagaggctagcaagaaaatgagattggttcgttagtcttttatagtttcttataactcaattatgactccgccggcttgacttgtggattggttgctttgaccatcagatgcttgagaccgattgatgcaattcttgaggatctcctggacctgtgtgttaggacccacacacgctttcgctgcaccactctgatcttgttggttgatattgatcgcattgtcttcatcagggttagcggctaacccccttaacaagagcattgatacacacttgatgaagatgttgccgactctgatcttgactgatttggaggagttggaggttgccaaaaggacaggtgcaagaggaaagaataacgagaaaaggtaagtatagacggattagagagagcagggggagaacccaactacttaactctatggcactcacctagtaaacatattccattgcggtccaagggccacaacacatcaacactcattccaaagaagcaaatcagtcatagcagaaggacaaacatcatgagcacacatcaacaaacatctcgttgctatacgttccttttaattaaatggtggtctttcctctaaggccagcaaaaggcaaggggaataataagacatggagggtaggggaatgagcataataaaggatggagctaaagcaatgattgtaaccgacaagggagagaatgcaaccaaggttaggataggtaaaacaccattctcaaatcgagatggaaaagatgatatttcaaaaggtaggcataagataacatcatggaaagatctagagattacaaaggtaagggaggtgaaaggcaaaacacaccaaaagatagagttaggacaagacttgcaacgcgacagtggaaaaagggaatgaacaagagcgggatagacaagacatcactcttgaaatgaaatgggagaggaggctttaaaatgcaggtgcaagataagcatcatggtaaagatcaagggatgacaagggttaaggtgataacagacaaacacaaccatggatgtattttagacaaaacttgcgaggtatcaaagaatgggaagcaatcaatggtgaagtaggtgaggcattatcctcaaacagcgatgaaaaagaggtggctttaaagggtaggttcaaggtaagcatgagggaaagggcgtagatatcacgagggtttaaaggtgataacggacaaggatgtaggagaggaggtaaatgcgcataataaccaaggatataagtaccacaaaggatggagttaagacaagacctgcagatgaaaaaggaggtatgtccaagggccagataggtaaacaaccactctccaattgaggtggaagagaggagattttaaagagccagaataaagatgagtatcaaggcaagatcgatggatgacaaggaggtggtgatagcaaataaaacacatagcaaaggatggaattgaaacaaaacttgtaaggcgacaagaagtgaaaagaaatcaagggagaggtaggtaactcgcaactctcaaactgggttaaaagaaaggggaggatttaaaggataagtttaaggtaagcatttaggtagaagacataaatatcgcaagggccaaaggcgataacagacaaggatgtaagagaaaagataaaggcatagaagagcaagtggtacaaatacaataacgaatggagttaagtctaggcctacacgcggtaaagaagaggatatagtcaagggtgagataagtaaaacatagctctcgaattgagatagaaaagaggggatttcaacaagcagacctaagataagtatcaatgcaagatctacatattacaaaggtaaggatgatatcaaacaaaagctcaacaaaggatgaagttaaggtaagacaagacttgcaaagcgacaaagggaaaggaaacgaacaagagcaggatagggaaaataacactctcggattgaaatggaataagtgaggctaagaaataggtaaacatcatggtaaatatggagagaggtcaagggtcaaaggtgataataggcaaggatataatggaagaggtaaatgtgcataaaaaaccaggaatctaggaacaatcaagaatagaaataagataagtcttgcaagaggtaaagtataggatataaccacgggtgagataagtaagagaccacgcttgaactaaggtgggagattggaggttttagataacgaacatagcgtaatcaccaaggtaggattgagagatgagaagggtaaaggcaataagaagcaaaagcacaacaaaggatgaggttacaaactcgcgagccaaagaagaggatacgaccaagagaaagaaggtatgagacggaagaggggcgattttaaagggcaggtatgagacaaacatcaatgtaggatatagaggtgtcaagggtgcatatgataataattaaaaagcataacaaatgatatagttaagacaagactcgtgaaacgacaaagtggagaaaacaatcaagggtaagatcggtaaggttccaacagaagggttgaagtaaagattcattaccgagtggagttacaaggaaacaacgagattactacaggtgtgcaaaataaaatgatcactcatggatcattaggaaacaagggtggtcaagggcatgttaactgaaatatttcaaacagatattgggacataaaggtaagcatatataaaaataagagtatgcaagattccaatggtacgagcataccaagaccaagaaagtacaaattgccaaaaagataacgacttatcaatagaataggaaagggtctcaaaagacagtaagatcatggacatataaactgaaatgtttaaataggtagtagaggtacaagggtaagtgctttagattaagggataagggtattaaaaatgcaaggatatgagcatgtcaataacaaaatggaatagagatggtcaaatagtagcaatttaataatggatgaggaaagagtcccaaaagactaaaggctatggtagggggcatctacaaagatgtcgcaagcacaagatgagatcagatctaatagattgagagaagtatagaccatactagaataaaatactttttggcaagggagcatataggagcacaacatagaattagtcgaggtgactaatattttgaagcagaatcaaggatgagatgaagtaataatcaataagtccttaaaacggccaatgctactctaggtcagcggtcctacagtcagcactgctttgataccacttatgtcacacccggttttagaaggcaaaccgaatgcgaaccatgtacgtgtcaggatcagtaattcacgtacacagcgattacataaattactcatcataacacaatgcttcgaattacaataaagagtaaggaataatattacagactagagccatttacataatataaatcaaagtacacagaatcgaaacgtagccaacgtaaacaacccaccacaagcaactgactgggggaggtcgctagcctaatccttgaactcgtcgatgtcctggaactcctggagatccgcctcgacaccgttctccttcttctttatttgagcatagattgcaccaaaggcaacctggtgttttgtgaaagcaagggtgagtacacatcaacgtactcagcaaatgtcccgtttggctgtagtggactagctttatgtggagttaattcaagcagttgcttttagttggtcagattattattactagtagaaagccaggttttagcgttaacccaagttattaacccaaagtaccctttccaaacggaaagaataccacttaccattaccatagtcataaacatcgtccttgtcaccacctgtaatccaaacatctctgatccagtatctctaatcaatggagctcccttggccgctcataatcgcgagcacggctgatatatcagtttcataacactcggcagagattgcgcactttacccacaagccgtgattccctcttgcctcgggccgatcaaacctataaacactaccaaggtgaataggcagggtctcactacgtagcctttacaaagatttcctagggctgtagccgcccgttaggtttcctaaatgcactgcactcctccccaaggggcgaaccaaccttggcagagcgagccgcatacaccgagccccattaacggcacgacggcgaagcgaactacaccccagttcctctaattactcagctaagggcgtcccactccaccctcatggttgcactgttttcccgggcggtcatctaacgaacaagtacttacggagaggcactcgagaaaccgctcgagccccctaaagtatcaccagtccaacatcataatcataatgacaacatcgtatcataagtgttcacatcatgttaattgattagagtaaagcaatagcatgaatctaaccatagtaacccaaaaggtttagggtttagggtttagggcacgtgcggaccgacaagcgaaactaataaataaacgtgattaaactaaataattattaataaataacatttcagttaaggttaatcatattggtgactaattataaatgcgcaaatcgaattcctaaattaggtttttaaattgaaatgtcgttctagtagccactggttaagcaaacgtttaactaaattaaataaaatgtgcaaaaaatgggataaatatttctaaattaagataagtttaatacgaatctaacgcaacttgaatggatcgaatcggttttaaaacgcaaaagttatgaatgttttaaaccatactgtaattcgtgcggactaaatttacgagactgccatcgtcttcttcctctcatcttcttcctcccatccatggaagagagaggagggggctgcgcaggggaggtcggttcgggctggccgggggcgggcgcggccgcacggggcacgaggggcgcggccaccgccgccggagaggggcgcacgggcacaggaacgcgggcgccgccggcggccactgccgccgcagccgggaaggggcgccgcagccggggaaggtgaggggagagtgagggaggccctgcgcggacgggaacacaaagaaacgaagaaaccctaggtacaacaatggaggttctcaccggggaagaagacccttgccggagccgagaggaaatccgtcgattgccggagattcggggatccaatcgacgaaccgaacgcgctgcgacgaagccctcgacgagacgaacgcagcggtaccctcggattccgcagacgatgcacggattggaagtaattgctcgccggagttgtcgtcggagttggaaccgccccaaacttcggcgagcaataccgggagctagggattggatttggagaaaacgtttcgtgttctggaacgggctcgacgagatgaagccggacatgtatatatatatagggtttggatgagatgaaaattcggttaaaattcggattttactatttttaaaattcagaaaaagcttagaaatccatattttgtgctcaaaatattatatatgctttcaaaaattccagaaaatttcctataaatgttttggcacctaatgaactaaaaaaacatagttagaatttctaaaaacatttttaagttcctcaaataaatagattttggtttccggaaaatagaaaaatatttcgaaaaatatgaaaatttaccgagcgcttctataagatatgttaacatgtttcaaacacattttgcacttagaaacaccatgcaacggcataaatgcaacaaccaaagtgcctctagggctcattccactaggtttacgctaatataaaacaaaataattccccattttttgggaaaagagaaaggaaagcaaagaactgagagagtaacacctgaatttggtggatattagaaaagaaattttataccccaatttcagggtgttacacaatcccttattgtactaccagaaatccaacgcaacattcgcaaatatccctgtcgtctgcaacacttatctgttgaacatgtcatcttttttgtaggacaacattctgcaccatacaacataactggtctaatcgaagttctatgaaacttgccttttaacttatgtggtactcttgtcatatagaatgccagatgcttgcgtcacttcatccacccttatttgattatgtagctaacattttcatcaatatccctgtctctatgtagcattgatcctaaatattaaaaggtattcctcgtgggcactacttgaccttccaaactaacatctttctcatgtgtagtagtgttaaaatcatatctcatatattcagttttagttctactaagcctaaaacctttggactctagagtcttccgccctaactttagttttctatttgctctcattcgactttcatcaactagcactatatggttcgaaaaagcatgtgtcggtaccctgaatcgggggtaccctcttctacagcatgaagacgctgcacccgcacagcacttccgagccacacggagaatggcaccagaccccaccacatgggcaggtctgagggcaccacgtggcaaggaaagataatacatcctggtaggatgcttcctccacgccacaagttcccaaccaccccgtgccaggcactgctgctgtgcacgccgctcggtagcacacgactgcgcagacatcccagactccatcgagggcgacttcgggagcattgtcagcagccagggagttgttgcgacaccctccaagctccacggcctcaccaggggccatgaagcagtggcgggacgacgtcgaccgactattcggtatggcacattctaccccgtctaggtcgaggacgcggtcatcccggcgtcaacacgaggcgtcagcatctgtgcgctcgccttcagtaaggggcgcatagaccaacgacctccgggcagaactcaactgcaggcgtgcgggagaagatgcctgggtctctttgaaaagggcgcgcgagcaccgccaaaacatagatggtcgcaacctcgaccaagacttcgctgcggttgcaccgcaaacaccaatgggcacccggtcccaaacgggtgtccccttggccggtgtgggttgcgccgccctcgcggatcatctccgcgcggcgtcatggccgcccaagttccggccgcacctgctggaaaaatacgacggaacatcgaacccgtcagagttcctgcaggtgtacgttaccgccatcacggtagcaggtggaaacaccgctgtgatggccacatactttcatgtggccttgtctggacctgcccggacctggctcatgaacctcaccccggggttagtctactcctgggaagagctctgcgcacggttcgttgcgaacttcgccagtgcttaccagcagcacggtgtggaggcccacctccatgcggtgaggcaggagcccggggagactctccggaagttcatctcccgcttcaccaaggtgcgaggtactatacctcgtatttttgatgcttccatcatcacaaccttccgacatggagtacgtgatgagaagatgctggagaaattggctacacatgacgtggaaactgtccccacactcttcgccctggccgataaatgcgccagagccgccgagggccgtgcatggcactcggccccacaaaccggagctgcctagtcgggtggctcgggcgccgtcccccaggacggaaagaagaaggaccgcgactaccagaagtcgcggtccaccgctctagtggtcgcagccgcgaccgggggccagggcgaccgcaacaaacgcccacggccgcagaggggtaacagcggctcatgcccagtgcaccccaacggtcgccacagcgccgcggagtgtcgtgagatcattgacctcgcgaaacgcgtcagtgagcggcgcgagcagtttttcaaagacggctccccacctcgccgctgacctggcaaagaaaaggtggacgatggcgaggtggccgcggctgagcgggatctcgggtatcagtcgcccgaaggggacctgaaggatgttttcgccggaggctcctactccggtgaagacaactaggcggaccccagggggaccccgtgctccccagtctacggagctaaagcatgccttcctccggaaacccttatggatcccccgcagatccaggcagccaacaggtacacgcagaagtgaccacaaccaaagacaagggctcctgtgtcaaatgcaggtggggacccagggtcgggacctagccctacggcaagtaccaaaccaagaagggctccgtaactctcccccagctgggaaggatccttcaaggtaacgggaatacaccgacctaggggcagccatctagctatgaccagaggagtgccttaccccgatgccgaaacatctctgtaagttctatccataaagcaagtctgaggggtcgaatctgctttttgtaactaaataacgcatatgcgtacgacaacccggtggggtctgtccccgtaaacccggcctattggtctgcacacatgcacgacgagttataaagagaaactaccccctcagttgtgctcttgtgatagttccatcttgctgctccatggtcctaccttgcagtctttcagatagtactttttagctaacccacccgtacggttttcatctgtctgacatgacgacatccgaattgagcagccaggcttgcagtttagggcccctgatacgaaagtagggaggtccgacagcctgggggccggctctagagaacgggaccccgttccatggggtggtccggagcccgtgtagccgctcagcctggtcccgtaccgtgggcctgcattctccgccaccccgtgacgggaacttagtatctggagttataagtcctgcgggtccgacaacctcgggaccggagctagagaatggacattagtctcctggggtggtccggagcccgtgcagtcgcttagcctggtcccgtaccgtgggcctgcacgctccgccgccctgcgacaagtgtcctagtatctagaaccgcgacccaagggggttcggacacgcaacttggccacccggactaaaacctgcgagtcccgagcatgtatcaaaggacgactaatgtcagacggagaaccctatgaggtgtactactaatgcttcctagctaaaagttgtgtacagatccagatcccggcgagtttgcctcccgaggattgttgacaaccttttcagaaacgctggtatccaacctcaacacatcaagcctgcatcccaggcggggggccaggtaccgaggaggagtcaacaatatcgcacacagcaggaacaagttgaaaatagataagtgctaatactgcttaacaaatagtactcttgagtaccttacaaaaagcgaaagtattacatctgttttcaagtggagccctagttccatttctactctgcaggtatgaactacctccacaccattaagggccgcgggatagctagcttcgagcggatcgccggcggaggcgaccacatcagcaccgacggcggcggccacctctgcatcgatgactcgccaagcagcggcgatcatctcagcatgtacaccgctgcgaaagggtcctcgcccccgtcttcctacggggggcgacaacgaggccattaaagccaatgagccagaggttcggcggtaggtggcactgacggtctcgccagcggaggcaaccacctctgcagtggggagcctcaccagcggcggcgaccacctcagcaccgacgacagcggccacctgcgcaccagtgccgtaccggcgaacggcggccgccccagcgcgcgcgaagaggtcctcgctcccgtcctcactgcgggagtgaggacaagaccatccaagaacgccgccgccgccgccccacggcgtacgacgtcttgtacgaccctccggtgcggctggcgacgcaggagaagccgtgggtgtggccgacctgcgcacggcgcgaccgtcgcccatgcggtggacggacagccacgccccgtccaagcggcaggaggcagcaccaaagccacccaggccgaggagccagacacgcggtagctgacctcagacggccgaccccgcgtagccgaagttcgcctccttcgcaaggctggcgaacgcccttcttccccgaatgctggaggaagaagcgggccgccagcccgcgcgaaaggcggagccccgactcggctcgccctcctccccagcgcggatgacgaacatccttgaagctgagggcaggggggaggccgcagcccggctcgcttctctccaccacaaggctggtagtcatccttgtggatgaccaccggtcggaggttgcgaccgggctgcgtgatgaaaatccttgaagccgaacgatgacggaagaatgccaacccccatagggttgcactcctctaacaacaacaaggagacaagatcggcgccaccaccgcgagcgcaagctcttggcgataagatcgccggaggagacgaccctgacgcggatccctccagagaacaccggcgcaccccatctggaggcccggaaggcggaagggcgcgatggtcgctagaggagcgagacatggctactacccgggagatcgacccctttttaaaggcagatctccccactcgcgcccccgaagcgtcacgggcgaagtcttccccgacgtgcaccagggttcccaccttatgacacgggggccaggccccacatgtcacacagactgacccgaagaaggagcgtgcaactgccccacagttatgcacccctccatcttcggggcaaccgacggtcaggaaggcgaaccgccgcacaaggggcatgcaactgccccgcggttaagcgccccttcatcttcgtcgtaaccagcggtcgaaaaggcgaaccgccacgcaagaagcgtacaaccgccccgcggctgtgcgccccctcagcttcgctgcaaccggcggtccagcacgagggcccagacccacatgtcatgcaaccggcgcgccgaccactgagtgtggaaaaatcgcaccgccgcttgcgccaatgccacgtcttctcggggccgtcgcggaagtttgaaaggataagcttttcagaaccagtgcagcgactcgaggcaccccgcgcgtggcccaacagtgacattaagtacgatggtcacgggccagtcagccatgggaataggcgtggcagtcggcatgaccataggcgggccggcggtaattgcgccaacgggcgcacatgagcagcaggccaaccacaaatcaaactctggccccacctgcaggctcgtatcctcccctgaggcgggctcgggggccactgtcggtaccctgaatcgggggtaccctcttctacagcatgaagacgctgcacccgcacagcacttccgggccacacggagaatggcaccagaccccaccacatgggcaggtctaagggcaccacgtggcaaggaaagataatacatcccggggtgtatcgatgggtccggacctccacagagggacaccggacccctatacgtacaggtccggagctcccaagaaggcatgtcgggtccccccccgagtgaggtacgggccttagcaaggtcccgggacggagaggaccccgacacaggcaagggtccggtgccgacacgtgtccaggccttgctctacgctccccgctcaggcggagacccgccgcagccgcgtggcttgtggctcgtgacataagccaacgggccgagcctgacgcaaggcccatacggctgtgcagtctttgcatttattgcggagaggacgcgccgtctgccaccacgctgacgggcgacgcgccctctcagcatttaatgcgtcctgtccaatccgccggcagacagcgtcagggtcacccagcagacggcgcgcctgaccagtctgttggggaacagtgcgcccgtgccgagcggcgcacattactcatcatcccttctacaagaagtttcccctgcacgccgaggatacggagatctcgggtgtcagggcacaagaagattgccccagcaacaaacatttatggctccaagcgctatattctttatgtccctgggcccacatgtcggggcccagtacctttgtgcatgcccccttcaactataaaaggggaggcatgcgacgttatagaaaaggctcaacctttcagacccaaccgtagtctcacaagttcatacaagctctcgagcaatacatcacacagtggagtagggggtgttacgctccggcggcccgaaccactctaaatccttgtgtgttattgtgttcttaccacttttccgactaacaagcaaaacgcttaggcccctcctcatcttaggatttagggcgggtgcactctgccacccggccggagatttgctctccgacagcatgcgccaagggatatccccttatatgtctcttgtgatctcatccatcaccaaggcaaaaaggtaagagctcaaaggtgacccttatgtagtcatattctaactgggaagtcatccatgtctccatcacttactataacactagtctcaacattattgtacatatccttaatgagtccaacatactttttagaactttatgtttgttcaaagcctaccacataacatcccttaatattttgtcataagccttctccaagtcaatgaaaaccgtgtgtaggtcgttcttcttctccctatactattacatcacttgtcttattggaaaaatgacttccatcattaaccttccagacatgaaaccaaattagttcataaagattcgttattcctctcagatgatgctcgctaactctttcgtagctttatagtatggctcataggtcggtagcaatatacttcttcactcgtcaagcatcgtgttcgactgaaaggtatggttgaacaatttggctagccatattggttggctatagtatagctatatccctaaggtatctctatgtgtcaatttggatatcatcagagcccattgtattaccctctttcatccttttcagtgtgtctttaacctcatattcttggatcctacgcacaaaacgtctattggtgttataaaaaaagatccaactgaggttgtgtccccatttttctcgttgaacaatttgtcaaaatactttcaccatctatgtctgatttcaacaactggtgctatgtttcttccttaattcacttaactaggtgaaaatcccttgtcttgctctcacagttcctaactatcctatatatgtcctatccttcatacttaaacgttggtaaagagtctcctatgctgtaccttttgccacacagcttgcttgtagtcttgtttgctaccttgtaccttgtgtacttctctatgttatccacactcctgttacgttctaatggatttctttcgggtttctcaatatgacgagaccaggagtatttatatggaaagtgtttctctattttagcaggtagttattttctggaatttttatggtcacaatagtggtgaaattcagatggttatccgtacagcaccttagtttagttttgtcttatatatcagatcctataaaggtagtccgtgcagcgccttagttttttttttgtttcttatatatcttagacccgaagggcagtcctctgaattgttgcagtgatgcttccttgtcaactcatactttcattggtgttttgcagaccacagactgcagggcagcagcctctgc

SEQ ID NO: 222 - DNA, 3457 bp, Zea mays
  Intron number 1 from transcript GRMZM2G136058_T01 (locus G RMZM2G136058) derived from phytozome v7.0 (chr-ID 6; pos 1 09829698 to 109833154)
cccaccccagctcgcatcccaccgtcgccgtcaaggtacgcggccacaactcgctctcggatgcccttggcgtgcggtttcgtctcgttcattctcgtgtttgatctcgatctgggccggtgaaccggtgtgttctgtgatctcggtgtaggcgaattgggacgcagctgaggcgctagattgcgctatttttcgtgcgaattaagccctgcaattttgttgttgtctgattgagcttctacgagtcaaaactagcacttaggggagattgatggagggaggaattatacgtgttctagttcctagtacggggctctttcgctacaaattagtcttaagtagctcagcgtgaattttgtacaaggggaaatctgcaagttgacaattcatcatgaatctggtcatagtatcaccttactaattcatggtttcgagacattagggaaattgatttatgagtcaaaactgcacttggccattgcttcagatggggataatcttcaatttgggtactgctatgctggatggcgctctctcaagtaactagcatgtgctatgcttggttttcattctctcttgggaatcgaattcttatattaccattcttagttattagccctaatgtaatggggttgaacataacactaagttgcagcagatgttggattgtgcttgctattgtgattgtttatatacctaagtgttatgcacattaatatatttttatatccaaaatacacattaatagattgttttagtagttagtaccttgtaatcatttgtgtgcatgagcagacgagttaatgcatatagtgtcactagagtctagtctagactaaaatttttgactggagttccaccctgaaccctgctcaattgctgactcttttagagaacttcagatccagattgaattttacaaacttccgaagacaagatttgatgatcaaagtgacaaggtgcactatgggcaacagcacttctgtaccatatctgccaacttaagaacatatttaccacaagtctgatgctcatgtcttatcttgttatcctatggcagccttgcattttattggcatttctgtgatcaattttgttttttaatcccagaatgcatgttaaagaaagctctgtgtgcttcgagagggatctttgtccccctaactctagttttaggaatcatattggaatttcaatgtacaaacggttgatataattcggagtaccttcattttcaaaaaacaacttcagcatgtatgagtggggtctctgacttgtttatatttgcatatggtgaaaatattcaatgcatcattcttcccggtggaattgtgaaaatccaaaaaaagacatacttgaagtttttttttagaaaaaaaattctaaaaaactccatgcatgtagatgagatagtaacatgctcgcatgtaacattttataatcaaactcaacttcatttatgagtaatgaaattgacaaatctcagagaaaagaagacataaagcacatgtactctgtctttttctttgctctctgtctatgatttgtcaatttcatactaataaacaaattgagtttggacatgaagttttatatgcatgcatgtcacccctcatttaaaggtatggagttttgaagaattttcaagaacttgtatgtatgccttttaattggggtttcatgatttcacaacatcaacaacaaagccttttagtcccaagtaagttgaggtagcctagagttgaaacccgacagaaaccataagtcaagctttaggcacataaacagttgtttgtcatgcactcctattcaagactaaatctttaggtatattacatcctttcaagtctccttttactgtctcttctcatgtcaacttcggccttccttgcctccctttcctattgctaggtcttcgttaggcatgtccaaatcatccaaatcagcgttggacaagctttttttatttggtgtacccctagactatcatgtatattatcgttccagactcggtcccttcttgtatggacacaatacgcatttctgcaacaattatctattggaaatgtagtcttttgtaggccaacattctgcaccgtacaacataaacttgccttttagcttttgtggtactctcttgtcacatataacactagatggttgtcgccactttatccaccatgctttgattctatggttaatatcttcatcaatatccatgtctctctgtagcattgatactaaatatcgaaaggtattcttactagacactacttgaccttccaaactaacatctgcctcctcgtgtgtagtagtgttgaagtcacatttcgtatatttagttttaattctaaaaaatttggccgaggagggaaagaccgccctcccggtattatattaagaagagaccgaaacatggtccccgtcgagaaaatcctcgaaccctgcccccccccccatcactagcggaacgtcaccgcccactctgcaacagcccagccagtgggtggcgtgcaggacataacccggaagcgggggggggggggggcacaacgagggttttttttaaccaagctagaaatttgcctccgaggcggattgaacccgagacctggaggtgctactcggaagccttaaccattacgctagagaccctttcgcttagttttaattctacaaagtctaaactaaaacctttgcactctagtctcctgccacaactctaccgtgcatttggttgcaatgacaggatgtgatgagacgcagggccatgccagcaaaagcctaggccctgtacgaaactattgaataaaggcctttctcatcaaatcactagaaaaataaaacgataacaatatagataaataaaataatcaataaattatttcattaacaaagtaagcaaataaatatgcatgcataccttaagttaagatattgtaggtaccttgtaatttgattggttttttcttaagtacctttgaacgtttacgatcaaagcttgaaagttaacaccttatagatgctatttgagtatctaatctaatgaatctagataggataggatcaatgtgtttctgtagagtggagacatacctaggtctagggacctgcctcctggatgtatctttgatcttttcctagatgtaccgttccatagatgtgcaatgacgacactatggcagagcgagcgagatcggtgcagaatgataggagcgcgctggcggcaaacgaagatgatgcatcaagtattttaggttcccgctatatcctaatgacctaattactaatatgccttcatagatggaagtttagggggcccaaaaaaatgggggccctgttcaaaaagttgaaccaaacacaccctaagcagtgctccttgttgaatgtgtcagagctttttccccctttgctatcctaattacccctaaatgttttttataggttacatcaccct

SEQ ID NO: 223 - DNA, 7373 bp, Zea mays
  Intron number 2 from transcript GRMZM2G059363_T02 (locus G RMZM2G059363) derived from phytozome v7.0 (chr-ID 5; pos 9 1817295 to 91824667)
gttattgtgaaggcgaactaatcaaggtatctttgggaaggccttttattacattctctgtatttaaactttgattattcttgccaaacaattgaattcttacattattgagtgttagaggtaaacagagtggtttttgcggaggtactaacctcagccatcattgcttgattatatagaaagatgagatgagtcacattgattacataacagctcattagagcttagctaatcagataggagccttggcagccgcacacacctgttgagctgctcaaggtctttaatgactataattaactagcacaagtaactaggagagtgcttaggaaacaggacttaataacaacatttctccccctaaggcctgtttcaactgatcttgatctccttgatcccaattctgcttctcatatcttccaacttggtcttgcccaaggctttggtcagtatatcagcaagctgatctgtagtgggaataaattctgttttgatgctaccttcttccacacagtccctgatgaagtgatgcttgattctaatatgtttgctcctgtcatggaaaacaggattctttgccaaagctagagcagatttattgtctactctaagttccaccacctcaacttctcttcccaataattctgcaaacaaccttgacaaccacaaggcttgggttgctgctgttgtcattgccacatattcagcctcacagcttgacaatgcaacaactctctgcttaatagattgccagctgaccagactgtttccaaggaaaaacaaacatccagtagtgcttttacttgtatcaatatctccagccaagtctgagtcactataacccacaagtcttgccttgcctgtcattctagtatagcatagcccatgatctagagtaccagtcacatatctcaagatcctttttacagcctgaagatgttcagctgttggcttctccagaaatctgctaacataccctacagcaaaagccaaatctggccttgtgtgcactaggtatctcagactaccaactagtcttctatactgagttggatttacctcctttgctgtactttccttgctcagtttcaacctttcttccatgggggtggtagctggattacagtctgccataccaccgagctcaagtatcttcttagcataatgagtctgtttcagagtaatgcttccctctgattgtcttacctcaaccccaagatagaaagacaacagacccaaatcactcatttcgaatgtctgcttcatttttgccttgaaagcttcaatcttctgctgattgactccagtgatgatcaaatcatcaacatagactccaattatcagcaaagaatcacctgaacctttcctgtacatggcagcctcatatacattctgctcaaaacccatctgcttgagagtcaagtcaagtttggcattccacgcccgaggagcctgtcttaggccatacaatgccttgtgtaacctgtacactttcttctcttctcctgatacttcaaaacctggtggctgagtaacataaacctcttctttgagttctccattcagaaatgcagactttacatccatgtgatgtactgtccaaccttcttgtgctgctagagcaagtaaaacacgtactgattccattcttgcaactggtgcaaaggcatcttcatagtcaatcccttccttctgaacaaagccacgggccacaagtcttgccttgtgcctgatcacagcaccatgttcatccttcttcaatttaaacacccacttcaatgaaattgggcgatgacctggactaggagtaacaagttcccaagtcccattccgctcaactgagctcagctcttccttcattgctgcctgccaatctggatcatcttttgcctcttcatagcttgtgggctcaccggcatgagtgaggtttaattctgcaaacaacctctgtgccggcaaaggggttggctgattaccaataatatcatggaccttcctataacgaagctcttcaccatcatgataagcatccaccctttcactatcattctccagaggagtcacatgctctatctgcgggcttgctggagctggtgtaggtgttctaggtgacacaggcacctctgtctccactgcggattcctctgcttctgctgcagactctcctgcactcaccaaagggagactaggtgatgtaggatgtggctgaagaggtggtgagggtaacactgaactttctgcttcaggaaactcttctgcccatggaaactcaacaacaaaatcgctgcatgctgcctctgaagtacctgctgccgctgatgcccagtcccagccacgtccttcatcaaataccacatcacggctgactcgcacgcgctgggacactggatcaaatacacgatatgccttggccccttctgcatagccaatgaacactccagccttaccgcgatcatcaagtttctggagctgagtaagctgccgggtataagccacgcaaccaaataccttgagatggccaactgttggtgcgcggccatgccatgcctcatacggagttacattcctcagtgcctttgttggagatcgattcagaatatgcacagccgtcatcacagcctccccccaaaaccgagaaggcatctggcgttgcttgagcagagctcgtgccatggccaccacagtttgattcctgcgctcaaccacaccattctgttgcggtgaataaggagcactgaaatgccttttaataccttcattggcgcagtatgcggcgaactccgcgacggtgaattccccgccattgtcggtgcgcaggaccttcaacttgcgcccactttccacctctgctgcctccttcatcttcttgattgcttccgccgctgcgtccttggatggcagcaacacagcccacataaaacgggtggcatcatcgacgagcagcaggatgtagcggttgcccgccggtgttgctggcgtgactgggccgcacagatcaccgtgcaccaattcgagttgattctgggcacgatatgctgctgcggccggaaaagagcgccgcctctgcttcatggtgacacaagtgtcacatacctgctccacatgatcgaccaccggcatcccacgcgccatctcctccttgctgagtcgtcggagtgcatcgaagttcagatggccgaaacgttcgtgccactgccatgcctcaacatccttgcgcgccgcgagacagataggttgtgcagcctcgaggtgcaaaatgtacaacctgttcttccctcgatgtaccttggccagcaatcggtgatgattgtcccaaatgtggagcacgccatggttaatcacaaccttggaccctccttcatcaagctgtcccaaacttagtatggagttcttcagcgctggaatgtagtaaacgccgtgaagaactctctgctcaccggtcttggcttgaaaaatgatggatccaactcccttgatttccaccttcaatgcatccccgaaccggaccgttcctcgaacgccagtgttcagatcagcaaagagtttctgacgcccggtcatgtgatgtgttgcgccagagtctaggtaccaaccgctgtccatatcttcttcatccacgccaaggtaggcacatgcacgtggctcagaaagctcgacgtgctgcgccgtgtagctgtgcgccggcgtgctctgctctaggctgataaagccctgtgccagaaacagagcaccatcttcttcacattcggcgtactggacgcgcgcctcatgccttccttggttcccgccacgctgtccagcctgatgtccaccgccgcgacctccaccacggttgccatcgccgcggccagcacggtttccaccgccaccgccgcgctctgcatcctcacggcgcggctgcggacactcacgtgcccagtggccttcctggttgcagttgaggcaggtgttggggccgacacggccagcaacattgccgtctcctcgtccgccaccacgtccacctactctgcctcgtcctcgtccaccaccgcggctgcgtccaccgccaccgcgctggttcctggaaccagagccacatgcatcgtctcccttcttttcctttctgcatcgcgctttccactgctcctcagtgtacaacagcttgccattgatggccaccggctcagtcagtatttgttcttcgcgattgtccactgccttaagccttccagtcacctcctcaagagtcagtgcctcaaaatcaaggaactgctcaatggcgacgacgatctgcgagtacttggctggcaccgtgcgcaggaatttctccaccacgcgctcctcggtgatgtccctatcgccatggatgacaagctgctggtgcagagttgacaaccgcacagcaaagtcatccacttgctcaccaggattgacgctaggggtgtaatcggatcgaatacggacggatatcaatgaaatcatatttgttttcatattttttagtcgaattcgaattcgaatacgggatagcttcgaatacgaatacaaatacggatgttctcgaatacaaaatacggatagtcgtggatcgaatacggagctaatcggacacggatagcgtcggtaacgaatattttttgtcggatatcgtgtaagacatcattccacacatatcatagttgtaatcatttagcccctcctttagtccaaacatttttaggattatatgtgcatatatgctacacctccataaaaatccatgaatttctaaggttattttgagtattattaatttctttatgtagaaaatcattaaaatgcaattaaattcataaaatattgagaactatgatatttggtttcacttattattatggtggttgtaatcattacgagtttcacaaataagtggaaatgaaatgaaataattgatgacatcttgtggtttttatggttcaaacattttttaggatgctatatggacatatgttactcatacgccaaatttcatgaatttctgagactatttgtatattattaatttctttttgcagaaaaacatcaaaatgcatttaaatccataaaatattatagtatcgaccaaaaattgcaaataagttaccaggaccaataaacattctattaaagataatatgaagtccctatgtgaaaatgataaagtgaagtattgattatgttaaaatttggatagttaaggtgatatcacatgtaactcacgtaacaagtgaaaatgaattgaaagaaatgttggcaatctttagattttatagcccaaacatttttgaggatgctatatgggcatatattgctcctccgtcaaatttcatgattttttgagactatttgtgtattattataattttttctatagaaagttatcaaaatgcatttaaattcataaaatattccacttttgaccgaaaattgcaaatatgttaccaggaacaataaacattatataagaacataacctcaaatctccatatgaaaatgataaaagtgaagtattgattatgttgaaacttggatatttagggcgattccacatgtaactatccgaatatctgaaatctgaaatctgataagatatctggggtagatgtccggatatccgaaatatgaaatccggacagttatccgataagatatccggatatccgaaatccgacggatatcagtcatatcatatccgtatccgatatccgaactgtactatccgaattcgaatccgaaatccgaaaattccgcggatatccgaaaaaaactatccaaccgaataattagcctcttcggacggtcggatggtcggataatatccgtaccgtttacacccctaattgacgctgatgttctcccaatcacggcgtaggcgctgcagtgttgctcgacggaccctgtccacgccgatgcgggtcgcagcgatggcgtcccacgcctccttcgccgtagccttgtcgagcagtgggagacccatctccttgggtacagccccgacgatcacctccaatgcgcgtctgtcatcgcggaactggacaggaccgccttcaatggcgtcccagagatcgcgcgcctgcatcctcagcttcatggtctggctccactcgtagtagttcgtcttgtccagcattggccacgacgtgccgctgccggagtcgcggtacaccacccttccttgcggcgactcgtagcgagcgccgccacggcagcgccttcggtcccgtagtggtgactgcgagcgcctcctatctggcggtggagtcctcatccgcctgttcctctctgtctcctcttcctcctcccagtcctcctcatcttctcccttctcggcggcgattttcggcccgcagctcctgcgccgtccttgccgctgcctctgctgcagccgctgcctgcttcgctgcctggactgccagcgccgctgcttcctctgcagccttcaggcgtgcagccctgctggagaagtcgcccagctctccttcgctggttcccttggccttgagcctggcagcgcgctcagcagaggtcgacatgagtagagaagagaggagtcggccttgagactctcaggtgtctaacctaagctctggtaccaaatgttagaggtaaacagagtggtttttgcggaggtactaacctcagccatcattgcttgattatatagaaagatgagatgagtcacattgattacataacagctcattagagcttagctaatcagataggagccttggcagccgcacacacctgttgagctgctcaaggtctttaatgactataattaactagcacaagtaactaggagagtgcttaggaaacaggacttaataacaacattgagaaacactaatggttgggcctgacggcctgtaaaaatcctagcatcattaacgccccatcggtatttttctatttaaaatctaggcatcctgtatatatgagattatggttcttgtatttcctataagattttccaattgttatctgaattacacaaagccactttacttttgttaggtctgtgtctagataaaactgtacagtaaatatcttaggtcactctgatgtattgttttgacatatggagttatggacactggcagagctgttcgtttcaaggcaaatagttggtgtatcacgcaggtgttataaaagtgaacaatatatgtgagcatctaagatgtgtcatctttgtgatttcgtaaacaatatttgtgttcttggtttttttgtgccctatgtatttatcggtgtattaacttaagaacattagccttttgtgtttctctacttccaatgcttatgcaggcccataactgtttctgatcctctcaacaggttacactttctggaaaccagcaacctattagagt

SEQ ID NO: 224 - DNA, 9730 bp, Zea mays
  Intron number 2 from transcript GRMZM2G127754_T01 (locus G RMZM2G127754) derived from phytozome v7.0 (chr-ID 3; pos 1 65654176 to 165663905)
aataccacgtatgaaattgtttaattagaaccatacattatgcgtttctgcatgtcctttcattaaatacaagaaagttaaactagtgaaagtcgcctataggggggtgaatagggcaaatctgaaatttaacaacttaagcacaactacaagccgggttagcgttataaatataaaggagtccgagagagggtgtaaaaacaaatcgcaagcgaataagaagtgagacacaaggatttgttttaccgaggttcggttctcgcaaacctactccccgttgaggtggtcacaaagaccgggtctctttcaaccctttccctctctcaaacggtcccttcggaccgagtgagcttctcttctcaatgaaacgggaacaaacttccccgcaaggaccaccacacaattggtgtctctttcctcggttacaattgagttgttcacaagaaagaatgaaagaaagaagcaatccaagcgcaagagctcaaatgaacacaacaaatctctctcactaatcactaaagctttgtgtggaattgggagaggatttgatctatttggtgtgtctagtattgaatgctatagctcttgtaaggtgtagaagtgtagagacttggatgacttgaatgtgggggtggttggggtatttatagccccaaccaccaaacttgaccgttggtggaggctgctgtcgacgggcgcaccggacagtccggtgcgccagccacgtcacctggccgttgggttccgaccgttggagctctgacttgtgggcccgcctggctgtccagtggtgcaccggataggccctgtaggctgtccggtgtgccacccgcgcgtgctctgctcctctgcgcgcgcaggcacgcatttaatgcgttgcagtcgaccgttgcacgcgaagtagccgttgctccgctggcacaccagacagtccggtgtgcactggacactgtccggtgactcaccggacagtccggtgaattatagcggagcgcccttggaaattcctgaaggtgaagagttcagcctcgagtgccctggtgcaccgaacactgtccggtgcgccagaccagggtgccttccgggttgtcttttgctcttttgtttgaacccttttcttggtctttttattggcttattgtaaaccttgggcacctgtagaacttatagactagagcaaactagttagtccaattatttgtgttgggcatttcaaccaccaaaatcaattaggaaataggtgtaagcctaattccctttcaatctccccgtttttggtgattgatgccaacacaaaccaaagcaaatatagaagtgcataattgaactagtttgcataattgtaagtgcaaaggttacttggaattgagccaatataaattctcataagatatgcatggattgtttctttatttttaacattttggaccacgcttgcaccacatgttttgtttttgcaaattcttttgtaaattcttttcaaagtccttttgcaaatagtcaaaggtaaatgaataagattttgagaagcatttacaagatttgacattttctccccctgtttcaaatgcttttcctttgactaaacaaaactcaccctcaataaatttctcctcttagtgttaaagagggttttaagataccaatttttgaaggtgctactttctccccctttttggatatactaagataccaatttgaaaaactctttttgaaaataaggtggtggtgcggtccttttactttgggctaatactttctccccctttggcatgaatcgccaaaaacggatacctgagtgaaatataagccctctgaattactttctccccctttgggcaaataaaacatgagtgaagattataccaaagttggagagttgctcggagcgacggcgaagaatgagtcatggagtggagtggaagcctttgtctttgccgaagactccatttccctttcaatacacctatgacttgttttgaaatatacttgaaaacacattagtcacagcatataaaagagaaatgatcaaagatatattaatgagctatgtgcaaaacatcaaaagaaattcctagaatcaagaatatttagctcatgcctaagtttgttaaaagtttgttcatctagtggcttggtaaagatatcggctaattgttccttagtgttaatatatgtaatctcgatatctcccttttgttggtgatcccttagaaaatgataccgagtggctatgtgtttagtgcggctatgctcaacgggattatccgccatgcggattgcactctcattatcacatagaagaggaactttggttaatttgtaaccatagtccctaagggtttgcctcatccaaagtagttgcgcgcaacaatggcctgcggcaatatactcggcttcggcggtagaaagagctacgaaattttgcttctttgaagcccaagacaccaaggatcttcccaagaactggcaagtccccgatgtgctctttctattaattttacaccccgcccaatcggcatccgaataaccaattaaatcaaaagtggatcccctaggataccaaagcccaaacttaggagtatgaactaaatatctcaagattcgttttacggccgtaaggtgagcttccttagggtcggcttgaaatcttgcacacatgcatacagaaagcattatattcagtcgtgaagcacataaatagagtaaggaacctatcatcaaccggtataccttttgatctacggatttacctcccgtgtcgaggtcgatatgtccattggttcccatggatgtcttgatgagtttggcatccttcattccaaacttgtttagaatgtcttgaatatacttcgtttggctaatgaaggtgccctcttggagttgtttcacttgaaatctcaagaagtacttcaactcccccatcatcgacatctcgaatttttgtgtcatgatcctactaaattctttacatgtagattcgttagtagacccaaatatgatatcatcaacataaatttggcatacaaacaaatcattgtcaagagttttagtaaacaaattaggatcggcctttccgactttgaagccattagtgataagaaaatctcttaggcattcataccatgctcttggggcttgcttgagcccataaagcgccttagagagtttgtaaacatggttagggtactcactatcttcaaagccgggaggttgctcaacatagacctcttccttgattggtcaattgaggaaggcacttttcacgtccatttggtaaatcttgaagccatggtaagtagcataggccaataatatacgaattgactcaagcctagctacgggtgcataggtttcaccgaaatccaaaccttcgacttgggactatcctttggccacaagtcgagctttgttccttgtcaccacaccatgctcatcttgcttgttgcggaagacccacttggttcctacaacattttggttaggacgtggaactaaatgccatacctcattccttgtgaagttgttgagctcctcttgcatcgccaccacccaatctgaatcttgtagtgcttcctctaccctgagtggctcaatagaggaaacaaaagagtaacgctcacaaaaatgtgcaacacgagatctagtggttacccccttatgaatgtcgccgaggatggtgtcgacggggtgatctcgttggattgcttggtggactcttgggtgtggcggccttggttcttcatcctccttgtcttgatcatttgcatctcccccttgatcattgccgtcatcttgaggtggctcatctttttgatcttctccttcatcaacttgagcctcatcctcattttgagttggtggagatgcttgcgtggaggaggatggttgatcttgtgcatttggaggctcttcagattccttaggacacacatccccaatggacatgttccttagcgcgatgcacggagcctcttcattacctatctcatcaagatcaacttgctctacttgagagccgttagtctcatcaaacacaacgtcacaagaaacttcaactagtcctgaggacttgttaaagactctatatgcccttgtgtttgaatcatatcctagtaaaaagccttctacagtcttaggagcaaatttagattttctacctcttttaacaagaataaagcatttgctaccaaagactctaaaatatgaaatattgggctttttaccggttaggagttcatacgatgtcttcttgaggattcggtgtagatacaaccggttgatggcgtagcaggcggtgttgaccgcctcggcccaaaaccgatccgaagtcttgtactcatcaagcatggtccttgccatatccaaaagagttctattcttcctctccactacaccattttgttgtggggtgtatggagaagagaactcatgcttgatgccctcctcctcaaggaagccttcgatttgagggttcttgaactccatcccgttgtcgcttctaattttcttgatccttaagccgaactcattttgagcctgtctcaagaatccctttaagatctcttgggtatgagatttttcctgcaaaaagaacacccaagtgaagcgagaataatcatccacaataactagacagtacttactcccgccgatacttatgtaagcaatcgggccgaataggtccatgtgtaggagctcgagaggcatgtcagtcgtcatgatgttcttgtgtggatgatgaacaccaacttgcttccctgcttgacatgcgctacaaatcctatctttctcaaagtgaacatttgttagtcccaaaatgtgttctccctttagaagtttatgaagattcttcattccaacatgtgctagtcggcgatgccagagccagcccatgttagtcttagcaattaagcaagtgtcgagttcagctctatcaaaatctactaagtatagctgaccctctaacactcccttaaatgctattaaatcatcactccttctaaagacagtaacacctacatctgtgaaaagacagttgtagcccatttgcataattgagatacagaaagcaaattgtaatctaaagaatctacaagaaaaacattggaaatggaatggtcaggtgatatagcaattttacccaatcctttgaccaaaccttgatttccatccccgaatgtgatagctcgttggggatcttggtttttctcataggaggagaacatctttttctcccctgtcatgtggtttgtgcacccgctatcgatgatccaacttgagcccccggatgcataaacctacaaaacaagtttagttcttgactttaggtacccaaatggttttgggtcctttggcattagatacaagaactttgggtacccaaacacaagtctttgaccccttgtgcttgcccccaacatatttggcaactaccttgccggatttgttagttaaaacataagaggcatcaaaggtcttaaatgaaatgttagaatcatttgatgccttagaagttttctttttaggcaattttgcatgggttgattgcctagaactatatgtctcacccttatacataaaagcatggttagggccagagtgagacttcctagaatgaattataaccggcagggtacaaaatgtaaccctcgttatcttgaggcatgggagccttgcccttaacaaaattagacaatctcttagaaggggcattaagtttgacattgtctcccttttgaaagccaatgacatcctttatgctagggcatctcccactatagagcatgcttctagcaaatttaaacttttcattttctaagtcatgctcattgattttagcattaagttgagctatgtgatcattttgtttcttaattaaagccatatgatcatgaatatcatcaatgttaatgtctctacatctagtacaaatggaagtatgctcaacgatagatgtagagggtttgcaagattttaattctacaaccttagcatgtaatatatcattttcacttctaaggttagaaatagtaacattgcaagcatcaaaatctttagccttagcaatcaatttttcattttcaatcctaaggctagcaagtgagacattcaattcttcaatcttagcaagtaagttaacattatcatctctaagattgggaattgaaccatcacaaacactagaatcaaccttagcaattaatttagcattttcattcctaaggttggcaatagtgtcatggcaagtgcttagctcactagatagtttttcacatttttctacttctagagcgtaagcatttttaaccttaacatgctttttgttttccttaattaggaagtcctcttgagagtccaagagatcatccttctcatgaatagcactaattaattcatttagtttttccttttgttgcatgtttaggttggcaaaaagtgtgcgcaagttatcctcctcatcactgcaattatcctcatcgctagaggtttcatatttagtggaggatcttgattttaccttcttccttttgtcgtcctttgccatgaggcacttgtggccgacgttggggaagagaagacccttggtgacggcgatgtttgcggcgtcctcgtcggaggaggagtcggtggagctctcatcggagtcccattcccggcaaacatgggcatcgccgcccttcttcttgtagtatatcttcttctcctttcttctccccttcttgtcgtcgcccctgtcactatcactagataatggacatttagcaatgaaatgaccgggcttaccacacttgtagcatactttcttggagcggggcttgtaatccttccccctcctttgtttgaggatttggcggaagctcttgatgatgagagccatttcctcgttgtcgagcttggaggcgtcaatgggtgttctacttgatgtaaattcctccttcttttcttccgtcgccttgaatgcgaccggttgtgctttggacgtggaagggccatcaagctcattgattttctttgagcctttgatcattagctcaatgcttacaaaattccctattacttcctcgggagtcattagtgtatatctaggattaccacgaattaattgaacttgagtagggttaaggaaaacaagtgatctaagaataaccttaacattctcatggtcatctcatttcttactcccgaggttgcgcacttggttcaccaaggtcttgagccagttgtacatttcttgtggctcctccccttggcgaagccggaagcgaccgagctccccctcgatcgtctccctcttggtgatcttggttatttcgtctccttcgtgcgccgttttgtcccgaatctccttggcgctcttcaatccttgcaccttgttatactcctctcgacttagagaggtgaggagtatggtggtggcttgggagttgaagtgctcgatttgggctacttcgtcctcatcataatcttcatcccctacggatggtacctgtacaccaaactcaacaacatcccatatacttttgtggagtgaggttaggtgatatcgcatcatatcactccacctagcataatcttcaccatcaaacgttggtggtttgcctaatgggacagaaagtaaaggcgtatgtttagaaatgcgaggatagcgtagggggatcttactaaacttcttgcactcatggcgcttagaagttacagacggcgtgtcggagccggaggtggatggcgatgaggagtcggtctcgtagtagaccaccttcctcatcttcttcttcttatcaccgctccgacgcgacttgtgtgaagggaattccttttccttccccttccctttgttgtaggactctcccgatggagccttcccgtggcttgtagcgggcttctcgccggtcaccatttccttcttggcgtgatctcccgacatcacttcgagcggttaggctctaatgaagcaccgggttctgataccaattgaaagtcgcctagagggggggtgaatagggcgaatctgaaatttaacaacttaagcacaactacaagtcgggttagcgttagaaatataaaggagtccgagagagggtgtaaaaacaaatcgcaagcgaataagaagtgagacacaaggatttgttttaccgaggttcggttctcgcaaacctactccccgttgaggtggtcacaaagaccgggtctctttcaaccctttccctctctcaaacggtcccttcggaccgagtgagcttctcttttcaatcaaacgggaacaaacttccccgcaaggaccaccacacaattggtgtctcttgcctcggttacaattgagttgttcacaagaaagaatgaaagaaagaagcaatccaagcgcaagagctcaaatgaacacaacaaatctctctcacttaatcactaaagctttgtatggaattgggagaggatttgatctatttggtgtgtctagtattgaatgctatagctcttgtaaggtgtagaagtgtagagacttggatgacttgaatgtgggggtggttggggtatttatagccgcaaccaccaaacttgaccgttggtggaggctgctgtcgacgggcgcactggacagtccggtgcgccaccggacactgtccggtgcgccagcccacgtcacctggtcgttgggtttcgaccgttggagctctgacttgtgggcccgcctggctgtccggtggtgcaccggacagaccctgtaggctgtccggtgtgccacccgcgcgtgctctgctcctctgcgcgcgcaggcgcgcatttaatgtgttgcagtcgaccgttgcgcgcaaagtagttgttgctccgctggcacaccggacagtccagtgtgcaccggacactgtccggtgactcaccggacagtccggtgaattatagcggagcgcccttggaaattcccgaaggtgaagagttcagcctcgagtgccttggtgcaccggacactgtccggtggcacaccggacagtccagtgcgccagacaagggtgccttccgggttgtcttttgctcttttgtttgaacccttttcttggtctttttattggcttattgtaaaccttgggcacctgtagaacttatagactagagcaaactagttattccaattatttgtgttgggcatttcaaccaccaaaatcaattagaaaataggtgtaagcctaattccctttcaactagaattcacattatgtgcagttattccatagattaagttgattattccgatgtgctaagtcactgcctcacacataaataattttgttattgcttctacagattcttgatcttgttctctttccatctacatcattaaaaactccctcatgttatctagtcatgttatttgttaagcgcaacatctatattattgcaccaaaacagcattctaagcaacaataatgttgggaaaatgtcaaccactaaatttcaacattgttctgcaatgtagtagtatctgtctcttccgaagtgtttgcatctcttttgctaacgattttattgtttgtgaaataaagttttgcattaccaaagtccaaagggcttttagccgcatcatgttttctcgttagcatatcttaccctgtcattctatcttttaatttttcctaggtagtgatgtagttctttgtgtgtatgtccattgttcatttttgctattgatcatccttgcaatttagtgacaataaccatactgcagccttgctcg

SEQ ID NO: 225 - DNA, 20111 bp, Zea mays
  Intron number 2 from transcript GRMZM2G074899_T01 (locus G RMZM2G074899) derived from phytozome v7.0 (chr-ID 1; pos 2 47429034 to 247449144)
cttttcaaaataacaaggtacgactatgtcaaataatgaccttaatgcagagtaaataggataaacagtcttgatgtttggtacgctggaatttttttgtaagagaaatcattaaacataaatgttcggactttgtgaagtctcacatttaacaaaatctgggaaggcacacacccatatacattattgtcatagcccaaacaagaaagcatctagattcacttgcattgccatggccaagtgatgaattttcatgatgctcctatggcataaaacaaattaaaaaggttgtcattaatcattgttggagttgtggtaaaacatataccaaattatttggttcatgtgaactgatctagaaaccatattctgtatcagcaactcagcgcaccagctgactagagagcaaatgtaagcttaccacaaacactaaaagccttcttccaactggtatggcagttccagttggcttctccctatgtgtgtttcaaatcaaaatgtgcaagagacacatactcaattgaagacccattcttggtgcctaaaacattaataaacgcttatgtagttccaaacctcatgacataacatagcaagttgattgcagttagcttaccactaagagggcattttttgtaacagtcgatggtgcctggcgcgatttcaccaattcaggacccgctttcatcatttgtgtatggagtcctgaatgatggatgattactacccagccatgtaccagcagttgacactggattcgttcaaaaagatcttgtgaattctacaataaactacaaacttataatttcctaaacctgtatttgactatttgttagcatactgcacagtagtgaaagcagagacattcagtagttagatgggtagaaacttttttttttctggaatacgcaggagagctgcgcatctttgtattaatagaagaaaagaaaaaagggggggggggagaaaccccaatacaacacacacaccactagagactaactacggatcaccgactaaaacatggaagaaacacgacccacaccgctgtattaaaccagcaactcatcgacttggaggaaggacaaggccttggcaccagtcatggaccagagcaccgcctcttccctagccatcctaatggccatgaccaagttgggattacaaccatcaaaaacacacctattcctatgcttccaaatggtccaagcacctagaatcactaaagaattgaaaccatctctcacaagatccgatgcccgggagctgctagacttccaccacgactcaaaggattcctcatgaactggatacagatcccgcagccccactgaattaagaaaatcaaaccagaactgcttagcaaaaacacacttgaccagcaaatgatttatggtttcagcctcttggtcgcacaaggggcactgttctggtcggtctagccctctttttctgagcctgtcagcagtccagcacctattatgttccacaagccaaataaagaacttgcacttcccaggagcccaagatttccacacccgctctgctggttcgaactgaactgaaccaaggaatagagcattataagcagaactagaagaataatcacctgaagcgctgaatttccataaatgacgatcccttattccaggctggagcacaacagcatcaagtacttcacaaagttccaggaattcagcgatgactctgactgagattgccccttgcacatcggagtgccaaaggaaattagggagagcatctttgaccaatcgaccattggcaagacgcaaaggcaccaactcaaacaaagcaggagctatgtccttaatacatctcccctccaaccatctatccttccagaaaagggtattagctccatcaccgagcttagtaataatggctgcagcaatcagatttttaaccaccttacaaacatgaatggggaagtctgcccaaggcctactggggtctgttttctgcagccacggccagcgagctctcaaagcccaacagaggttctttaactcactaatccccagaccacccaactccttgggacgggtaaccttaggccaagccaagaggcagtgaccaccacagaactctttcctacccctccagaggaaacccttcctcagcttatcgattgctttgatggcccaaacaggaaggtcaagtgccagagctgcataaatcatcttagacgtcatgacaaactgcacatgaatagctctaccagccctggtcataagttcagctttccatcctggcaaaaggctggccactctatcaacaatagcctgaacctggtcccttgtgagtttcttgggagacagaggcaaaccgaggtacttacagggaaaaactgaaatattgcatggcagcaagtcctgtaaacaattcacctcttcttccccacaacagattggaaacacactgctcttctggacattagtccttagacctgaagctgaaccaaataactgaagaatatccataaccatactgatatctggggtagtaggacatagaaataacactgcatcatccgcatacaacgagaaacggtgctgcatactcctagaagaaagaggctgaagaaacccttcctcagaggctcgctgcacaagcagattcaagacatccattacaagaataaacaacataggcgatagaggatcaccctgcctcagtccacgttgatgcccaatacaatcccctggcagaccatttaataaaattttggtagaagatgaagctaacagcccgcatataatatcacaccagagctgtccaaaacccagttttttcaagacctcgagaagaaaggcccacgataccgagtcaaaagcctttgaaatgtcaagtttgagaaggatacgagcctgcttctgacaatgtaagaatctggtcgtctgctggactagcatgaagttgtcaagaataaaccgtttttttataaaagcggtttgattgggggaaaccatacgttgcagccggtctgctaatctgttagccaacaatttagttaccactttcgcgaaactatgaaccagacttattgggcggaagtctctcacactattggccccctccaccttgggcagaagagtgatgaatgctgaattcagcgaacccaagtttctgaaatttctggcccaaatgcagcgaatggctgccataaaatcagccatgatgaccgaccaacaacacttgtaaaatctaccagtgaacccatcaggacccggggatttgtccgaagggagggccttaattgtatcccagacctcctccaccgagacaggcgcatccagggcaacgaggtcaaaggatggcatcccaagagcatccagatcaactgtaacatcccttacttctgcagttccaagtaacccttgataaaaattaaagaaggctgctgcctttccttcatgggcagtccagatttgcccatcctctgagtgtattgctgcaatgaaattctttttcttcctgaaccttgtttgtgcatgaaagagagatgtattggcatccccatctttgagccacccaatccgcgatttcaaccttgccacggtacgagaaatagaagacagggcaagggagtgcttcttgagcatgttccggagccacaattcagcaggagataaagagcggttgtcctgcgcaacctctaattgatgaaggagctccctagccatctccaactgcagcttaatcttcccaacttttttgtcgttccagccctgcaaacacctagctgttgcctttaacttcttagcgaaggtaagtagagggcacgaccctgcaggaacagacgcccaagaatgggctaccacatcaataaatccctccatcttaggccaaaatgcttggaaatgaaatctcccttttcctctgctgaaatcatgaaacccaagcagcaaagggcaatggtcggagtcatccgtggctgaactctggagaagagaatctgggaattgttcctcccaatctgttgtgcagaaaaccctatccaatttgaccagggtaggattagagtgaccattcgaccatgtatatttccggccaaccaacggaatttcattaagggccaaatcatttgcccatctcctgaacctgcccatcatggcacggtctaagttattattattcttctcttcctcccttaagatcagattaaaatcccccagcacaagccatggcccagtacaaagagccctaatttctctaagagattgtagaaattgaatcttctcttgattcccttgcggaccgtacacacatgtaagccaccaaggagggctggtgcttgaatgaaagttcacagagacgctatgaccgtccaccctgctactagcacaaataccaatgctatttttccaagccaccaagatgccaccactagcaccaacagatggtaggaaaacaaaattgtcaaaagcaggaccaagcatccgcaatacaaggaaccgagaaatatccaccattttagtctcttgaagacaaaccacatcaactcgagcagaatccaccaaagtacgaacagcatcctgtctagcagacccattaagacctcgcacgttccaaataagaaattttgaaggatccataagagatgaaaagagaaacgactaccagggagggacccaacaaatcagcagattggtccgccctgcagcacctccaaaggcctagaccagccgaataacgctgccatggccgtgacctgtacctcagaaagccctttgctgaaaactctggcatactcatcaaggtcttctggcctaatagtcacagcctcatcagccttcacaataccaagttccttcaaaatacgtttcttgccctgtgtggccggtggaggagtaggcagcctctccacacctgcaccagcgacccttctactgcgtcgggggatcacctcagtgactgaagccttgccctgtcgcggccttctgactggcgccctcagaatcccaccagctggtctggtcagcttatcgataaaatcttttgcacccgaaggggggggggaggggacggggacgcgccaagcaactgactgggttggctatccttcttcctcctctgtcgaaagtaagtaatgatggggcctctccgagataggcgactcgacgttcgcgcatccaccaaggctgacatctgccctcccatgtcgagagtggcccgagacggagatcccaggggtgacccctgaattgcctgctccttctcacaaccacccaaagagcaacaaactgccggagccctcaagggtgaagagggggaagatggaactggcaggggggagtgaactgggcaaccaccggacagccccgacgccccagcctccaccatgcaggcctgctcatgactcctgccgaaaccgtccacattatcttcagacgcctcaatcaaagcctcaatatttaattccttgacagcagggacaagctcctctaaattagaagaaccagaaaaagatgtctcctttgaaacctcctgttccagcacttcctgtgaaatagccacgtggcggggacagactggcagcggacctagtctctcatgcacggggcgccgaacggccaacgcttcggcagggcctccctgccctgccggaggagcttgctgcaggcgacgtcgacgagacctagtgtctcgatcatcatcagacgccggcggcgacgggggaggggaaacctcgcccgccggcggagagatcagagacaccgaggccgtcacctgataagccagaagattcttcacagtggcctccacttcaaaactctgaaccggctccggaatcaatagatcaacagcaaccggaatgagctctggatgccggcaccaaccaagaaccctgaaggaggataagttcagacgagcagcagtgtcgggatgaagctccaatgccgtgcagtgcgctcgcaacaaacttctagcagtttccacactccatgcatgcaacgggactccctcgaagctcacagacacgaaggaaggcagggaaaccgcttcagcgtgtgcaagccttgaccacttgatgaacttgaaagacccagaaggtgagttgagaacagctccgttgttgaatatacgcaatgctgcttgctcattttgcaagataataacgaaatcttcaggcgccgaacggtggactgaaaaacttgcaggatcaagctcatactccgctgtaatttctgccgccaaaagctcagcagtcaccggcggccgtgaaccaatgaccacggcgaacagagcacaacgccgaagattgttctccaccaaagttaaatcccttgcacgctcaaggacgcaaaccggccgtgccgccaagcctgcagtcttcaccacagccgactgatgagagggtagccgaacggagctgtcatcatccactggtggcaagttagcagcgctcctagaacggggccttctccccctggtacgatgtcgacccttcctggagtgaatcatcgactgaccaggcccgtcctcagcagcagcttgccttccatgatccatgggaggggagaccctccgccaaaccagcctccgcttagagaacggaactgaaacctccactggttgactgcctaagcgctcccacacaggacggcgggcgacgagtggaagcaggactggaccgccagacggaaccttggtcacgtcgtgcccacgatcggcgccaggacaatcagcagcacggtggcccggccgtcggcaacgcaagcagcaggacggacgtcggcatgcagccgcacgatgggacgtcgccaagcagttgaaacacctcccccggagatcctgcgggaccggtcgacggggaaggggaaggcgggggcgctcagccagacgacgacgacgacgggaccacctagtctccacttgaatccagccctctgcgtctgaaggcggcgagatcccttgcagacgacggtcaccagggcagtccttcaacctcacgatcgggacggaccacgccgaagagacgcgagaagaggtcgccggcctagcacgagctgccggccgaacacgaaccgccggctgggagagcagagctgcacagaaggtctttgcagcggacgtcccaccaagcccacaagccggtgagagagggccggagtccgcccatcgctgtgccttggatcgcccggccgggagagacggcacaacagcagcggacgacgaagaaaaagggggaggcgcgcagggagaaggtgagaaggccgccgggaaggaagcagcggccgggaaggtggtcgccgagcccggggtggacgtcaacgagaggctgtggggagggcaggggacggcgccggcgaaggaggggagggtggaagacgaggcgcgaggggagggggacgaggcgacccgggcgggagccgaggcggccagggcgggagccgaggcggccatgttcagatgggtagaaacttaagagcatacttcttgacttatcaggtccacacacaaaaacgaaaaattatctaacatttgttctaacaaatgaaacctcgtccagccactagaccacattcacacgcgcagacgtatccatgcagatcctatttttatggtagatcccataattatggtagatcgtgagagtttctattgcatgtgcgttaattttgaatgacattttcgtttccactgcatgccactggtttgatttgaatgttttattttctctataaatataggatctctccaacagccatgcagctagcctcgttataatcaatttatggtatatactgatactaattatgatacacagtctaggtatttatgcaatgtgataggctgcataaaaatttgttttctattgcatgcgtacaaatttaggataacaaggatgtgcgtggaaggaaatggatttgtatgcatgaaaataaaaaaatctgacttaaatgctttatttcctctatagatatatgatctctccaacggccaaaccgctaggctcgttagaaccagtttatgatatatattgatactaattataatacacggtgtacaatggcatagctaggatattttcatgagatatgccataagaaaatttttagaaataatttactataatccataataatttaatatacgaatatgaatataaagataaaaatagcatatgaaactatagttttaacatttaagtctattatgcatacattataatgcaaattaatatgaaatagcccaaacatcaagaacaaaatatactaatgaacgtcagatttacataattaaaatgtccaatcactgtattttacaagtaaattgatagaacacaatctcaaaatcatttcattactaatgaactttagatttacataattaaaattgtaaagataaaaaatagagtttattaaaaaatttaacctctcttgttgcggcctatggggcgatgctcgggcttggccgcctcggccggagaactgagatggcgggacacaggagcaggtggcctggtgcagtatccacatgtttggtttctgtatttggagagtcaggccaacttggcccgtacgcgcagagcctgcatgcgcagcgcaactaccctagtgggtatggccgtagcttggttcaaggccaccttttgcatgagctaatgcacgccatgtcaacaacccagtcaaccaaacaagaaaaaaaataaaaaaatcatgtatcccatgacacagatcaaacaaatgcagaaaccaatcacacgtatgtggctccacacacgctctgaagttatgagcataaattatcaatccaacctgaaagttgtttgcaaacctcttgatttggcatagatatacatacaaagtgacataaaaatatgtatgagattgtatgtcatccctacaccacgaacatgcattcaggcgcatccccaccagacgcatgcatgtagtcctatttatttggcacttctgaacaatatggcaaccactaggcacatgcacgtggtttttatttttatacaaatccaaaaattatgacagctcataaaagttttcattgcattcacataaattttcattgcatgtgcacatagcatcccctcatgccgaaccacgcgtatgcatgcgcacgtgcaccatcgagtgactctttcccccgaaaaaattgaaaactgattttactattgtgcttgtcgcgataaaaactttaaaactgatctcacttgacatatgtatctcaagttttattagggtcagtcattctatcttttaacttcagtatttcatagggattattaggataacggtaacggtaagtgagtcagtcactctacaaaaaatatgcattacgaggaaggaatttatcgaactcggtcattctctgaatactcaatcattccatctttttagtcttagtcatttatgagaataattgagatagaagtcatttagtgagtcagtcattgtacaaaaaacagtcattacaagaaagaaagtgaaactcagtcattccatgaatgctcagtccttccatatttttagcctcagtcaataattgagaaagaagcatgtcggtatcctaaatcaggggtaccccttactagagtatgaagacacggtgcccgcgcggctatctctagtcgcgtggtgaacaacagacgaccccaccacgtggacagatccagggccgccacgtggccggataagacgatatattccagcatatcggcagagggtccggacccccatgggaaagtgtcggacccctatacgtacggaccggacctccgggcaaggtccagaacctccacgggcgtgcccgggccccctgtgcagggtccgggccactcacagcaaggtccgggattccggggcaaagaatacccaggccttgaccaaggctaggcaggggtccggagctgacacgtgtctggaccataccgcgtaggcttccgctccccgctcaggcggagtcccgatctgccgcgtggccgaccgcccgtgacgtaagccaacgggtggagcctgaattaaggcctctgggccgcgcgtcctctgcatttattgcggatgagtcgcgccgcctgccagcattaaatgcgtcatgtctactccactgacaagcgatgtgccgcctcagcattaaatgagccatgtccactctgctgacgggcggcgaccaggccatcctgcaggaggcgtgcctgtccattccggtggcagacagtacgcctgtgctgcggcatacgttgtgctcatcatcactcatacgtccccagggaagcttccgcggcacgccaatgctacgtagaccgcggatatcagagcgcaaggagattgcactggcaaccagcattagttgttccaagtattacatctgttatgtccctgggccccaatgatttcaagtcgcctggtcgcctggtcgatccctgggaccgaccagacgactagtcgcgattaggcgacgactagggcgattagtcgactcctagtcggtcctagtcgttccctggtcgtcctagtttagtagttatacttatatagctatatatataaatgtacatgtatacaactacattatataaattagaaagtcactacttagcacagccttaggattagggcagccaacaaccatccactaatttggcagaactgcagagaagggggagatggggggagagcaggaggaaccttgagataacgagctcatctcctcaatggtgcaggtctgctggagcttgggaagggacagggtggagactgcagctagtgaaccttaagacagttgccgcaggtggagactgcagcaggcgagcaggggaagggcagggtggtgtagccgctgatgatgtagccgccggtgagctgtaggtctgtaggggcagccaccagcgaccaagtgtgaataagggctggaacagtcgagctagcaagagaggagagtaggagacgcagtgcactgtttggcggctaggtattacagaggagacgagaggagagggtagtctaaagtatactgtagatggctgaaaatggcccaataacaaaacctagccaggacgaccaggaaacagtaatcgggcgattagtcgccctaatcggcgattagtcggacgaccaggacgaccagcctatctagtcgagtcgtccagctaattgagcccaaatagccgaccagcccgactaatcgcgactaatcgcgattagtcggacaacttgaaatcattgttgggcccgcatgtcggggctcagcacccatgtacgtgcccccttgagctataaaaggggaggcacgcaatgctcactaagactcagatacacttagacccagctcaggctcacaagttcatacaagctgcctttgggttgtcttttgctcttttatttgaacccttccttggacttttattgatttgtgttgaacctttggcacctgtagaactcataatctagagcaaactagttagtccaattaatttgtgttgggcaattcaaccaccaaaatttatatagcaaaaggtgtaagcctatttccctttcaggtgctgtcgctcaggacgacaaaaagaagaagaagaagaaccacagctccgagaggccaccgtctgccgctccgatcgtcgcagctgcgattgggggccgaaacgagcacaacaagcgcccacggccgcagaggggtaacagcggctcatgccctgtacaccccaactgtcgccatagtgccacggagtgtcgcgagatcatcgaactcgcgaagcgcgtcagcgaacggtgcgagcagacctccaaggatggctcccctcctcgccgtcggcctggcgaggaaagggtcaacagcggcaaggtagctgtgggagaaccggacctctggtatcagtcacccgaggaggtcctgaaggatgttttcaccggagactccgaccctggcgatgacaactagtcgggccaccggggagaccccgtccttcctagtctatggggctgaagtctgccttcccccagaaacctttatgggctcctcacgggtctagtattttaacgagtctatgcaggaatagtcgcggtgtaaggacgtggacttgaccaatgaacacagatggcaagcggcaacctaaaaatgcacgatacaaccaagcacttaggcgccaccgccagcggatcgtgcatggtaagggaccccggggtccgggacctagtcctacgacgagtactgaaccgagaagggctccacaaactctcccccagttgggaaggacccttcaaggtgacggaagcatgccgacccgggagtgcccgcctcgccacaactgagggagtgcctcttcccaatccctggaacatagagcattcctgtaagtcctacccacagaagcaagtccgaggggttatgattccttcttgtaactaggttgtgcatacgtgtacgccagcccggtgaggtccgccctcataagcccggcctgttggtctgcactcatgcatgtcaagttataaggaaaaaaatacccccctcagatgtgcccctgtgatggttttattctgccacagattccagatattgtcattttttatctaacccacccatacggttcccatccctgctgacatgatgacatccgaattgagtagtcaggcttgcagtttaggacccctctgcgaaagcaggagggtctggcagcctgggggccggctctggagaacgggagctcgttccatggagtggtccagagctgcgtagccgcttagcccggttccgtaccctaggcctacgcaatccaccactctgtgacgggtaccctagtatttggagctatagtcctgtgggtccggtaacctagggtccggttctagagaatggacgcttgtctcctggggtggtccggagccgtgtagccgcttagcatggtcccataccgtaagcctgcacactccaccactctgcgacgggtgtcctagtatctagaaccgcggtccagggggtacggacacacaacttggcttcccatactaaatcctgtaggtcccgtgcctatatcaaaggatggctagtatcaagcggtgggtcctatgatgtgcaactaacgctccctagccgaagctgtgctcaagtccaggtcctagtcgaggctgcctcctgggagccgttgccaactcttttaggtatgctggtatccagcctcgacatgttgagcctacatcccaggggggccaagtaccagggaggagtcggcaacgccacacacaacagggacaaatagtatgcagataagtgctaatactgctcgataagtagtactcaaaagtaccttacaaaaacaaagtgattacatccgccttcaagcggggccctagccttatgtctacaggtatgacctactcgacatcagtagggtcgcgatggaagtgcgcgaccgccatctccttgaggctgatgaacatccttgaaagagatgggccagcggtcaccgttggaggcggcaccgatgccatcaaagccaaagagatggagccgcagctcagctcgcttcccacctcatggagttggagctagaccagttcatggtggtgtaccatgggatgctggtgaagctcacgcgaaagatggagccgcagctcagctagccttccgcctccggaaggtcgctgcgcaacacccattcctccgaatgctggaggaagaagcgtcgcccccacggacatcttgcagtggtaggcgatgatggccgcctgaaggatgaagcagggcgtaaagtgctgaggttggaggccaagctcctccagcagcagcacgaagaaagacgagatcggcagcaccaacccgcaggagaggttggagacgaagagcacaaactccccggcggcgagatcgtcatgaggagaagcgccgacacggatccttccggcgaacgccggcgcaccccatccgagcaggttgcgcaccaagtcgagtgccacctcggactggaagcactcgggagggtctagcaaggccatggcggctacagcggcagaagagcgcggagaactcgagggcgaaagggcgttgcgagtgatgagaatggctaccacgctcgggagaatccctttttaaagaaatattcccccactgacgccccgagacgccgcagaagatctcgcccgacgagcgccaaggtgacccagcctctggcacaggggcccgggcccacgagtcatcctccttgggcgtcggtctccgtgtgcgaagaaggctaaccgccacgcgaggagcgaaccgccgcgcctcttcatctccgccgaaagcagcgggccagcctctgacacgggggcccgggcccacgagtcatcctccttcggaatcggtctccgtgtgcgaagaaggcgaaccgccacgcgaggagcgaaccaccgcgcctcttcatctccgctgaaagtagcgggccagcctctgacacgggggcctgggcccatgagtcatactccttgagtgtcggcctccgagtgcgaagaaggcgaatcgccgcggaggggcaggccgccgcccgtggtagtacgtctcttcaccttcgccgaaaccaacaacccagtctctgacacgggggcccgggcccacgagtcatcctctctgggcaccggttcctgggtgcagagaagtcgaaccaccgctcgcgccagtaccgcgtcttatcgaggcaccccgcacgtggcccagcaaaaccataaagtgcgaaggccacgtgtcagtcagccgcggggacatgcgtgacagttggcgtgaccgaaggcgaactggcagtaattatgtcagcaagcgcagagaagcagcgtgccaatcgccaatcaagctttggccccacctgcaggctcgtttcctcccctgatgcgggcccgggggccactgtcggtaccctgaatcaggggtaccccttactacagtatgaagacatggtgcccgctcggctatctctagtcgcgtggtgaacaacagccaaccccacaacatggacagatctagggccgccacgtggccagataagacaatatattccaggatatcggcagacagtccggaccccatgggaaagtgtcggacccctgtacgtacggaccggacctccgggcaaggtccagaacctccacgggcgtgcccggacccctgggacgggtcctggaccccctgtgcagggtccgggccactcacagcaaggtcccgagattctagggcaaagaatacccaggccttgaccaaggccaggcgggggtccggagctgacacgtgtccggaccatatcgcgtacacttccgctccccgctcaggcggagtcccgatgctgccgcgtggccgaccgcccgtgacgtaagccaacgggcagagcctgacgtaaggcctctgggccgcgtgtcctccgcatttattgcggatgaggcgcgccgcctgtcaaactggcaggcgatgtgtcgcctcagcattaaatgcgtcctgtctactccactgacaagtgatgtgccgcctcagcattaaatgagccctgtccactctgctgacgggcggtgaccagaccatcctgcaggaggcgtgcctgtccattccggtggcaggcagtacgcccgtgctgcggcatacgttgtgctcatcatcactcgtacgtcgccagggaagcttccgcggcgcgccaatgctacgcagaccgcggatatcaaagcgcaaagagattgcactggcaaccagcattagttgctccaagtattacatccgttatgtccttaggcccgcatgtcggggctcagcacccttgcacgtgccccccttgagctataaaaggggaggcacacaatgctcactaagactcagatacacttagacccagctcaggctcacaagttcatacaagctctcaagctcaatatatcacacagtggagtagggtattacgctccggcggcccaaaccactctaaacccttatgtgttcttgtgttcgttcatcacttagtagacatgcaaaacgcttaggcccctcctcatcttaggatttagggcgggtgcgttccgccacctgaccggagaatttcctctccgacaaagccatttggtgagtccgtcattctaaaaaacaagcattacaagaaataaagtgaacaaactcagtcgttatatgaatactcagtcatttcatcttttagcctcagacgttcatgagaataattgagatagaagttatttagtgagtcagttattctaaaaaccatacattacatgaaagcaggtggcaaactcagtcattttataaatactcagtcattctatcttttagcctcagacattcatgagaaatactaagagataagtcattttataaggtgagttattctaaaaacagacattacaagaaaggaagtggacaaacacaattattctagttagttgtccgtttattgctatggtttctagttatcattgtcttgtatggtcacaattagcgagaggatctatggaaaaccttggcttgcctcagtatgaattaagtggttggtaaaccaccaaacatctagatgaaaatcgtcatgtcaacttgtttttccgttgccttgtaattctcttacacaaacttgtattaacttgtttatatatttgtgcttatgttgttattcttgtgtatccaatttacttgtgtgtttggttcgtggctaactagccacactttaactaaggttagtcatttgaattgaataactaaccttaggcagaaaagttaggcaaagtgtggtaagttaggcagtggagcaaacaggtcgtaaattagttgctctcttatggtaattatctggcgcagacgcgtagctaagtatagttgtactaaagtagttactcttttaaaatgaaaattgcggataaaaagattgatgacgttagctagcttggtaattaatccatgatttcgagtatgtaccagctgaatacgtgtgtcattcggccttcacagtatttcctttatattaaagccggttcaaaacggtaacaatgaagctatccacgttatcaagaaatcatgcaccgtttgatcagtggatgcgtgccatcctaatcctccaatctgcatgctccacacaaataaataaatttcctttatattaaagccgattcaacaatgaagctatccatatcatcaagaaatcatgcactgtttgatcagtggatgcgtgccaacctaatcctccaatctgcatgttccacacaaataaataaatttcctttatattaaagccggttcaaaacggtaacaatgaagctatccacgtcatcaagaaatcatgcaccgttcgatcattggatgtgtgccatgctaatcctccaatctgcatgctccacacaaataaataaatttcatttatattaaagtcggttcaacaatgaagctatccacatcatcaagaaatcatgcaccgttcgatcagtggatgtgtgccatcctaatcctccaatctgcatgctccacacaaataaataaatcctatgcatctccacagtgttggagacttccaggcgcttcttctcctcgcgctctccctcgccgccatgttcgcctttctctgcagtggctcctgtcgtccctcatcgtcgtcccacacctccctcgtctgcaagcgctgtcgcctcctcgtctccaaccccatctgccgcttccatgttcaccatagggcgcctctcctcctcagcttcttcgtcgacgaagatggagacatcgagttcgtgcccacactgcaccagttcgatcgcatcaccagcgcgcgagagatgctcgatattatgtcccaacaaaatgtggtgtcctgtacgatggtagccgtgggagtaagcgcacataaggcgtccaaaagaggcaattgaggtattttgatgggtgcatgttgaaggcctcgagccttgtagatttccattaccgtcagtcctttcggcctatgcaaatctacttactgttgatctaggacagggatgcgggaatcttcttgacctgatggaatctgcttactcagtgctagtggaggtatttgaggatatgaagaataatgtctgaattggaccacactaattgttgttgacatgttctgccatatggagatggagaataggtcaccaagtgatgccacatttctttgcaaccttatcagcgtctatccatatttgactatctaatcttaacgacatgatgtttattcttctcggattctcaaaggggaacactcacattccaagtgcctctctcaaggtgcccaagacatactaagcaaaaatcatgtatcctaacttgattacatgcatagatgcggatggaataggggcatatgattggttcaatcaaggccatgctcctattgtgccattttaatgctaaagaataagatatcagcatcgctgaaaacaacctgaacataacccaggtaacctatgtcaattgtacttacattttccatatccatggttttaggcttctacgagactgataaagactgaaatttgtctatgttttttaaagcatactaacattcaagacaagatagcaataaaccaaatcaatactcctagctcattggaatgtcctcctgccttaatttatccagattctttgagaaagaggtaagctcaatgtttgtttcagtctaattttttagtattttttaatttcttcgcatctactaaagaatttaaatttgaactatgtctcaggagaagcatttgaatgattacagaacaagatggttttacaaatacttttgatctcacccaactgtgtggtatttatagtttgctcatttgtatacaatcgtcggctttacaaccttgtttgctcaacccaaaaaaaggtggacagagactgtctgtttcatcactcaccaagcacacccaacttaaatttaaggagaacaacacaagaagacatgaagcacctaaacggaagtgaataattaattaaccatataaaaccatgtcctcacacgttaaagttgtttacatttcctcataaatgaatttgtacaaattcgaacaagcttgtcagcatgtacgagtagtatttgtgttagaaaatacaagaaaaaaagatctcttaagttctcaacttttgcttgatcttgtgtgttggactgttagtgttcatatggcgcagcccaaatattcttgtcctgtaattgaacacaagaatctgttgagttgatgtgcagcctcctgtaattgaacacaagaatctgtttagttggtggtctggtcatggagctcaaatttgatccaatatgaattatgatacgtattgcgtactctaaatatttatgtttaatttttgcaaaaaaaaactatataagccttagctgcagctatagctgctacagaacccattcgctaaaatacctagactgagattttgaacattgatggcagtgaaaggaatcaggctccaaaaacagggagcgagaatatgtgtgttgtcttgcaagtcctccttcatgaacgagttgcttcttttatttttttaaacctctaaatatctattcaaaatcatacacagtacttcactttgttcttcatgatatacaattctctaagtcaaaggaaccttgtgcctcctgtgtttccatgctttactattgaataatgaacataactgattcgcaattatttagagaatgttgtaggattttcctattctacctaaactaaagtcaccccatccttcacctgttcaattactccatatgcacaatttttataacagatatatgcacatttttataacaaataattttggcatcatcaagtgtaaaaacttgcagtgtcgtactgtctgctaacaaattgtaatacagttagttgttgtgggaaatggtaatatttgttgttgtttgagctgtcttctttaaataatgaacattgcattgaagttttgtagctcagtaggatgccattgctttatttcttcttgccaatcttttgagtgtctataactgattgacgcagccatcctgaattttgagatgcatctgttacaatggaatcctatgtcatgtactcctgcaatacttttatttacaaataacaaatcactacacgctttccacttctttacaagtaacttctttatgtatattttttttgcagtactta

SEQ ID NO: 226 - DNA, 6590 bp, Zea mays
  Intron number 1 from transcript GRMZM2G059393_T01 (locus G RMZM2G059393) derived from phytozome v7.0 (chr-ID 3; pos 1 40551701 to 140558290)
cttccccttcctcttcctgctgagcgccagcgccggtgtgtcacggcagacactgccggactggaggaagcagccggactgaaggaaacagagactgagctgaatcgtattctgtaagctacgcgtattcttgtaagcggaaacgcattctgggtgtgtgggacccatgtatcagggttgtctagtcaggcttataagccgggacgccgaactgtaaacactatctacatctggaatagaaaaccacaaacctggcagccctccggctgatccagcgtcttcctcgccatcgccgacacgctcaccggcgatccactgctcggctcacgtccggcgtaggcacgtcgtggccacgggtcgtcacagttggtatcaagagcctgggattcctcaaccgggttggatcgtcgactcggcgtcaggaaggcgggaaatttttttccgactcaagttgcaagctttcgccgcggcagcagcgtcttcaaccccgtctcgtcgcggccacgacgagaccaccctcgatcatccgccacggctccaccaggtaaaccctcgctccaaactcagctgatccttcacgctatggcgtcggattcgcagagggaggagacgcgatgggatcgggtttttcaaaagttggattctttggaacaacggatgttaacgatggatggagttcagcagcaactcatggcacaagctgatctcgccgctggagttgcacaagaagccgccagagagaggtcgttgatgtctcggcagattgaagagaccggcaaggtggtagcgcagatgcggctcgagcgactggcagcacagcttgactctgatcagggatcacagggtgaccctcatccccatcaccgtcggatgcaccatcaagatgcttcttttacccccaggacagaaagtcttcacctttcaaattccccaagacgcccccagcgaccaagaagaggaagaactggtcttcggcatgacccaccaccaccttcgcttcccaagatgcagtttcccgagtttgtgggtcgtgacccggtggtatggattgatcactgtctcacttactttagtatatacagaatcccacaggacatttgggtcgtatctgcctcgttacacatgaaagagaatgctgcccgttggtaccaagtccacaaaatcaagcatggtattgagtcttgggagggcttcactaaatcagtcatgaacaaatttggagctgagtcttacccccaagccatgcgacagctgctcggcctacggtaacagcactccttattggagtacaccaaagaatttgaagaggtccgttatagagtggctatacacaattcagagattgatgaagtcttatttgtgtagcagtacatcaaaggccttaaatttgagctacaagggttagtgcagacagctctaccatcttcagtgaaccgagccatgatcctagctgaactgcaccagaccaacctggacaaagctagagcccgggggacgaaaggcttctttcagtccaaaccatctgcctctactgctcgccctgatgcaattccagtgaatcttccttccgacttgtccaaagagcgacaggttcgggaataccgcaggttgcatggtctctgttatgcctgtggtgaaaggtttgagccagggcatcttgccaagtgtgccaaacgaaacgcagcccaattacacgttctctccactgaagatttgagcatggaattgtctaactcagtgttggagcagctgcagaaagaggatgtggcccaagattatttatgtcacctgtctccgaatgccatcagtcgacatgactcttcaggcacagggtcggctgtgagcccatgcaacagaggcgacggccgggggcccaaaaataataggacccaatatttagtatctatatcacaatataatatactattttatactttacaaaactcatccaaccaaataatccacacacataatctttactaaatccactaaacaaattgcacttatacttacacaacatcaaaatcaacagttcagatcgttgaataacatcatctctcttgcgcactcaaatctaattgacaatattatttgaatcatctttcagcactcccctcctcatgtccacaccgccgtcaacccctcccctcgcgtcaccaccgtcgtcgttcaccccactcttccccttcttaggaacgtagtattagcacgggctatatactagtagtaaaatagtatatgtagctaacaagccggtagggctaggcacacggacgcccaacgcacacggaccatgagacatatattgcccactgcccagtcatcacgctcacgtcgtcgcgcgtctgtgtgaccataccctccacgtgatcatcgttcgccatctcgccaatgcaaccctccaggattccagggcgctgggcgctactgctctatccctcaggcacgcagggtcaagcagtcaagattcatgttattttgtggtcgtcgttcttatttcttaccttgcaaagtgctaatctgcaccgatatatattatttagtgtcttagatattttaaaaaaccaatttcaatgcacgtcatcatttacatacaaagtactaatttgctccgctgcatatcatagaatttttgatatagtctagagggcccaccattatcagttcgcctgggggccctcaaaatcataacaccggggctgttcaggcagcatcaagatccgagccacactgaacaatatgatcattctgatccttgttgattccggtagctcgacatgttttataaactcagcggtggtgaccaaggctggcttatgtgctattccatgtcctccagtgcaagtcacagttgccacaggagacacagtcatttctgatgctatggtcaaggcaatcgaatggaaggctagtggacatatttttcgcacagatatgagagtcctgaacctgggaccatatgatgctatcttaggctttgattggctcactagtcacagtcccatgcattgcaattgggatcagaagctgttgcaatttgtggatcaaggggtgatggtacaattgcaaggtgagacagttcctcaagcatgtgcactcactgaaatttcagggcctcaacttcaccagttattcaacaccaatgatatttggtcatgtgtcttactcgatcacactacttccactactccagaggtggtgcctcctgagatctctcacctcctccttgacttccaaaacctttttgctatcccctcagttttacctccacatagagtctatgaccattccattcccctgctccccggagccattcctgtcaacaccaggccctatagatattcacctctccacaaaactgaaatagagaaacaagttcaacacctcttagacaccggtctaattgttcccagtatgagtccctttgcctccccagtcctccttgtgcaaaagaaagatggcacatggagattttgtgtcgattaccgaaaattaaatgccctcactataaaaaatcgattccctatgccacttgttgacgagatccttgatgagctagctggtgccacgttcttttcttccctggacatgactgctggctaccaccaaatccgtatgaaaccaggggatgaatataaaaccgctttcaaaactcaccacggtcactatgagtttcttgtcatgccattcggcctcaccaacgcgccagctacctttcagtgcactatgaactcgatcctagctccttatctaagaaagttcgctatggttttcatcgatgatattttggtgtatagtgctaccttggctgatcacatctcccacctcagattagtccttactgcactccgggaccatcagttctttctcaagcagtctaaatgcaagtttgccaaatctgaactgagttacttggggcacatcatcacggatgctggagtggcaacagacccctccaaagtggcggctatgttacaatggccggttccaaccaatttcactgagcttcgaggattcctgggtctcacggggtattacaggcgatttgtgcaacactatggactgctcgccaaaccccttaccaatctgttgcgacagaaacaatttcactggactgtggcagcccaaacagcatttcaaaacctcaagactgctatgacaactactccagtgctcacacttcccaggtttgacctgccattcgaggtggaaacagatgccagtgatggaggtctcggggcagtcctcatgcaacaggtcaaaccagtggcatatttgagcaaggctttgggagaacaaaataagcatctatctatatacgagaaagagttcctagctctcatgatggcagtggaccgttggcgtccgtatctccaaagaacaccattcactattcgaacagaccacaaagctctcagtttccttgagcaacaagagcttcagtcggacctccaacgcaaagccatgaccaaactcatgggcctcaactacaaaattcagtacaagaaaggcaaggaaaatagggcagcggatgccctttctcgcagggggcactcttctctcgccactactgtcactgagatcataccgagttggattcaggaagtaatcaactcctatgccactgacccagcagcacaggcactgttactcaaattggcaatctgtagtcctgatgaccaagggtattccttgcagcaaggattgatcaagcgccacaaccaagtctggataggacacaattcagcccttcgaaccagactgctctccttccacgatagtgctattggaggccactcaggtactttggcaacatacgacagaatcaaaaaattcttctactggaaagggcttaaacaagatgtagtggactacatccaacagtgcacaacttgccagcaggccaagacagagaaatcacaccccgcgggtttgctacaacccttgccaacacctaccactgtgtggcatgatattgccatggatttcatcgagggtttgccttcttctgatgggttcaacactattttagtggtggtcgaccgattctcgaagatggctcatttcatacccttgaaacacccattctctgccttgcaagtggcccaggaattgctggatcaggtgattaagttacatggccttccgaaaacgattgtttcagatcgcgaccggatctttacaagcaacctctggcaacacttgttcactcggttcaacactaagctactcctcagcacagcctaccaccctcaaaccgatggccagagcgagagagtaaaccaatgcctcgagatgtatctccgctgtgcagttgctgaaactccaaagaaatggaaacgatggttggcgttagccgaattctggtataatacatcctttcatacatccttatgatgctccccattcaaggcaatctatggctatgatccagactgctcttttcttccagcgtctgcggccaaaccagacccaacagctgaagattttctgtgggacagggaagtgcagactgacagactcaaacagcatctcacagtggctcgcaaccgtatgaaaattcaggccgacaaacaccggatcgaccgtcagttccaagttggggatcaagttctgctcaagctccaaccatacactcagcacacagtggccaagcgtatttgtcccaagcttgcataccgttactatgggccattttcagttcttcagaaactaggcgcagttgcttacaaactagatcttccagcaacttctcaaattcatccagtcttccacgtctctcagttgaaaccatttactccaaactatactcctgtgtttactgagctccccactctaacagatctgtcggtccaagggactgaaccccttcaggtgctcgatcgtcgcatggtaaaaaagggacacaaggcaatcgtccaggtgctcgtcaggtggaagaatctcgaccctgctgccaccacatgggaagactacacggtgttgaagcatcgctttcctgaagcagttgcttggggccaagcaacacctgaggccgggggagatgtcacggcagacactgccggactggaggaagcagccggactgaaggaaacagagactgagctgaaccgtattctgtaaggggtgtttggtttctagggactaatgtttagtccctacattttatttcattttaattccaaaactatcaaatatagaaattaaaactttttttagtttctatatttagcaatttatagactaaaaataaataaaatgaagagactaaacattagtccctaaaaaccaaacaccccctaaactacgtcgtatccttgtaagcggaaacgcattctgggtgtgtgggacccatgtatcagggttgtctagtcaggcttataagccgggacgccgaactgtgaacactatctaccatctggaatagaaaaccacaaacctggcagccctccggctgatccagcgtcttcctcgccatcgccgacacgctcaccggcgatccactgctcggctcacgtccggcgtaggcgcgtcgtggccacgggtcgtcacacggtgctctcagcgaacttgccccaccggcccgccct

SEQ ID NO: 227 - DNA, 20002 bp, Zea mays
  Intron number 1 from transcript GRMZM2G166459_T01 (locus G RMZM2G166459) derived from phytozome v7.0 (chr-ID 9; pos 4 7044167 to 47064168)
actccttcgccaccgtcaccggcctcagcctgctggtaagtaaccacacaccacagctcctctactcacttcacttccattccatgcgctgaatgaccctgttctgcctatgtatactggtactagttgctcgtctcatgtgatttccaatgcataagacgatcgaatcacagttagttggtgtccttattaattacttggccactcatgaacagttggttttgcggtcactgctcgcgtcgcgagttcttgttttctcaagtgtcggtgtctaggccacagttgctgcactacgtttcatcctctctttcgggaggaagatcaacgaatgccgagtcccaaaatattaataaacgctagttgctataaaaaccatttgcctttttgactcttcgacgccgtctactagtgaggaacttgcattgatctttctgtataatatagtactaccttctttacagtaaagtattagctagtatctgatgtgtgtctccaatttatatattttttcggaacctcatgtgtggccgttgtgagatctttctcgatggtagacatgttttctggcctttccccaattactatattgcagcagatgatttgttaaatatgctttacgtgaatttgtaagctgcatttttctttcttttcgcctatggccacagtaggtgctagcaccatatataattgacacaatcatggatatgcagttaattgatgtatacacattagggcttattcgatataagaggattgatgggattgtagaggattaaatacattgctagttaaaattgaatagaaagggacttaatctctatcaatcccccattaattctcatgtaactaaacaaggccttaattggtgcttgcatataagggcgtgtacaaccctatttaatatgggccctagggatttaattgaaaaaatacaaggaatctgctcttcgtgaagagtccgtctctacacaatttttcatatacattgtctcttaactacatttatgattcaggggctcaggattgtacaatgtagtttttttgttgtctcttatacatagaaaatcattccatcgtctcaggattgtacatgccctaactagattcaatggggatacgcaataaatgtgtcacagctaggggaggcagtcgaatggatgctagggcatgtttggattgcaattttcaagaatctagcttctagagactttgggatttgaacaagtcagttttgccatcttttcgcatctttttgtgtcaaccttttccaaattcaaaactgtctgtatctagcatttcctagtttttcgtgattcaaaagagcaacaaatcaaactatgcctagctttctatcacatgaggttagcaccaagatatccatgcttaattcatcggttacaaaatggacccttacaagctcaatcattatatgatatgtcgatgaactcatatacaggacagccaccccttacaagttacaacccttgtgcaatatgtcaactccactaaccacggccagaccgttcgaatataatctcggaccatctggccataagtcggattgtctataacctatcccggatcgtccggtgtcccgtcggaccgtccagtgacctactacggactgtccatggtacatcgctcaaattggtacaatatgcacaatgtgcatccacactctgcaccacaccatcactaccctcctccaccttcagcccaccaaagccaaatcttttcacacctagagccaactatcgcccaccacataagaagatagaggggttcacaccaccaaacacaaattatccttatggataatagccataacaatggccagccatctgagacatgtcttaggatctggtcatagaccaccagctaccatggataaagttggggaagaaatagttgaattattctaagacaggctaggaattggtatgtccagtttagggccgtcatatcgaaaaccatattatcacagatttgacgtcataccatacccatagagcacgtaggccactttttggtgagtgcggtaaaatcgcacatgagcacgtataggccacttttagcacaattaggagaattggctgataaagaagcttttcatgttcgtttattttctttgtcccttactggtactgcttttgcatggtattttgagttggcttctaactctattaattcttgggggtcaagaacacaaatatcatgaaaacatcttctctaggaaatatgaattagagttggttgatctagcatcactctgacaggtacatgaagagtcgattaatgattacatccagagattctgggacactagaaatcgatgcttctagatccatatcctagataaacagttagctggtttagcttttaatgggttacattcctacttaaaagaaaatttggatggcacccaattcttttcattagctcgactacatcaatgggctttggcttgtgaaagccgaagcaaagatattgtagaaatgtaacatcataatgtacatcatgatagtttagatgatgactccaaggatgtatatgccgctgaacttgtttggcctgctaaggccaaacttctaggttgctcttgttttacaaccggtttaaaagaattgacaagaagttaaatttatatttaatgttaccatgtgtgacaagatatttgatgagttacataaaagtggcaacattgagataactcacattattccaccgatgaatgagttgaaaaggtgtgtttattgtaagaggaattattatttttctcatgccactaatgattgtaatatcttatgtcggcaaatacaatcggctataaatgaaggttgattaagatttcaagaaatgcagattgactagcaaccattccctatcaacacactagagccgacagacaagaaagcctaacataatcaataaaacaactcacatggaagtaattgcctaaaagactcctagtggaaaggagttgctggagatcaccattagaactaagggcgtcggggggcaagcatgattgcccattaggccaaaatcttatgcctagcacccattggatggtccgggccctaagaccggacggtccggctacctaccatggacggtcctaagacaaccaaaggtgtagggacctgtcggtaccctgaaacaggggtaccccttactacagtatgaagacgcgatacccacgcgtctatctctagtcgcgtggtgaacagcgaccgaccccaccacgtggatggcttcggggccgccatgtggccagagaagacaatatcctccaaggtgtcaacagtgggtccggacccccatgggaaagtatcggcccctgcatatacagaccggacccccgggtaaggtccaggacctccacgggcgcgaactggacccttgggacgggtcccagacccctctgtgtggggtccgggccactcacagcagggtccctagattctgggacaaagaatacctaggccttaatcaaggccaggcgggggtccggagccgacacatgtccggaccataccgtgtgcgcttctgctccccgctcaggcagagacccgatcctgccacgtggcctactgcctgtgacgtaagccaacgggcgaagcttaacgtaaggcctctgcatttattgcggataaagcgtgtcgcctgtccattccactggcaggtgatgtgccgcctcggcatttaatgagctctgtccactccactggaaggcgatgtgccgcctcagcatttaatgagccctgtccactccgctgacaggcggcgaccaggccatcctgcaggcgcgtgcctgtccattacgttggcaggcagtacaccatgctgctgcgctcatcatgactcgcgcgttaccgaggaggcaaccatgacatatcaatactatatgcactatggacattatggcgctcggagatcaccctggcgttacaagcagtagttacttccttccattttgcccctgggcccacatgtcggggctcagcatccttgtacgtgcccccttgagctataaaagggagggcacacgacgttacaaggcaagctcacttaaactctcaaactcacaagatcgtacaagctctcaagctcaatacaacacacagtggagtagggtattacgctccggcggcccgaaccactctaaacccttgtgtgttcttgtgttcttgtgttcatcccgatttcatctagcaggcaaaacgctaaggcctctcctcatcttaggatttagggcgggtgcgttccaccacccggccggagaatttcccctccgacatttggcgcgccaggtagggggcttaggctttaggttttttcttgttttcctgctcgacaccatggttcacatcgtcgagcaccatgatttcatgcctgaggacttcatggtggaggaaggggttgcctcttccacaccgtgggccaccaaccgccctacgcctggtgctgctgctgtgcactctgcgtggtagcacactcccgtgcaaacatccagggagtctagggctgcgcctggggcgctgtctgtggccagggaattgctgtgccaccctcctagctccacggcaatgccgggggccatgaagcagtggcgtgatgatgtagaccgtctgctcggcatggcgtattctggctcagtcaggcccaggcctcggtcgtcccggcatcaacatgaggcgcgtcagcgtcagtgcgctccccctcggtgagggccgcaccgactgaggacctgctggtggagctcaactgtcggcgtgcgggagaggacgctccagtctctctggagaggtctaatgacctgtgggcagaactcaaccttaggcgtgcggacgaggatgcccacgtctctctggagaggaaaagtgagcgccgacagaacgttgagggtcgcaacctcgactacgacttcgttgcagttgcaccgtagactccaacgggcgcccggttctaggcgggtgtccccttggccggcgtgggctgcgccgcgctggcagatcatttccgcgcggcgacttggccatccaagttccggccacacctgccggagaagtacgacagtacgtcaaattcgtcgaaattcttgcaggtatacgtcaccgccattatggcagcaggtggagacaccaccgtaatggcaacatactttcatgtagccttgtctgggccagcccggacttggctcatgaacctcaccccaggatcgatctactcctgggaagagctttgcgcgcggttcacagcgaactttgtcagcgcttatcaacggcatggcgtggaggctcacctccatgcagtgaggcaggagcccggggaaactctctaggccttcatctcctgcttcaccaaggtacgagggactataccccgtatctccgatgcttccatcatcaccgcattccaccagggggtacgtgatgaaaagatgctggagaagttggccacgcatgacgtggaaactgtcgccacgctcttcgctctggccgacaagtgtgccagggccgccgagggccgtgcatggcactcggcaccacagaccggagttgcccagatgggtggctcgggtgccgtcgcttgggacggcaaaaagaagaagatgaatcgcagcctcgagaggccgccatccgctgctccagtcgtcgcagccgcgactgggggtcggagcgagcgcaataagcgcccacagccgcagaggggtaatagcggctcatgccctatacaccccaacagtcgccacagcgccgcagagtgttgcgagatcatcgagctcacaaagcgcgtcagcgagcatcgcgagcagactttcaaagatggctccccaccttgtcgctggcctggcaaggaaagggtcgacgacggcgaggtggccgcaggagaacgggacctcgagtatcagtcgcccgagggggtcctgaaggatgttttcactggagactccaactccagtgacgatagctagtcgagcagccggggggaccccgttcttcctggtctacggggccaaagcctgccttcccccggaaatccttatgggctccccatgggtccagtcgtttgatgagtctattcaggaacagctacggcgtgaggacgtggacttcatcgacgagcatagatggcaagtaacgatccgagatgcacgatgcaaccaggcgctcaggcgctaccatcaacggtttgtgcatagtagggagctccgggtcggggacctagtcctaaggcgagtactgaaccgagaagggatccacaaacgctcccctagttgggaaggacccttcaaggtgatggaagtatgccgacccgggtgtgtctgccttgccacaactgaaggagtgcctcttcccaacccctggaacaaagagcatctccgtaagttctatccatagaagcaagtctgaggggttggggtttcttctttttgtaactaggtcgtgcatacgtgtatgccagcccggtgaggtccgccctcataagcccggcctgttggtctgcacccatgcatatcgagttataaaagaaaggagttaccccgtcagatgtgcttctatgatggttttattctgctacagtttctggatattattttttatctaacccacccatacagttcccacccttgttggtatgacgacatccaaattgagtagccaggcttgcaggctaggacccctctacgaaggcagggggtccggcagcctgggggccagttctagagaatgggtactcgttccctggggtggtccggagctgtgtagccgcttagcttggttccgtaccctaagcctgcacgctccgccactctatgacaggtatcctagtatttggaactatagccctgtgggtccggcaacctagggttcggttctagagaatggacgcacgtctcctggggaggtccggaactgtgtagccgcttagcctggttccgtaccctaagcatgcacactccaccactctgcgatgggtgtcctagtatctggagctgtgattcagggggtccggacatacggcttggcttcccaggctcaatcctgcaggtcctattgcatgaatcaaaggatggctgataccagacgatgggtcctatgggtgtgccactaacacttcctagctgaagctgtgtacaggtccacgtcccagtcgaggctacctcctgggggccggatcaccaactatttcttaggtatgctggtatccagccttgacacatcgagcctacatcccaggggggccaagtaccaggagaggagttggtaacgccacacacagcaagaacaaataccatacagataagagttgtttaattgatagttcccaaaagtatcttacaaaaacaaaagttattacattcgccttcaagcggagccctagcctcatttctacaggtatgagctactcgacatcagcagggttgcactggaagtgcgcggccaccgtatccacggcgtcttgtacgacctcccgggcggcgtcttcagtgtcgacaaccggaccagcgatcactatcaccgctcgtgggcttcctccctcagcgccgtcgtagtgcagctgccgctgcaaccgccgggcgcaggcctgccgctcaccctaaacacggtagcggccactaggaacagcagcgctagcggcaactcggtgctacagcttgccaatggcggcgaccttctcgttgtgtgcgtcaaggcgaaggagccctcatcgttggaggcgacgttgaggccattaaagccaaagaggtggaggcgcggcagcgcacgacgctcggcggcctggccgctgagacggagccagagctggaccagttcatggaggcataccacgaggtgctggtgaagtttagggaggagctgacgaggccgctacaggaggcaatgaagttcatgcgaaagatggagccgcagctcaactcgcttcccatctccggaaggtcgctgcgcaacaccgtttcgtccgagcgctggcggaagaagtgccacccccacgaacatctcgcacgggtgggcaaagatggctgcctgaaggatggagtggggtgtgaggtgctgaagttggaggccgagatcctccagtagcagcaggaagaaaggcgagatcggcagcgccaacccacagaagaggtaggagacgaagagcacaaactccccggcggcgagatcgccgaggggagaggcgctggcgcggatccttccggcgaatgccggcgcgccccatctgagctggttgcgcaccaggttgagtgccacctcggactagaagcgctcgggatggactagcgaggccatggtgactacggcggcggaaagcagaggagcacaaatgcaaaggggcgcggagagcttgaaggcgaaagggcgcagcagttggcagaaaatgcgaaagcgtaaccgctgcacgcggggtgaatcccttttctaggaagactcccttgctcgcgccccgagacgccgcagaaaatctcgcccgacgcgcaccaaagcaacccagcctatgacacgggggcccgggcccacaagtcatacggctggtgtgcgggtcttcgagcgctgagaaggcgaaccatcacgtgaggagcgaaccaccgccagtggtagtgcgcctcttcatctccgccgaaaacaacggcccggtctctgacacggggctcgggcccacgagtcatactccttgggcgtcggtttctgagtgcagaaagagcgaaccgccgctcgtgccattactgtgcctcctcggggccgccacggaagacaaaaaaggtgaatttttaaaccgatgcagaaatatcgaggcgcctcgcgcgtggcctggcgaaaccattaggcgtgggggccacgggtcagtcagccgcagggacagatgtggcagttggcgtgaccgaaggcggactggcggtgattacgtcagcaagcgcacggaagcggcgcgtcaatcgccaatcaagctttggccctacctgcaggctcgtatcctcccctgaggtgggcccgggggccactgttggtaccctgaaataggggtaccccttactacagtatgaagacacgatacccacacggctatctctagtcgcgtggtgaacagcgaccgaccccaccacatggacggctccagggccgccacgtggccagagaagacaatatcctctaaggtgtcaacagtgggtctggacccccatgggaaagtaccggacccctgcatatacagaccgaacccccgggtaaggtccaggacctccacgggcgtgagccggacccctgggacgggtcccggacccatatctgtggggtccgggccactcacagcagggccccaggattctgggacaaagaatacccaggccttaatcaaggccaggtgggggtccggagccgacacgtgtccggaccataccgtgtgcacttctgctccccgctcaggtggagacccgatgctggcacgtggcctactgcccgtgacgtaagccagcgggcggagcctgacgtaaggcctctggaccgcgcggcctctgcatttattgcagataaagcgcaccgcctgtcctttccactagcaggtgatgtgtcgcctcggcatttaatgagccctgtccactccactggcaggcgatgtgccgcctcagcatttaatgagccttgtccactccgctgacaggcggcaaccaagccatcctgcaggcggcgtgcctatccattttgttggcacgcagtacgccatgctgccgcgctcatcatgactcgcgcgttaccgaggaggcaaccacgacatgtcaatactatatgcactacggacattatggcgctcggagatcaccctggcattacaggcagtagttacttccttccattttgcccctgggcccacatgtcgaggctcagtatccttgtacgtgcccccttgagctataaaagggagggcacacgacgttacaaggcaagctcacttagactctcaaactcacaagatcgtacaagctctcaagctcaatacaacacatagtggagtagggtattacgctccggcggcctaaaccactctaaacccttgtgtgttcttgtgttcttgtgttcatcccgattccatctagcaggcaaaacgcttaggcccctcctcatcttaggatttagggcgggtgcgttccgccacccggccggagaatttcccctccgacaggaccctagactttcagaccacaacgtccgaaaagaggtacgtggaagcaaactacatccaaacatttggtcggttcgttagtgcttgtcagggttcaaatccagggcccccgaggccactggttagtagatagataaggaccagggttagtctgccatgggtctgatctatcacaagtgaatcaaccacgcccataggacgcccctcggcatcgagccaaggggtcaggcgaggtggtggaaggcagagggggtcagatgaaccaaacaaaacccactcgagtgagacttgcatgctcgtcagactggtcgtacagtcagccctacgtacaccgcattaattacatcagtctgcatacacagcatgaacagtgttagtcctccttccactcatgccctactggtcctaggtccaagtctcactcatgaactacgggtcctaggtctaagtccacgacaccctacatccctgcacgatgacaagagggaaggctagcggacaggctacaaaggcgaaaggtcgacatagggaataaagtggacaaaaatcagtaatgatgacgcacgaacttcccttgcctgcacgaatcaaatccacccccgcaatcttagaaatacagcagaggacccacacatgcaagggaatcaacacacaaccagttttcatcatgggtgaaaagcttgtttacgttgcgctcccttctaggagaagccatatgtaaaccccctccttggtctataaaaggaggggtcaaccttaacggagggagagaggagaaaaaaaatgagagatccgatatcggaaaaaacgagaaccacgaaacatctgacagggcatcgaagatagctccttagagaagtaagacaccacatatggagactagggatctctccctctctctcatctgcttgtaacccctactacgagcaactaggtatcggtagcgcgagcaaccgaaaacaagagtagggacatttttcctgatccaatataattcttacacccactgagcacaccatctggcctaaaacgtgcatacacaagtttacatcccagtgctagttcaaaactatcacacccagatttaaggacaaatccaggtgcgtctcaaatgtgtgctaggatcaagtctcacacatacgatgactcatgcatggtatagaaatcaatgtcacatctttattatatcataggggttctatacaaaatagctaaataattacatcattgacgacaacgatcgtcgacaaccttagttgactgggagatgatggcctagacctctctgaactcatcatagcatccttcatgttccttcagtggtacatgttcttgacctggtgtgagtatagaaagggtgagctcacatacgttcatcctcaacaagtgtggggaataatgtgcatgagataacttacggtgggggctcatgtaaagtctaaggcttactaagaagaatggttaaggctgagcatcgcttttaataagttagtcaaaattttattagcaattactaattataagtgtacaccaatccaattaaataattgatcataattaataataaatcccacaatgtaatgcaaatgacaggttaagtttaattccataagttactcatgcgagggtccgagccactcttgatcgtgaacatggttgatatacaagttttacactctgcagaggttgtgcatctttaaccaaaagatgtgttccttttgtcacctcgggttggtcggactcttaaacacttccaaggtgagtaggcaagggtacattgtgaggcctttccaaagttccactatcatgagagatcccgctacagttttaggcagaaggaggtgatacaggaaaccctcatccgaaaagtcatcatagcatgattgacccgagaacctccctatgtcggcagcttcctcaccttgcttgcccctttcgggaaaggattaactcacactagctttcctaattaatcaaccaagggtgtcccatcccacccttatggtagcactgttttatcaagtggtcgctccatgttccaattaacatgatcatagttcagatataatattaatcccaaaaccaagtagagtagtagcaagactaccaaatagttcatttatttacaaggtgtagggtaaacaaactaggtaacctattaggtcccatcaatttaacctaagcatgtcacgattattatcaggaacattattaggtaaagaaagtgattaagggcataattgccttttgggtgcaactacatgtacttctccaagttgggcttcaggttcctcatggccttgcttctacctgtagcaatacatacaatcaagcaaataatggatatgttaacattacacctaaacataagaataaattgcgtaagaatattttacacgttgctacgaaaacgtgggttcaagaaccactaaaatcagagttatggttgaaaacttatggttttctgatgttcttaggtgattaaatagtgagagcacctagagaggggggtgaataggtgatcctaaaaaattaactcaacaaaacaaacttggagtaatattggattagtgaaagcgaaagccaagtccgaatgaagaggagagaacttcttcacttaattgctcttacaaagtgagtattaaacttagagcaattatgaagtgaagtgaactactagaaagagtagaatcgctataagttaaagacacagttgacatgacgattttatctcatggttcgatcaagcataaaaaatgcttgcctaatcaatgttgtggtgtcccaatggacgagggttgcactcaacccctctcaagcgatccactgatcaacttgagtaccatggttctctttcttatctcaactttttcccgttgtgaggaatctccacaatttggagtctctcacgccttacataatttgatctcaaataaactcaagagtaagggggagtagaaacacacacaagagacaaagttacaacaacgcgcgcacgcaagtcgagagaagagcacaagagacaacgcagtggagttagcactcaaaacaagtgctcggatctcaatctatcaaagcaatagcgtggtcgcagtgtctcagtgtcttaggatgttcaaaggatgcttggtgttgtgctccatacgcttaggggtctcttttatagtcccaagggacataggagccgttggagcttcaattggaaggccctggttgccttctgtccgtaggtgcaccggattgttcggtgcatatcagacactgaacagtgcaccgacatggaatcgcgtgattggttggtttcctgttctaggggcaccggaccgtctggtgcaccaggtgacagttggccctcgaccgacatggcagcttgctgttggctagctggcacaccggattgtccggcgctccgcgctgacggtccggtgaattataaccgacgtagactgaaattcccgagagcaaccactttagcggaccatgcaccggactgtccagagagtggcactggaccatctgatgctacacagtccagcccaaagtctcctttttcaatctgattctcttttgctcttttagacttgacatcataaagtccctatcacttagacaaatatgattagtatacaaaacaattgactaagtgtccagagcttacctttttcacttggtcccatatagatgtgtattatgtcctcttccaaactcaatttgcttcatgtacctttgctcatttctcatgttagtctaaacataatgtgttgtgcagttaatcactaaaataatatagaaatggcccaagggcacatttccctttcaaatagtaaagatatattctatgttaattaatataaatcatgtgagaaaagatagtccaagaaatgattaatttaactttaagctaagttataacttaagtagagatcacattttagtcagattacaattattaacaaattaacttttgattagaaaggtcaatctactaaaacataggttaaataattatccaattataaatgtatgtgatattgtacaattaatgttgttactacatagtaatatttatatgaagctaacacaacttaaacatatcaaatcgaggttaaaaagagaaatttatgatttaaacaagtttgagttgtttttattattaattttgatgccaaaatacctatcagggccataaatgtaaatactaggagggacgttgggttgattctatgaatttccagggtctctttagaaaaatgtcatgcctgcattacatgatgcgctctggccatttgattagagatcaaggacccagattagatgaaatagaggtacggtactagagccactggatcagagatccacgatacaaaatccgatgatggcatgatccgatctaaaccatctgatagccgatcaacggctcagattttatgcaccaaaacagtatggctaaacctaatcccaaccgtccaaacaccgatcgatggccagaatctgtcctcccccgccaccggcggccagggcggcggcacacttgcgctacgacgacgctatcgtcggcgatcaatgaatcggcgccccagtggagaactttagtgtggcacaaaccgtgaagggaagacgacaacgtgaggtgtccttgatgaatggcggctcgggcgaagtctctattagcaacccagatcgccgagccgccgtagcaggttccaggaaccacagaaggggagtggaggaagggaagaataacagtagtattagggttcacaattttcgacacaggttctcagcggacatgccgtttaagtattctattacacggccttcggccgatcagttgatccagtcgtggcccacaactctggaattcagccttcatgcacggcggctcttgccttctccggcttcagtcttggttccctgctcttgtgtatgggcctcgtcagctatgctgacagtctcttgactccattgagaaattgtcagagcttcagtcgcctccccgccccgcgactgtcgccatcgtgttccaagcgcacggtcgagtctcctaggctcgtgcacggaagtacgacgacgacacttgcgcgtttcaagggtggtggcaacttctccttcctcccctatgatttccgctttctccagcgtgatgggatgaggagggggttgcggctgcacaatcttataacgctagtgcggagtccgctccgttagcgcttggctgggctcgacacacgagtgccaggtagagatggcaatgggtacccgcgacccaatacccgatgggtatttactccattagggtatgtatgtgggctaaatattatacccgtgggtctgttattgggcaaaaatcttcacccaatgggtaaacgggtattagaacgttccaccttcagccatacccgttaacccgtgggtataaaatacacaatataaacttagcccaagcatgaacttagactttagtcatccatttttttactatttaataaccttttaggccattatgtcatagaaggcttaacgacaatttaatgaccatgtaatggaatgtgtaattcacccaatgtgtgttcaatggatggttaaatgatgctagaaattttgtaatggtatttagatggatatacttgatatttgtataatataatattttgatagatgtttaatttttgtgggtacgggtgacccgatgggtgacccatacccacttgggtatgggtatggggtaaatccatacccgccagtgtatatgggtgactcgatgggtttatttttttgtcgtgggtatgagtatggggtagtaaaatccggtgggtatttacccattgccatctctagtgtcaggtgggtaacacagcgtctgtagcaaccgccatggacttttatgcgaggaagaagcgtctaggtgctgggtccaaccggtcagcggctgtgaacgacgaaggcaacatcgagtcggtggagtgcgtgcggtgttgggcctagtctggccactcgaccaatgcggcgataaaagaaaagaaaaaggagaagtgaagtaatcgggccgcacgggaaagggtattgggtcgaggaaggttgggcccgcgagttgtggagatgagccgctagaaggggaactcgacccacggggtcggttttgcctttttcttttcctttttcttttctgttttcactttcctaacttcaaatcaagtttgaattaaaatttttgaattacatttaaatggtgttcaaatttcaagcctatttaaatgcacaaaccaaaatctcggcatgaatgcaaagtttcttttacttatttattttttacttacttaactcaatgcctctaaatgtaaaattgatgaaaggaatattcactcaaataaatagaaaatatttctattattttttatctgagtttcaccattatattttaaatttaaaaactcaaatctaaattcgtgacatcaaaatttaatattacttctaattatttatttattttaagcacataacttcaaagtaagaaaacatgcattaaaggacattttaatcttaagttctttggaaatttttcttgaatcccaaaatcaagatttggggtgttaaggaaacaacgacagtaggcgcaccaggtagggcctttgtgtgttttcaccatccttttcaggctccaaatggccagccacgacatagaataggccctcagaacaaccatacgcttcgggagccttgacttcatcgtcaccgttgaaggggatctggtctaggttccgattgcctggatagccctgataggagatctcaacactatcatggagtccttcggtgtcctctaactcgcctcgcaggggcacgacctgaggcgaggcccaccctcatcccccgccattgggagataaggcagcaacttgtgacacacctaggagcccaatctgtcttgtagcaacctgcaagccttcttcacctccctcgccagcctagtgtcatagctcgctgaggaagagtcaatctcccctagacgatttcgacgacagaatccccgcggcattcccaccaacctctccataacgtcgtataattcttgcaccattgagcacaccatctggccctaaaacacgcaacaaaaatttactcaccggtgctagtttgaaactgaaagtcgcctagaggggggtgaatagggtgaaactgaaatttacaaagttaatcgcaactacaagccgggttagcgttagaaatatacccgagtccaagaaagagggtgtaaaacaaatcgcaagcaaataaagagtgtgacacacggatttgttttaccgaggttcggttcttgcaaacctactccccgttgaggtggtcacaaagaccgggtctctttcaaccctttccctctctcaaacggtccctcggaccgagtgagcttcttcttctcaaacaaatggaacacgaagttcccgcaaggaccaccacacgattggtgtctcttgcctcaattacaagtgagtttgatctcaagaaagaatgagaaagaaaagaagcgatccaagcgcaagagctcaaatgaacacgacaaatcactctctctaatcactaacgctttgtgtggagttgggagaggatttgatctctttggtgtgtcttgtattgaatgctagagctcttgtaagtagttggagagtagaagcttggataacttgaatgtggggtgggggtatttataaccccaaccaccaaactagctgtttggtgaaggctgctgtcgacgggcgcaccggacagtccggtgcgccagccacgtcacccggccgttagggttcgaccgttggagctctgtcttgtgggcccgcctggctgtctggtggcgcaccggacaagtcctgtagactgtccggtgtgccacccgcgcgtgctctgacctctgcgcgcaggtgcgcatttaatgtgttgcagtcgaccgttgcgcgcgaagtagccgttgctccgctggttcaccggacagtctggtgtgcaccggacatgtccggtgaattatagcggagcagattcccgaagctggcgagttcagagtcgctctcccctggggcaccggacactgtccggtgatgcaccggacagtccggtgaattatagcgaagcgcctctgagaattcccgaaggtgtgaagttcagcttgaagtcccctggtacaccggacagtccggtgcgccagaccagggcacacttcggttatcccttgctctcttttgttgaacccttttctgggtctttttattggcttattgtgaacctttggcacctatagaacttatagactagagcaaactagttagtccaattatttgtgttgggcaattcaaccaccaaaatcatttaggaaataggtgtaagcctaattccctttctgaaacgtcgacaatgccgacactactttttatcagcttctctctaaatgtcaaaacaataaggtcattccgcacaatcggccagcaaaacaatcaaagtcgtctgtaggaaagaagtgatccgtgtgggggcaaagaattgtcatctactcatatgtccccagggatatcgtggtactttccacctgtctacttatcgccgatgttttgtcctactcacatgtaggatagtgcggcgatgaatatgtattacgtgtatagtctgtttgtttattcggccatcaattacgtgtatagtcacagcgaagaagatgcaatcataaagggtctttatgcattagatttctattagatggctattgtgtttggttgaaagaggttgttgcttgcatcgacctagagttcttatttcaggaacaagatgacttgtgaaatctattttttcttgaaagacgttggtagtataagtgtttttggttcatgaccttcaccgaaaggtaggggcatatgttgaacactaaatttggcagcactaacattgtgggacattccgcgggcaagctcggacggtccagcccccggacagtccggcttgttaacccaaaccgttagggatcaaatcagttcgagtgagagtcctgatgtgttgcgagatcttccccatttattgcgttatcttgttagacttcgcttataatagggtatgtacctcctcccctataaatatgaaggggtatggccgattgagaacacacattatattcatgacttaggtctagatatagcatagctttagttgtattttctcaatctcaatcttcatctctctttggctctacaccgcccccggaaaaaaaccctacgatctctccttccagacagggtctctcccggatggtgagatctaggttctacatgatctaggtttgtgctcgtacgttgtcacaaaagtaaaaagttagtataaaacatagatacagaataacaaacatcactattttatatgaaaattttgtaatattatattgacaatataaatatatgatattattataaatacgtcgaacaaaatagattgaactgatatcgaatgcaaagaagagcgtaattatatgcgccacaacggatggtccaaatacctaccgcgaaaaattcagtgacctatctcagaaagtacgctagcccgtagacttcggtcctgtatgtcgtcctatgcatcgttagtatttggtccaaaaagatgccaacacaaccggtgctgatgtttttggacggaaatccctttctgctgtagtaagagttatctctcttatttttctcagatccttacaatcatgcttgcgcacgattgtggggtatgattcagtgattgtggggtatgattcagtgattgtgcctctctttgtgtttgagcatgcatgcagctaggc

SEQ ID NO: 228 - DNA, 7757 bp, Zea mays
  Intron number 3 from transcript GRMZM2G110244_T01 (locus G RMZM2G110244) derived from phytozome v7.0 (chr-ID 4; pos 1 59736113 to 159743869 reverse strand)
caaatttaagattcgctgattctctttcatataaggtattgaaattctgtcacggaactaaagtgtatctgctcttatcagtcagtgtttaagatcgttttgaaacttgccagtgatatgataataatcttatgtaaatgtttgtagtatactatatcatggaggtggcggcgtcctgggcgccggcgaggataggggcgggcgggggaagccgcgtcgctagtttcctggaggaggggtaggcgtagcctgagggaggccaatcgctggccatggagtgggcgacaacggctggtgagaggagagagagaaagagaggaaacctaaacctagctagatactatgatagtgggcctaaaaccctatccctaaccagggttggaagatatatttacaataggagcagttgggtctaagcccattacacaaatacaacccattacgatactcattacatagattacatagaggctctaactgttgagaacaacgttaccacggatcaccagatccgctcccttccctcccgtcagcagtagaggcgcgagaagctgtagagaacccgtctcccttcccagaagtacggcagagtaacacacgagacacatgatatagggttggacctctggtctctttcttttctctgtattatgaggggtgtacaggttccttatatagagatgtgagacccctcagggacaaagcaggtatttgcccacataaccctaactagggttacttaacactcccccttgagcgaataccgcgaccaacacatgcctcgttaaaactccgaaaaacccagtgggaaaatgtggggaaagagtgtatggtgatacaaattgcatttgcactttgttgcctcgttaaaaacctcatgtgagaaacttcaagaaaactcacaaagggaaaaaagagtacaacagttgtcatcaggacagatttcgatcctctgggatctagattctatcgaatcttctacaagggctaactttagaaatatgctccccctgatccttgcaaaaccgtatcaataaggcaaaacatcttctagaagtatatgcacataaagatttagaaaacggattgcatatccttgcaaggactatttcaggaattttacctctactcacttctaggatatacgaggtaagtgcacgtatcaatataaataagccactttgactgatggtgtttgatcgactggatctatatatttgataaaaagttctataaaggttcacatattgatcatcaagctcacgccttcagggcatagaatatgacatttattgtctcacggttgtgatcaatataagcattcgctccccctgacgatgacatctgtcaaagtcgttatccctcattactcaagcatattcttcaagatatatgtctcattgttcatctggaataacgagaatggatgaggttggggtgctatcattttctatcttacaccacaatttatacataattgtgcaaagcaaataacatgtccttcaataggacttaggggataatatagttgcaatagtacatattctaaatatgacacatcgctccaggcgttcatccatcgcaacatctatgatggtgtaacaaaagtccatcaaagatcgtaatccatcagagatttttcatcgatcagatacatcgttatagtctgtcattctggcgcaatggggatattttgccagtaacacctaaaccttataggtttctgccatcgtggctttagaggataccgcaattccacatctagtggaaattaccatgagtaaaactcatggaatgcacatgtgcttattcggtgaacttcaagtcctttggtacctcatcttattccttttcgggtatgtatgggtctttatccctttataggggttatcaaactttagtgttcaacacagactttgtttcttctggaaagattccatctggaaactataatctcaactaggagatattctccctacacaggagagtgatcattcatcaggaatatattattcgatatgagatttatatgttgcatatttataaatcaaagatatgaatcctcataggatctcatgatggatcttcagaatcttattaactgcatattttaattcatgccatttgccagatattttacatagcggaacagtgtttattcaacacatatgtgggatgggtctctcacaagaccacttgaaccatcgcattcaccacacattatttcaatagtgctcataaatgtccgaacttcaagctcgcgactttcattttgcgattcttggttcagcctcgattgcatttatcaatgacccgataagagagcttaaagcactcatgcctaggactttgttttggatccatttgcaatctagagaggcaatataggtgtcgacatatttgtctcccacatttaataatgatctccgttatttcccaaaacgaaagattcattgttccgtattcccagcacaatgatattgcgcgcattgctaggaatttcatcatcaagatgaacctcttcgtgaggcaaatcaccatcagggtgaattaatcggaggagagttatcacagaccatgtgaatctgcaatcagaacatatgctttgactaaggttgatggatcatattcgcaggcgtccccgagaatagatcaaatgccgataagtcaaatatggatatgatattaatcccgggtatatccacatcatatctacatcaggtagaagcattcagaccaatatggttactcctttaatgattttctggcaaactccatatacacaggagtacacaccgaacgacaggttcagtttgcctttatgtgcgtttaatagaaatatttgaggcattacactatatgggcatttcctccccctaatgccgagatgttttaaaaagcatacagataaaatccccaacccacaatcatcccattggggggcaatgtatgctattgtggtgatttatttgggaaatcttacgcacattacagatagggttttatgcagaaaaaaaaaaaaaattagattaatgtagtggcataaatactacatattttgtccttcaacatgaagggttagtctcaacatccagcgagacacgcaacaacaagttgcttcatggttacaattctgcaaacttattgttattactaccaaatgcatagtcaatcattaagatttagactgatatgtgcaacactattttatccataagggtccttcaggggctcatgcataccatttgtttggagccattagttgacttcagatcgacaagtaaaatgaccatcagggtctaatgctcacaaagacattcactggttgcattttgcttttaagcacataggaaaaatgtgtgtgtttatattggtagtgaagtgcacggcatcaggccaatgctgccaagcaaagatttttatatgcagagatgtatagtccagctcgtttttatcactgcccatggtttacccaattactcatactgctctgaaattgggtatcgatttatgcaacatttttatgtataataattttgagagagaacttataacaatagttaattatttgtggtgttgccagcaaggcaaacatttctcctcatattatatagcaaattgttctatatagcattatttcgatctcttcattgttcagcaaaaagagaagctttggaatagaacagacaagaccaagaattcattttatctgggaaaatcaccatataactatcttttgatgaagaaattgatgataactgcttggcaagaacgaaacaatactggtatccgcctaggatccatcttcaacaacagatattactgctctcatccgaagaaatcatcaggagtagagaggatacaacaggtctctacaagatcttcatatttctatcacaaattatcatcactagtagtctagaggtctagacatatgacttttctggctccgaggaccaaggacatgttaatgtctaatttagcttcaagctctgttgtgatgtgggatttcatagttatttgtctactcttctcacttctgatagatcggaggtagataatggtaagcatgccaaagagtggaattcaatgtagttcggctacataaaccccatgtatgtgtccattcagaatcgacctttaccatttagcttacagtgtataccaaacttgtcaaaggactatcccgagtcaattcagtgactataagtatttacaattccgagagatgtatgcgacacaagcatagaggtcctagataggacgatgcaacacaaacatcgtgaaaaaattctcagaattacctttcgatgtactcgcaacatcgtgttgctagcggttacatgtccttttatctcatagtttgctttatgtcatccagcgacaaagagaacaatgtgctaacatctggttgagcaatgtatgactgagatttctgatcttaaatcatttggtaagttcttttttgcttactaatataatcccaatttgtgatatcttctatgccaaaaaggctttcatgcattatattatatatcttcgggttacttcgggtaaaactttatgcatgaggagagagttgagaattaacttatccatgttctgttgtatttcaatttaacttcccagatttccaagcactatagagcttgatatagttgttaaggccacttggcaatatatataaatatatgataccacacaacacaatcaaacaaaatatagagcgaaaaaaattgtttaagaaggttgcgcgacaaagtaaccttaggggctcagataacccaccacattctacgcgagtacaagctccagcgtaactggtgtcaatgcgtgtgcggccatcagggctacgacaacacagtaagccctcgtaacaagcgcaacaggcgcatatatggcttgatagtcggggtacacgaaatgtccacacaacgtgcgcaacaggcgcatttgtgtctcgatgatcacgatagacgaatagtgccaacagggcatgcaaaaaatatgcgactccacgatggcggtttgactcaacgggagctgtccgattaaacagagtgctacatagcaatcacaatgacgcagccaagttcgtacgacacaaatattgcgtcgtgttgccagggcgcagccaatggcaaaactcagccgtttaataatttagcctgatcggcatgttcgggtacccacgataaaatttaatcgctcggcgtgagttcaaaagctcaacgcagcacaaatatttagagcgatttgagtatacacaatataaccttcacatgcattttaataattttctgctaattatttactacgggaaataattattaatgcagaaaaaatgaacaccataattaatatatgaacataacacatcaggtgtaaaagacatttctccatatttaagcatgcattttctaccaattatttactacgggaaataattaatcaaagtagaaattgcaacataaacatgcttcattctatttattatttgcagcataaaataaatagaataaatcatatggaggatgcatataaattaaaattcgtctgatttaattcaacgagaattaataggaaaaatggtatgccttttttttctagccgtatgcactcatgcgccatcacgtgtggaagacgaccaccaactaccagatccatatttttagcagcttgtttgactgggcattttttaaccgcacaactatgctttttagctacattttttctaataaatgaataagtgactaaataaataatgtacacatgcatgggtccatgcacatgcgcgttttttatctcaaccatgcagcccttgcacgaactcgtcatcgcaggccagcatgcagtgtgatccgttatctacggactacagttgctggacgcggtcaacaacgagagtctgttgagatctgtaggaactgggtaatgcagtctcctgtgatggtggtcgacacaacgccaaattttctagatgaacagttaccacgagcattagatccaatctactaacaaaaaaaatcataccgttcgattgtgtatacggggaatcgaagcctgtcgcgtaggacagttcggctaggccgagggacctgccgacttgacggtgagttgatgcagatctgatcccgcagcaacgtcgaggtagagcgtgctgataacgtgttgagaacaacgttaccacggatcaccagatccgctcccttccctcccgtcagcagtagaggcgcgagaagctgtagagaacccatctcccttcccagaagtacggcagagtaacacacgagacacatgatatagggttgggcctctggcctctttcttttctctgtattatgaggggtgtacaggttccttatatagagatgtgagacccctcaggggcaaagcaggtatttgcccacataaccctaactagggttacttaacactaacaatcgcctctacaactttgtcctatatggtttctgtaggccactttaaatttagtggtccgttgagctttaagaaagtaggttgttagcttgatctgctatgtttctagtaatatctgttaaaagcatccaatttttacgctgaagattgaacaaacgctgcatattagtttcatttatgctcatcctcaatattcttgataggcatctttaagtttttaatcatgagtttcatgagctaatctaccttcatgatatcctagaaaaggtgccctttgagttttgtgtggtcagtatgtttgagcttgggaggtttgccaaatattctgaattttgagattatgcattaacaatgatacagctaaattactcctcaaaagtaatttaaaaatgttataattttctaagctgcgtaaatatatcaggataaaaattcgtgtcaaagttatatcttgggcgtatagctgtccagaacaacactttcatgttactgtatgtagttatttgtaccctgacaatgtattcacagatatgtaaacagtttgtttgttttactttttagttaaagttgtttggctactatgcactccctctaggttcaaattataagtcgtttaggtcaatgacatggtctccaaaatataatattggtcagtgttttttaaatacaaattaattcttaattcttaatacatttatacttttgtaaaagtactttttaaaacaaattagtacatatgactattaggtttcaaaactaaataacaaaacggttatttgtagtcaaattttacaagtttgactgaaaccttgtctaaaacgacttataatttagatctgaagggagtatgtcattgaggatagagtctaagtgttgaagattacaagatcctttactcaaacgtctttatgaatccagaatcctgtcagttttactctacttggattatttagctcatgttgttataaatttattcagataggcatgggcatgtagttgagcttaatctctgctgaatttccaagaaaatttgttatacatcacatttgtatattggagataattgtttgcatgaaaaaaatattatgtatgaaagaaacagttggatcgaaactgtctctgaacaaacccaaagtctcttcattcttgttctcttatttatttgaagcccgcgtgtttttcttgaggatttttttaatcacgactgcactttatgttgctagctggcctgaatccttgaacaaatacagacatgtcaatcggatctttcgttgatttcaggctacttggataacacggtgcccgctgctcttact

SEQ ID NO: 229 - DNA, 4773 bp, Zea mays
  Intron number 6 from transcript GRMZM2G461948_T01 (locus G RMZM2G461948) derived from phytozome v7.0 (chr-ID 5; pos 1 3583056 to 13587828)
tatatccatttgaagagaggtacctcactgtatttaggtcgaaacaatcccaatagttttaatttgacatcgtgaacttaataaaaatgatgttttaaactttttctctctttttttcatgtgctccttcttgcagtggattttgtgttttcagtgtatctggttatcattaggatctttgattgtcgttatttttctcacgtagaaatccactaaagagatacttgcacaccatgatacacttagtgctgatttttcttggtggatcaaaaacttatacttcttagctgttatcactgattgttgaaacatgatattcacaaaacttacatggtaattctgtctgatggtcgaggaaaatttggtacacgtgcactcctttacaaatggcaaaaaatccaccttttttttggaaaatgtttaaattggcataaaagttcaacccgttttcatcttgagatttattgaataaactaggtatatacccgtgcgttgctacggattaatatgataaaatatattatataaaaacactaattgttgttctattcttttgttagcatcgctaaaagtggatatttacataccttaaaagatataatatgacataatttgaatagtatgacagaagattcaatcatatacttgagtaatacttattgcactatccagactccagagtcacataatttctcacatacacacaagtaacacacagatattgtgacacaccacagacaacaacctaaacatcactcttcactgaagaaatgtagccatcttgatcatcatagtacttgaaccacatcatgatccctccatattccctgggttattgatcaatggaagcacataagacttgatgtcatcagcgagtataaaaccactcccagctgcctgagacgaagatgggaggccaagaaagatctgattcacagaaattgatagccactgcttccatgaatcagcaagaccagctgttgtgattttttgttgggtattataaattaaatcacttacgtgacatatatcttcgcacattattcaatcagaccagataggatagctgtgacaagccatatgtcatcctttggcatttctagactgccaataagagtgacctgaaaggaaacatcattcagatagcagcatgtttaataacgaaagcataaatgacataccaaaccaatcacaacagaaattagaaagctgaaacaaagaacaacatcacaagttcacccaaaccatagggtcacttttgagtcaaacaattagcaaagaccgaagagagtgggagtcatatcatgaagcaaagaaaaatggtgaaatggtttggtgcaaaatataactaccataggactgaaacatactgcacaagctttaaatttctatcatgatatactatttggagtacacttgaacacaacaaattcaataatataatcatggggctactgataactactgaaattaggaataatcacaatgggaggttatacgccaaacacacaaaaaatccattcaggagcacacagggttaagtgtgagacagagacacaaacctctggaccaccgccaatatccattttcccaacttttctcccacatggcgtcacacgcttgacagtaaaaaaacaggaagattataaacatcgaacaattcttaataataaatatataacattgaccctgaaaaataggaaacatcagtgacttctatatgtacacagaccacaacttttgcaagaaaccagcatctagttaaacagctacagaatgtttctagcgagcacacatgattgtgattccattattccagtcataaaagctgagatatccaatagacatgcataaaacatctaagcaatagtttagacaaacaacgacttaggggtaaaacattacgcttatgaacatctacaagtctgtgaagtgaggcaagctatcttcaggttctctaaaacaggtgtggcatggcataaggctatgaggtggttatttgcacaactgaacacaaaatctgtgaaacacactaacaaagtaacaatagcatgcatccagaatatgagcttgaagaacctatgttgtatgattaaccacacatgcgagcactaaactactctatgtacaacttagcatccagaaaagaagtctgaaaaatcaaaattttgttcattgaaaagaaatcacaagacagtttcaaatcctaaagagaacacacctggtgcgtaaaagctaagcattctgttggcatggtaccttgagcattctgcccctactgctgccacctttgcacaagtacaaacagggtgagccactatgtaggcaattcttgatcaaatggcattgcatcggtttttttgttttgtaacatacctccaaaagggcttccaccaccaaagaatgactggaatatgtcgaagggatcatgcatcccaccaccgcctcccattccctccttgagggcatcctccccatactggtcatagatctctcgcttttcagggtcgctgaggacctcataagcctgagctagctccttgaactgaaatagaagcatgaagccttagtttttatcataaatcaacaactccattcgaccattcatatagccttgtaaccaaacatcgccatactcttgcagattaagcaaaatgatatatacacactatcagggaagagcaaaacaccatcatagcatgagtgtatttgagatttacctagaaaaaacgagccttatgcaaatggccttctctaagcacttcctaaataaccagtcaatagtccaatttgaggatcaaacatgtggatggaagcacgttttaaaaacttcataatgattgctttgcagcaaaaccaaatgataaagatgtttgtagtactaatgtcttgttatttatagagtggcgcaaggaaggtttacaggctaagtaacaacagatcattatcattctcaattattaaaataaaacacaattttgctagtcctattagcatttctagcatattcatgcaacaccctttagcatcttctactcatctattgtgcatgatccttacagtgctacaatggtctctaattccaaaattgctcatatgctctacaattgtaccggctaaattagccaaaatctttaaataaacagtgacattgcatcttcgttatgttattactgtttgtagtactaatttgttattatttacagattgacacaaaaaggtttacaattattttaggcatttcaagtgcgctacagtcgatcacagattttgacccgctacatttccaaaatgagcacataagttcatctataaattttcaagaatgttttacgtgtacaatcaatgtgagcaatagtgtagtgtacaatcagtagaccatccatatctatgccataaaatttaaaaaggttcacgtttccaatttcttatatacaataactacaaacattcaataattgctagtctgcagaagtttttaagtcacttattataaagcaacaaacttatcatgtaataacgccagaaagaatctttgtgatccataaagcaatagtgaggaagccataatcagcttgaacagtccatttagcataatcagcttgaacaatccatttagcatcaataaccccgtccactgagccataatcagcttgagcgcctcagttcacaagcacgatatattgaaaccaatactcctagctaataacaatctccagagaaacagattgaaccaccatacaaattaacagatcgaccggaaccaagaacgagtcgagaggggctaggataggcgggagggactgaccgatgcggaagaactcgatgaggtcgtagaactggcagtggatgtcgccgcagacagtgacggggcagcacacgggctgcacgttccactcctccatgaggatcgccttggcctgctcgcatagcgttttgacctccgcctcaggcaggaacttgcaatcccacagctgcgagatctggcggtccagatccgcgtgcgatggcatcgccgctgccgctgcgctctccctcaaacctcccctttcctacccccttacctagttccctccgccgcaaccccagccagaacagtcgaggaggaggagcgcgacacagacgcggatgggaacttgtggatccgggcggagggcgaggagagagcacggattgcgtctgtcgatccgagtggagggcagatggggaatctgtggatcccggcggagggcgaagaaaaccttggagagcagggaagcggacgtgattcgccgatggagaggattgcgccagacgcgattcgtggatggagagagcaggaaatgggcgtaggaagcggacgcagtttctcacggctgggattgcgtgcgggcgggatggcggttcgcggcgttcgcggcgggattgcggcgtgcggctggatggcgggcggacgggcgtaggcaggcgggcgggcgtagaggcgggggcagtctacaataggtacttaatagttagtagagaaatggtacacatacattatccgctggaggaactcatgtagtggtcatactgtgacactgcttgtgtagttgtgtacgcgcttgttatgttgctatagtgtgacagacacatatctcagtagtttctgttcacttttttgtttggttgatgagtttgatctatagtagcatatagtttcctttaacaagctgcacacctttttattacttaagcatttctagcagtgttaattttcttgacatcatattatggcttttacacagagtgcaa

SEQ ID NO: 230 - DNA, 19389 bp, Zea mays
  Intron number 12 from transcript GRMZM2G326643_T03 (locus GRMZM2G326643) derived from phytozome v7.0 (chr-ID 1; pos 116024820 to 116044208)
ccaaatttttgcgcaagcctgctaagaggaaacgtgtaagttaacaatatgtgttttccttaggaactactactaattcaaattataagtggtgttggtttttctaggtagcttttggcatgtatctttaggtgcatagcaaaatcctatgtacttaaaaaaaccaaatggcatagtttggaactgagtattgaagtaatagttttgttacacgtggatcgcgaggggcatgttggggcgaaggcaaagacgccacccttcgctcgaggccttcgctgcagtcgctggtctgacaaagacaaagcgggcagggacacccttcgctccattcggcaccagacgaatggcctgcggcaacgtcatcccgcagcgcggcctcgtccagctctgaggcccacgtgtgatctggcccattgtaacgggccctgcgtggccgcctttgtgttacgggcctaatttgtaaaggcattcttgtaattacagcttgtaaccctgctttacgggaatattctggggataaactaggtgtctgagggcacatgcgtccttaacacaaggcgctggtcactcagatacctataaatacccccacacagtgcccgtgagaggctagattaacagagctattgcctcctagcacgtaaccctgttgtcaccactgttcacccttgttggcctccttgcggttgagagcaagttccaacatttggcgcccaccgttcgtgctacgacaaaaccacccgcgatggcacccaagagagctaacccgaaggctgacgaggctgcgaaggcagcactgcttgccgcaagaaagggcaaggccctcgtcctcacccaatccacccaccaagagcccactgaagacaatgttccccgcacctgcgaagacgacaccttccgcacctgcgggcccgaaggacaatcgcagccgcccccaggcttcgccccactggaaggcgcggatctcaccgaggacggcgaggtcctcggcgtctcaacagaagaacagctatagctgcgcgccctgcgcctcaagaaccgcaatctccagaggcagaaagaaatactggaggccaagcgccaacgtgtgtccgcactagccaaggtgtggcaaatgatacgcgacgaggagcagaaggcccaagaccttgagcgcgagatcgcgctgatgcagcgcgaaggccaccttggcctgcagcaagagccacccagccagcagcgcgcacaaccggaagacacgcgcgaaggccaccttggcctgcagcatggagcacccctgcaacaccgagcacagccggagaacccgcgtttcccccagcgtgactacaccttccagcacggcgcgccgttccaaggggtcaactacctcgacgagcgaagtcccctagcgccacacctgcaagtgacgccttggccagccaacttccgagtaggggcatatcccaagtacaacggcagcaccgacccggcgcaatacataatgagttatcaggtcgccgttgcattcgccggaggggacgacgccacaatggcgaagtctttcatcatcgccctagagggcccagcactcacctggttcaccagattgcctccgctgtccattgattcgtggagaagtctcagggacaagttccttctcaacttccaagggtaccgtccagacaccgacgctttggccgagctctcgttttgcaaacagctggaaaaggagactctgcgggagtattaccgcaaattcttaacactcaagtcacagctgccctccgtcgatgatcagatcgctatccactacgccatcagtggccttcgggccggcgtcctctacagccactgtatcagagatccacccaagaacctccaggagctatatcagctctttgaaaaatatgccaaatccgaagagctccaccagcgcaaggttgagtcacagcggaagcccaaagatgccccgcagtccagccgcacgtggacgaggactccgcagccagactccggtcgagatggctgcagtcagcagcaagtgcacaacatcgccaaccagcagcctgctgctgacccccctcgtcgccaggaatatccccccagggccgcggaaacggaactcgtggcaggggccgagggcgcgcgcagccgccgcgccggttctactgccttttccacggcgaagactgcgcccaccaaaccaaagactgccccgaaacgaaggccaccagagacagaatggcgcgggcgcagccagccgacaatcccagaattgtcgcgcataattaccagccaccccctccaccatatatccacgctcccgctccgcatccaccgcaccacgcttaccaacaccatcaggaagtacaaatcgtacctcctccacccccaccgccacaccagcaacatcaaaacatccccatgccccaaagcaggaagacttcgccgatcaaccatatcgcggagtcattcacatgataacaggggggtccagcactgacttcgacaccaagcggcagaagcgggaccactaccgcagcatcaaccatgtcgccgtcactggcccagtcgtgcagacgaagtggtcccacataccgctaaccttcgacgcacgagacgtcgacctgcgcagcgccccccacatcgacgctatggtcatcaattgcagcgtggcaagctgggacttacacaaagtcctagtcgacaacggcagtcaggcggacatcatcttcctccacgccttcgaccgcatgggtataagccacagcctgctcaagccttcggacaatccgttgtatggcttcggcggcaaaggcacctttcccgttggcaaaatagagttgcccctctccttcggtgtagcacccaatgcccgaagtgagcaagtaaccttcgatattgtcgacatggtatatccatacaacgccatcatgggccggggctccatcaataagttcgaagctgccatccacagactgtacctatgtatgaagataccaggtccgctaggcgctatcacgatctacggcaaccagcagacggcgcgcaacatagagcgggacttcgtgcctggtcagaggaacgtacactgtctcacgacccagcgcgaggtccctgcgcccgccagcccaaccgataagcagcacgacaaggcacagttgcagagccaagacgggaccaagactgtcccccttgatcaggccacgcccaagcagacagtcactatcagcgaagaccttacatcacatgaagaagagaagcttctctgctgcttggccaagaataaagatgtcttcgcctggtccgccctagacctggtcggagtcagccgatccataattgagcacagcttgggaattgacccttcggtgcgaccaaaaaagcaaaggctccgcaaaatgtccgacgaaaagacagaggccgccaaggcggaggtgcaccgcctcctagaggctaaattcatcgagccagtggcttaccccacgtggctctccaatgtcgtaatggtgcagaaaaaagcgggaaatggcggatgtgcatagacttcaccagtctcaataaggcctgcccaaaggacaatttcccgttgccgcggatcgacaaaatagtcgatagcgcggccggatgcgaggtcatgtcactcctcgactgcttctccggctatcaccagatatacatgaaggaggaagacaaggctagcaccagctttataacacccttcggcacttattgcttcatcaggatgccggagggactcaagaatgcagggtccaccttctccagactcaccaaaacagtactcgaagggcaggttggcagaaatatatttacatatgtggacgacatcatcgtcgccagcaagaataaggaggaccatctcgccgacctcgccgagacattcgcgaacatgcgagatgcacgactccgcctaaacccggaaaagtgcgtcttcggtgttcgccagggcaagatattgggctacctggtgtcacaccgcggcatcgaggccaacccaaccaagatccaggccatcgtcgacatgtcgcctccgcagtccgctagggacgtccagcgtctgacaggcagattggccgctctcaacagattcatctccaggttcgccgagcgaagtctccccttcctcaaaacactccgcggtgcgaaagacttcgcctgggggccggagcaagcagcggccttcgcctcactaaaacagtacctgtcggagctggccatcctcacaagccccgactcctcgctccccctattgctctatgtcgcggcttcgccgcacgcggtcagcgtggcactagtgcaggagcagacagttgagggcgcagtcagacagtgccctgtttactatgtctccgaggtcctgacaccgtccaaatgcaacatgacagagctggagaagatcgcctacgtagttgttatgtcctcgcgcaaactgcgccattactttgaagcattcaaggtccgagtcacctcagacagggggctcggcgaactattcagaaacccggaggcatcggtgaggattgccaagtgggcagccgaactctccggctaccacatcagcttcgagccctggacagccatcaagtcacaagtcctggcagacttcgtcgtcgactggactgggccaataacacagccggacccgtccacagagaaggtttggaccatccattgcgacggcgcatggtgccatgcgggggcaggcgtcgctgcagtcgtcacctcaccagccggagtcaaacacagatatgcagcacgcctcagcttcgctctggaatccgacagatgcacaaacaatatagcagaatatgaagcggttatcctcggcctccgcaagctaagggccctcggagtcaccacatgtatcatcaagacagactccaagatagttgccggccaggtcgagaaagattatgcagcaaaagaccccgcactcatgcaatacctcgcggctatccgaagtctcgagagacagttcaagggattcaccttgcagcatgtggatagggccaagaacgaggaggccgatgcattggccaaggctgccgccaggggcgagcccttgccctccgacgtgttctttcacaccatcggcacgccagccatccggagccccgaagggctccaaataactaatgatagcgagggccaccgcatagtcaatctaatcatgaccgaagactggcgggcaccaataaccctgttcctacagggatactatcatccaaccgacgtcagcgaggccaagcgcctcagacattgaagccgggacttcgcactgatcgagggccaactctacaagaaaggggtcagtcagccaatgcttaagtgcgtcaccgaaaccgaaggcatgcagatcctacgtgaagtccacagtggcacgtgcggctcgcacgcagggccaagggccctagctgccaaggtgatccgccaagggttttactggcccgcaatgatctgcgccgcaaatcgggtcacaaggtcctgcgaagcctgccagaagttttctcctcggtcaggcaacccctcgcagtatacaaagctgattgcccatacatggcctctccagcgctggggcctggacattgtcgggcccctgcccaccgctcaggggaaccttaagttcgccttcgtagccgtcgaatacttcaccaaatggatcgaagcgagggctgtttctacaataacatcaaagactgcccagaaattcttctggcaaaacattgtttgccgcttcggagtaccgtccgagctaacagttgacaacggcaagcagtttgacagccaagatttcaaggatttttgtttttccatcggcaccaagcttgccttcgcttcagtctatcatccgcagtccaacggggtcgtggagcgcgccaatgggaaaatcttcacagctgtcaagaagatgctcctcgatgaaaaaaaggcagatggaccgatttattaccggaggcagtctgggcgctaaacacaactgagtgcagggcgactgggttcactcctttccgccttctatacggatcggaggccatgaccccgcaagaaataaagcatgggtccccgcgtacagttccgtcagccgtccccgacgtggacgagccaacttcaaaagatctcattgacggagaccgggtcttcgccctacaggccctgaacaaataccaagcccagaccaaagcatggcgcgaccacgcagtcatcccgagggagttcagcgaaggggacctcgtactcgtccgaacagctcggacggagtccaggggaaagctggagcccaagtgggagggcccctttatagtcaagacaaaagcttcccccagcgcttacaggctcacaacgccaaacggcgaagacctggagcactcctggaacatcgacaaccttcgcaaattttttgtttaactcattagggctgatttcgcccttgtaattcgccaaaaacaatcttgtaccggcccgcacttttttcctcccggggggtgaggtttttaacgaggcggagccatgtaatatatgtgagaaaaatcccccgcaaaaacatgtgtcgaaaaaagaccgcggcaacggtcttcggcattcgaccaattcaaggtcaccgcgaggctaagcgctagccaccctcgcgtgcgacaaatccgcgcagaagtcgcctaagggtgcagccggactagcacaacaagtgcgcaaaaaccgaagtccaccgcgaggactatccgcgcagaagtcgcctaagggtgctcccggactagcacaacaagtgctcaaaaagcgaagtccacggcgaggactatccgtgcagaagtcgcctaagggcgcagccggactagcacaacaaatagggaaaagccgcagtctaccgcgaggactgtcgcaccagtgtagcataacaaaatataccaaacaaagcacacaacgccttccctcaacacaggcaagcgagggcacacaacttcatcgtacaagcctttacacatatacaagcgagggcaccacactctacatcggctcaaccttaggaataatccccatctccctataattaaataacattatcctaagctcctcacccgcaaaaagacttcgcagttccccttcccctgtactcgcggcggccggcaaagacaacagttcttgccgaccagccctactcacacgaagccgagccccttcctccgtgctaaccctacgctttgcaaccgcccttcgtcgtcggcgcccggcgctagtacctggcacgtctggcgcgtccgcggcgtacggcgtagcctccgccgcagccacatccaaggccgcaaaataatccaagtcctcctccgacgactcctcagtccactcaaccgagctcccagagtcagtaaaatcaaaaaactcagatgcagattcaccatatccattaccaccttccgcggtcgaagccgccaaaaattcagtagtagcggttgcgtgcgcaggcccaaaatcttgaacctgcgcagcaaccaaaattcagcaaaatatccaaaattccccaaccctatacacccactacgccacctgcgaaggccctgacgctgcgggagcctccgccgttgcctccgccgccgcttccgccgttgcctccgccgccgcttccgccgttgtctccgccgcctccgccgcgggatcttcagcactcagcacagcagccgcgggggcatcaggggcgccttcggccacctttgggggcaggtcttcgccggccgcagcggatgtgggggcagccgtcgcgatcgccgcggtctccggggttggctccagggcgaccccaggcacggcctccgcaggggtcggctccgggtcaggcagcgcgctgttcagcgccccgaagtcgtccacccgctcgccacgcgccgcctaagacaagacacacaaattcagcaaacacacgcacaacccgcatacagcaaacgccaaacaaacaacaacgttacctgagccctcgcagtctcggcccgctccctgaccacctcacgaccgtgcggaccccacatccggtcgtagagggccccggcggattccttcacaacggggtcttcgaccttatagacatctcgctcaaaatcttcatctgcctggtcgaagacctcgaagtgccggcacccttcgcgggagagtgcgttcatcgccccctcgcaggtgaccagggaggcgtacgacataaacccccccacgacagcggggagttcctgcagctcctcctgcacccattgcagacaacgaagcccgggctctcggtccggcacctcgaagtcaccggtccgcgcgcccagctcacgatatgtatccataagctgagcgcgcgtccgttcagcctccgcacgcatcgcggcctcggcccccttcgcgcggctctccagggcggtaagccgctcctgcagatgttcggcgagctccttggcaagattgccctccgcccgcgcgagtttggcctccgcctgcgcagcctgctccttggcgatggcctcgttggcctccctcctctccgccgccagttggcgccggaggtcagccttctccctctccagggcggccaccctgtccgtcagcttacggcacttgctgtcggaggccgatttctcacagacagcgtcagcatgttgcgtccgaagtctctcgacttcggcagacacagctgccgtgagggcccccgacgcagtacggctggcgaagtcagccacctgcagagcacacgtaaggccgttgccccaaaagaaagaggtgggggagagagtatagctcagcggacctgactcagcgcctcgatcgcctgactcagcgcctccgtcactcccttcagccggcgggtcgctgcgcccgcctcgtccctgaccaccgcgagggccgacacctcgcctccggcgccaagggcctcgcccctcgccttcggcactatggccgccgtcgcgatcttcgcgccaggcgcaaccatagcaagatggccctcgtccgaccctacaacgcatcaacgaattaaaaaataataataataataataggccaacgacttaccaccaagatagtcgtccacagtaatatcggtgtcgaagtcggcaacacgcttgcccgacaacggcaacgctcgggccgccttcgaagcctccgccactccgctggccggcggcaccaccttcgttgacttggagcctccggcgcccgccgttgcctccggcgccttgctaggtgcagaggcgcccgccttcgccgccagcggcggcttgcctccgccgcagccttcgcagcccctcgctgcctcttcggcctagcttcatgcagcctgacagccgcctggcgtttttgcgccgccccttggcgatccttgtccatcactgcccacacaacagcaccgatattccgcccgtaaggaaaaactctccactgacgaaccatacgagatgtaaaacagtcctcgtcagccgcgcaggggataggaacattcctaggccagcaacccccggtaaccctcagcatccgagccgaagactcccggagctcgggcgaagacatcctttcccccggggccgcacacgtcctcatcaactctctagcaaagctatcagacaccccaagtcctcccatcgcagtacctaattttctctttttcgacgagggggcggccgccggcgcagggtcgtctccagtctccaccgccggcttcttcccacggcggtccgcttcgtcttgaccaggatagccgtcgtacgacaattgatttaattcgaagaccctgttcaaacggtcatttgacccgcggatatcaaagctgcgctggccttccgtcctcggcacgtaacgtcccacgagccgcaccgccccgtcctccgtgaaaggcggccgggtcgcggtttcgcagattcaatgcgaaggcaggacttcgcaccacccttcctccgtgaaagggcatctggcgagggcacacttcgcccaacgcccagccatgcgccaagggccacaccccgtacgccacgaactcttcaactaaatcacgcccactgctctgaccggcggcgcaccgaagggccccttcgtctgcatcctcctctgccacttcaaagggcgggtacgcagagtaatagtgagagcaaatctcagactggggagtttctcttggtcttcgacagtagcctcagcaacgtaaaatccagatcattccaattgccccacttgttgcgggcgcacggaaccaactccactacttgcattgtggtcttgccggtcttcggcgtgaatgtgcatgacccgaactgggcaacttcgtccccaatcatcctcttctgccagtgcaaacaataatacttcgcaaaaacttcaactgacggctgtccgccgtacgaagtcgtcgcccagacatacttcgacagtgccaccacaacattcagtgtcagctgatgtatttgaacgttgaatctacgcaggacttcgccaacaaaccggtgcgcaggcaagcggagaccggcggcgaagaacgcctcgaaaacgaccaactcaccctccggctcggggacttcctccgtccccggagcacgagcaactccgccgccaaagtagcccaaccgctgcatatcttcaacgcgggctgacgtcatccgcgacacaccaaaatcaacagagtcgccggcgcgcaactcctccaccatcaagctactcaacgtctcctcagacgaggcggcggccggcggcgtagtggcagcggaagaagaagaggacgacattgctacgtaccgtcggcggcggcgggcggtctgcttcactcgagccagatctccggcgagcaagagcacggcgggcagacgagcagcaagacggcgggcggctagggttttcgcggagcacggaaggcaaagttcaaaaagcgccgacccccgcccccttttataggcagggcgcggctcttcgggaaacccgcaatccaacagggcgcgacgcttcgggaaacccgcaatccaacagtacgccgtccatcaacggtcacatcgaaaacccccgcggaaccacttcgagcgagggcagcgtctccgccatctagcgacgtcttcggcaccaggtgactttgtcgaactggtccctcggagggcaaatgttggggcgaaggcaaagacgccatccttcgctcgaggccttcgctgcagtcgctggtctgacaaagacaaagcgggcagggacacccttcgctccattcggcaccagacgaatggcctgcggcaacgtcatcccgcagcgcggcctcgtccagctctgaggcccacgtgtgatctggcccattgtaacgggccctgcgtggccgcctttgtgttacgggcctaatttgtaaaggcattcttgtaattacagcttgtaaccctgctttacgggaatattctggggataaactaggtgtctgagggcacatgcgtccttaacacaaggcgctggtcactcagatacctataaatacccccacacagtgcccgtgagaggctagattaacagagctattgcctcctagcacgtaaccctgttgtcaccactgttcacccttgttggcctccttgcggttgagagcaagttccaacagggcacaatgcgagaaatataagtacaagaaatgttttctcttgagatttttatttttctgtcagctagtatccatccttgaatgttttgtcagctgcttagcttaattgtttttgtgactgtagacttaatttcctacattattgtaatggcttccacttcgcctaatcacattataacactcaaatattcaaaactgcaaattattttttctattagtgatcttgttgctgtgtataacatctggtttgaaaattgctcaaccctaccatttaattttatgaagggcagtccttgtgcagttgtggtgagtgttggaaaccttaaccccttcggggtgagctatgtattgctatattagaaaagaagttacatgggctggaccaaggcccataacacttagactgagtacaatgaacaaacacaagaatctaacacccctgcagttgaaactctagccgcgacggatgttgggactagaccgaaacttcaataacaacgagggaaaacctttggtgaagatgtcagcaacccttcgagacgtgatggacgcaaacgtccccaatagcaacacactcacgaatgaagtgcagtgtcaagggcgttgggtgatagagtgggtggcccttggctacgtagattgtagccgcggtccgtgttggggcgaggttttaccccccagcgcccgactgttagagaagaggaacaagattaattgttcttgcttactctattaattcctcccctgacattatatagccaaggctgcctagtacatcttaacaaacttctgataagataaggagctatccatctaatctatcaagatcttaacaaacttcagataagataagggagctatgcatccaactaactctcatctgttcttatcttttctaatctctcctaaattctaggatcccatcctttattctagactttatctaaaccgagcgctgaggctctagcgcgtgcgctatgtttgcgccgccttggcattcatgtgtgcgttgcacgtcacgtgcccttctattcttggcgtacgtctggtcgtacatggcaccccccggtcgaggagcaactcgtcctcgagctagaagtttgggtactttggcggagaaggattcgacatcttcccatgtagccgaggcaactgtctcacccttccactctacgaggatctggtgtaccccacgcgccaaccgggaccgcacggtccttttcggttctagaactgatgcaccatggtgaatggtgggcaatggcggaggagcatccagtggtagcccacataacttcttgaggagcccgatgtggaacacatcgtgcaaccgggcgcagggcggtagggccaaccggacagcgatgtcgttgattagttcgacaacgtagtaagggccggagtagcgcgacttgagcttcccagtggcggcctggggaatggatgaagtcgctcgctgtcggagacgaaggagggcccaatcggcaatcgcccacctggtacgcaacatgtcggtggagcttgtcctagtgcttcttctggaccttctgcgtctgttccaaatggtagcggatgtccgccaggaacttgtcatgctcctccatgctcctggtgactgtcgccacgtggttgtcgtccgggtcataggatctgatggtcggacgatcgcgcccgtagacgtcatggaacgacgtgtcctgcagcgaggactggtaggtggtgttgtagatgtacttggtccatggtagccaacgcaacactgtcgaggacggtcgccagtgaggcagcgcagctatatgatgatgacacggttggcctcctccgattggccatcggactgagggtggaacaatgaggtcatgtggagttggtacccatcagtcacatgagctcgtgccaaaacagcaaggtgaagatcggatcgcagtcagacacgatggactggggcacgctgtggagccacacaatgtcggtgaagaaggcttgtgtgatggactcaatggagtacaggtgcaccaggggaatgaagtgacaatacttgatgaatcgatccaccaccgtcaagaggatggacttgctgtggaggcgtggtagtgcttccacgaagtcgagcgcgatgtccgtccagacgccctggggtacaggtagaggaaggagaagacccgccaggtggaagtgctctgatttgtacctctcgactcttcgccacctcgaccatctcttgcccccgcgacaacgttacttctctttgtcatgcttgtcagcttgggcgtcacacacgcttacccttttcctcttccctgttccgcgctacttgccacttcgaccttatccactgtgacctctagacatcccccattcctagcatctctggtatgcagtaccatctcgtcattttggatgacttctctcactacttctggacctttccccttcgccgtaagtctgacactagggatggcaatgggttgggttcgggtcgggtatggtaaatatccgcccacgacaatacccgcgggtattactcatacccgcccgcgactatacccgcgggtaggattttgtacccgtgcccgtatccatcgggtatcgggcgggtatcggatacccgcgggtataattacactccacacaaataaaacacatggacacatggttgacaaatgacaaggtaaaacaaaaaaaacaagatagtgctgtgtgcagtgtgcgtgtgcagtgtgcactagcgtctggcgggcttgctgcttgctgtccaagtgtccaacgctaatttcccttggagacaatgatagtgctgctgcagtgtccaacgctaatttctcttggagacgctgagtcgctgaagcaggggcactgctggcctgccgcactggacagggagcctggtcgctgggcgggcagggcgcaggcattaccgcggcagccggcagggagcaaggcaaccagaggagcgacctgcgtctgcgtctcgacgccggcacagccgtgcgatggacggccgccgccggggcggatctagcgctgtcccacgagccggcttactggcggccgtgcgatgaaccagaggacggtcgcgctcggtttctggcggtggccggtgggcggtagcggatgagagacagagagaggtgagacgtgagagagagagatttgcgtggctgcgtcctgtcctgcgtgtgagagtgagactagggtttctggtgattggtgaatagagatggacattgggccggtccgccggttttcttgtgggctgaaattgaaaagtgaaaactgaaataatttcggatatccgccaagacccgcgggtgcaagataaaacccgtacccgacctgattttatcacgggtcgggtatgggtgagacccgcgggttaaatttcgtacccgaacccgaatccgacgggtcggatatccgtggatatccgaacccgcgggtaaaattgccatccctatctgataccttcccccaccttcttcatttctttgcttgcgtgtcgactcagttcggtcgtaccatttaggatgttcaggttgataatggacgtgaatttgataactccacgtcccgcatcttctttctttcccatgccgtgcaactacggatgtcgtgcccccacaccttcccttagaatggccgagctgagcgcatgattcacaccaccaccaacgtgctgcgttgcctcctcttttaggcttctcttcccgcccgctactggtcggagccttgaacacaatcaccgatctcctcaatcgccttccctccaaggcggtttcccatcccactccgttcttcgccctcttcggtaccacctcttctatgagcaccttcgtgttttcgggtgtgcttgctatcctaacatcttcaccatcgctcctcagtcctcacaaacttgcccctcgttcttctcgctgtcttttcctcgggtactcccctgatcacaaggggtatcagtgcctcgatcttctaacacaccgcatcatcatctcgtgtcatgttgtctttgatgagaatgttttccccttgctgactcctccccacctcccgaccttgattccctcgatgtcgattgcattgatgtttctcttctgttgccctctttcacgcagcacgtgaccacgtcgcctgcgccttgtgtgaccgcaccacgtttgcctacaccacacgtggccctgttgccatcccctgcgccacgcgcggcctcactacctctacctttcctcgcgctgccacacgcggccccgtcgatccagcccgcggcacgtcgacgagcgtggccccttcgccctcgtacgctctaggtgcgggcccatcgcctgtgccccttgcagcatgttacgctaatctcgcccatgtctaccagcgacgtgtgcgacctgcctcctcggtccccttcgctacaccggcccgtgctttgactccctctcgtgaggagccaccagtgtaccatctgaatgctctccatcaggacccgtgcacatccacccgatggttacccgccgggccgctggtgtcctcagtcctgtcgaccgccttgtcctctcggtgtcatcttctttggtgctctcccttgagccgtcctctgttcgtagtgcgcttgccaaccccaactggcggcacggtatggagtacgagtagagatggcaatgggtacccgcgacccgatacccgatgggtatttactccattagggtatgtacgtgggctaaatattctacccatgggtctgttattgggaaaaaatcttcacccaatgggtaaacgggtattagaacgttccaccttcacccatacccgttaacccgtgggtataaaatacccaatataaacttagcccaagcataaacttagactttagtcatccatattttttactatttaataaccttttaggccattatgtcatagaaggcttaacgacaatttaatgaccatgtaatggaacatgtaattcacccaatgtgtgttgaatggatggttaaatgatgctagaaattttgtaatggtatttagatggatatacttgatatttgtataatataatattttgatagatgtttaatttttgtgggtacgggtgacccgatgggtgacccatacccacgtgggtatgggtatgggggtaaatccatacccaccagtgtatatgggtgacccggtgggattatttttttgtcgtgggtatgggtatggggtagtaatacccggtgggtatttacccattgccatctctaagtacgaggccttataggcgaaccgcacctcggacctggtgccacgaccctcgggcgcaaatgtggtcatcgggaaatggatctttaagcacaaggtgaagacggacgactccttcgattgatataaggctcgctgggtcctgcggggctttacccagcgtcctagggtagactatgacgagacattctgccccgtggtgaagcctggtaccattactgttctgactctggctctctcacgggcctggccaatgcatcagctcgacgttaagaataccttcctccatggcactttgacagagacagtgtattgcactcaactggttggctttgtggactcgacgcaccctgacatggtctgcaagcttaaccggcccctatacggtctcaagcaggcgccaagcttggtacagtcgcttcgccgttttcttgctctcatagggcttcgtcgaggccaagttgaacaccgggttcgtcttccaccgtggcctggacacgacgtacctcctatacgtcgacgacatcatcctcacgacctcctacaacgcatcatcttcctccaacaagagtttgcgatgaaggacatgggtgagctgcaccaattcttggggatcaccgtggagcgtcggtcctagggcctgtttctccaccagcgccagtacaccgttgacatcctcgagcgcgctggcatggccgactgtaagccttgcacgactctggtggacactcagggcaatgtttccaccgatgagggcccccctgtggctgatcccactagctatcggagtcttgtcggggtggtacagtacctcgtcttcactcgcctcgacattgcctaggtgtgcctccatatgcacgccccgcaggagccacatttcaccgctatgaagcggatcctacgttacctccggggcactaccgactttggcctccttcgacgatctgcgaccaccgacgtcgccgtctacaccgacgtcgactgggccggttgtcctgacacgcgccggtccacctccggttttgccgtgttcccaggcggcagtcttgtctcctggtcctcgaagcggtagccggtcgtctcccgcttcagtgctgaggacgtcgacttgggattgggactgtggccaatgacgtcgctgaggcggtgtggcttcgtcagctgctccaggagctccacaatccgctgacgcggagcacacatgtctactttgacaacgtcagcgccatgtacctctccaccaaccccgtccaacaccagtgcacgaaacatgtcgagctcgacctccacttcgttcgcgagcgtgtcgctgtcggggatgtgcacattctccatgtcccgacatcttcaccaagagcctccctgtgtcggtgtttgaggagtttcagtccagtatcaacatctgtcatggctagagtttcgactgcgcgggtgggtgggttagatatactgtgtgtgtattaatgtattgtgtgtgattgtccctgtattgggcataggtccacttacctcttataatacatcacccaaccctggtttggggttagggtttccacttctatcagacaatatcagtgagagtcccatagagaaaaacattcttgacgtccaactaatgaactagccaagaatgggagagcctgaggatgacacagatggtagaaggcttcacgacgggactgaatgtctcatcgtagtcaacgccaggatgcttaaataaacaagcacatgaatctaatagagtcctgtctcatcgagtcaccggatcacgggtttgaaccagtctctctacatttggggggggggtgcctcgttttatcccttccccagacctcatacacgcaggagcctccgacactgggtctatccacccctaccatataatgttatgtaaaaactagtttaaacagtttggaaagtaacattgttctcactattaaactgatatcattttaatagtttaccttggcagttgaaaggaggaaaatggtagaatacagatctgatatggcaaagtttccataaatagtgtctgatctcagcccaataatagatgtctgatgtatggccagcggtgtgtctgatctcagcctaatagtagatgtctgatgtatggccagcggtcacaagtagtggctatagtagaagtaggtgtactagctgtacttctagttggctggagttgtatacagcatgtatagagctggctggagcctggaggtagttcagcttttccacttgtgctcgtgtgtgctctgttctcaacccctcttttctacctctagcccaaacctgtgtgtgtgtacttgagttgtgcaggccagccggtttccaacagaaacatgtggtgtttattcttggtagttttcattgtgctttgttacacttgactaagtgggaaactttttttttctcgaatagagagacattttgactaataaaaaaataaatacactttttgtcgattctcgattgttgatcccttctgtgtttaacacacttatcaatattttcacctcatgattgcttttaattatttatttacagacaggaaagaccaattttgttgaacatcgcacttt

SEQ ID NO: 231 - DNA, 12280 bp, Zea mays
  Intron number 6 from transcript GRMZM5G883741_T01 (locus G RMZM5G883741) derived from phytozome v7.0 (chr-ID 5; pos 1 93175539 to 193187818)
tccaaaggagaatacacgttgcaactgtacataaggtaaatatcttccatctttatatgtattctcattttttgaagtcatcttattttaataatatgaaggacactggtttactcaaaggggaccccaggggcggggggcaatctcctggcattgcattaaaaaggaaaccttctcatgcacggcgcacgctggtaggctgggcattcgggttacccgattttttcgggtcgggtaattcgggtaatgaaaaatttgggtaataaaaatcaggatccaaaatatacctgtccaaaacctataaccgaactaggttggtccagattttctgctaggcgctagcgctactgaccgaatcatcgaacaagcacttgttgcaacgtttctaaaaatttgcaaagcactaacccttttcatttcagttttttatcaacaaataaacttaattgtttgcaacaataaagttggtggctgttcctcagaaatctgttcacagaagtaccatgaccaggcacatagaagtggtagaactcctgaactcctgtcggtcatttcaaaaaagatctgctagctcaggtcctatgctgggcgtggccggcagccgtgctgaaggccagagcaggcgagcgcccaagtagcagtcagaaacttgaataactcagctcgaacattcaagatattcactgagtatttgccacttaattagtcgtgttttactctataccatcttagtatcaagtctctttaagccatgctatctgatggcaaaatcatcagttaggaacctccgataacataaactagatttatggctacagagatactattgcatactaaagcctgagctttcttttccatgtaaccccattgattattttaatcttcatctacatcttcagatccgtctacaaataaaatgctggcaggggggcatattatgagttcatgactagtattgataatgtaagaatacaaaagatgtctctaattaaatgagtaaaaatagggttaatcttatgccttcttgccaaaaagaataaattgtgcattttttaaatttcatacatgttttgttctctaatattaaatacgaacccatccgtttttgttagtgtgttgtttcctattggccctaggccttgtatccaacccattatggtgcttctatatgtatctacacacattctggttaatccctcatttaatttggtatcagtagccttctaaccctagccgcctgctcctcttcccagtcgacatcggctatggctggctgctagctgccgcaacccccctggcgcgaccttccccaacctcggcgttgcctccccctctttcctccttttctcgtcctggtcgttgtcgggccctgggtgcttgcctttgtctccggccttgacgttgatagcccgctggacccagctgtgggcccgactgacattggggtagccactggcgcttcttccctgcctccaccctatcccacgcagctaggctacgggcggctgcatggctggcccttgtcttcgtcgccgctggctttggcgtaggtcctccgcttgttagcgctgtcggggtggctggctttccctttgtgggcctcttcgttggttgtgcccttcatgatgaggtggttatgacccattccacccttgtcgttgctcttcacgcagccaagtatgttattaccaccgcgcgtgagcgggttgctgtccttgtctaggagtaggaacgtgcctctgtggatgttcttgcctgttaactcgcggaagccaagcgttaactggaggtggttgctgtcgagaacacgcccttcgcccccggcgatgtcgatgcctccatcacttatgaagcctctgtcatggccaaccttcacgcttaggcgattggtgtctagaacatcttgttgctagccacagtcgttcttgacccgaccacctccaactacgctcgctggcgcgaccttgtcctcaccttgcagcgctatgcccttgacgaccatgtgctcactgacgactgcctgcttgtgccctccttgcgtcatgtgcacaatgtggttctgtcttggctcctcggcactgtcactatcgagttgcaggacatcgtctgtcagtatggtgggcattgctcgccaggcctgggttgccatcgaggactagttcctcgacaaccatgaggcttgtgcccttcacctcgccgtcgccttacatatcttcgtctaggtcgacctctctgtcactaagtattgtcgccagatgaagggtatggcagatgctctctgtgacctcggggagacggtctcctcctgtacactcgtcctcaacctcctttgctgtctcaacgagcgctacgaccacctacgaacttggattgtgggtctgttcctttcccctacttctagaaggtccggaatgacttcatcctttaggagcccactaagggggtctcgcttcctcccaccaccgcataggctctctacagcctcggtcccggtgggccgtctcagcacccctcaccctccactcctacctctgggatcccgtcacctcatccacttgccccctctagccctcctaccggctatggtggaggtaaccattgtcggcacaagcatggtggtggtggctgcactggaggcggagatggtggttctggcaaggatggcacaccctggccattcctctgcaacctgtggatcggccatatcactatgtaacctggtccgacattttgtggccccacatcgctcccactgccgcctcatcctacgctacttgccactctgtctttcggcggtcctgggtgtccgcttgagccctcaccttcggctccatcggcgctgcactggcccttgattctccctcgcacgcggtcgttgcttcacccggctccatcttggacgtcgtgggctagggtttggtaccaacagtctcttgctaactcgtttagcacgatgacattggccccttctgtggccatcacctactgagttgcggactccggtggctcattctagaccacttcggatcaatgttattaaaatgtcatttaagcgatgtttaaacgacaaaacacttattagatgctaaaacactgatacgttacacgagtaggcctaaaaagacgtattgcaccaattaaatgctctaagctgtaaaacatagcatttcacacgtttcggccctctttccgcccattagcttctttgggtccattattgcagtctagtccggcctagttcccgcacacttgccttattctgctcacttgaagcccgaggacaccatgcggtgtgcgctttgcactctgccatcgtcgcctactactgctctctgctgtcgcggccgctggaggcccactggctccaggagaggtggggccgtgagcgcagccttgcacaactgcaccgatctttgttcagctcccgcgactccgtggttgatgtgtgcgcaaggaaggaggacggaagttactctgtggcgcaaggaaggaggaaaagagttgctccgtggcacaaggaaagagctgcttcgtggcacaataaaggagttgttcctcctcaccatggtattttcctatgttgttttaaactacttttcaacgtttaaaagtcaactccatccatgggcgtttcaacgtattatcgttttaataaccttatgtggggatagtacatcgacctgctctcgcgacgagtcatcggtgtaccaccctcctctccttcgttgggaccctcgtcacgtactcacgtcaattcgatggtgattcgccatgtcgtcggggtgcttcggtctgttgaccttcttgtcctcttgacgactgcctcaccgctggtggtctccactgtgctaccgtccgtccaccgcgctcttgccgatcctcaccggcatcgtgctatgcaggacgagtaccaagaccctacttgccaaccacacctaggatttggttccgcatcacgcctgcgacaacattgtgattggcaagtgggtgttcacaccaatgttttcaagtcgtctagtcgaccctagtcatatagctcccgaccaccagtcgactagtcgcgattagtcgtcgaccagatcgactaatcgaccagatccacatctacatgcatcaagcagatgacatgcatttaatcaaacagagaggctagagggcacacaacaaacaaggaaagcagagaagaaaacccccactcaccatctgacgatgagacttgagggcgagcactacacagggttgggcgcttggaaggttggggggctgtgggcgcttggaagctcttggggcgacactgcgtcttggcccttgggcggcgactacagtcgtgtgcggtgtcggcggctccacgttcgtgtgcgccagtggctcctagtccgtgtgtggtggtagcgactgcgatgtggaggacagaacagagcggttgtgcctgtgcgtgcgggactagacacggggcgttatggtcttatgcctgaggtgaacgctcccaaccctagaagtccataaagcaatttgcagcccacaagttacaagcccaactccaacagtccacccacaaagcatgtctaaactggttgtcccatgtctgatcggacgactaatcgtgattagttgacgactaatcggatgactagtattctggttggtctagtcgcatcagtggacctggtcggttgtgacctactgattagtccgactaatcgagattagttggacgacttgaaaacactggttcacacacaagcggcacaccgatggctctttcgactgatacaaggctcgatggggtcttcgagggttcacttagtgccctaccgttgactatgctgagaccttgagccctatggtgaagacagacattgaccacactgttctgtgtttagatctctcctggtcttggcctgtccatcaattgaatgtaaagaacgccttcctttatggcactttgactgagatagtatattgcagctagtcgaccagtttcgtggatctggctcatccagtcatggtctgcaagctcgacaagtcattgtatggtctgaagctggcacctctagcttggtacagtcattttgcctccttggtctccttggactttgttgaggctaagtcggacacgtcactatatctattgtcgcagtggtgacactctgcttctgtatgtcgacaacattgtcctcacggccttgagtcctaccctcttgcagtggaccatctttgctttgcagcaggcgttcgctatgaagtatctgggccaacttcattacttgggcatttctgttgagcaccgtccccatgacctgttccttcagcagcgggcatacactctagaccttcttgagcaggctgtcatggttgattgtaggccttgccccacctcggtgcccttatccattgatagtgcccttatcagtgatcccactctgtattggagcatcgctggcacctgaccctctctagtacctcaccttcaccgggttatatatctcttatgttgttcaacaggtgtgtctacatacacatgatcctcgggtgtcgcaccttaccgttgttaagtggattctctggtacctctgggacaccctcgactacgaccttctccggcgctcctcggcgtcagtagctattagctacaccgacgttgactgggcgggttgcccggacacacgtcgctctacctcaggctacaccttcctgggcagcaaccttgtctcttggtcgtcgaagtgacatcctgttgtctcccgctcgagtgtcgaggccgagtattgcgtcgtggctaacaatgtagttgagatgtgatggttttggcagctccttctggggctttatagtcctgtctccagtagcatcttcgtctactgcgacaacgtcaatgtcatttacctctccaccaaccctgtctagcactagcggacaaagcatgttgagatagaccttcattttgtctgcgagcgtgttgctattgttgatgttcgcatccttcatgtttcgatgacttctcagttcaccgacatcttcaccgagggcctccctacgtcggtgttcttagagttccgctccagtctcaacatctatcgtcactagagtttcgactggggggtgttagagtgtgttgtctcctattgggcctaggccttgtatctagctcattatggtgctactatatgtatctacacacatattctggttaatactattctattctcttccaatagttttgggtgcagtttcattgcacaataaattattttgcatcatatggtaatgcatgggaatccttttcattgtatactagaaggatagcccacacgttccatgtgggacttccctagaaataaaggtgttgtatgtatgagctggacatgcatgttcttgcattcctcctgggtgaaaaatgagcaagttaatgggagaataaacaaactaatagaatattagattgcattaaaagatgatgaaatatcaaaacaaatagcatgacgtggatgcattatattttgacggattaaaaatgcatggttatcttgtcagatgctgtaagctatttcacttaccatggtctcatttattttataatatatgtaatggtgtaggcatgagaatgtgcaattcttagagaaactcaaggaactggttctgtttattgagaggaaactagacaaaaaggtattctatctaatacttatgttactaatgagtctcatttgagtattaagtcataaaccgcctctttgacatgcatacttttgggtatggatgggctgatagcctcgtacccataaaatataaactgttttggagatttactctgaaaatgctgtgaatatcccatgcaaggactagactttcttattggcatccattatttgaatatggtttcgtacacaaggcgataatacaaaaactactatcactagtttgcatctacttgtgcatctgacatgtgacagcctgtcacttggctttctacttgaacaatgtatggaatatgttcctgggttctggtgattctatgcctgagcaacggtatagatcacagaattggctggaagatgagattttcttacattcgtttctatgtctgaaagataagaagggcaggcctggtgcatcggtgagagctgtctcgtgagtcactaggtcgctggttcgaagcagccagcactgggtctgccctttttcgtttctgtagggatggtttgagcaacaagctggtgtcaggtttgtctgtccaatagttgctactgttagactacccgtctagggtttgtggtgttccccttgtaattaccgtcatacccccagtgtaatgggcctggcccagttacttactctattaatactactcccaaccctgtttagggtatgggttcacattccaacatggtgatgacccctccctcctccgactgggtgattgactccggtgcctcctaccataccactcccactgcaggcatgctctcccgctctcattcccccctttcctctcacccatcctcgatcgtcgttggaaacggttccactcttcccgtcaccttagtaggtgccgcggttctgcctggaccgttttacctcaacgatgttctcgtagctccccacatcactcacaatctcctttctgtctgtcgtttcaccactgacaactcctgttccattgagtttgacccctctggtttttctgtgaaggatctggccaccaggaccactctcgcccgctgtgacagctcgggaccgctctacacgctccaaccatccacagccggcgtgtctccacctcccgtcctggtctccaccacctcctttaccacttggcatcgtcgtctcggccatcctggacccaacgtcttgaccaagattaccagtagtctcgatccttcatgtagtaggggacattttgagggcctctgtcattcttgtcagttaggtcgacacactcgtctcccatttactacttcctcttctcgggctgagcaggcttttgacctggttcactgtgatctttggacctcccctgtactcagtctttctggttataaatactatttggtgattttggatgatttttcccactttctctggaccttcccgcttcgattgaagtccgacacattccccaccctcacacatttcttcgcttgggtatccactcagtttcgtcgcccggtccgtgctctgcagtgtgacaatgggtcgcgagttcgacaacaacgcctcccgttctttcttcctcactcatggcgtccagttgcgtctctcgtgcccctacacctctgcacagaacggccgagccgaacgcatgatccgcaccaccaccaatatgctccgatgccttctcttccaggcgtctctccctgccagctactgggcagaggccctgcacactaccaccttcgcgtgttcggctgtgcctgctaccctaacacttctgctaccgcccctcataagctttctcctcgctccacccgttgcctattccttggctactcccctgaccacaaggggtaccggtgtctggatctcacctcccaccgcatcatcatctctcgtcacgtcgtcttcgacgaagatgtgtttccccttgctggctccaccccacccaccgatctcgactccctcctcgagtctgatccgattcccctcccacccccggcgcctcggcttgcgccgttacctgctcctcgtgtggccacgacgccaccgcgcacgacctcttccgcgcctcgcgcggccccgtcgaccccacctgcgccacgcgcggccacgacgatcatgcctgcgccacgcgcggccacgtcgaccacgcctgcgccacgcgcggccccgtcgaccccgcctgcgccacacgcggccccgtcgaccccggctcgcttcgccaaccccgccctcgtctaccatcgccgtggccacgccacttcctcggcacatcccgactcgggcccatcgacgagcgcggcccgattcgccgaccccgccgtcgtctatcaccgccgcgagccgaccatacctgacgctctcgacgtcccggcggtgcgctccgagtcgtccatataccacccggtcgccatccaccgcgaccccgggcacgtccacctagggctggaaacgagccgagccgagctaggctcggctcggtggaatagcgagccgagccaggctcggctcggtcacttcgcgagctcggtaatgaggctcggctcggctcgatataggctcgcgagcctgtacactcaagtactcagcaacagtaattgcggtcattagctcaaatttaaagcacaatatggtccatataataaaaaaattatgtcattacactctagttccttgtgagttgtgaccaaaacaactagggctgggcattcggtttttttctaaactttggttcggtttttcggttttaaaaaacttcggttcttcagacattagaaaccgatcggttttctggaaaatgaaaaaccgagaaattcggttttggttttttactctggtttttcggtaaaaaccgaataccaaacttatactcaagacaatacatacaacaagtttacatgatagattacacataatttaaaaaaataaaaatcatataggaacaaatatttagagataaatcatacatcacatataaataagtgaataataatttaattgtatcacacatttagttcacacaatctaatagccaaatttgagaattgataaagtttggtattcgatttttttggtatttcggttcggtatacggtgaaaaccgattacgataccgaaaaccgaacttattagatacaaaaaccgaaaccgaaccgaactaccgaaaaaccgaaatttcggttcggttcggtacggttcggttttcggtttatggtaaaaaattgcccacccctaaaaacaacacacggtcactggatctagatgactggacactaataaacaaactgacaactgataggtgatagctgcagtagtttggaccgagcctcgagccggctcgcgagcctcaccgagccagctcggctcggctcgttagtgtagcgagccattgaattaggctcggctcgggctcgtttaggctcgcgagcctcaccgagctgagccgggcctgatcgagcccgagccggctcgcgagcctcgagctttttttccagccctacgtccacccgatggtgactcggcgcgccgctggcgttctccgccccgtcgaccggctgatcttggcagctactacgtccagcaccccacccgacgcctccccggtgccctcctccgttcgcactgccctcgccgacccacactggcgtcgggctatggaggaggagtacgcggcccctcttggccaaccacacctgggacctggtgtcgcgtccaccaggcaccaatgtggtcaccggcaagtggctatttcgccacaagctgacctcggatggctccctcgaccgctacaaggcctgttgggtccttcggggcttcacacagcgccccggagtggactacgacgagaccttcagccccgtcgtcaagttcgccactgttcgcgccgtcctctccctcgccctctcccgcgattgggcgatccatcagctcgatgtcaagaatgccttcctccatggcactctgacggagactgtctactgcagccagcccaccggcttcgtcgacgccgaccgtccggatctggtctgccggctgaaccggtccctgtacggcctcaagcaggcgccacgggcatggtacagtcgcttcgcctcctacctggcctccatcggcttcgttgaggccaagtcggacacgtccctgttcatctaccggcgcggcgacgacaccgtctacctcctgctctacgtcgacgacattgtgctcacggcatccaccgccgaccttctacaccgcacgatcgtcgcccttcagcgggagttcgcgatgaaggacctggggcccctccaccacttcctcggcatcaccgccgagcgtcggccccagggtctcttcctccaccagcgccagtacgccatcgacatcctggagcgggctggcatgtctgactgcaagccctgctccacgcctgtcgacactcaggcgaagctctctgaggacgacgggcctccggtcgccgacgcgacgtcctaccggagcctgaccggcgcgctccagtacctcaccttctccaggcccgacatcacatacgccgtccagcaggtgtgcctgcatatgcacactccgcgggagccccatctcaccgcgctcaagcgcattctgcgctacctccgtggctccctcgactacggcctcctcctccgaccgtccccgacttcggagctcgtggtctacaccgacgctgactgggctggctgtcccgacacgcgccggtccacctccggttacgccgtgttcctgggcgccaacctcgtctcttgggccgccaagcgtcaacccgtcgtctctcgctccagcgctgaggccgagtaccgtgccgtggccaacggcgtggcagaggcctcctggctgcgccagctcctccacgagctccacagtcccctccagcgcgccaccctcgtctactgcgacaacgtcagcgcggtctacctctccaccaaccccgtgcagcatcagcgcacgaagcatgtggagatcgacctgcacttcgtccgcgagcatgtcgctgccggtgacgttcgggttctcagcgtccccaccacgcttcagttcgccgacatcttcaccaaggggttaccgtcgagtgtctttttagactttcgatctagtctcaacatctgtacatgatagagttgtgactgcggggggtgttagactacccgtctagggtttgtggtgttccccttgtaattatcgtcatacccccagtgtaatgggcctggcccagttacttactctattaatactactcccaaccctgtttagggtatgggttcacattccaacagctactactgcctggctcgtggttttaattctcaaggatgatttactgaactcagtgccttttgctcagtggtgtgtggaccttgcagtcaattatattcttgttagttgttagtttattgctagtgatggcctatttggataggaaatttgtgatttaaattcctaggatttaattcaaattgtacccaaatccaaaacctcccctcatccaaacatgctttattgtgaaagccagccagggttccatgttcatcaagaattgtgcacatttaggccaattaccaatatgactggtgtatatgttattaccttattgcaggatttcgttccattg

SEQ ID NO: 232 - DNA, 1198 bp, Zea mays
  Intron number 5 from transcript GRMZM2G029029_T01 (locus G RMZM2G029029) derived from phytozome v7.0 (chr-ID 5; pos 2 04086905 to 204088102)
taagaggtcgtggcagcatcaaagatccagcacgggtaaacattcagaatagtgcctcttaatcttatggaattggtagttagatgtactcagaaatttggagaactggagtttatgtatgaaatatgaactacttatatggacttgatttgtcatctataacgagtcattcaaagccagatcaaccctgatagcatctggctaggtaaatatgtagggatgacagttggacccgtgggtatggatacccgcgggtttcgtacccaccggatatggatacggccaccggatatggatacgggtacaaaaactcactcatgggtcctatcggctcggatacccgaaatacatcgggtcgggtatgggtaaaatactttacccacgggtatccagtggacacccgaaatatcaatatacctctttaaatgtgctacatccattaaaaatgtgctacattcactagaaaaactcacttgcatgtgttgttggttaatgaatattaatttgtgttgtgttaacatgcaactataatgtaatcgagaccaatgagacattgccaatgttataactgtcatgaactcattaagcttttattctctgtactcaaatttaaatttattggatgtgataattatgagttgagatattgtatcgacgtgtagccaaatatagtcattctcgtgttgcattggtgcttagatgtaaactaaaatattttatgcatttattataacattgaccaaatgttatttagtctacaataacatatccactggatacccgatacccggtggatacccgatgggcatgggtacgggtacagtttctcgtccgattggcttggtgggtatgtatatttgtagaagtctcgggtacaatttcgggtcgggtattattatacccgaacaaaacccgacccgctgccatccctataaatatggttgttttatagtttgttcctgcttgatttttcaaatcgttttcttttatgtaccttcccattctgtgccttggtatgaaagacaacactggctatctgatgattaaaaaaacactttctttctggaacttcacagcatgggaccatccatccttagatggcctgactacctttatgcatgtgtccatctagtggattttctgtttacttagtgctatgggattggggatcgcttatgctgttatttttcaggaggaa

SEQ ID NO: 233 - DNA, 2841 bp, Zea mays
  Intron number 4 from transcript GRMZM5G883871_T03 (locus G RMZM5G883871) derived from phytozome v7.0 (chr-ID 8; pos 1 1389386 to 11392226)
ggcaacttgtgcatcgggctactcttcaccaacaggtaccctcatcctcccccttcttgtggctcttgattttgtgttttcaactcgtctctgtggtttgttcttgcaaaatctcataacacatggtcacaaatacactgacatcaatctgtcatgacatgcctttatttgctagacaaagatcgttttatcccatgtgtttgcagagcgggcagcctgcctcccgctgacaacagccacagcagtagtgcagtgtgcactgtgctttttcactgtcatcgagcttgctcaacgactgagtcatctacaattgagtgaccaaataaaatcagtaaaattgcaaaagagcattacatccatatttttagataaaacatgttaccaaagacattattgtattcaggcgttaaacaacatgtatcttgcagatttaccattatccaggcttaatctttactactctataagagagcaaagtaggcgtccacctgcttcaccgtgcctccgctcccgtgattcgcgtgcccccacccccgtgatccatcttcgcctgatgaacgcatgtgctccttcgtcctcgtccgtcgtccttccgtcgtcctcccccgtgattcatctttgcctgcatgtgctccttcgtcctcgcccgcgccaccacacctcccccgaaacctcgctgccacccctccacacgctccttatcacccacatcctgcctccctcatctccagttcttctctcgcctcctctgtacacacctcgccgcagggtgcatcctcaagctcgatccctccccggcctattcgtcgtgacctctcgcattgccggcaacgacgctggctccccgcgcaccgcatcctcatcatctcgagcctcgccacagggtccttgtcctaaggctgcatcctctcatcgctctcctcccgcggcgtccacactgtggctctcgacctccccggccaaggcctctctccatcgccgccctctgcgcctggacaagcgcgctccatgtcatcatgaactacgacatcttccacgcatgtgcggtctccttcctcgcccccgctcaagcccaagaccacagcagcaccgctcccgatgcccctccccccgccctcgagccccgagacattgtcctgcccccacccgccacacccgcctcccgagcatcgaggtggtggtcgaatcgacaaaggtcgtgtccccgccgctcgcctcctcgccagctccatccgcccctcgcaaccctctggcctcgcccagccaagctccctcctactcgtcgcctcgtctagggccagggtcgtcgtctctgccctacgggcactgaagcccctccgtggtgccactcagcgcccccatcgaccaatagtgttcctataaagctaattagaaagatgtaaatgttgaacggaggctgtccttggagatccgggttcacagggagcgctggtacgtgcttagtttatacatttattatgtagtttacctttgagagaatcatgtccctcctttttgctacttaatattaggttcatgttattttggtattgttagatacttagattggcccttaaggcaaaatcgtgtgtttgtgatacatgatgtgtggaagcagttaggcagttcaattaggcacaagtttttttacctaaaaaagttagcccttagcgcgatgtgacaagctacgattgtgcatttgtgcttcttccatgttgttctcgataatttagctctcccacaatgaagcactgcaaattattagattcttgtggcagtgtccacaatggggcttgtgatttctgcagtgtgaactgattccacatttctactagcttttgagttgcagaaattacaggtcaactaatacaacaaggtttatatgaagcttaaacagcctcataaaaaatccattgtaggcttgtatacaaattaatgccgcttgtgaactgattccaaaattcttgccacttgtttgctaactgctctggactcaaagttactgctgcagtaacggtcaaactctttacacgacaacaccacttgcatgtatataaataggatcaatctatttttgatacggccatgttattgatttttttttgcatgctactctgatttggtcagaaaaccatcactgagaaagagcagttagcaactggtgttgtcgtgttgcgactcaaaagggcttgcctatgggcatccacataggagccatccccaaatgctgactgaccaaagtatgtatccctttcccttttaggccttgttcgtttgtgccagattgatgggtcggaacgattcctaaccggattgcttctctaatttatataaactttgattagctggaacgattccggtgcaatccgacggaaacgaacaaggccttaaagatttttcaagttagcactatcaaatggataaaaataaaaatgttatgtgccatggatttgagacatcatatttgtctatcaattgttttggtggctttactggcttatttggtagaaatctgctcctcaatattagaaatatgtgtacgcattgcagaggcaagcccttttgagtcgcataaatttagatacctgatcctatcacaattcaaaaggataaaatatattggaatttaccataatgcgaaggtaggatgtcattacaaacacaagaattcagtaactagggaaagttaagagcactttccactatggacaaattatcagtgctggatgaaaagtgtcctttcattttgaatcatcattggtctattttactttgtgccaaaaaatgatcgtatcaactttgtattactgaactctgctgttttctgctgcagtgttcggt

SEQ ID NO: 234 - DNA, 9682 bp, Zea mays
  Intron number 1 from transcript GRMZM2G576932_T01 (locus G RMZM2G576932) derived from phytozome v7.0 (chr-ID 2; pos 2 11126531 to 211136212 reverse strand)
gaaaacttctatattgatagtgttgggaccatacttcgtcgccgaaggtcctgcaggaagaaacagcttcgtctgaagctgtccgcatgtgatgaccgaaggttcctctccatgaagcttcggagctgcaaaccgacttaaaaatagaatgaccgtttagtccataaatgtttgagtcgttgttgtaaacttttacgaggggcatgattgtaattcctcacaggctgtgtcctgtgcctataaatagtgaatagtgctcctttactgttcaggcattcctgtaattgcaatcgcatcactcgggaattattccttgccaaggcagaggtataaaatgtatctaatattatattcatatacatcaagtttatataatataaaaatgatgttgtttacctatagtttacttatctttagtgctttgtttctcacattattttatgcactctctaagaatttaattataaaagttcaaccttcgtaattgtgtcgttttaaccttcgtccaaagttcattataccctcgaggatataatgcttcagcggacgaaggacattaacgtttaacattttgtgttgccttgttcttaattcatagcatttgagaacaagtccccaacattggcgcccacctccggtgaactcacttccacttctctgagctgatggcttcgttcaatattcaagctggagctgcttcggttccgaagctggtactcccaataacggatgggtcatgttcagaccagccaacaagaaacagaagaaggaaagcacagagaagggtacaacatgtcgggggtgcaaggaacattcgtcaagtcaagatggtctcacattcctattaccttctcccaagaggacattcaactcaaggattcccacacaatgatgataaggttatctcttgtgttatcaaaggaattatggtccacaatattttggttgatacaggcagtgcaggggatatcatatttgctaaggccttcagacagatgcaagagcccgaagataaaattcttgatgccacacatcccgtcgaggcttcggaggaaggcagatagtagcactcggtaaaatttaaatttcagtggccttcggattcatcaacaacacaaggactgaacaagttatgtttgatatcgttgacatggaatacccttacaatgccatcattggtcgtggtactcttaatgccttcgaagcaattctgcatccagcttatctttgcatgaagataccttcggaccaagggcccattgctattcatggaagtcaagaagctgccagaagggccgaaggaaattggacagactcaaaagcaatccataatatagatggaactgaagcttgtgagcaatacaagttcagaagggaaaaagctgcttcggctgatcagccgaaacccatgctcttatgtgaggatatagcagagcagatggtgctattgggatctcaattgtccgaagagcaggagaaaactttgataaggtttttgttcaacaataaagatgtctttgcttggtcagctaatgatctttgcggagttaacagggatgttattgagcactcgctcaatgttgacccatccttcagacccaggaagcagaggcttcggaagatgtctgatgacaaggccgaaggtgctcggaatgaagtgaaaagactcctcagtgccggagttattagagaggtaaaatatccagaatggttggctaacactgttatggtgaagaaggccaatggtaaatggagaatgtgtatcgattttactgatcttaataaagcctgtcctaaggacgagtttccattgccaaggatagattccttagttgatgcagcagcttcatcagagctcatgagtttgttggattgctattcaggctatcatcaaatatggatgaagaaggaagatggaccaaaaaccagtttcataacccccagtgggacatactgttaccttcggatgcctgaagggcttaagaatgctggaggaagcttcagcagaatgacagcaaaggttctccattctcagataggcaggaatgtactcacttatgttgatgatatcattgtaaagagcacgaagcaggataaccacattgctgatttacaggagacctttgctaattttagacaggctggtctaaagctgaatccagaaaaatgtgtcttcggagtaaagaaggggaaattccttggttgcttagtttcaacaaagggaattgaggccaacccaagtaaaatcgaagctatacttcgaatggagccaccaagtacaaaaaagggggctcaaaggttgacaggaaggctggcatctctcaatagattcatatccagatcagcagagagaaacttaccattctttgaagttctgaagtcagccgaagtttttcaatggggaccagtccagcagaaggcttttgaagagctgaaacagtatttgatagatctaacaacattaactccacctacgccaggggctcctttgttattatatgtggcagcttcgcactcagcggtaagtgcagcacttgttcaagagaaacttgaaggccaggttaagagacaggccccaatatattttgtatctgaggttctcagtttatcaaagaaaaattacacagagttggagaaggtactgtatgctgtcttgatggcttccaggaagcttcgacactattttcaagcttacaacataattgttccttcttcacaacctctgaaggatattatgagaaaccgataagctactggaaggattggaaaatgggctgcagagctcaatgaattttgtattgaatatgttcatagatcttcgattcagtcctaggcgttggcctacttcattgctgactggacgccaggggctcaggagaaagaaacaaataaagacgccgaagcatggacagtgttttgcgatgggtcttggggaaccttcggagcgggagcggctgctgtgttggtttcaccttccaaagttaaaacttgttatgcggcaaaacttgattttagttgcacaaataacatcgccgagtatgaagctctgcttttgggtcttcggaaattaaaggcaatgggaatcagaagggctatccttaaaattgattcccaagttatttctggtcatattgaaaaaagttacaaagcaagagacccgaagcttgaaaagtatctagatacagtccgaaggattgaggcttccttcgaaggtttctctgtcaaaaatattcctcgtggagaaaatgaatacgctgatctattggctaagtcagcagcccaggggctgcctgtaccttcggaagtattttttgaaacaataaaagcaccttcggtcgagcttcttgaaagagcaatccttaacatatcccctatttatagtgaagattggagaactgagatcatctctttccttcagggtaattttctttcagatgacgaagcttataacaggagaatagaagcaagagctcgaccatatgttataatagaaggggagttatacaagcgtggggtctgttccccattgctcaagtgcttatccagatccgaaggtatagaattaatgaaggacatacatgcaggtctgtgtggatctcacattggatctaggcttttgcttggaaaggtttttcgccaaggattttattggccaaaggcagcttcggacgcagcggaattggtccaaaagtgcgaaggttgtcagaaatgtgcaagagatcaaaaacaaccttcgtctttaactcagctaatacaacccacttggcctttgcaaaggtggggtctggatttgctaggtccattaccaccagcacaggggaacttaagatacgtggtggtagcagtggaatatttttccaaatggattgaggcgaagcccttagccacaataacttcgtttactattcaaaagtttttctggcaaaacattgtttgtcgcttcggagtgccgaaggctatcactgtggacaatgggacacagtttgattctgaagccttcagagaattttgtaatcaaatcggcacgaagatccattttgcatcagtccgacacccagaatcaaatggacttgttgaaagagtcaatgggatcataatgacaggaataatgaagtcaatcttcaatcagccgaggggaaagtggccagacgagttaatcaaagtggtgtggagtcataacacaaccatatcaagatcaacaggctttacacccttcaaactattgtttggtgacgaagcaataaccccagaagaggctaaaacaggatcaataaggacagtagcttcagcagagggcgaacacgaagctgattgctccgtagaaaaagatgctattgaagggatcagactccaagctgtggaaaacataaataaatatcaagctgaaacaataaaatggcgtgatagaaaggtcaagttgaagaacattgaaccaggacacctggtacttcgaagagtggttaaccctgaaacagtaggcaaattacagctgaagtgggaaggcccttttttggtagtatcttcgtcaagacctggttcctacaggttgaaggacttggacggcaatgacattcctagatcgtggaatgcggatgagcttcgaagatattatgtttagtttgatgtaattttttaaattcttttttgtggcacccttttcctttccaaagggggagaaaggtttttaatggggccacaacatgtaatttttcttttccttatttcaattctataagagcgatatcccccaaaaatgtaaatgtaaaagctgagaacgcaccctcaagtgcaaaagagaaagaaaagaaaacagggagaagctcaaaagtcgttcctaagggaatgcagagcttacagcgaaaaataaacgctgattccaccgaaagtaaaaggcgaagaagctcctaagggaggcttacagcgaaaaataaacgctgattccgccgaaagtaaaaggcgaagaagctcctaagggaggcttacagcgaaaagtcaacgctgatacaccgaaaagtaaacggtgaagccgaaaagtaaacggcaaaaagatttttatcattcttgagagaacgaaggaccgtgattatggtttttttgagcatgtgctctaatattcatttgcacatagcatatcatcatgtcatttgcattcatgaacattcatttagacatatatagaatcatcatcatgctacacaaaaaaagataggtgcttcagaaaacagagaggggaaaaagattcgaaggaaaaattttctatgcttcgttgtgtacgaaaagaagggaagatgtttttcgccttcggctcaaaaaagaagtttcgtccacagcaaagcagactggatgcgattaaagaagacagaatatattacaaggtatgtacaaatttacataagttactccatatctatattacaaaagtttctccgagaatttttgcaggaaagcacattataaacaattttaagcttcagctaaggcttcgtcttcagttttgtcaaacttcagcactgtcaatcttcagcttcgtcatcctgcatatatcaaacagcacagtaagaaaggtgcaaatttcaaaggagagggtaaaagtaacaagcataagttttttaccggcttaagatggcttcgagcttcgtcgcctgccattttccgcccgccatttacccagatctgggtcatgaatctatttccgatgcttctggctaagcttgggatatctaacaaatctgaagttgacaggctgaagtttggtctgttcacagtgtttccatgtgtgcagccagccttcaaaaaagcagcagctgtgccccgagaagctatcagggcgcagaagtcagcgtgcccaccaataacttcgttaagggcgtcaacttcgccttcaatatgttctaatgtttttggcaggttttcagctgaaggtgtaaatttcgaagaactagctccgacagagtgaaacacgtccttcagccgctacacacaccgggcgccgaagcttaagcatttctcctgaagttctgtaaaggatttctgtaaatttgagtatttgtccactttagccttcaggcttgcttcgaaacatttcttttcttgctcgaatttttctgattgaaggagcagttcattctttaatttgtcattttcaagttgggcttcagccaaagagccttccatggtctgaataacaaaatccttcttttctaatgtaccttcgtgctctttgaccatgagttcaagatcttgaattgcgaagtctttctttttcagattggcttcgtgattctcaactttttcagccaaatcttgaatgacagctttgtttttctcttcctccagatcttgttgcatcttcagaaccttgcttaataatatactctgtcgaaatgaccttcgttagaacacgacccaaaagttaataataatagtaataaaataacaaaaatatttattaccttgaagttggcataaagcaagctttcggcgatgtggtgtcgttggtaacgacacaagtccgcttccagcttcggcaagccaatgcttttggaaagggttctgacaattttggtctcggtgcggttccgaaggcatcttagtttcccttcgttgaccccaccaaaaagcatagcccctgatttgtatccgcaagatatgacatattttttcaactcctctttttcggcgtctgataattcttgtccgagcaaatcttgaaagttgaaatcttattcttctgaaatttctttaatttgctctttccccttctcagttgtcgtattcactgtagccacggtagcttcctcttcagccatttttaggagtatattgtcaatagcctcaattgtggtttccaggtccgactcttcggtggcctcggcttcggccccggtagctttggctccgcccatttcagcttcagctccgcccatttcagcttcagcggttttcattccagaagcttcggcttcggcagtttcagcaaaaacaatttttgacaccgttgccggtggcggcgtctgatggattacgtctgttacttgaataattctccgctttttcggcttcacaggactttttgttgccgaagctgccttgtccctctgaaaaaacttcgtcagttccaatgccagcagacttagcctgataggcaagggttcagtcattaccttcataatctcttctacttcaatagcagaaggagaagcaggagtatcttcttcttggaccggcgtttccggctctggggatgcactttttctcttttttgccgtagccaccttcggctcaggatttaactcttcagcactaatgttatcagaatctttctttttcttttttgctgtcttggtgacttcttcgtcagtagtgctagcaatcctttttcgcttagggcccccagcatctccgcccagtcgaccgtagtcagcatattcaaagcctatggcatcaagcaccctgtccagccttcgtttcggccgtgtgccgaaggccgctgtcatcagttggtcctctttcttagagtaattcccaagaatttcattgctcattatttcaatcgtattaagccattcttggcagggtactttaaagtatttcttgaatttataatggtagggcagtcggacgagttcccccttcttcttttccccttcaagcttcggcattgtccactctttcatagttggaaaaaccctgaaggccaggaattcctgcactaaatctctagtgccaatatgttctgcaataattttgaattcgcccagtgcagcccaagttggaccttctacttccattctgcatcggggtcttgtttctccgaaggttaattcaagagggctctgaaccagcttctctttgtcttcgtcaactttgacataaaaccactctgatttccagcctgccggccatttgcttcggtagctgatcacgagaaactttatggttttccgataagcaaagttatagcaaccaaaattttcatgtaatccatcttttctggcttttgtttggtaatgcagctcatgaacccgacagaagctgtcggtaaatggctctaccgcctggcttcggagagcccagatatagacattgagcctgacaatcgcgttgggcgtcagttggtgaaaatagatgccaaatctttgcaacacgtcagagatcatcctatttaagggaaatcttaacccagcctttagaaagctcttgaaaatgactatttcatccttttctggcttcggggtagtttcttcccccccgaagcgaagtagcttcttctcattctcactaaagtaacccgacttcaccatcttggagagatcagccttagagacagtcgactttccgaagtccaagtggctgggcttgcttggcacggcaatgtggtaatcatcatcaggatcagcctcctcaatatttccttcttctgcttcggcagcaacttgttctgcttcggcaacagtctgctctgtatcggcagtacggattccttccgaggtcaccagtccggatcgttgcatcgcttcggagatgggaacagtctccgatccttcagcttcgcctccctcgcgctcaaccctagcggtagagcgcactctggccatttaattctgaattttttgggaactaaaaactttttcttccgaagttttttctcctgacgaagtaggctttaaactgcaagcttcatttgattgtgagagtcaagcttcggctatggttaaaaattttggcagcaaaacagtgcaatagcaatgaatgttgtggtaacttcacacctacccgtctgtttatatagtgctgcaggtaagaaggtgaatcgtcaggatttttacaccaggcgaactgctgcttacacccgctgcgcggtggaccgcagagaccaaatagtaactctgcagggtgggaccgttacgtgctcggaaactgaatcgtttctcggcaacgagctcagggaaggtgttttcggaccttcggcttcctgaagcctaagagacttttttcacggatcaagctcgttacgaaaaacaatctagcaccgcgaagggctactgttgggaccatgcttcgtcaccgaaggtcctgcaggaagaaacagcttcgtctgaagctgtccgcatgtgatgaccgaaggttcctctccatgaagcttcggagctgcaaaccgacttaaaaatagaatgactgtttagtccataaatgtttgagtcgttgttgtaaacttttacgaggggcatgattgtaattcctcacaggctgtgtcctgtgcctataaatagtgaacagtgctcctttactgttcaggcattcctgtaattgcaatcgcatcactcgggaattattccttgccaaggcagaggtataaaatgtatctaatattatattcatatacatcaagtttatataatataaaaatgatgttgtttacctatagtttacttatctttagtgctttgtttctcacattattttatgcactctctaagaatttaattataaaagttcaaccttcgtaattgtgtcgttttaaccttcgtccaaagttcattataccctcgaggatataatgcttcagcggacgaaggacattaacgtttaacattttgtgttgccttgttcttaattcatagcatttgagaacaagtccccaacagatagagtagtttcgttgcagaaaaaaaatactata

SEQ ID NO: 235 - DNA, 881 bp, Zea mays
  Intron number 1 from transcript GRMZM2G101518_T01 (locus G RMZM2G101518) derived from phytozome v7.0 (chr-ID 4; pos 1 80632903 to 180633783 reverse strand)
gccccgtctccgagcgcgagacgtcccacctccccgtgagacaccggatccgagctcccttcctctcccctctcgcgtaggcgattcggtcctgtttttttttttccaattggggtctcgctcgcgctccggattcgggcggttgggcgactcgggctgtgacatccgctcgggtgaagagcgatttcgcacctgggacgtcctatcgatagggtttggtgcgcgattcctgaggttttagtgttgattgctgctaattaggacaggctttggttggtggaactgttgctacctggcaagcgctcttgttttgttcatgcttaggatttgcttcttctgatatgagcttattcagaaatcggcgctccaatacagttagagctgttcactgggtcagacaatctgtgttcgtgaaataattttggtttaaggatgtttagatcattagatgcctatgatatgcgaaggacgcactgaaataggtttactccatcaatgtcgcatttcctttgtgttttcacttgtcatgtaggaaagttctgatggaaatcaagttctatccgcccttggttacatttcagtctagtctttttatgatgtcattggctggctgatagatgtagctgcaaggccaaagttgatcagatgtttcttttggtagctttccatttctttattctctgtcttttactctttcatgctgtagtaagttgcatgtcgtcggatgatgattgctgtacatgtgtttggttccagttagtgctagcacttactcttaaccatgccaggttttcagtcatcatctcatgttattgaaagtttagatttcaatttctttggaattttgcaggaggttgacgaagtgctagaaaatttggacg

SEQ ID NO: 236 - DNA, 8659 bp, Zea mays
  Intron number 1 from transcript GRMZM5G887140_T01 (locus G RMZM5G887140) derived from phytozome v7.0 (chr-ID 10; pos 82138061 to 82146719 reverse strand)
accacttccaattcgtttgtctttggttcttttgttgtatcataactaatgattcctttctagaattatttggtctacttttgttctagatttaacatatgttgatttaatggcatgaaatttcacttcattctggaatgaagttaccgtcggtcattctatcgttaaaaaaatctaggaccaaggtgaataatgtttccctggtggctcacacctactgcacactccttgcttggaggtcttacgaaaattttcacatttacatgatttagatttcatggtgaacttatatcttgcctcaagaagctttctaggtatagcgacagataagatgaaattcccaatgataatgcattgtctgtctcagaatgcctacagtgatgtatagttgtgtttaaagtctggaggagcaaccttgatgcgcttaatgtggatctacatgatttctttgtacaactttataacctcatactggagtgttgggggccttcgtcctccgaaggtcctaaaaaacatgatttaacaaaatcttccaagtgtgacatatgaacaggtaccttcggactcgggctaaaagcatgatcgtgacgaaggtcagaaatgctccgaagctacgcgcaggggagcttcggctaaatggcggaaaaaggaaccgacttaaaggggaaaaggctatctggtcctcatagagttgttcataagtcaataataaatgtaaagggcatgaatgtaatttctcacaggctgcgtcctgtgcctataaatagatgaacagtgcccccatactgttcacgctaaactggtattcgtttttgcgtcacacttgtacttttaccttctatcaagccgaaggtatcttttgtaattcaatattgtttctgtctttccaaaataatataatgagaatgaattaataatgttatatggttgtttatgttccctcttatattttatatacttttacttatattaacatatatcgcattgatgaaggtatatccttcataaccttcgtctgaagatcattatatcctaagggaaataatgcttcgaaggacgaaggacattaacatttaacattgtgtgttgccttgttcttaactcatagtatttgagaacaagtccccaacattggcgcccacctctggtgaactctttcgaccaccttcggcaagcactgaccttcgtcatgccaccgaagaaagcttcagcgccagggactgctgcactgcagccgctggacccaaaccaggaaactctttctcttcgagaggctcaaagccagaagaggaaagccaccagtccaacactctaggaggaagagttggactaagagatcagggacatggaaataatccatcagcaagtacaaaggaagaaggagaagatggcgcggctggctgatcttcaaaggaagatcgacgaagctactaaagaagtgcgtcatcttgctcaagatgaacaagatcgaaggccccaacacagggagcttcgtcaagaaggcttgttcaacgaagatggatggtatcctgattttaaccatgatacctttacttttgatgatgcttctcccttggcagcagaactgcaggctaccccatggcccccgtcatacaagccacctcagctcccatgtatgatgggcactcagatccaaagcagtttctgatgagttacgaagcaactatatcttcgtatggaggcaatacttcagttatggcaaagtccttcatcatggcagtccggaatgtagcccaaacatggtattcttctcttcggccagggactatcacgtcatggcagaagcttaaggacatattggttaccagcttccaaggctttcaaatgaagccggtcacagctcaggctctgttccaatgcacgcaagaccacgaataataccttcaggcatatgtacgaaggttcttgcgactgagggcacaagcacctacagtgcccaataatattgtcatcgaagccatgatcaagggtcttaggccaggacctactgctcaatacttcgctaggaagccctcacaaactctggagaagctgcttcagaagatggatgagtacatctgggctgacaacgacttccgccaaagaagggaggaagcttacagattctcggaaatgaccaggggcttcggaggaagaatccacccgaggcatgtcaggtcaatccataattccactcagagtgacgacaaaggaagtcagcctcagaggtcgcaatacacctcacaatcttcgaggcaacagcaaagctctttcaggccaccagctccaaggggcagaggcgctaggggctttgggggaagatttggggatcagcctagaaagatctactgcttattctgtggtgaggataagggccatactacaagaatgtgccaaatcaccattcagaagcaaaaggagatagcagaagccgaagctcggtagaaccagccgaagcaggtcttgcacactgcttcgtgccactctccctacataccaaagtatgtgggcaatcatcccacagcttctgctgcttcggctagccactcacaggcttcctggccacaactcccaccccaccaccgctactgccgacctattctcgaagccagccagaagggcgccagtattctcagcagcaacgtgaagtcagggaggaatccgaagctcgcacagtcaacaatattgtgctagaatcaaagcacatttattgagcgatatcctacctttgaagtacttttatgttctatgccattttgtattccaataaggaacaaacaatgcagaactagttttagtttcttgtaatagtttcacttttattagaatgtaatacatcttcttcaaatatttacgaagctcaaaaattgttgaagctcaaaagtcgttcctaagagaatgcatagctaaaaatcgcagccaaagtttcaccgaagctacaaaaagacattcctaaaggagcgcagcgtaagttttgtcgaagctacaaaaagtcgttcctaagggagcgcagtgtaagttttctgctcaaaagtcgttcctaagggaatgcagagccaaataccgccgaaatataaggcgaagaagttcaaaagacgttcctaaggggatgcaaaacttataccgccgaaatagaaggcgaagaagttcaaaagacgttcctaaggggatgcagaacttacaccgaaaaataagcggtgaagccgaaaaataaacggcaaagagatttcaatcgttcctaaggagacgcagagattgtgtgttttagtgtgggcgtgtgggtgtgggtcttcggcattgacatcattctttgcatcatatcatcacatcatctcgcatagcatcacatcatacatcatatcgcacctatgacacaaattgactacgaagtctatcttcggagaatgctctataaaaatgaaaatatgccaaggcacaaagtcgaaaaatacagcttcgtcagctctgttgcaaaagaagggattccttgtttatgaagcagggatgtttttacgaaggttggaaatttctacgaagcatggttgtttttatgaagcatggatattttcacgaagcacagatctttttctttatgaagcatgaaaagaaggaaaggtgttttttcgccggaggctcaaaaacggtacggtacgtatataaagtttcatgcatcgcaaagagctgaattacaaataatttacatattacattcaaaaatatgcacatcgaatattacagtattgttacagcaaaagttacattgatcatctagaaatgtttttacaatgagtactagtcctcttttaggaccttctccgcaacttcatttaacaacttggtaacaacttcatcaacaatagattcggccatattgatgatctctattgctttcttcgtttttgggtcggccagggggtcgaatgattccggtggaggaggtagctcagttgcagtagaaaaaattaatcagttcgaagtcacgaaaacaaacgtcgaagctaaaggctacaaaaacaatacctatccgtctcttgcgttctgcagcttcctcagcttttttcgctgcttctcgagcgtcatgaatatctttttcacttttcttcattattttgtgagccatttctaggccaccatttgcctagatgtcagtgtaaaattttccgcccattaaacttgcttcggctgagggatcttttgtatcatccatggagaaggcagcttcggtctaggtcagggttttgacatgatcgcaacccgctttctccaggatggctgaaattcctcttgcaccagagaacgcgcagacatccccgcgatcacttaaaatttcttcaaaagcttcgacctctccgcttatccactcgataacaccttcagggtcgcctcgtataaagttatcttcgttggaataggcgcccacgttggcgaagctagcctttatcttctccatgcagcccagggatttttcgaagcatctttctttggatgcgcgaagttcttcaactgtttttttctaaataatttttccagtattcactaatatctcggttggcctctgcgagaccacattttttctttggcttcaaccagctgtttctgaaggtcttcgatctcattcttttgaatttcagcttgagccttgaaactagcttcatcttcttttactttgtccaccaatgaaagtataattttgtctttttccgtggcttcatttctcagcctgataacctctgttcgaaggttgttgagagctatagtgcagctctcatcttcagcattcttttgcgcccttagggcattgctaagtattaaaccctgcaagaaagaataaaaggattaacatgagaataaaaggcttcattccagagttcataagcttcaaaattcacaatttctgtaccttcagactgttgtatgcaagactatctgtgagatcagccttcgtcatggcgcaaaggccaccttcgagcttcgggaaacccatacttctggccatctcctggcagacggataattctttgttgtccaggaggcagtacaaaaagtcatcttcggttgtcccattaaacactagggcccccttcggatactgcaattcctgggcataatgtttggcttcaaaaatttcttcttcggatagtcttttttcccgaagcatgtctaacgatataatcaaaaccttcggagagtgcttcgggagtaagggatttggcttctttggacacatttttctcaaaagctatattagtatctggagttattccttcggccccctactcggttggggcaagcttcgtctcagcaggcactgagggctctgcctcggtttcagcatgggttattgtagcttcaacttctatttgcttagtatcagctttgggttgcgttttgtcagcttcgacaaccttccctatgggaacgagacttatggagtcggttgtttccaatacatctaatacatttaccatcctccttctcctaggagttgtggcagaactcttttatgccttcagcgctgttgcttctattgaaggacttgaaatccctggcatctttgttacttattcagtttttgacattgcagctttatctttgttaaacttcgtttcaactaactcaatcgaaggtgccttcggcattataattggctcttcagtcctctgcatgggaggaacaatttctcttgattcagcagcagaaggggcttccccgccaaactcaggcaccacaaccggttcaatgtaacgcggccggtgggtaagtaccttcatctttttgcccgcagccttcggcataggttcagctggggcaaccaaagcagcagtttttctcttcttcccctgtccccgcagcgggtagtggtagtcagggtagacgaagccgatggcgtcaaaaactctgtttattctcttttttacccgacctccgaaggctacagatagtgcattatcttctgccttggaataagctccaagcagctcatcacttgtaacttcgatgcattttagccagtcatcgtttggttcatcaaatttatccccatatctgaatgtatacttcagccggaccagttcaccttcgctagacttggtgatggtctccttcagcatttcccagttctctacaagtggccatactctgaatgctatatgctcttgaattaaatctcttgtaccaatgaagaagcagatagtaccaaacgccttctgacacgcttcagcggcgtcatcaatttcaaccttcggctttcagagaccgaagcgggaccatatggggcgcataataacctccttgatgtcctccctcgctgtcaagtcgttcttcacataaaaccattcttccatccaatttccgggccatctcttccgaaatgttggcactgggtggcttgcgttgggacgggcgatgaatccataacaaccgaagttgttgtgatactgttctttacccatggccttcgtctcatacagaagttcgtgcatgctgtagaagcactttgcgctcggctctatcccttggcttcttactgcccagacgaagactcccatcctcaatatggcttcaagggtcaactgatgaaggaagatttggtaggttttcagcacttcaactacaaacctgctcagcggcaaccaaagcccagctttgaagaagcttcggaaaatcacaacttcgttatcctcaggcgcaggaacgttgttgtctccaccagccctcacaatagacatatcccgaaaataccttcccctcatgttttcgatgtgactttgtttgatggtcgattttccgaaaattgcatgacttggtctccagggtcgatcctcagaatctttgcccccactttccgcatcataactgtcactgtcaccagtatcttcagacaggccctccaatatctccttagtaatcttctctgtatttgtttttgccattgactcgataaatccagccatgtaaggattcatagacttcttctcctcaaaaagcttctcctcttcagttagcttcgtctcagcagcaacattcttgtcttcagacatttctccttcagagatgacgaaaatgcgtctttttaaccgaagctccaaaagcttgagaaactagcaagcgctaatgagcaagaattatgaaattgagaaaataaagcaaatggcacaagcagcgtatcaaatgtcgttggtgcgagttcttatttatacgctcagcacgctccaaattggggggcccatccgtcattgactgttgctattctagcaaagggaaggtgttttttcggaccttcggcttaaggccttcgtccatgtcatagtctgaattcgttatcttaaacaaattaatactgtgaggggctacttttgggggccttcgtcctccgaaggtcctaaaaaacgtgatttaacaaaatcttccaagtgtgacatatgaacaggtaccttcggactcgggctaaaagcatgatcgtgacgaaggtcggagttgctccgaagctacacgcaggggagcttcggctaaatggcggaaaaaggaaccgacttaaaggggaaaaggcaatctggtcctcatagagttgtccataagtcaataataaatgtaaagggcatgaatgtaatttctcacaggctgtgtcatgtgcctataaatagatgaacagtgccccgtactgttcacgctgactggtatttgcttttgcgtcacgcttgtacttttaccttctatcaagccaaaggtatcttttgtaattcaatattgtttctatctttccaaaataataaatgagaatgaattaataatgttatatggttgtttatgttgcctcttatattttatatacttttacttatattaacatatatcgcattaatgaaggtatatccttcataaccttcgtccgaagatcattatatcctaagggaaataatgcttcgaaggacgaaggacattaatatttaacattgtgtgttgccttgttcttaactcaaagtatttgagaacaagtccccaacatggagtatcggcctgatggttttgattctttactcttgatgatagttataaggaagaactctctctctctgcttttttaatctatagttatcatttgtcaaacaatccaagataacctgctactgtattattcttttcaaacaaaggtactcttgttagatagcaaagttttatcactaagactgtctccagcagtttacccatcttatctcctatctcattttctattttaaaattcacactatgaacagtgcagtctatagtgcaaaacaatattttgcacgacaatatacacaatctgctagagacaacctaaccatcacatgctgaaaatgcatatcatgcacttcatacattttttatcttctcttgccccaaaaaactattgtataatcttgaagaatgatagtattatgtccatgcttaattctaaattttcaataatgtagagacaatgttatacactaaatatttccatggtgatagttattgtctattttttcatccctatcttgatatttgtgccattttcaatatattttggataatcctagggatcattttccttcaattagcttatgtagttattaagttgtcttgtaccatgaaaatattttttctgttacatccagggatcacgacgaggtattggttg

SEQ ID NO: 237 - DNA, 1437 bp, Zea mays
  Intron number 2 from transcript GRMZM2G104481_T03 (locus G RMZM2G104481) derived from phytozome v7.0 (chr-ID 9; pos 5 9154097 to 59155533)
tttcgtagggggtgtagcctgggagacaactgaaggtagcgagcaattcttttgaatctaactatgaatctattttggtttatatcacgtgaagtgttgtagcaaaacacaatatattctgggaaaacaacacagtacaaatgagaattagttcttagctgtgttctgttagcataaaagaaaaatacgttgcaacatgttgcgctgcaaaagatatagctgtttctgtttttgtgagttactgatcaatttctgcattgagttggatcttggatgagtcactgatgcacttcgattttccttagctagtctaatttatgtggtaaaagcttagagttgggagctactgctgcctccattatattgatgatggaaccaatcttatattttgtatatctctctccatcatattgatggaagcaaccctatactttgttttcttgttggtgtattctgaattattattataaaacattgctgtttggtgatttgtgccagcctacttaatggatttcagaaacatggcaattctgaacatttagttctttttttcatgactgttgctacataatctgtctaattactaatctggttatgagatgctgttccatgtttgtctgctccgttattttttgtgctgatcagctacttattgtgttgcgatgatgatcatatcaatacatccagacatgctataaattattaatcagtatgctttattttatgcaattattctggaactgtatataatttgaccaatacagattggacttcagttggcgcattggtaggagatgttctgctttgatctgtttgataacttagaactgataattgtgactcattgtgcatagatgtgtgaactagaaaacagtaaatgaagttcatttcaataatttagtgacaatgtgggtgaactggaaaaatagagttcttttatttgagaaatcgaatgacaattaagtgtgtgtttgcattgatgttctagaattgtttgtcagtttcttgtgttcctaacttacggattataggagcatcatggtcttaatgtcacattattagttcgcaatctcacatggtactgcactgtagctaactagctaaccatagttgtcttcaagatgaatccttcgcattaatgatcctccaaatctactccaaaattgtatgtgaaccttttacgagtcatgttgttcattcacacttattttagtatctagtagtgccaagtatctgcagctacaaaagaaacattagaatatagattgctgatctcatagagcaataagtttttgttagattagattgtgttaacttgtttatttcactcatcttttgttacatgcaccatttgcatgagcagaaacattcacaaagcattttcagaagtatggagctataactgattctgtgatcatgaaggacaagcatactagg

SEQ ID NO: 238 - DNA, 7241 bp, Zea mays
  Intron number 4 from transcript GRMZM2G078360_T01 (locus G RMZM2G078360) derived from phytozome v7.0 (chr-ID 8; pos 1 0930597 to 10937837)
ctccagaccaccattaccttgaaaacatagcccaggtgaattctcacactactgttcttatgttattactccctatgttctaaattgtaagttgttctagcttttactatgtatctatacataatatatatttaggaaggtagcaaaagctatgcacttacaatttggaacagaggggaatattatttatttgtactccctctgtcctggtatataaggcgtaaccactttttattctagtcccataatataaggtgtgctctctctagacatgcgtacatcgatgcggtagtatagagagaattaaatacatttcttggtctttgaatcaggggtgtatatcgggacaaagggagtagtacacttgttgataggatctagaatcctattgcgacaacacaatttgtattgtatggataggatattgacggttggggtgtatacccccggcggcgcacatgatatacaagtcataacatctctccccgtctctttgaacaacccatcctcaagttggatgttggggtaggggtccttgaattgtggaagtggctcctaagtggtgtcatcgctgggtaggccgcatcactgaacgaggacatgacaggtgtcctggtgtagatgagcgctcaacacacactctagcttgggtagtagtcgaccatcatgtatggttggtgtgggtgattgagtcatcgcctcatcgggggagtcccacagaacggcttgagcagccccacgtggaataagtctccacgatgagtgactactggaagctaaaggcgataagccacctgcccgacgcgttccagcaccgggaaggggctggcatagcgtggcccgagcttacccgtgagtcgggactccaacgagtgtgtgaatcggtggagacaaccacacccaatcacccaccgcgaactcaagctcacaatggaggttgttgtagtagcgcttagcatacagttgggcctagagaaggcactcgtgagcctttgtgaggaaggcattggggtcgcacaagagggtgtcaaccgcctccgactgaggtgtccttgtgacgtgctgaagaattggttgtgggggacgactgtacaccacctggaatggtgtggtgctgagcgccatgtggaacaaagtattatagcaatattccgtctaaggcggagtcaacctaggcatgcagacgatccctcgtggtgcaacagaggtacattatgatcaccttgttgacgacctctgactgaccctctgtttgagtgtagatcgccgtgctcaagtggagcttgacactagccatcttgaagaggtcatactacatgtgactggtgaagactgggtcgcagtcgttgacgacgaatgtagggaagtcgagtagatgaacaacactcttgaagaatgcctttacctggacacctgaggcagcggaggcgttcacgacactcaaggacatcctctccatggggctcgtcctacaaatgctagacttcgaccgatagtttgtcatccactgcgacgctttgagtgtggacactttgggtgtgggtttcaacgttgttctccaccaagggtggtcccctagccttcttcagttggcccttcacctccggtcatcacaagctggcagcatacgagcgtgaactcatcgatccagttcagcatgtgcggcattggtggccgtacctctggagtcactgcttcctcatccgcactaaccactacagcctcaaattcctctcgggccaacgactgtcaactgttccccaacacagtggatcagcaagctattcggcttcgatttcgcagttgtgtactgtcccgatcacctcaactcggtgccacatgccctctcgcatcgtgacaccaacatcagtgggaacttcacaacgttgtacaaccactctaggcccttgttccacctacttgatgagatccatgccgcaaccgcgaacgatgaagaggttggtcgccagtgattacaagttgggcgaccagctggtcgggctataggaccgaccaggcgcctaatcgtgattagggtgacgattaggacgcctaatcagtcatggtaagagataggatcctgtgaagtgtgaactatgcaatctacagacatcctatgaagtgtgaactataggattgcagtggacaatggtaagtggtaactggtaagagataggaaagggagaggaggggaccaggtgctaccatcagatgacgagctcatctcgactaagggagtgagggtcaatggctcactgctattggtctgctcactgctggactggagacgccggcgtaggtgactggagcttggagccttggagtcttggaccaaccgccggtgaaggagccgtggagcttggagccttggactagctgccggtgactggagcagtggagcttggagctcaaacaaactgtgaagaaacgtttagatcatgatctattaccacccttgcattggctaataccatcgactatgaggggatacaaaagactatccaacaactcggtgacatggcgctcatcgttgtccatacacgcgtcacataacaacacaagacgccgacccagcacccgggtggtctccttcagcagttcaatgtgccgttcctaggtgtgggctgatatctccatagacttcatcgatgtccttcctaaggtatacaggaaatctaacattctcaccattgtcgatctcttctccaagtaggcacactccattgccctcagccacccagacatggttgtctcggtcgcccttgcccatgccttcacaatgatcgtgccaaagtcctgcatgaactttcggtattagccgtctagccttaggaagttgtgcacgacctagcgagcgaggctcaggctaggacgagacggcttcgaccttgtcgttgtccatggtgatgttggcggagataatatggacaagttaggcgatcaacgccgcctcaaaagtgcactttgaccacttcaagtggggtcgtgtgcaccgagggcctcaaagacgagacgaacatgttgcaggtgctcagactatgaaaaattgtatattaaagtgttgttaaagaagacgagcacagacctatggatgaaatcctggaggacgtcgttaatcggtgcctagaatgtggtcgacgcattagagaggctgaaaggcatgacgaggaattcgaagtggttgtggttggtacagaaaattgtcttctcgatgtcctcaggatgcatcctcacattaggactgggcattcggttcttcggttcggttcggttcctcggttcttgtagatattcggttcttcaaaaactggaaccgaaatagcaagataaagaaaccagaaccgactagttcggttctcggttcttcggttcggttcctcggttctaaccgaactataacagtcactctaaaattctgaataacgacaacttttgtgagaaatttcagcaacatctccccacaaacaacgacaagtgcacaatgaccataatttcatagataatacatggatgattagaggttcaacataggtcgttaacacaacatccaaagttacaaacacatgtaacaaattgaatctaatacttttgggtttttcggttctttcggttctttcggttctttggagtgcagaaccgaaaatatctcatttatttcggttctcaaattaccagaaccgaatttcataacggttccttcggttcggttagttcggttccggttctcggttatttcggttcggttcctcggttccggttctttttgcccaggcctacctcacatgatgatagccggaccacaagtctaacttggtgaagtacttggtgccatggagctcatcgaggagatcatcgatcacagggatggagaattcatccatggatgtcttgtcgtttagggcatggtagtccatgcagaacctctaggagtcctccagcttgactagcagcatgattgtcgagaatggagaagtgctcggttggatgatgccttgctctagcttgtcattgcaccgctactcgagctcatccttttgcagctgtgggtaacggtaagggtagacggccaccgacgcggtatctgacagtaggtggatcctatggttgtacgaccgcaccagtggtagctcgtggggcttgttgaagatcgcatcgtactgctagagtagacggtccagcaacaactgctggtggttgtcggtgacagagcggaacaacagtggtgtgttgttgtgaagggatcccacacccgcccataggatgcaacaatcacctccctagaatgaatgcagagggcctcaaaatccataggatgggtcccaaggtttggaggtagtcgataccgagtgcaaggtcgaacccacccaagtcgatgccaaagcagttgatggtgaactccagaccaacacacatggctacgttgcgtgcgacgccctcataaggaacgtggttaccattggccaccatgacccgcatgttggtatggttcgttgtcgctagtccgatgcggtgcatgactccggtattgatgttgttggtcgagccgttcatgccgatgaccatggatgtaggtgtggaggtgcatggtgtccgtggtgtgtatgttgacgatggcgtggagggagacaactggggtgttgggcccatcatcaagggccacctcgtcgcccacttccttgggtacctcgtcaagcaggtagtcgatgaccttaagatggaacaagtgttggcactggtggccccacacatgtggttcgtcacaggtaacatagcccttgacgatggcactcgatgatccattgtgaggcaacggaactggtgttagggagaaggtagggccaccataggaggtggtgcaggcagcataggcgcagctgcagccatcgcatatgtgtgttgtgggcctagtagcaccaatcacgagggttggggaggctaggagacccgtgacatcgtggttggcattgtggctacgacttgacagtcgtaatcttgcgccaggtgcatggacgtctgcaagtcctagggttctcggagctcgacgtcgaaccaaatatgcttcagaatatcctcgacggaaaggttgaccttttggattggcagaagatttgtcgtgtagctcaccagcacgttgaagcactcctggtagttttggaccatagcatggaaggggacctcactagttcagcaagacaattgctatggatggctggaccgaacccgctgatggcaaagatccttgaatcgctcccacaatgacatgtcctcatctgtctccaagtcatagtaccatgtctgggctgtgcctgtgaggtggtaggaagcgagccagacgatccgaggcgagtgtacgccacccacataaaaactgcttgtaatggttgagacagttcaggggtccaccttgacgccgtaggtggagaagtcgagcttgttgaagcgaggaacgttcaaatcggcgggcgcgtgggcaacgtctacagtagagggcgcccgcacagatgagaaaggcggtccctgcggaaacattggtagcgaggaaggtgaggagggaaagttgatctggtggatggaaatgggaaaggacagggcagtggtggctgttgcggtgtgcaagagtgtggcgggcgacgcggcgagcagggtggcacaacggtggcggtggaggatggggacatcgtcaccccctaccccttagggaaaatcttggtgcatggcgcccatagaggagggcgcctgttggttctctagtgacgacatgcaggtggggagattgccttgctgtatggcgatgtccaccaaggccttcacagtggtgttgacggccggtggtggtgggatttgcagctccttctaggagtcatcatcaccttgtatctccggtaccagattgataggatctggaatcctaccgcgactgcgaaagttgtacagacaggagattgatggccgaggcatgtaccccggcgacgcacatgcattaccggtcataacacttgcaccccgtttggatgtagatattggagcacagaattgggaattggaaccggctttcctaaattctgttgtttggttgcatatggaattgagatttggaatcagacatgcaattccatagaattggactataactataaactcccttccaataccgagcgtcatccctatgtattgcgcggaatttgaccgcacaattccaaactccaattcagtggcatccaaacaatataattggattcacatctcatttcaataccatgactgatttggtattgagcccaattcaattccataccctccaatatcgacatcaaaacggagcattgtattcttccttatctgaattatgaaaacaattcttcaattctgtttacattgttggatactacctgtccaaaatatagttagttatgagtttgtcctactccccccatcctgaaatacaaggcatagttctgggacataatatggtgcaatgaaaatgacgcatgtaacctcccttaatcgtggagagcttatgactagctatttgggctggtataaacattaatggcaggtagcatgtgaatgctgtctttgtaaactgagttaggatgccacttcacctagaatccctgtaaattgtgaaattttttgattgtttgagtaccttatgtttcaggacagaggtagtaagtcaaattatttacaattttgacctattctgtaaaacaaatgataaacatctgtgacatcaaatacaatctgaaaatttacatttcatagctgatctaataatactactatattggtttcccaaatgatattttctcctataaattgggtcaaacataacatggtttcgcttaggacaaacttacaagtatacatattattgtatggagtactccctttggtcatggtagttgacttctctgattgcatgtagttgaggtatataaaattcagcgatccatatctatttagatttgaaaatgtgagtaaacatgtcctgaaactcagtaatttactaattttgctctatcttataaacatacaagaacaaaagttagtagggactttgcattttggtgactgttttgatctccaaaatggcaattgtttgtggctggagggattttttttggtcggcattttactgctgtagtcaaatatgtttccgtatgagatttcttgcttacatatagttaaacaatgttctggcagggcacgggtggaagaaagtgggtaaaaaaagtaca

SEQ ID NO: 239 - DNA, 1053 bp, Zea mays
  Intron number 6 from transcript GRMZM2G070284_T03 (locus G RMZM2G070284) derived from phytozome v7.0 (chr-ID 2; pos 1 53863668 to 153864720)
aaacctgggagtgggttgatcttaaagaggtagaaaattgctatttgtaatgaaaatactttggtcacttgacattttttatatcttcctttttgatattcttctgattttttaatttgtcactggataggcaagatttagtttaggatcacttggtttcacagcactagctttcagaaaattatctttgtagatggtagtcacaccaattgtgagtgtgaaggtaaattttactttgaaatttgccaccttaaatataatcacacacatccatatactgtatcagcatggacttgtgctgatggacaactaaaactgatgtataaagagaagtacacaagctggacagcagaatataaagttggcatctctatgaaattcatataagcagtaatcatgcaaggggctcttgattgtataatgatatactagactgatacaaatgcagtagccttgtattttagtaactagcatatttttatttgtgccaatcttctgtttaccaaatcttgctttcgatatgattggtgttcatccagattagcatacttttgggtcatgttcttgtgaaatatttttaatatagttttcctcaacgacattttacactgggtcaatgttgacataataatacacacctgattgtggtgtcaatatcttgtgcaaatgagcagctgatggctggtgctgtaacctttcaatttgaagggagcttgttgaaattctattaataactttgtcagctgtcagtggtttactgtgttagtattgctgattgctatctggtttggattagtagtgattgggttatttctatttggttcattgattttctagataataaacacaggctggtagcatttattaattcaagtcatgtcatgcttgacgtaacatatattatcagacaaaagccaacattgatctctctcctaccttgttcacttctttcaaatgcattatctggccatgcatttgtgtccacatttatccgttactgcacatcaaaacctttaatttgatggaattgtggtcaaaattgcttgagtacag

SEQ ID NO: 240 - DNA, 5161 bp, Zea mays
  Intron number 1 from transcript GRMZM2G378907_T02 (locus G RMZM2G378907) derived from phytozome v7.0 (chr-ID 1; pos 6 0095306 to 60100466 reverse strand)
cagggaagctcacgttccccatctcacttaagcaggtttgtgctcttcggtcatcctcgttgtacaaatagttctattaccatcttgattcctgatgatgcttactgcttacgaagttagggcgataggctcggtggtcgtactcacttagactgcttctaaccctggtagctacggcgacggctattatgcaatcaggctttacgtgcaagcctcctggtccgttggatcatatggcccaatcatagatataactatgatttgttagagagttttttttgtataaatctatgcgagttgatggtggaagggttaaagtgttaaatacgacatatgattggatcatgatctaacggaccaggagactcgcttgcatcatgatctaacggaccaggaggctcgcttgcacgcttgcaactggtggtcgttactgactggtccgactccaacgctaatcggttcggttagccagtcagtagacctgccgaccggtcgatttaattggtactgaccgcgttgaagccggaccggtcgataccgacctctgcgttggaggctctgatcgctaccgactcaaactggtcaataacgatcgcctttagccatatatcgtgttctggttggttcacttttgaccgtttgaagtccaaaaaataaaaaatctaaaaatcgctagaattcggcttataattagaggtagtgtgtttgagttcattcatacccctaccctctatttcgttcatccttcttcatattgtagctttccactccctatttgagtatggatctaacgaattttcaaaccttcaccgacttgatcaacgaacaatctccataactttctgacgcccctggtagcgtggatagcctttctcctgtacatcgtcgatgggaggatgttttgcccatccccgttcccttactccacaacatctgtttcatactcatatccttcccctatgtaattataacagcttagcacaagcaatcaagaataagcttgtcgccgtttcctgcaagttaactcttattactggtattatacactttaatcgtcttattaaggatttgttttttgaacatcaattaaggacttgtttggcatgaggagtcaaagcacttgaaaaggagccacaaatggcagctcctccttcaatcccaaaaatagcttcgactcctctaccattcactcaaaatgggatcctcctcttaaagtgtttgatatggttcctctgcataagctactgccagagggagccggagccatgccaaagaatcactaaaagattagatttctaggccccttgcgcttgcttgatctcttaggattagattgtgcctcccttagagaaactccaagagcatagttaaatttggatctctaaattggctctctaaaataatatatactcttaaaatagatacagtccgcagcatcattactataaatcaggttttcatttttcaaagccaccacatcattactattttactaattttggttggatgggatccatggtgggttttaggcttttcaaaatgtgtgttggtagctggtagggtgtgtacaaacatggcgcttcgcaataatgccatcccaaacaattgtttcgcagaaacggaactacaaacaccttctaattgattatactaccatttggcgtatattctttcttttataaatcatctctatgtattttctgcctgatgagacagattttcccatctacatgctatcgtgtttacgtctaatacacctgttctcgttcgtctcctgtgcacgtcatcccattgttccggccaagagaactacgtgatgcatacatcttcaggttttggccaagagaactacgtgatgcatacattgttctatagcccaattcaatgtacaagaaattcaagcggaagatgccggggctgggccgcttctccatactggagatcgtcctttatggcattgcttcctgaagatggatggcgggcctcagctcaatagcaggaactcatggtcgtggcaccacccagcctgcagcagcagcagcagcgccggtttgcagcccactcggtccatggcctctgttggaatctgggacactctcaaacacgaagagccgagtttattcctaacagcctcggctgccgcggcgcggacgttgaccaggtgcgagcttgtggggcggggcaaccaaccgaccctgccaggaagttgagatgcgcgtcttggtgcccggctgctggatctccctaaccgccgctcatgagagccgctgccgtcgaagccaaacatgcttgcccaactagtacttctctgcttgtttgttgcgtgagggggaaaagtgtctcctagaccataaatacatggggagatgaattagaaaaacaaagcaaatatggaaatggcaggttaatccatagtagatgtttgtagtcctgtttctacggaacaaatatttggatgccattactgcgaagtgctatgtttgtagttcaaaaaatacaattgtctcacctgacatgcctgtgttatagatgcttttgtgggccgccaattcacaaggcgcagaaataggaaagaggagataagtcaggaatagtttctgttttatcagttcctaaataataggttagttcctttttatgtggctaaatagtagcagttcctaaataataggttagttcctttttatgtggctaaatagtagcagtagatatgtctatcctgagaccgcctatggctataaaggcggctgggcatcagctgtaataatcaaccaggaataagatctcccttttgttagggcgagatcacctgggatcatcctggccaggcacgacgccggcgcaggagatctgggtgatcagcgccctcttcttccatacaccttacgccactccaatctccctctccactccccattgaaggacaccaggaaaccaaggttacggactcaccagcgaggagtcggtaacaatttggtatcagaattatttagtttctggtccgagctttttcaccttgctggggtcaagttgttacttagttccgcgtttcacccccagaccgatggacagtcggaagtggttaacagaattattgtgatgtacttacgctgcttggcaggtgatcggccaaaaacttggttacaatggcttccatgggctgaattttgttacaatacgtcataccagactgtggtcaagtgcactccattcaggattgtatatggccgggaccctccaacaatgctttcttatacacctgggacagccagagtagctgccgtcgatcagcaacttcaggatcgagatgttttcttggcagacatcaaacaaaggctaatccaagctcaggtaacaatgaagcaggcgcaggacagtggccgtcgagatgtgcagtatgctgtcggcgattgggtttggctgcgtctgcaccaaaggtcggcagtgggtgtcactccagcagcaacatccaaattaggacctaggttctatgggccatatcaaattctgcaacgcattggagaggtcgcctataagctacagctgccaaccaatgcaagaatccatgatgtttttcatgtggcacttctcaagaaattccaagggggagcccccatccgcactagtacccttaccaacgattctgcatggcaaggtacttccggttccagcacaagtagtgaaggctcgtttaaatagaggtgtttgggagttactggtccagtggcttggacgtgagccggctgatgctacatgggaacaatgtaatgagttcaagagaagatatccagaaatacaactcgaggacgggttgtttgtcggagaggagggaaatgttatagatgcttttgtgggccgccaattcacaaggcgcagaaataggaaagaggagataagtcaggaatagtttctgttttatcagttcctaaataataggttagttcctttttatgtggctaaatagtagcagttcctaaataataggttagttcctttttatgtggctaaatagtagcagtagatatgtctatcctgagaccgcctatggctataaaggcggctgggcatcagctgtaataatcaaccaggaataagatctcccttttgttagggcgagatcacctgggatcatcctggccaggcacgacgccggcgcaggagatctgggtgatcagcgccctcttcttccatacaccttgcgccactccaatctccctctccactccccattgaaggacaccaggaaaccaaggttacggactcaccagcgaggagtcggtaacagcctgacgcaagcaaaagagtcatcaactcacctgtgctgcccttccttgcctttgtgactaagtgagaattgaacagcgcaacaaaaggtactatttcatggcgttgcaaaggcaaaaaggaggccaggagcgcgggtacgtctgatggcgagtgaagttggctcgcttgctttgccaactgaaaatcacagaatagcctgctctgcattttacagatgcagtcggtgaggctgttggagtttgtccccagttctacagatacagagcgagatacattgactgttggagttgctcttaggagccaaggaataatctctatataaaggggaggtcatgtatgaagaaagggaagagaagaacaaacaatccacaagccaactttgcccggcaatcttcctggcaatggttatccacaaatgaactcgggttcatagcatctggtcagaaggattggattagatttgggtccctaactgacgcccataacagggaggggacactggcccccctcccctccgcccctggttggatggctacacaaatcacaatcatacttacatgaattacatgctttgggattagggagggttgttgagaaaacaaacctggttcgacatgtgaaaatcatattattatactggatatataggcatatagcccatttctctgttattgcagtcattgacaagttcagcatgaaagccattttaaatgtattatgttttgatttttcatttcattaagaattcttcacattttgatttactagtacttgtacagttacattcagcttataattaaagtttgaagtcaaattattctgacttaatagtacttatactgttatctccatgactttcagcctggcccaaggg

SEQ ID NO: 241 - DNA, 3059 bp, Zea mays
  Intron number 1 from transcript GRMZM2G165769_T01 (locus G RMZM2G165769) derived from phytozome v7.0 (chr-ID 3; pos 7 201379 to 7204437 reverse strand)
gctcaggtaatcgactgttgaaccatctccccctgcagtctgcagtctggtggcactggcacttggtctttgaaacattgcctttggtctttgaccgtatgtaccttgcctaccagcacgtacgtactcgcatgggcgtggggcgacgtcgttggacgctggctgcctagctcccaatggcatgagtgaggggctggccgtatgtacgctggctgtctgaggggctggccgctggcagttggtgggactgagaaggctccaagcccgcatggccagcccatgggcgggacgggatggaggccaaaatgggaggggctaatagttcggtttttgtttaaaccgaagtaaaaactgaaaaaacaaactaaattttggtttctaaagaatggtaaccaaagaatattacggtttagtccgtttcagttttttcggtttcggttttcttggttttcggttttcatgtctaggcctactcctatataacgaaagttaactaaacatccacaaaaaaggagagatcatgtgaaggaactaatcaagtgccctctagtctagtattatatctctatccacggcttgcaaagatatccatgaccaccacaccttatagtcgacacaccgtaaggacctcgtactgatcttcttctttctgcaataatcttcaaaacctgaatcaatatgttttctgaaaagaacctgtatggttgataatattagtttactagaaaagaccacatcattatgataaagctaaatagtccaaaacattgctaccaccctaattaggagtctttttttacatgtggttcccttgttagcatatcaatttctatttagatgattaatactagaagctctctctatatgtaaagcaaaactaatgattctccaaatatttctagcaaggtaacaataaaagaaaaggtgctgaatattcttaatttaatcacaaaagttgcattccatactattttccacctgtgattggctaaattatctttattgtttctccataaataccataagaaaattttaatattgagagggaattttagcttccaaagcactctatcgagtttaggggggggggggtatccattgaaaggaagtaattgatcgaatcgagaaaagtccatcttcgtggggccccatagaaatttgtctccattttgtcgtaaaggaacatttaccaataaatttgataaattctgtagctcgacctgttttaccccaacaataactcggcgaaaggatatattttttttcatgtagaacaaagtttgatgagcaagatggaatcacggtacatacaactcgctttgtttttttaggttccaacatttccgtccaaattgttcttcttctgcgaagtggagccaaagagtggcggagagacgccggttgtaccgagccattatgtctacaagaggatgaaggagaaattccccggatttgtggagaaactggagaaggacatgattgtatatacaagggttttaggagagggcgataacccgtcctcgtcaatcggtcgtggatggcaatcgacatttctcactaaagataaagctgttgccgaggaaaggtaacgccattgcatcttatagtaagatggttttgtcatgggtttacattgtcgtcgaaagaattggggtgtttgtcacaccttctcgtgtgattgaatgaccttagtcaataggcagtcgtacgtctttgtctgaacagggccgcaaagctcgggataaagctagaatggaccgacgacggcgtgaagacggtcatgggccccatccccgcggtgaagtgggacgagagccgagggcggaagatctggttcaacagcattgtcgccgcctacattgggtggaaggacgcccggaacgaccccatgaaggcggtgaccttcggcgacggctcacccctgcccgctgacgtcatcgacgcgtgcggccaggtcctagaggaggagtctgtggccgtgccatggcagcacggcgacatcctcctcatcgacaactgggccgtcctgcactcccggcgctcgttcgagccaccgcgtcgcatcctcgcctcgatctgtaaatgatgtgtgtagatgcgctgcgggtttgctgctccgacgggcgacgaaggcctgaaactgggaatactttcacacgttggaaagagcggtgtttagaatattagaggtgtgcgtgcaggcgaaataattggtatttcgccgctcaaaacgttgtctcctggttataattatcattgtatctatgagttgtgggtccatttgagtctacaaaatgtagcttgatggcaaatttgtgaaccctttcgtggtgatggcaaatatcgtaatctcccgtttatcggtgcccaatgaaacgaatccgtgtaaggggccattcgtttcttccggaacggaggcatggaataatttctagccggtttgtttctctaatttatactctctccgtttctttttatttgtcgttggatagtgtaattttatactatccagcgacaaataaaaagaaacggagggagtataagttttgattagctagaatgatttctggtccaatcctgaacaaacgaataaggcctaagtaatacacaatgatcgcacgcgagagattggaagtagcagcagaaggaaataatattgggagcgggccgtttggtcaacatgcctaacagtacgctgtatctctgtgggtctggggtcatgctgaatcttggcttctgttcagtggaccggcatttgttttgggcccatttcacttgggtgtcgttagtgtaatacacagtacaaaaacaaagctcatattttacacgaaactactgaagacatatttcgatttagtaatattaacattttctttagatgcttggatacttcaagtacaagctatagacgtgagcacaaactcgcaccacgtgaacgcaaacgcacacatactgacataacgtagcatatattccctttgtctgattatattattcgacttggcaatgttttggattatttagattcacagtatattctttgtatctagacgcaagta

SEQ ID NO: 242 - DNA, 1412 bp, Zea mays
  Intron number 1 from transcript GRMZM2G013619_T01 (locus G RMZM2G013619) derived from phytozome v7.0 (chr-ID 10; pos 128866356 to 128867767 reverse strand)
atacgcctacgtcaactacagcaatcccttgggtatggctgctagcttgccatctcctcgtggggcttcctttctatcttgttgattcagggtgggagggttcgtgggttcgtcgacatgtggtcgtgttgaattggagtctgatcagattgggttaggtttaggtttcatatgaaacaatagttcttatggcatctgtaaactgcatgttaaaagtgtttcctcagttggtacttggtaggtggtggattgattgtgttttttttataatttcggtaatgttgtttggttcattctagcagacgtggatgtgttgcttgggatttattataattttggttatccttcaggatgattctctcacctggcatttttgtatacggtgaagatatgtgcggctggccattagtttttttaatatcctagagccttgtgatagtatactctgtagtttggggtttaaaactgcctttcttaaaatttattatgtttaaggtaactatggacccaggtatgttgcatgctggaaaaatttatgcctttctaatctgatggaatttattttctatattgctggccttcatgtgttttcttaactgattgctagattgcataggcataataggaatgtaacagccccaaatacttgacatgtttggttcctgtttgagctctggccttgctttgcccagttaggaatcatgcagaagcacgttacttagatgcaggcaagctgtcctcggattctgtgctggtgaacttttttgcttgccattgtgggcgggcctggtgcagcggtagagcctaccgtctgtaaccggaaggtcccgggttcgagccccagcctctgcatattatgcgggtaaggcttggcgcttaaagatacccttccccacaccccgcacagtgcgggaagcctacggcactgggtacgcccttttttttattgtggataatgttttggcttggctggattggcaaggcaaggctcacttgtgcggttgaggttaagcaaaactagtcaggcaatcgaaaacgctctaaagttaaacctgtctatgtccctaatcttagataagacgaggatcactctttaaattctgaggatttaattcaaatttgacaatgctatcctaagcccttaagtgtataaggtgcagcttagtggaaaaatgggcctaaaggaagacaatgggttaactatactaaatatatggttgacagtggagttactgtttagtttcggtgtctcacctcgctgtatcgtacaccataaagcttgtttgtgtcatttactattgtaatttgcctattagttcctcatatcttagcgtaaaaacgaaattgccatagctgattaatgattccattttacagctgcgagagcattggaagtgctgaactttgctgct

SEQ ID NO: 243 - DNA, 8092 bp, Zea mays
  Intron number 1 from transcript GRMZM2G313750_T01 (locus G RMZM2G313750) derived from phytozome v7.0 (chr-ID 4; pos 1 30237402 to 130245493 reverse strand)
ggatcaacgagactgacgtcaaagcgctcctcctcgtgagtttgcttgcattgacgacctctcaacgtgcaaatggaatggacgtatgtattttgctttctgcggatatctgtactaactattaaggggacagtgtagactgcccccgcctgcgaatcccacccaccgctccgcctcccccgccgcggaacccgcctacacccgcaccccgcctgcggagccgctcctcaatctcccgggaatcgcctgccgctcctccagccaaatcctcgcacgcgcccctcgccctaccttgagtcccaactgctccatccgcataggcaatccacatgtcgcatatggtggtcgcacctccccctccacgccggagcacgtgcccaccggcgctcccctcacccaactttcatccccaaccatcccatccgtcgattccgccccatccgtgcaggccagtcgcgtgccgaacaaccaccccgccaagcgcaagcccccccccccccccccccccccgcctggaagaaggaggacaagccccaccgtcgcctggaagaaggaggacaagccccgccgccgcctggaaggaggaggacaagccccgccgccgccaccctcgcattgccagcccctgcccaccgcgcccacccccgcgctgcaactcccgccgcgccgaatgctccccaacgccctgtacaatccgggggagaggtcaaggaaggcgagcgacgctcggcaggaagggcatcccgcgaggccgcgacagtggcggcactccgctcccaccaacccacaacactgatcccctcctcgccgagccgccgccggggataagcgtgggggagtgagaagccaaaatctaagacaccgatccccgggcgtgagtcgcgaaggtagcggcggagaaaagggtggagccacaacgcggtcgtgagcccgcagccaccggttccgtgcggctagacggagagagaggtatccgctccctgcaccctcttgccatgacccgcgagacgctaaaaaaagccgacgggatttggcaacttgacggtttggttcagctgtagcgtgcgtgcgtggttggtggcatgcgcggccgtctcgttgctttatttatttcgatccgttgatgtttgattctacctccgtccgtgcgctgcttcgtgaatctgctgtgtcgcggcggcggcggaggaatctgcaccgccgtgcgtcctgcctgctggcgacttgtccggccaatgtgggtgcttagctcatgtcgttgccgctcatccacatgcaggaggagggagccgccattgccgtagatctccaggagcttcttgagggttaggtcagtatgcatctccactctccatagagatgcatctctctatgtcgtcgtccattaaatcaagacccttttgatgattaatctaccatccatgctgtttgatcatgccacattgacttgttgttgttgatgggcagcagagacgggaggatgacagttagagtagtgatgaggtaccttgttaacaagctgggccttgaggacgattcacaggtatggcatgcattgtctgatgtttttttttgctcgccatagttttaaaatttttcccttcttgattgattaccatctatgcatatatgtgtgtgtttttgtttgtgcaatatgggtgcatggtgaaccctagcttgtgttttaaacaataacctttatgggtatggccggcatgatcctgcgcgtgcggctcccaacatacctagcccctgctagccccggttaactaaaaatggtacggtgtgcaaatggaaaaggagatctgttttcagagcaattatatgattgatgctaatggggtgtcagatcatatatttctccttatgttaactaaattctataaagacacaatataaatgcattttagcatagattgactaagcacttgggcgagccgcacaaagcacaagccacctcacatttgttggagagtcgagagagctacagacagatggcgaactgtgggttgtgggagttggagaagcaagcaacggtgaagcagcataggaacctccgtcagatagtggtgaatctagcttagaatcaaagcttgggcaccgttataaacctctaaatttcaccaagaggatattagtatgaaaacttcaatgccagataataaaacagataagggtataccgtacttttgtatctaagttgctaaatccagatcctaaagcgaggtgtgattcatcccgctgcaattcagagccatatgtggggtgatttcaccaatcatgttgccaaaatcatcccacataatagtatgagcattaatagaagttcccaaaatcatctcgctgcaattcagagctcttgatggcatcttcaacgtgtgattcagagttcaatagttacaattgaaacctccatcttaagtggatactcaaatttgaaaggaagaaataaaacatatgtcgtatgagcacaatcatgttgtcagtcaatattcaagtgctcattggattgctcataggagatctgctgagatagccttagtttctagggactaaagtttagtgcctaaagtttaggatggtgactaaaggaaccaaatagggccttaatatgcgcatgttccacttaagaaaggttgctacggaatcagttataagcacgttttcttaaaactagctctgatgtattcctgcacctctattatagtcctctactgaatccaatttaaacaaatagagtggcgtgggaattaaaaaatgaacaaattagctcataaatctaaaaacatttatcagggagaaaaattgtagtcgtacatctgaaactcggcacactcagtttatgaattcaatctagaactgttcgggagctttgagagcggggaaggaatctgcatgcgacgcggaggtggtgaggccgctctcaaagctcccaaacagcagcattgggctctacgattcctcgttcgagtgtgacgcgtgcggcgttgggtttgtcgctgagctatctggtgattacaaacacgtgactgtgagttacatcaattccttcaaagttcaaagaggcgatgccacatgcattgtagctacactattttgatgtatcatgttccgggatgccgattttgctctcctttttaccccaggttaatgatactattgagatgcttgagagaatggctcaccgtggtgcctgcggctgcgagaagaatacaggagatggtgccggcatcatggtcgctctaccacatgacttcttcaaagaggtgagtttctttgcaacaaaaagaaatagaagaacaaatctgttcttttcaacagttattcaattgctttggtgttcttgtaggtcgcaaaggatgctgggattgagctacccccactaggcgagtatgctgttgcaatgttttttatgccaacagatgaaaagcgtcgtaagaaaggcaaagctgagtttaagaaggttggtgtaacactattaataaatttgatagcctatgatgcaggattttcatgttaagctcatttctctgattaataatcttgtccttgcaggttgcagaatcactgggacatgtaatactcgggtggcgtctggttccgactgacaactcagacttgggtgaatctgcactcgagactgagccagtcattgagtaggttttcgttaccaagagctcaatatcagaggctgagtttgagcaacaggtaattccataccactagatgtaagtgcatatcagcacatttgatggatttggctttaacattttttcatgaattgtcgcagctatatatccttaggagactctcaatcatctctgttcgagcctctctgaacattaagcgtggtggagagagggatttctacatgtgctctctatcttctaggtgcttcccttttctcacttcaaaagtttttgttcatgcttttgatttcattaggttttagggctgaaaaggattagagagtctccacttagcacagtttttagaatggaattttggcaatatttttgtttttctatagggggatagcaaaaatttgccttagatttgctcttaaaaattgtaaatatgtagccaaatgacattctggttggcttatgtttgtataaataattcttattatgtatatctttatattacaggactattgtttataagggccagcttaaaccgtcctagcttaaggggtactactatgcagacctaggtcatgaaaacttcatgagttatatggctctggtaaatacaaaactttggcacttacacaaaaattgtcatgatcatagtcgacggatgggaaccaataatagcaaggctgttgtaagaagatacactcctatgtaggcatcaaactttgaactgtcctaccatcactgctctactcatatgctatttcagtcctggttcttgatgccttaaagtgaagtattagaaatctctattagttgatacccgataaccatgttgtagagtccagctgcagttctgctatggccgactgctatgcccgactcatcatgatgtgaccttcgattaggtggtgggaaggaaatgtgcttggtttgaggtagcttagggctcccaaccgttttgcatgaaattctatgcaactgacattttctttttttgtggtgttgatctcgtttagtgcatcagagacaattctacttgagatgaggcaaccgacttttctggtcaccttgtcatgctgacactattagcacaaatgagggaaatgtactaccacattaggcacaaagtagtgtatattgctaggtgcttattcctataccatgctctgcttttagtttgtatttctcttatttttctttgggtatgtcgttagctgtttcacacaggacatttaaaccatgttgttggttctaggtgtgtggcctatgggtgctgcgcacaagcctgttgcccaagtcgaacttgggaacttggggatgtgtgcctcaaattggtttttgggtgtcacaagtaggccatcacacttgaggtttggagtttgaagaacggtaataaagtggttaagtttgccaataatcggtggtaagctgcaacatgtcgtgatgtcttacccttgtagccttgtctctttgctggttggcatggtcaccatttagattatgtccaacgaatgtaatgcttggataaaacgtttttttgtttgtgctaaacagaaggaactctggctaggttatgggtactggaacatttacttgtttcttccataacactcatgggggtattatggagtaatactcctggagtaacaaacttcacaacactttttgtactcaatttcttttttgtgacacctggggtgctctggtttgatacaacttggaaacaagcataacttatatcaagtactattatgcctgcacggttgatcttaaccccttgttaggtgatgttttgtgggcctcaacaatggatgcctttttattgatagggatgtttgtttattcatcaaatgcatcatgtttaaatttggagttggttcgatatgatgctgatggtttgtagtggggtttcccttatctgtctaggcaggtatatgcttgctagaaatctaagctcgtcactggcttgctcctggaaagacgatcataatcgtacgcataacatcatatagctttctgaattgtgtgtatctatgccatcaagtatgagtggtgtaccattgcaatgcacgggcatcgtactattgctactatatgcggctttattctgctatttttacgagacatttttgtttttggttttggttagataagagatggttcgtttcggcgtccatgcagggtgtggaatggatccagtttgtcccagttcggaaatcggaatggtgaacacatatgagatgagcttcccggatatgtatgtaatctgagcgtttccttcctgtaatcctgtgtagcgtaggaggcttacctgctctataagcttcattgtattgttctacaaaggctttaatacaatcaggtattatcaagaaaacaagaagaaaagaaacagatggctactttgaggtaaatatttcagggccatttgtatttacttatgaggtttagatcaaatgatagatgatgtcctgcatgattttggaattgcatttgtattgtataaacctgaatataaatgccattattaaatttgtgaagtagtccgatagcatcaaaaatttgtgaagtagtctgatagcaacagaaactataattaattgagtcttattactcacactagatcttgtcccccaccgcctgatctgactacttttgagctgatttggtcaggaaaggtgccatttttacccagcggcttcctcgccaccaaattaaaggttgcattttgtctccggtctcaccattcccattttattctctgcgtgttgctgtctgctccagggcgacagtgggcatgctgctcgggcgtcgaggacatgcacaggttcccggtgcgctccccgtggatggaccgcggcgacctcatccgcagtcccgccgcgcgacagatcgtgtccaactacttcaggtacccagagcacacgccgccattattggcacccctgctccgctcgttccattttgtttccactagccgtccaataatgttgccccgccatcgatggaccgagcagcatgttcgggccggtgcaggacgtgcgcatcccgtatcagcagaagcgcatgttcggcttcgtcaccttcgtgtacgctgagacggtgaaggtcatcctgagcaagggcaacccgcactttgtgtgcgacgctcgcgtgctcgtcaagccctacaaggagaagggcaaggtccccggtaggtttaggtatgttctcccttcttctttgttgcattacccattgtctgcctgcatgcatcgcaatctcatctacatccgcgcttctcttcagtcacattgcaattgcactgcactgcacgttgggttgcgttgcttgtttgtttcgatagcttcagttgccacctaaaaagcttcttttttcggttttatcgttttgtctggttgcaggaagctgcagcacacgcaccatggcggagccgagttcgtcggttgcgcgtcgcccactggattgctggattccagggacccctacgccctcctgcttctttcaggtgcccaggtaaacgttctcagcatgtagcttaaatctttcctgcgtgctatttctcttattgcaagcaattcatgtggggtgagcaaaagaaatcaaagattattgtttttttgttgttacatccgttcagaatttctccaggttttctcctgggcatgaagccattgggctatgatgtgtgaggtgcacagagcaaaaaagggggagggcccccctccattcctctaatctgggagtaagtgtcaacaacaaccttccttgtgcctgtctttctgatagtgctgtaaccattaataataagctagctgctgctcccatgaccatgatgcatgtatatgccagcatagatcctgaatcatgatggtcataatctgtgtgttaacgggctgttgtgcgcaggggactactaatatggctacatgatggccggccccatcaaccgagcatagagaagctttgataaagaaaaaagaaatacctttggagaggtgtaatcttcttcagagtgggagaaggaggggacagtgaagacaacaacagagaagaaacaagtccagtttgttttttagctcttaggcctatgataagtatatgatagtaagtgagtgagtagtaggcataaataatagtagtagtagttaattagtagtcgtttattagtagctgctgccagtgtcaagaaggtgatgaaaaggcacactccagctctctcctatgctcgtttgtggcatggatggatctctcactgttgctatgatatgttgttttatttataatatcgtgtgtataaatatttcatgtttttcactttgtttgatttgcggtaccacatatataacgatttcatgtgttttccgtggcaacgcacggacatagacctagtgtaatatatatggacacaaacagaacctcttcacggctgggacggacacgacatccag

SEQ ID NO: 244 - DNA, 11625 bp, Zea mays
  Intron number 1 from transcript GRMZM2G702514_T01 (locus G RMZM2G702514) derived from phytozome v7.0 (chr-ID 10; pos 136327346 to 136338970 reverse strand)
catttgggtattatctacccctcagtagaattcaggctagctgtgaggcaatatgctataaacgaagaatttcttcttggaacaataaagttagacaaagaaagatacagggtgtattgtcaagggaatggtggccaatgtccttggagactaaatggttcaaaaaaaaccagatggaagtgtcatggtactttagtgtttaatttttaatttactttagtgtttattttttaatttacttgctaatattcaatttgggtttgtgatataggtcacattgttggtgaatgagcattcatgtgcctcaagcagccggttggatgggttgaatgctactcaaggatgggtagcacagaaggcacttcctatacttaggattgagccaactataggtgctaaggacctacaaaagagacttcaagcaacatataaggtacaaataacttatgacactgcatataaagggctgcagaaagcactgaaaaaaatgtatggtacatgggatgatagttttaggttgttgtatcaatggaaggcagaggttttattgaggtcccccaatagtgttgtggagatagacacccaggttgtagatgggaaagtgtacttccatagatttttttgtgcacttggcccatgtatacaagggttccttggaagttgtagaccttacctcagcgtggactccacgtgtctgaatggtagatggaatgggcatttagctgctgcaactgcactagatgggcataattggatgtacccaattgcttttggttttatagatggtgaaacaaaagataattgggtttggtttgtgacacaattgagaaaagcattgggcaatatagataagcttgctatatgtacagatgcatgtacggggttggagactgttgtagaacttgtttttcctaatgcagacaagagagagtgctttagacatctgatgcaaaattttattaagaattttcatggcaatagctatagaggcatgtaccctgctgcaagagcatatcgaactgaagtttttaatagtcatcttggtccaattttgcaagctgatcctgatgtacatgcttggttacatagaaaccatcctttcaaatggatgagatgtacttttgatcgtgatattaaatgtgactacataaataacaacttggccgagtgtttcaataactgggtgaaagatcataaagaccttccagtagttgaattagctgataagattagagaaaagattatggtgttgtgggagaaaaggagacggataagtgagaggttgagtggggtgattttgccagccataattcaacagttgaatgctaagtctagaaatgagtcaaggtacttgaaagggaattaggcttacacctatttcctaaactaattttggtggttgaattgcccaacacaaataattggactaactagtttgccctagtttataagttctacaggtggcaaaggttcacaataagccaataaaagatcaagagaaagggttcaaacaaaggagcaaagggacaaccgaaggcaccctggtcgggcgcaccggactgtccggtgtgccaccagacactgtccggtgcaccaccggacagtgtccaatgcactagggggctccaagctgaacttcgcaccttcgggaattctcagagccggcgcgctataattcaccggactgttcggtgtacaccggacagtgtccggtgctccaagaggacgcggctctgaactcgccagcttcgggaattcgcatcggctgctccgctataattcaccggacatgtccggtgtacaccggactgtctggtgtaactggcgcaccggacactctacagttcatgttcggtgcgccaccggacatccaggcgggcccagtagtcagagctccaacggtcggaaccctaacgttcgggtgacgtggctggcgcactggacatgtccggtgtgcaccggactgtccggtgcaccatgcgacagacagcatccacccaaacggctagtttggtggttggggctataaataccccaaccaccccacattcaagtcatccaagttttccacttctcaaccacttacaagagctaggcattcaattctagacacactcaagtgatcaaatcctctccaattccacacaaggctttagtgattagcgagagagatttgtcgtgttcttttgagctcttgcgcttggattgcttcttttctttctcacttgttcttgtgatcaaaactcaattgtaaccaaggcaagagacaccaattgtgtggtggtccttgcggggaagtatttgttcccggttttgattgagaagagaagctcactcggtccgagggaccgttgagagagggtaagggttgaaagagacccggcctttgtggcctcctcaacggagagtaggtttgcaagaaccgaacctcggtaaaacaaatccgcgtgtcacactcttcattcgcttgtgatttgttttgcgccctctctctcggactcattattatttctaacgctaacccggcttgtagttgtgactaattttgtaaatttcagtttcgccctattcacccccctctaggcgactttcaattggtatcagagcccaatgcttcaatagagcctaaccgctcgaagtgatgtcgggagatcacaccaagagggagatggagaccggcgacaagcccactacgagtcacgggagcacctcatcggaagagccccgcaccaagaggaaggagaagaagaagagctcctccaacaaagggaaggggaaggagaagaaatcctcttcccacaagtcgcatcggagaggcgacaagcacaagaggatgaggaaagtggtctactacgagatcgacacttcatcaacatcgacctccgactccgacgcaccgtccgtcacttctaagcgccaagagcgcaagaagtatagtaagatccccctacgctacccctcaaagtgtactcctttactctccgttccattaggcaaaccaccggtttttaacggtgaagattataacatgtggagtgacaaaatgaggcaccatctaacctcactccacacaagcatatggaatgttgttgagtttggtgtacaggtaccatccgtaggggatgacgactacgactcggacgaggtagcccaaattcaccactttaactcccaagccaccactatactcttcgcctctctgagtcgagaggagtataataaggtgcaagggttaaaaagtgcgaaggaaatttgggaagtactcaagaccgcgcaagagggagacgaggtgacaaagatcaccaagcgggagacgatcgagggggagctcggtcgcttcatgcttcaccaaggggaggatccacaagctatgtacaaccgcttgaagaccttggtgaaccaagtgcgcaaccctcgggagcgaaaaatgggatgacccatgagatggtcaaggttattcttagatccctcgtatttctcaaccctacacaagttcaattaattcgaggtgatcctagatataagctaatgtctctcgaggaggttataggaaaatttgtgagctttgagctaatgattaaaggctcaaagaaaatcatcgaacaaggcacctcctccacgcccgaggtacaacccgtcgcattcaaggcgacggaagaaaagaaggaggaggctactccaagtcgaacacccatcgacgcctccaagctcgactacgaggagatggtgctcatcatcaagagcttccgccaaatcctcaagcaaagagggaaagactacaaaccccgctccaagaagtgtgctacaaatgtggtaagcccggtcattttattgctaaatgtccattatctatgatagtgacaggggcgacgacaagaaggggagaagaagggagaagaagagacattcaagaagaagggcggcgatgcccacgtgtgccgcgagtgggactcggacgagagctccaccgactcctcctccgacgaggacgccgccaacatcgccgtcaccaagggacttctcttccccaacgtcggccacaagtgcctcatggccaaggagggcaaaaagaagaaggtaaaatcaagatcctccactaaatatgaaacctctagtgatgaggatgatgctagcaatgaggaggataacttgcgcattctttttgccgacctaaacatgcaacaaaaagaaaaattaaatgaattgattagtgctattcatgagaaggatgatctcttggactctcaagaggacttccttattaaggaaaacaaaaagcatgttaaggttaaaaatgcttatgctctacaagttgaaaaatgtgaaaaattgtctagtgagctaagtacttgccatgagactattgacaaccttagaaatgaaaatgctagattaattgctaaggttgattcttatgtttgtgatgtttcaattcccaatcttagaaatgataatgatgatttgcttgctaagattaaggaattgaatgattctcttgctagtcttaagattgaaaatgaacaattaattgctaaggctaaagatcttgatgtttgcaatgttacaatttccgatcttagagataaaaatgatatattacgtgctaagattgttgaacttaactcttgcaaaccctctacatctaccattgagcatgtcactatttgtactagatgtagagatattgatgttgatgctattcatgatcacatggctttaattaaacaacaaaatgatcatatagtaatattagatgctaaaattgccgagcacaacttagagaatgaaaagtttaaatttgctagaagtatgctctataatgggagacgccctggcatcaaggatggcattggctaccaaaggggagacaatgtcaaacttagtgcccctcctaaaagattgtctaattttgttaagcgcaaggctcccatgcctcaggataacgagggttacattttgtaccctgccggctatcctgagagcaaaattaggagaattcattctaggaagtctcactctggccctaatcatgctttttatgtataagagtgagacatctagctctaggcaaccaacccgtgccaagttgcctaaaaggaaaactcctaatgcatcaaatgatcatagtatttcatttaaaacttttgatgcatcttatgttttgactaacaaatccggcaaagtagttgccaagtttgttgggggcaaacacaaggggtcaaagacttgtgtttgggtacccaaagttcttgtttctaatgccaaaggacccaaaaccgtttgggtacctaaaatcaagaactaaacttgttttgtaggtttatgcatccggaggctcaagttggatcatcgatagcgggtgcacaaaccacatgacaggggagaagaagatgttctcctcctacaagaaaaaccaagatccccaacgagctatcacattcggggatggaaaccaaggtttggtcaaaggtttgggtaaaattgctatatctcctgaccattccatttcctatgtttttcttgttgattctttagattacaatttgctttccgtttcgcaattatgtcaaatgggctacaactgtctatttactgatgtaggtgtcactgtctttagaagaagtgatgattcaatagcatttaagggagtgttagagggtcagctatacttggtagattttgatagagctgaactcgacacttgcttaattgctaagactaacatgggttggctctggcaccgccgactagctcatgttggaatgaagaatcttcataagcttctaaagggagaacacattttaggactaacaaatgttcattttgagaaagacaggatttgtagcgcatgccaagccgggaagcaagttggcactcatcatccacacaaaacatcatgacaagtgacaggccactggagctcctacacatggacctattcggcccgatcgcttacataagcatcggcgggagtaagtactgtctagttattgtggatgattattctcgcttcacttgggtattctttatgcaggaaaaatctcatacccaagagaccttaaagggattcttgagacgggctcaaaatgagttcggcttaaggatcaagaaaattagaagcgacaacgggacggagttcaagaactcacaaatagaaggcttccttgaggaggagggcatcaagcatgagttctcttctccctacaccccacaacaaaatggtgtagtggaaaggaagaatcgaactctattggacatggcaagaaccatgcttgatgagtacaagacaccggatcggttttgggccgaggcggtcaacaccgcctgctacgccatcaaccggttatatcttcaccgaatcctcaagaagacatcctatgaactcctaaccggtaaaaagcccaatatttcatatttttagagtttttggtagcaaatgctttattcttgttaagagaggtagaaaatctaaatttgctcctaaaactgtagaaggcttttttactaggatatgactcaaacacaagggcatatagagtctttaacaagtcctcaggacttgttgaagtttcttgtgacgttgtgtttgatgaaactaacggctctcaagtagagcaagttgatcttgatgagataggtgaagaacaggctccgtgcatcgcgctaaggaacatgtccattgggggatgtgtgccctaaggaatccgaagagcctccacatgcacaagatcaaccatcctcctccacacaatcatctccaccaacccaaaatgaggacgaggctcaagttgatgaaggagaagatcgaagagatgagccacctcaagatgacggtaatgatcaagggggagatgcaaacgatcaagacaaggaggatgaagaaccaaggcctccacacccaagagtccaccaagcaatccaacgagatcaccccgtcgacaccatcctcggcgacattcataagggggtaaccactcgatctcgtgttgcacatttttgtgagcattactcttttgtttcctctattgagccacacaaggtagaggaagcacttcaagattcggattgggtgatggcgatgcaagaggagctcaacaacttcactaggaatgaggtatggcgtttagttccacgtcctaatcaaaatgttgtaggaaccaagtgggtcttccgcaacaagcaagacgagcatggtgtggtgacaaggaacaaagctcgacttgtggccaagggatactcccaagtcgaaggtttggatttcggtgaaacctatgcacccgtagctaggcttgaatcaattcgcatattattagcctatgctacttaccatggcttcaacctttatcaaatggacgtgaaaagtgccttcctcaatggaccaatcaaggaagaggtctatgttgagcaacctcccagctttgaagacagtgagtatcctaaccatgtctataggctctctaaggcgctttatgggctcaagcaagccccaagagcttggtatgaatgccttagagatttccttattgctaatggcttcaaagtcggcaaggccgatcctactctattcactaaaactcttgacaatgatttgtttgtatgccaaatttatgttgatgatattatatttgggtctactaacgaatctacatgtgaggaatttagtaggatcatgacacagaaattcgagatgtcgatgatgggggagttgaagtattttttaggattccaagtcaagcaactccaagagggcaccttcattagccaaacaaagtacactcaagacattctaaccaagtttggaatgaaggatgccaagcccatcaagacacccatgggaaccaatgggcatctcgacctcgacacgggaggtaaatccgtcgatcaaaaggtatatcggtcgatgattggttcattactttatttatgtgcatctcgaccggatattatgctttccgtttgcatgtgtgcaagattccaatccgaccctaaggaatcccaccttacggccgtaaaacgaatcttgagatatttggcttatagtcctaagtttgggctttggtaccctcggggatccacatttgatttgattggttattcggatgccgattgggcggggtgtaagattaatagaaagagcacatcggggacttgccaattcttgggaagatccttggtgtcttgggcttccaagaagcaaaattcggtcgctctttctaccgccgaagccgagtatattgccgcaggccattgttgcgcgcaattgctttggatgaggcaaaccctgcggggctatggttacaaattaaccaaagttcctcttctatgtgataatgagagtgcaatccgcatggcggataatcccgttgagcatagccgcactaaacacatagccattcggtatcattttcttagggatcaccaacaaaagggggatatcgagattgcatacattaacactaaagatcaattagccgatatctttaccaagccactagatgaacaaacttttaccaaacttaggcatgagctcaatattcttgattctaggaatttcttttgctaaatttgcacacatagctcataagtatttctttgatcatgtctcttttatatatgctatgactaatgtgttttcaagtgtatttcaaaccaagtcataggtatattgaaagggaattggagtcttcggcgaagacaaaggcttccactccactctattactcatccttcgccgtcactccgcttcactctccgtctttggtataatcttcactcatatgttttatttgccaaaggggaggaagtagtttgaaagggcttatatctcactcaaagtatccgtttttggcgattcatgccaaagggggagaaagtatgagcccaaagcaaaaggaccgcatcaccaccctaattttaaaactaatgattttcgattggtaaatttcaaattagtatcttattgtgttctaaagggggagaaagtagtattttcaaaaatgatatcttaaaaccctcttgaacactaagaggagaatttatttgagggggagttttgtttagtcaaaggaaaagcatttgaaacaaggggagaaaatttcatacttgaaaatgcttcgcaaaatcttactcatttacctttgactattttgcaaaaggactttgaaaaggatttacaaaaagaatttgcaaaaacaaaacatgtggtgcaagcgtggtccaaaatattaaaactaaagaaacaatccatacatatctagtaagtaatatttattggctcaaattctaagtaacctttgtacttacattttgcaaactagttcaattctacacttctatatttgctttggtttgtgttggcatcaatcaccaaaaagggggagattgaaagggaattaggcttacacctatttcctaaactaattttggtggttgaattgcccaacacaaataattggactaactagtttgccctagtttataagttctacaggtggcaaaggttcacaataagccaataaaagatcaagagaaagggttcaaacaaaggagcaaagggacaaccgaaggcaccctggtcgggcgcaccggactgtccggtgtgccaccagacactgtctggtgcaccaccggacagtgtccggtgcaccagggggctccaagctgaacttcgcaccttcgggaattctcagagccggcgcgctataattcaccggactgtccggtgtacaccggacagtgtccggtgctccaagaggacgctgctttgaactcgccagcttcgggaattcgcatcggctgctccgctataattcaccggacatgtccggtgtacaccggactgtccggtgtaactgcggggaaacggctacttcgacgccaacggctacctgcaggcgcattaaatgcgcgccagcgcgcacagaagtcaggaacgcccatgctggcgcaccggacactctacagttcatgtccggtgcgccaccggacatccaggcgggcccagcagtcagagctccaacggtcggaaccctaacgttcgggtgacgtggctggcgcaccggacatgtccggtgtgcaccggactgtccggtgcaccatgcgacagacagcctccacccaaacggctagtttggtggttggggctataaataccccaaccaccccacatttaagtcatccaagttttccacttctcaaccacttacaagagctaggcattcaattctagacacactcaagtgatcaaatcctctccaattccacacaaggctttagtgattagcgagagagatttgttgtgttcttttgagctcttgcgcttggattgcttcttttctttctcacttgttcttgtgatcaaaactcaattgtaaccaaggcaagagacaccaattgtgtggtggtccttgcggggaagttttgttcccggttttgatttgagaagagaagctcactcggtccgagggaccgtttgagagagggtaagggttgaaagagacccggcctttgtggcctcctcaacggggagtaggtttgcaagaaccgaacctcggtaaaacaaatccgcgtgtcacactcttcattcgcttgcgatttgttttgcgccctctctctcggactcattattatttctaacgctaacccggcttgtagttgtgactaattttgtaaatttcagtttcgccctattcacccccctctaggcgactttcagtactaactagtcatttttatatgtcaattcatcattttttctctagtgactacacattttttgtagccaagtgatgattgtaggtctacaaggtggactaacacatcctgaagatgccacatgtgcacctgcaccacctccaagtgttgaaaatgaagcaactccaagtgctctaatctcaaccccaacaagaaacaattataccaagaagaaaaagcttactcccaaaaagaaaagatgttgatgaaattcgtttagtttgccttttgtgtgattgtgtgtgactatgaactggatgctaaattgtgtgactgtgaactgtgtgctatcaaaattgagcactattttactatgtatggatcctatcaaaattaagacaaaacgctgtcaaaattatgcattagttgacaacactgcaggttcctgtatggctgtcagtatttagtgtttcggtgtttcagtagagaatgcaatgtagtaacagttttctagttcctacgtggctgtcatgaccatattcataaatctagaaacaacctggaaccaatcacggttggtttgtcgaaacctggacagtagcatgcattgttctattaaaagaatggctggacagtagcacaagcgcacgcagctgcaacaacatgatgcatctgtcacatgacagagaaaatgaagaaacgagaacgtgacgttaagaaacagtgtaagggtataaatgtccattataacaggtaattagtgcagtggggtattttagctaggaaaggggtttaagtggggtaattagacgagcgctacaaataccggggtattttggcgagcggcaaagaagagagactaaaaaagcaataagcccatgtcaacgactctgacgagaagcccatcttcgacgagggtcccatcttcgacga

SEQ ID NO: 245 - DNA, 2118 bp, Zea mays
  Intron number 14 from transcript GRMZM2G409224_T01 (locus GRMZM2G409224) derived from phytozome v7.0 (chr-ID 2; pos 198109937 to 198112054)
cttggtgtgcacatcagagggtatggtatctgcacatataccttttttctttttgctaaaagtgttccttacctttacttactgcacgctcatataggaaatggtttgaaactttggttacaacttattacttttgtatattctatattatctaaactggaagggaggcctggtgcagtggtgagtgctgccccactgagtcactaggtcacgggttcgaattgcgggggaaggcttgcatcgatttatcctgtttcctgcctgaattctctgcatgttcttcaagctaggaataatggtgtgttaaacccggaatgacacagaatgcctgaattctctgcatgttctccaaggaataaggggtgtgttttgttgcacttagttttcatgtagcttgattcttaagtagggatgtaaaatggttcggaatatatccgttcatccaaatccgaagaaagtgaacaacagttcggacacaattttcggataaccggtcattttttcggatatcgaatacaaatacggatactttgttcgaataccggatacgaatacaatattcataatatctgtcggatatcgaatatccaagatatttgtcggatatatccgaccactatccgaataaagatccgatgtgcaaatagctagcacatccctttgtattcagccaaagccacttggtctctttatatatagcatcaaagcataccacatcctttcattggcaaggtggtattaaacttgtgtgcctagtgctgctgcgtgcccgcagcatgtgcttggggtatccggcattgggcggctaggcagcgagtgctgccagcgctgccgacgtcaaaggcccaaaaggccaatagcccatgtacggttgcatgtgctgccataccatattccttccaatgtttttttatcttttttatattgtgattataaaaaatttatcttgatgattaatgctaaaatactaaatgaattactcttcataaatatagttatttcttaagtgctatcgtcatggctatatgttcctgatttaattattgggttccgaccgttaccgatgcatctccaatcaattttttctgttatcccacatttccaataagagtactagttcatacttattacaataaggccatgttctaaacttcaaaagctaattgttagtcagctaatacgttgttagcagattttagttgagttggagcagctaacaactaatagctatttgtgagttatacctaacaattagttggtttattagctgacccattctaaacctctcaactaattttagctactaactattagttttataatagggcataagtatggtacatgtgaatgatgaattttcttcatatccgaagagaatatttgtaaccgatgttatccgcatccgacttgttccgtattcgacacttgactatccatattcgtaaccgagacaatccatatttgtatttgtatccgaagctatccgcattcgaattcgaacaaaaaaatgaaaacaaatataaaatcagtaatattcgtccgtattcgatccggttacatcctctttaggatggtacaagccatgtgctttccaatagtaacaaaaaagttcctgtttctttttcccagtgtactgtttttctttgtttagttgtaaaacaataaaaaactcgacatgcgagggtaagacagcctccaggcattgtattaagaagactcacataggtcgagaaaccccccgtacccctcctcacccatacacaacggtatcgtagcccatgtgagaacgaccacgacaggggccaggccttagacatgtgctttggcatgggacaaatgaggtttttttaaccccagcctgaaattcgctcccacgaatagtcaaactcaggatgacaggatctgaggagtgctactcataccatctaaccaactcagctagaggccctttcgcagctgtaaaagttggtccttttgtaatttatcacatcttcaaactcaggtttcaatggttgtatcttatattatgttcgtggagcttatattttccatgtccatatttgcttgtgatatctgtcaacagggtttgctgcaaagtgagcctgaaggcgagcacaa

SEQ ID NO: 246 - DNA, 15642 bp, Zea mays
  Intron number 1 from transcript GRMZM2G703109_T01 (locus G RMZM2G703109) derived from phytozome v7.0 (chr-ID 2; pos 9 7351403 to 97367044)
tccctgctgcagttcgccgttgaatcgcctgctcgctgtgacaccccagtgtcacctagggtttctctcaaatacgaacccaaaaaccattattttatgtgaaccaaagtaagcatgagcatcaaattaacttaaaaaataaagaattcaccaagtatatacttaaaagtatcatgatcaaaacaattgagtcttttaaaaagataagaatgtacaaccctaatgaaaaccctaagtaagcccatgagcaaaatttaagaaaataagaaaaaggggatggaaagtttaaaattatgacttgagccaattataaaaattgaagtatatttaatgagcaacaagaaaggttgagaaagcttagccaaaataactcaaataaaaccccaaatcaagcttctcatgtggggacttaatgggaattctgaatttcagaattctgaaattcagaccttgagccaaagatcagggatgttcaccttgatccctaactcgaatcataatggccccattgacaaaattgtgtctaactaacccctctgtcgtgtgccagaagatggcattgggacgcgagccctagacacgacaaaaccttggatttgcctcgggtttaggcagggagacagaccggatttcctggctccatatctctgcaaccagtaggcaaaatcctatgacccccacacaagaatggtagcttgtagggaagagaagaggttttgtgcactgaccaaggcgagagcaggctcggatgagtgactacacgcgccagaacttgggcagaacgcacgggcacacgtgttcgaccctggtcggcacgccagagctcgcccaacccgcgcgcgcgctcgccctggcgtccggtcaagtccgccgcgcgcccacgccctcggtcgtgcccgcccgcgcctataaagcctccccgggcgcacctcacttcgccccgcactcaccctcaccggccagccactttcccttagctccggcgagctcaatttcgcccgccattgccgccagagcttcggccaccgtggacagcccactccagccatcctctgggtaagccagtgcttcggctagctccgccagtagcccgtgaagcttgccaagccctcggacccggccggacttcaccggaggcccgagatcgacctcaccggacttcggtcttccgccgccgcgcgtggatcgagctatccagtgagtctccgcccaattccttgcgctcatgtcttctctggcaccccgtgaacctctctgacccatccaattgctctatctcgccgtgaccaggtcggactcctcgccgccgacgagcatccccgcctgcgcgtgtggaccgaccaactccggccatctccgacggcgacccgcacaccgttgtgatccccgagacctcccctacgtcctcaaccacttcaccggagccatctcgccgccggtaagcccctccgccctttcttccgccgcggttactgtttaaggtagaagaaggacctcgggttaggatttgtagaacccgacgggttttctgtaacgtcagtgactcatgtgaatagtagcttaaggactgattcgcgaagaaaacttaaaacacccgccagggaccccagtgcaaagtagttttccatttaatcaattatgttaatatttttaaataaccagagaacttataaaatccataacttgatgaattcttaatcaaaagttgtcaaactaattttgctagatcttaaatattatgaactatcatctaaaaatgataaaccctatgctttctgttctaaattttagagtttaaaattaaaaacagaaacccaccataccttgtttaattaaggaaaattagtttttcttctgtgctgaacttaagaaaatttatagatgttcaaacctcatttagacactgtttaaaaatagtaggaaccccagcattagtaattatggtgtagttattcatttaaagctattttgtccaaaacttagagaaaatcagaatggcattagaaattaatgaacattgattaagattattttttctagtttacttatgtaacaaggaacctaggaaaaatacagagaccattaatttggaccagttttaaattaaaatgatttaattagccttatttggactgagaatcaattattagagtagcaaaactataaccaaaatgattaataaaaatccagtggacttacaaccaccagagccccactacaaaaatatagagcaccctagcccaactttttaagtaaggaaaataaatacaaagtgttgataaggcattttccaaataaatcatgaacaacccctattaatgtgataatgggcaaccaaaaattagctaagtccatgatgagataaactaccagagaaaaatgcaaacccatgaaaaggaagcaaactcataccaattgctaatgatttaagagaaaggccaattaattcaaataatgcataccaccccttcccttaagcaaaaaagaggccaaacttcagaatgattgctcttgcacaaaataataaccaagaaaaataagcaccctgttgtttgatgtttttcaaatatagtggtagtagaaagcacccatttggctagaaacttgagaaaaccatagaaaaataattaaaaggtattaatgattagaaatttgtatcaagtcatgttataacacctaaaagccagcaaaaataagttttggagaattgcccactgttaaataatagttgtagttcaaagcaccccttctgccctagaatttaataattttgtccagagaaaactattcactttctgatccccaaattttgagacagagaaacatataccagtacccagccactgaaatttttgcagaatttttagaattttataaaagcaacttgtagttcaaacctactccaaaacattaaagagaataaaagaaaaggaaaggagaagtaaacctcaccccaataagcctaacttgagtacttaccaattctcactaagacttaaaaggaattcagtggaaccccaaaattgtaatctacttaccttagctaagtttaacccaatttaccaagtataccacccaagagtcttgcgtgagtaaagttaaccttgtttaactcaagaaaaatcatgcacctttaaagttgtgatttctaaaagcacatgtcatatcatgcatatatcttacgcattgcattcattagattgtaatcttgccgacggagagtacgtgctcatccccgagcaaggacctgtccaagaggaggaccaggagcaggcttcagaggctgctattgaggatctccccgcagccccagcaattgaaggcaagccccggttttatgcataaccgtattattatatgctactttactacacttaatgcttgtaggattgaaatgtgcacttaagtgtaggagttgcttgaaacctctagttgcatgaacttaggattcctttttgagatgaatactagtatgctaggtcgagtagctgcttgctaatcaggatctcagtagaagtcgagtgatttttctagcactcgcgcgaggtcaggaattgattgtattcatcttgataacgggatctatgttggtctatggacttggatccagggaggatgccttgtccatgagacgggaaaaatgaattaaggattaatgtgtggatacctgagtcaagcttttgaacgtactaagcacatgccgggaaaaatggtaaccggtaaacctagtacctgagtgaagccgggcgcggactttatccctcatgcgacctgagactgggtctcccatgctagctatggtgggtacaagtgcggtcactgcacggcggcagccggggtcagtggagcattgtatgccaaggcggtgaggcctggacgcgaacggggaatcgatggggacggttgtcatgtgtggggtcggagtaccctgacatgccgtgtgtttaggtttaccttgcaaggttaaaactcgattcgaatcgtctgcttcttgcagctaatgagactgcttgattccttgtactgcatcgagtaagaagtgaaatgtggttacctgagataatttgttgattgaactaattgattgttaccatgtatgcttagaaggagcaaatctagctaagttaatgatgatagaatttgaaaagctaaaatttgcttttagaaacagctagtgcttttggcaaaccaaacccctcagccaaacagctgcatagtctagaggtagaggagtagactcctcacaccggttaagtctagctgagtattagtatactcagccttgcttgtggcacaatttttgcaggtaccattcaggaaatggttgatggtgtgacttggcctaccaccctgccaccgggttggacggtcgagtgggatgttgctccggcaggagaggagcacgaggagtagtgggctaggccttgcccgattcctcgataccgacgacatcgattatccgctgcacttttatttcgtgaactttattgctacgcaaaaactctgatttatgtaataactccgcacttaatttgaggtttcctgttttattgtatttcttctgtgactcaccttcgagtgagattgtggaatttgatcctggttaagtggctctatcagactagatctgagggactgacgggttattccgatttaagtgtgttacggcccctgaggcgtgacttaggcacttaagctggaataattcgggtggttctgccatagctggtatcagagcaaattccaccacagagaaaaacaataaaccatgaataccaattttcaaaatctaaaacttgcctagaaactgttatggatcgtcaggactagaccgctagacctaggacgaaaggccttaggcatagagggagaaataggtggctaactaattaggccccgtgggccaatacttatattttaaggatgccctaaaaagcaccctattttctttttagaggcagcgtttcttctagcatgcatgcattataaaacacaagaaggaattaaaattttgagctaaccccctttctttaaaaccatccgggctctctttttctttttccttccaccataatctttacctttgattcccttccgcagatgaattcacccacccccgccagtggaggagactctcgtttcagttctgacttcctttctcgcgatggctttccttccatcttgtgggaagtgcttaactccgccggttaccctacgccccctttgtacacggtgcagttgtatgaggagcatcgggtacctcgttgtcgggtctggttgactttggaggctcatccccttcagccgggttggcgttctcttgactctgagacgattggtctcaggacggacgacaccgttgaggcagcagccatgaagactctgacgactttctgtggctaccatcccctggagatggtgatgcaccccttgggactcttccctgctgaaaagaaggatgatcccatgtggtgtaaccgcgtgagccatgtaaagcatgtgtgggcgatgtatcctgacttggttgggagggtcaccgttcagtgcatgagtgcgctgtaccgccttcaggcccttcagagcgatgctatgacacttcttgctaacaccgctcagactgccaagctcactctcgacagtcgggaagattttgtggtctacctatccacggagttggtggagaaggatctgcaggtggagaggctgagccagcgcattgccaccctggagcagcaggtggagatccgagacaacactattgatgtcttggagaaccagcttcacgatgtgcagagggaactcgaagaagcaaatgaccacttggacatgcaccacctgtagatggaggccaatgaagcaggaagcgagggagaagaggctcccgaggagctaggaccagcccctggtgccaatgggactacctccacgatgcctccttcacccgtatccagtgtcgcttccaccgctcagggttaagcagtcgcttcgacacttttaggcggatagaaacctatgcgagcttagttaatgtcagattttggactaggcttatgggtaccttcccctgattgatgtaaccctataaacttttgaaatctgtgggatctttgtcaccatgttatcttcctttcgaacctaatattatgattatggcatttttccttccatatgaaatgatatctcgtcgttcgaaactgtgagttgggataacaatggcggcaatctctgttttcagatggcagctaggcagcgtcgcgggcagaacgagcaggttcccccgccacctcctccagctcccacagtgcaggagctgatggcccagcagaatgagattctgcgacagctcttgcagcgccagccccaccctcagcagcatggtggaggccagcatcagcgacctccggctatggcaacttaccaggagtttctgagcacgcagccgcccttgttcaccaaggcagaggatccgttggacgccgacgtgtggcttcgcgtcgtcgagtccaagtttcccctcctcacgggagactgccctgatgaagccaaggctcgcttcgccgcacagcagcttcgcggccctgctcggacttggtgggatcacttccgtgctatgctccccgctgatcgtgaggtatcttgggaggaattcaagactgccttcagaggacaccacatcccagctggcattctggatcggaagttgaatgaatttatggcccttaatcaaggaacccgcacggtactgcagtatgcgcaagccttcaacgacttatgccagtatgcagggtatcatgctgattctgatgaaaagaagagggatcgcttccgcagaggtctcaataccaagctgcgggaacgactcaacactgtccgggctgatagcttcaatgagttggtcaacatggccatctcccaggaggattgcattgttgctcaccgggcagagaagaagaggaaggcaccaatggcagcaccatccgctcaggctcagaggtttcggattgtttctcacaatcatagcaggggttttcagcagcaggcagacagatgggtgatcaggccacctcagcagcagcagcagccggcacccaaccgctacccagctcctgccccaaggaacaatcagcctccgcagcagcagcagttccgccagggcaatgggaacaagtgtttcacttgtggcaatgtgggccactatgccaagaattgtcccaggaaccagcagaggcagatgccagcaccaaatcaagacaagggaagaaagcagaaggtgcaagtcaggcaagggaagctcaacttcactactctggaggaagtacctgaaggagctcctatcatgaccggtaccttttcagtttataatcaacctgctttaattctgtttgattctggtgcatctcatagtttcattagccaaaagttcagtgctaaatgcaaactgccattctctcactcaaaagggtcatttatgatagtcacacctgggggtaaaatttcaactaatcaattaaaccaaagtgtgcctattcaactgggaagccacattgtcaaaaccactcttcttgtgttgggattggaaaatgtggacattattctaggagcaaattggatgaccttgcaccaagttgtgcttgatgtagccagccgtaccgtggaagttaattctccattctgcgggaatttcactttaattctgcctagttagggttcttcttagtcatgtgctttctctatgacggagctacctctgaagaagatcccagtggtctgcaagtatgcagatgtctttcctgatgaattgccaggaatgccaccggactgggatattgaattcgccatcgagttgcaaccgggaacgaccccaatttccaagaggccctaccgaatgccacccgctgagttggcagagttgaagaagcagttgcaagaattgctggataagggttttattcgcccaagcacttcgccttggggatgtccagcactatttgtgaagaagaaagatgaaagcttgaggctgtgtatagattaccgccctcttaatgcggtaactatcaagaacaagtatcctttgcctcgtattgatgttctttttgaccagttggtcggggccaaggtattttccaagatagaccttcgctctggctaccatcaaatcaagatacgagcaagtgatattccgaagacgacattctcaaccagatatgggctatatgaattcttggtaatgtcattcgggctgacaaatgcaccagcatacttcatgtatctgatgaattctgtttttatgccagaattggacaagttcgtggtggttttcatcgatgatattctggtgtactcaaagaacgaagaagaacatgccgggcatttgcatgtagtgcttcaacgtctgcgagagcaccacctttatgccaagttatccaagtgtgatttttggctaaaggaaatcaaatttttgggtcacactatctctcaggctggaatagctgttgatcctgataaagtgcaagaggtgataaactggaggccaccaacaactgttcgccagattcggagttttctgggattagctagttattaccgaagatttattccggacttctctcgaattgcgaagcctattactgagttgctgaagaaagaagtcaagtttgtgtggagtcagaagtgcgaagatgccttccatgcattaaggcagcatctgaccacagcaccagtattggcgcaacccgacagcagcaagccttttgacgtatattgcgatgcctctggcaccgggctaggttgtgtcttgatgcaagacaaccgagtcattgcttatgcctcaagagcactcaggcctcatgagcaaaattatcccactcatgacctcgagttagcaacagtggttcatgcattgaagatgtggaggcactatctaatgggaacccactgcaacatcttcactgatcataagagccttaagtacatctttactcaggctgatctcaacatgaggcagagaagatggttagagctgatcaaggattatgacctggaggtacattatcacccaggaaaagctaatgtggtagcagatgccttgaatcggaagttgcaatgcaattgtatcctgatggattctcgcattaacaccttgtgtgatgagttgagcaagatgcaaattgaagtgattccttctggttctttgtctcacatttctgttgagccagctttgcaagaccagattatcatggcccagctcagtgacaagggagtgcagattatcaagaagaatctccattagaaggttgagaagtataattgtttccgccaggatgaaaagggtgtgttatggttcaaaagcagattggtgattcctaaagaccaggacatcaagaggaaaattttggatgaggctcatctctccaaattctctatgcatccgggaagcaccaagatgtaccatgatttgaagcttttatactggtggaccagaatgaagagggagatagcccagtatgtatcagaatgtgacacctgtcagaggataaaggcaagccacttgaagtcagctggagctttgcaaccactgtccgtaccttcgtggaagtgggatgacatcagcatggatttcattgtgggtctgcccagcacctctcgtcatcacgattcaatttgggttattgtggaccgattgacgaaagtggcacattttcttcctgtgcacaccactgataaggctcagaaatatgcagaattgtatattgaccggatcgtgtgtttgcacggattaccctggaccattgtttctgaccgaggagcccaatttgttgccagattttgggaacaattgcaagagtcttgggaaccaagctaatcaggagttcagcttaccacccacagactgatggtcagacggaaagggtaaaccaaatcctggaggatatgctgagagcttgtgcgatcgattgtggcaagaactgggataagcacctctccttggcagagtttgcttataacaatagttatcaatccagcctaaagatggcaccttttgaagctctctatggaagaaggtgcaggacaccactcaattggtctcaacctggtgaaagagaagtttttggacctgatttagtgactgaagccgaaaggaaagtcaggctaatcaggaagaatctagaagctgctcaggccaggcagaagagctatcatgataaaagaaggaaacctctccagttcgaggtgggaagttttgtatacctcaaggtatcacccaccaagggagtgcagaggtttgggatcaaaggcaagctagcccctcgttacattggaccttatgagatcatagaagcatgtggacccgtggcatacaagctgaagttaccttcaaagatgtctgccattcacagtgttttccatgtatctcagctgaagaagtgtgtccgattgccgatcgagatcatagcagagccagaattggagatagagccagatctatcgtaccaagagtacccctccaagattctggattgcaaagaaagatcaactcgggctaaatcgatcaagatgtacaaggtccagtggagtaatcactcagaggaggaagctacttgggaaaccgaggaattcttgagatccaacttccccgattgcctacctaaggaagctggtacgtaatcacccccaacccctcctcctgcccttcgaatctaattttcaaaaatatgatcttaattcagaatgaagtaactatgaagtaaaacttaaaaggacttccttctgaagttgcaaagagaatgacattcgaagagcagttttaccataataatagcaacactcacccatttcctataagtctcacccttcgcttcaccctgggaggactctggcccgaatctcgggacgagattcctttaaggggggaaggctgtgacaccctagtgtcacctagggtttctctcaaataccaacccaagaaccattattttatgtgaaccaaagtaagcatgagcatcaaattaacttaagaaataaagaattcaccaagtatatacttaaaagtatcatgatcaaaacaattgagtcttttaaaaagataagaatgtacaaccctaatgaaaaccctaagtgagccccatgagcaaaattcaagaaaataagaaaaaggggatgaaaagtttaaaattatgacttgagccaattataaaaattgaagtatatttaatgagcaacaagaaaggttgagaaagcttagccaaaataactcaaataaaaccccaaatcaagcttctcatgtggggacttaatgggaattctgaatttcagaattctgaaattcagaccttgagccaaagatcagggatgttcaccttgatccctaactcgaatcctaatggccccattgacaaaattgtgtctaactaacccctctgtcgtgtgccagaagatggcattgggacgtgagccctagacacgacaaaaccttggatttgccacgggtttgggcagggagacagaccggatttcctggctccatatctctgcaaccattaggcaaaatcctatgacccccacacaagaatagtagcttgtagggaggagaagaggttttgtgcactgaccaaggcgagagcaggctcggatgagcgactacacgcgccagacttgggcagaacgcacgggcacacgtgttcgaccctggtcagcacgcaagagctcgcccaacccccgcgcgcgctcgccccggcgtccggtcaagtccgccgcgcgcccacgccctcggccgtgcccgcccgcgcctataaagcctccccggggcgcacctcacttcgccccgcactcaccctcaccggccagccactttcccttagctccggcgagctcaattccacccgccattgccgccagagcttcggccaccgtggccagcccactccagccatcctctgggcaagccagtgcttcgactagctccgccagtagcccgtgaagcttgccaagccctcggacctggccggacttcactggaggcccgagatcgacctcaccggacttcggtcttccgccgccgcgcgtggaccgagctatccagtgagtctccgcccaattccttgcgctcatgtcttctctggcaccccgtgaacctctctgacccatccaattactctatctcgccgtgaccaggccggactcctcgccgccgacgagcatccccgcgtgcgcgcgtggaccgaccaactccggccatctccgacggcgacccgcacaccgttgtgatccccgagacctcccctacgtcctcgaccacttcaccggagccatctcgccgccggtaagcccctccgccctttcttccgccgcggttactgtttaaggtagaagaaggacctcgggttaggatttgtagaacccgaggggttttctgtaacgtcagtgactcatgtgaatagtagcttaaggactgattcgcgaagaaaacttaaaacacccgccagggaccccagtgcaaagtagttttccatttaatcaattatgttaatctttttaaataaccagagaacttataaaatccataacttgatgaattcttaatcaaaacttgtcaaactaattttacaagatcttaaatattatgaactatcatctaaaaatgataaaccctatgctttctgttctaaattttagagtttaaaattaaaaacagaaactcaccaaaccttgtttaattaagaaaaattagtttttcttctgtgctgaacttaagaaaatttatagatgttcaaacctcatttagacactgtttaaaaatagtaggaaccccaacattagaaattatggtgtagttattcatttaaagctattttgtccaaaacttagagaaaatcagaaaggcattagaaattaatgaacagtgattaagattatttttcctagtttacttatgtaacaaggaacctaggaaaaatacagagaccattattttggaccagttttaaattaaaatgatttatttagccttatttggactgagaatcaattattagagtagcaaaactacaaccaaaatgattaataaaaatccagtggacttacaaccaccagagccccactacaaaaatacagagcaccctagcccaactttttaattaaggaaaataaatacaaagtgttgataaggcattttccaaataaatcatgaacaacccctattaatgtgataatgggcaaccaaaaattagctatgtccatgatgagataaactaccagagaaaaatgcaaacccatgaaaaggaagcaaactcataccaattgctaatgatttaagagaaaggccaattaattcaaataatgcataccaccccttcccttaagcaaaaaagaggccaaacttcagaatgattgctcttgcacaaaataataaccaaggaaaataagcactctgttgtttgatgttttcaaatatagtggtagtagaaagcacccatttggctagaaacttgagaaaaccatagaaaaataattaaaaggtattaatgattagaaatttgtatcaagtcatgttataacacctaaaagccaccaaaaataagttttggagaattgcccactgttaaataatagttttagttcaaagcaccccttctgccctagaatttaataattttgtccagagaaaactattcactttcggatccccaaattttgagacagagaaacatataccagtacccagccactgaaatttttacagaatttttagaattttataaaagcaacttgtagttcaaacctactccaaaacattaaagagaataaaagaaaaggaaaggagaagtaaacctcaccccaataagtctaacttgagtacttaccaattctcactaagacttaaaaggaattcagtggaaccccaaaattgtaatctacttaccttagctaagtttaaaccaatttaccaagtataccacccaagagtcttgcgtgagtaaagttaaccttgtttaactcaagaaaaatcatgcacctttaaagttgtgatttctaaaagcacatgtcatatcatgcatatatcttacgcattgcattcattagattgtaatcttgccgacggagagtatgtgctcatccccgagcaaggacctgtccaagaggaggaccaggagcaggctttagaggctgctattgaggatctccccgcagccccagcaattgaaggcaagccccggttttatgcataaccgtattattatatgctactttactatacttaatgcttgtaggattgaaatgtgcacttaagtgtaggagttgcttgaaacctctagttgcatgaacttaggattcctttttgagatgaatactagtatgctaggtcgagtagctgcttgctaatcaggatctcggtagaagtcgagtgatttttctagcactcgcgcgaggtcaggaattgattgtattcatcttgataacgggatctatgttggtctatggacttggatccagggaggatgccttgtccatgagacgggaaaaatgaattaaggattaatgtgtggatacctgagtcaagcttttgaacgtactaagcacatgccgggaaaaatggtaatcggtaaacctagtacctgagtgaagccgggcgcggactttatccctcatgcgacctgagactgggtctcccatgctagctatggtgggtacaagtgcggtcactgcacagcggcagccggggtcagtggagcattgtatgccaaggcggtgaggcctggacgcgaacggggaatcgatggggacggttgtcatgtgtggggtcggagtaccctgacatgccgtgtgtttaggtttaccttgcaaggttaaaactcgattcgaatcgtctgcttcttgcagctaatgagactgcttgattccttgtactgcatcgagtaagaagtgaaatgtggttacctgagataatttgttgattgaactaattgattgttaccatgtatgcttagaaggagcaaatctagctaagttaatgatgatagaatttgaaaagctaaaatttgcttttagaaacagctagtgcttttggcaaaccaaacccctcagccaaacagctgcatagtctagaggtagaggagtagactcctcacaccggttaagtctagctgagtattagtatactcagccttgcttgtggcacaatttttgcaggtaccattcaggaaatggttgatggtgtgacttggcctaccaccctgccaccgggttggacggtcgagtgggatgttgctccggcaggagaggagcacgaggagtagtgggctaggccttgcccgattcctcgataccgacgacatcgattatccgctgcactttatttcgtgaactttattgctacgcaaaaactccgatttatgtaataactccgcacttaatttgaggtttcctgttttattgtatttcttctgtgactcaccttcgagtgagattgtggaatttgatcctggttaagtggctctatcagactagatctgagggactgacgggttattccgatttaagtgtgttacgacccctgaggcgtgacttaggcacttaagctggaataattcgggtggttctgccacactcgctgtctgtgccgtcgaaacttcccgagccgtgcgc

SEQ ID NO: 247 - DNA, 1974 bp, Zea mays
  Intron number 1 from transcript GRMZM5G824600_T01 (locus G RMZM5G824600) derived from phytozome v7.0 (chr-ID 5; pos 2 15494378 to 215496351)
gggacatcaacattcagccagtacactgtggtgcatgatgtcagtgttgcaaagatcaacccacaggcacccttagataaagtctgcctgctcggttgtggtgttcctactggtatgttcttttcatgtatgtttacttgcttttatatttaggatataaattgctaattcaggacacatatttgtccgcattgttttgaggattccttgatcctcaggagtcaggacagttatcctgtcatacatattgttgtgtggcttagtgctaagtatctttgcatgtgatacttatatatttgtctgcctcggtgtattgctgtatactttattactaccaatgtttctctctcattgtttatgcctaaactgcaatagttagcaccaatattttcttaacatgcacaatcacgaagacattcttacatttgttcatgatccatgcaactagcaaaaagttggtggttttaatctcatgcagaaactcgcatgccatttctttttgtgtctttgtgatgacgcaaaaatccctgtttttattctgtgaaatgaattgattatgaaaaaccatactgctgctagcctgctacactgattgaactactgacaacatgtttagcagcttcacacttatacatatcttttctcgttatcctctaaatattttcctataataagtggtatttagtttgtccatagtccatacatctgacaaagtttaatcatccaggtcttggagcggtgtggaatactgcaaaggttgaatctggctcagttgttgctgtttttggccttggaacagttggacttgcagtaagtttctcttattaggtcattgtcataaacctgagttagtgggtaggattttgacttctgagtttctcctttaggttgctgagggagcaaaagctgctggtgcttctcgagttattggcattgacatcgacaataaaaagtttgatgttggtatggtttacgtcctccgcaattatgttcttcgactcttattcttctcttatgttgtttatcagctggtgaaatgggaaaattctaatttcctttgtttccaatgcactgaacgtgtccattttcttgtgcaagttgtggaacctgttaataaattgggaccactaacttctgttgcttttgtttctattaaaaaaggacagaccgaagtggggtctaggaaaggaataaccgaggcaagccccacccctgcaatttttgtggagaggctgcattttttatctaacgtggaacagaaaatctccaaagttatattctgtagggctaactctattaatttctacaatgtaagcagtatatctactgccctagataaatagaagttcaaaaggatattgtttatgaagtgcaggaaaacttggatgcaacaactgtagttaccgaatctgagtggcttgatagttctgaatttcctgaacctgatttttatttcctcgttaatatattcccagtggtcaaaggtgcattttggggatgtgcagttcacttgtgctagtggtctatcatttatttataataaactatgtattcatcattccatctgttgtatatacctacgaagcacatgcctcctctaatctttgtctcactgtttgcagcaaagaactttggagttacagaatttgttaacccaaaagagcatgacaaaccgatacagcaggtcctggtcgatcttacagatggcggcgtggattacagctttgagtgcattggaaatgtttcggttatgagggctgcactggaatgctgccacaaggtaaagcgttcccattgcggcatctgggtgttgctgcttatatctcagctgtatcctgtttatccagccattcccattcgcttgttttaaatttgggggcgcgcacacctgtagggctggggaacctccgtcatcgtcggcgtcgccgcctctggccaggagatcgccacacgaccattccagctcgtgactgg

SEQ ID NO: 248 - DNA, 764 bp, Zea mays
  Intron number 1 from transcript GRMZM2G049288_T01 (locus G RMZM2G049288) derived from phytozome v7.0 (chr-ID 9; pos 1 11981891 to 111982654)
atctccgccgacgcacccacgagtgggcccccttcgtaagcacaccgccttactgaattcccgcttctgtcaacttcacatcccgctactgtctattgtgttgtgctgctgtaaacaaaaactagcaatgcgaggctgtgtttcattttttaaataaaccaaggcttagtttctgcaagtaattttgctgcacaactctattctgatcagttgatgcttccatgccaatctcatatagtactaccctacttcatgaatgaatttgttcatccttaagataacttaccagatctcatagcactaggctaccagttcaagcagaactattgaagacaattcacatatttgcacattcattcttgctcaattttttgtgattttttaactatacgaaaaataggataacaaattctactattcaacctgtgccacaaaatgtgctaaaatagatgatgtgctaataaatactccctccagtcagatccatatgatgttccagaaagcaagtttggtttgcatttagctttagtttgtttgttgttcgaaatatcatatataagtgactggatgtggtagattgttgtagtgcaccacttctatggtcattatttagatatctagatgattgcggagaccatctttaatatattataactcatataatgctgtatagaaaaaattatcacatgatgtctaatactttggttacggtatctgaacattctgtagaaacttaaggttactcctgtgggtgttgagctcct

SEQ ID NO: 249 - DNA, 3003 bp, Zea mays
  Intron number 1 from transcript GRMZM2G477441_T01 (locus G RMZM2G477441) derived from phytozome v7.0 (chr-ID 7; pos 1 2520493 to 12523495 reverse strand)
gcaccggcgaggggctgggccagctgcgtcgctaggtgagtagggagtttggtgcgagctccctggatgccatgatgtttgcgtattgacgaggaagaaggaggcgaagaagagggagaaggagatgatttgtcacctacacatgaagacagggccggccctgagaatttggtggcctggtgcgagacaaaaattaaggccccattgatcacaaataccaaaaaaattatgaatactatgatgcattgaactcatctttatgtgttttcctttttcactactagatgcatgtggaatgtggtgatcagaacacaaaataacctatactcagaaataaaagaacatttaactagtaaagattggtttgaggcgaaaattgatcaacggaagtagagtagcaaacctgacgaagttacgaagggccgaggcagggcgcgctaccctgtcgctaccgcgaggcacggcgcgcgtcaagccaggtctgggcagatgacagagcagcagacaaggtgatccctcctgtctgtcgctgctagctgctactgctggtgccggacaattgttgtagcctggacaacgtgagcggaggcttccacgagaaggcaaagaggattgcagctcaagcgtccatgagaagccaagtaatcgagcttaaacaggcatgcatattgtacgttgatgggctttggccttttatcaatctttgtgctgtaatctacataaacatgttctatatatatacccatacacgtatatacggggaggggcccctggttctcgaaggccgggtgcggccgcaccattggcacctgtccagggccggacctgcatgaagaacagttgagcaggcacacaaggaagaggaagatgacggggctgctcctccggcgacacgaggaacacgaggatgctcggccctaaccgcgccctacctccctcccccaaccccgttcatcccgcccccgttcatcttgtgaacccatccccgcgctcccctccgctactctagcggcccagcaggtcccccttcttctctccaatctcttcgtgtcccgcatctagtagcgttggtcgcacaaatatgcgtgtcctgggatttccccaatcactgcacaatgcgctctcgtggctgctttcccgtgtttttttgcctcgcgcgccgtagtggtggtggttgaaggcatgagcgcgtgagcctcgatgcaggcggcgatcgcagaggtttttgcatgtgaggagcgagacgctcgatcgtggtggacgagacggcggcagagtcttctgcggtgctagaaaaggctaggggacattgatccacggaggagacacacggtcgtaccttctgcgctactgacatcggcaggggagagctccatccgaggtgaaggcgcgggcccgtggcttctgcgctagtggcctgggctgggggaagctcgatccacgatagagagccccatccgcgacctccctcagtccccagccacgccagcagcacctcccagattctcccccgttcatcccacccccgcctgtgatcccctccccgcgctcctctccacgaccccatctatctcgccgctgtccacaaccatagtctgcgcccttccatcggactcccttcgatggtgtggcccttccattgatgccgactcgtactactatttaaaaaatccaaagcgaggatgccaccccacccccaatctcctcggatgtgcagaaatcactaaggtgtgtcaactctattcttcatacttctatttatgttgttctcaacgactggattcagcagtgaatcaggttagtactagcttttcaacatagtactagccttgggggcaatgccgctgacgcggagctagggctgctgttttcctgttcgtgggtgctccagcggggccgaaaagctagaggatctcgccattcgctgggaatttggctgatttaccagcgcttcctgtgcaatgggtgatatgatttgttcacttggtggtacctcttctctgtgtgctttgcagagatgtgtgttgtgatgcgatttccttatggtggaggaaagctttgaacatcttatagtcgttggtatatttgaagttgctttgtttgcttggaagactgctgggacttgaactctttggctccttttggtacccaaagttgttgtgccatgttgtacacttgcaatgttctgtgccgcttgtcttcagtttccatccttctcttttgatgtatctgtagggttagatccaaagtttgttgttttgagaagttttagcttctgccaatactttggattttgcttcttatttgtttccgatcccgttatgcaaaaaattgtgttcaatgcttgatatttagttggacctaggctttgattcgaagtactatgttgaaggtggcccccaatataggcacttgtgttagtagtttagtacagaccaactgataactgaaaatactctgctttatgtatgattttggctaaaattttgggacatcacacatatttgttgtttttattagtcaagtacttcatttcttcaagaattttattggtatatggccattcaaaactccattgaccgtgttgtagtacgagtttggttttttcaacactcctggggagtcgagcttctacattgcaactggttcaaatttgtgtggagggacttgcttcagtgtgcttctggtttctaatagttttaacattctcctcctgaagcctgaaggcctcaaggattcatgtaaaagtgatatggtgttgttctaaatgtgcaaattcaactagaatacccattgtctcttttttcagtttcccttagagaatatttttaactttaggtttttgttgccttttccctttgtttatttcttgttggactgtagtgtaaatatgtatttatagatgtgtaggtcctacccattttgttccttagttgaggtttgattcaattgtattggacctttgcaggttgctgcttcgtgatctactcatcaagggaggag

SEQ ID NO: 250 - DNA, 3853 bp, Zea mays
  Intron number 1 from transcript GRMZM2G104464_T01 (locus G RMZM2G104464) derived from phytozome v7.0 (chr-ID 1; pos 4 6551146 to 46554998 reverse strand)
gcagcggatacggtgtcaacaagaacgagcacaaggtgagccattaagattccgaggcggaagcggctgccttaatcaatgttttggttctgggctatctggctttcggagtatggcaattcttgatattgaatggtttcactttggatcagttttggtccttagttacgggcggctccaaaacttcctcagtgacttgtcacaacttagttaggttgtccgctacgcaatttctgcctattgttgcagtagcgcttgctattggggaaacgagactgtgtagttgttaaatattgtccttactggtagttttgcaagaaactatgcacttttattgcatataattgatatatgacacgatcatcaaccaaaaaagagcagaaatgaatatcagaaactgtgatctgtaagatgatacatttcctgtctaactggggtgttggttgacatgaggaatagaggtggcagattcatcccaacttatttcactgcatttgttgataataaaactaaagattgcattgttcagttgtactaatcatcctgttaagatgctgaaagaagcacttgcttcaacaacagcaacaacaaaggcttttagtcccaagttggggtagctagagttaaaatccaacggaaaccaccagacatagatagctgtttttcattcactcttatttgaaaagctaaacctttggatatattttatccttttaagtctccttttactatttattctcatgtcaactttggtcttcccatgtttgaatgtttcccttctcattgccatcatgtcttgggggtgtttggtttctttaatcaccctcctaaactttagtgaataaattttagtccctaaaatttctatttaggaggcctcatttagtcataccgtttgacaatttagggactaaaaatgaagtttaggatgtgggaaccaaacacccgttaaaattccattacacgttggtgcctatggaggtctccgttggacatacccaaaccatctcaatcggtgttggacaaacttttcttcaatagatgttacccctaacttatcacatatatcatcgtttcagactcgaccttgtcctgtatggccacaaatccaacacaacctacacattcacgcaacacttatctcttgaacttgtcgttttttgtaggtcaatattctacactataaaatatagcaggtctaagccattctataaaactttctttttagcttttgttctaccgtctggtcacatagaacgctagatgcttgattccacttcatccatcttgttttgattctatggaagtatggataacatcgtcatcaatattcctgtctctctatagcattgatcctaaataatgaaaggtatcttccctgtgcactacttgaccttccaaactaacatctccttcctcatgcatagtattgccgaagtcacatctcatatatttcagttttagttctactgagtctaaaacctttggactctagagtctctcgccaaaactccagtttcctatttactgttgcctgactttcatcaactagaactaaattgtccgcaaaagcatacaccaagataatatcccattctatttctcttgtgatctcatccatcaccaatacaaaaaaggtaagggctcaaagctgacccttgatgtagtactagttcgtgtctcgatcacttgttcgaacactagccacaacattgttatacatttccttaatgagtccaacatactttattagaactttatgtttgttcaaaacccagtacataacagttcttgatattttatcataagctttcttcaagtcatccctatactgcttcattacttattaagaaaatggcttctatggctgaccttcctggcatgaaatcaagttggttcatagaaatcctcgttattccttcagacgatgctcgttaattctctgtcataactttatagtatggctcgtcaacttaatgctccgatagttaatacaagtatgtatatcttccttattcttgtagatcggtaccaatatacttctccactcgttaggcattttgttcggcgggaagatatgattgaacaacttggttagccacactataactagatcttcgaggcatctccatgcctcaatcgggataccatccggccctatcaccttaccccctttcatccttttcaatgcccttctaacatcagattctcggattctacacacaaagcgcctattggtgtcatcaaaagagtcatccaactgaaaggttgtgtgccaatctccattgaacaatttatcaaaatattcttgccatttgtctaatcctatcctccttcaccaagaggtgctctgtttcatccttgatgcactgaacttgttttaagtcccttgttttcctcttactgatgctagtcatcctatatctctctttctctccttccttcgtgctcaaacgttagtaattatccttgtatgtcctaccctttgtcacacttgtagctcgatttgcggctttcattgctaccttgtacttgtttttgttgtccacacttttgtcatgatagaaacatctatatcattcttttctcttcttaatatccctttggactttctcgtttcatcaccaagtatctttagcttcatctccactccctttggttgttccacacacctctgaggccaccttccaaatgcaggttgtcattgttgaagcgtataagtgaattgtctaccttcttctaatagtttaagtttttgggttgaattggttagtgtgtctactctaacatggtatcaaaactagaggtcttgagttcgaatcctttcagaggctaaatttttgtctccacccatttatttccacgtttgcgcctttctccctggttgcacgtgagtgtgggtgttgaagtgtataatactctgtttggatgtcgatattggagggtttggaattgaattgggttcaataccaaatcagccctggtattcaaatgagatgtaattccaattctattgtttggatgtcactaaattggagtttggatttgtgcggtctaattccatgcaatacagaggggtgatgctctgtattgggagagagagtttctagttatagtccaattccaggaaattgggtctctgattccaaatcttaattccacgtgcaaccaaacaatagaattttggaaagttgattctagttcccaattccgtgctccaatctctacatccaaacggggtataagtgaattgcctaccttctcctaacaacttaagtttttgggttgaactggttagtgcgtcaactctaacaatcatcttctcccacatgttgtttgtgtcatcttgttcctttcaagtggcctctttgatgccccttttttgaatggtaccacttgttatcacatactcggtgcttgagatatacattctagaactatttttttttctttggctgccagccccttgttacaaaaatttaataataggccgcaaataggcgtgcgtaaatactgaagcttaaatcttataagactggatatgaatccagcaaatctctattgtgcactggagcccgtaatagattttgcaactgcacagaataggtttggattttggaatccaatgggtagtatggggtgttaaaaaatggaaaataatgaagaaaatatctaattgaacatttgtttctgagctcaccctttttttcaagaacctccatgagagctgcaaaagcaggaaaagcccagaggggcactgagctcacctgtgttggattctgtgatcattcctgttgtatttgcaacaaaagtttaactgaccaacaacttcatcatataggcaagagtttgg

SEQ ID NO: 251 - DNA, 10379 bp, Zea mays
  Intron number 1 from transcript GRMZM5G831305_T01 (locus G RMZM5G831305) derived from phytozome v7.0 (chr-ID 2; pos 2 01577861 to 201588239 reverse strand)
cctcgagcgacatcttggtctgctccagctgcttggtctggtatatcagcgatagtggaggcggcgatcttggggcgaggagagcggggcggcggggacagacgcgggcaagatctgggggcgaggagagcgggggcgcggcggggattgcggcctcggtgcagggagagaagagcggggcggggggattgctgcggtgtcgggtggagccgtggtggacgccctccttgcgtccttatagagtagtagagaaaaaagacatataggcttgtttgttcgctgactaattttccttttttgtctaacttttctgcctaaagttagttcttgaattcaaacgacaaaccttaagtaaagtatggcacagttagccacaaaccaaatagaccaataatactatataaacatataaacagtgcaagtctttttagattaaagtcaaatgaacgaacagtttgtgaatattttttattttatacctttcagagaaaattaagttcatatatgtgtatatgtggtgaaattattgttgtatctggcacatgcaattcggcgctacccctgttttcaagtcgtcgactagtcgacgattagtcgaacaggcggtcttgagaggccgacttcggggactgactcgacttgcctggcaagtcactcgacttgccaacgactgaaaaatataagtcgactagtcgtcggcttggacttaaaagtcggctgatttgtccgagttcggcccaaccagaggcccattacaaaatctaaaccctaacttacctgaagtcggccctcctctacaacacccgtcggtcgccctcctatgcagcatagagccgccgcccctcctctacagcatagagtcgccgctcctctacagtcgccgcccctcctatgcagcaagtcggccgcccctcctctgcagcacgccggtggccgcccctcctcgcagcaacgtcgccgtctcccgccctcgcatcaaggtcgcccagcctcttgaagagatggaagatatatgtaacgcccaaattcagaaattgggattggtagaagaaatgtgagcaaagtacccttgataaataattagactttataattcaccattttaaggtaaatgatcatgataaaataacgatagttaaaataaatcctgataaagagtagacattggaaaatgttcctatcaaaacaaagggagaatttgttttaatatacctttaatccaactacacactcaaaataataatgtggtgtgtacttcatgttgaaaacctagcctaaataaaataaataaataaataaagtaactgaataataaatattatgtagaaattgtgcatcatgtggagtttttcttatgcataaatttgaaatttaaaaattaaacttggtttgaattggatttgaaataagaaaagaaaatagaaaaaaaagagaagaaacaaacctgcttgtgggccgaatccacctggccggcccaacttcatttcacatgcgtggcccacatagctcccgcgcttctttccctctctgcggctgcctggtggtccccactggacaggtttccactgcgcggtctgcgcgcttgtggatgacacgtgcgggcccacccggtcagtttcttccttgccgcgcatgtagcatccagtgactgacttgtgggccggcactgtcagtcatccacagctgcttcttcctcctggatttggtgcgcaacagaaatcgcgtcgcgtggattgacgggagggcctgcgccgcggatcacaggatgaatccgggtcgtcgcaaccctgtgttccttcccccctgctgtcatacgctcggaccggtgggcgacttccgcgtggcggccgccgatgtcacgggatccgcccgaaaatctcgctaacgattgcccttaatcggacttggtcgcggagtataagaacaagcgtgccgcctctgtgcatctcctgcgcgccgcacaaagggaattcgtggcctcctcgaatgccgttgggtggccggaaccttgtaaattctcgccgtgctaccactttccgctgtcgctcggggtcagcagccatcgcgacacaactcacggtaataatacacccatctggatcgccttaccctctcgtacgcgtagcactggatagcggtagttttagtgcccagaatcgccgtgcggggttccgttggtgtgtgcgccgccgcgaggccctacgccgtcgctgggtatggtcggggtaggaagaaacaacgcttgtcgttgatcctggcgcctacggtggagattagatcaagatcgtgatgaatccgagccatcgagatgagatcggaggagtgataatagatcgggctataataaaatctagaccgttggttttagatccagtggaatagattgtgtaccgtttctattttagatgagtctaatccgagccgtctaatgtagatcggacggttgatgccacccgatacctcttcgacgtagcaatttcgcttatgagcccttcgatttttatagaataaacccgccgtcctacttattgcgctctgtgtcttaggggattatacgccagggcccctgtgcttctagttattcatgcgcgcagccccagaatcatagaaaaatgcagaaattcaattagaaaatgattttagtgttaaaataatttcagaaacttatttaattcatagaaaattcattctagctccaaattaattcattctagttcctataattttataatattattgtttatcatctagtgtcactattttgacatgaaaacaataataaaatttatctcctaattaatctcatatcaaatacataaaaactttggaaatttataaattcctcgttttaattccgatttgactcgttccagttgtgttagttttgtataagtatttactatgcagtaacaatatttgttataccatatctcatccttttctaattagatctttatttaatttatgtgggttagtcttgttaatctacttatcattataatctactagaagatgatctatggtcaattcataacttagattaaagttgagataattatttatagaataacctctcatatgaattataataaccaaattataatataatgtgacagttaaatcacatagatcttttataaaccataacttcttaatcgtaacttcgatcttagtagttctcaatcccgcgatctcgtagcacgtgtagatcattattatgcagtttattcttatgtttggtgtaatgtcaatttttgcctatacaatgtttgtttgtattgctacgactagagcgaggtcacgtgtcatctaaagagcaagttggtacctggaatctcaagtcccaggcaaattgtgcccttgatcacttctttttacccactcatgttctaatcaatcataatggtctgcataggttaattttgatgggacccaataggttaccctagtttgattatctttataccttgtttaccactgaactttttggctagtacttgctagtgctttatgtggttttgggtacgaagatacattattcatgatcacacttttattatctatttattattactgttcatgataagatcattatgttaattggaacatggagcggccacccggaaaaacagtgctaccacaagagtttatggacgcccttggctaattaattaggaaagctagtggaggactaccttacccgaaaggggcaagggtagtaggggagtggtcagtgtagggaggtccttggttgattttgctgcgatggcggtcaagcaagaaccctgcattggagcttcctataaactgtagcgggttttctgaagctagtggaactttgtaaaggcctcgtagtgttaccctgcctcgcctcctcggtaaaggtgtatgagaagtcgcgatcccttggcagatgagtaacatgacttgtgggtaaagatgcgtaacctctgcagagtgtaaaactggtatactagccgtgctcacggtcatgagcagctcggaacctcacatgattaatttatggaactaaattcaaactgtcatatgcagtgcatcgcaggtgatgttgttacttttgttctactatttaattgggttggtattttacttatacttagtaactgctaataaaattttgaccaactttaaaagcaatgctcagctctaaccatcctctttggtaagccttacacttcacgtgagctcccacctttggcgagttcatgcacattattccccacaacttgttgagcgatgaacgtatgtgagctcactcttgctgtctcacacccccccacaggtcaagaacaggtaccgcaggatgaggcgcatggaggatgctgcgatgtgttcgtgagaggtctaggctatcgtctcccagtcaactttgggttgctggaccgttgtctccttataatgtaattatttatttattttgtatagaactcctactatatagtaaagatgtgacattcgatcctgtgccatgattcatcatatgtgtgagacttggtcccagcacacctagtgattatgttcgcgcccgggtctgggtgccccgaaacccgggtgtgacagaagtggtatcagaggaatgttgactataggacgaaacctagatagaactggccaaccattatctacttaccttactctgattcttttctaaacttatcttaatctactctcatctatttccgctttactctgattattcttaccttttctttctaaaagacaaatgtggaattcacactttgaaatcctatgcctaaagtgactttttggagtaggagacctactcttaggaacaaaaaaaacaaaattatttttttatgtgtacctatgcacttgaatgattgttctgatgattaatgcctgatttgcttctttggttgagtaagatattatatatggacatcttagcatgtaccaccataaggtattgaattagctatggtaggtaaaacattaatctgctcagctaataaattccccaaagtaacctgaattgtaaatacctgccttatctactattctcttaccctatgtatctaacccagatggtcaataccaggcggggtggtggaattgatttacctcctaatcgacacactcggtggatatatagacaaccccagccacaaccagcagagatgaatcctcctaatcctccaccaggcggagttgacccactgattgcagctcagatgaggatgatgcagcaaatggcggacactatggcagatatgcgcactcagatgcagcaagaacgccaggaaatgcgccaggaaagagaggatgtacgtcgggagatgcgctaagagcgggaggagatacgtcaagagagaagagcgcaacagcaacatcaacaagtaccattgcctcccccaccaccaccagttccacactgggacaagcatcgggaattcatgagccacaaaccaccaaccttctccaactccacggatccgctgcatgcagatgactggctaaagtctgtagaaaagatgctcaacatagctcagtgctcagacagagagaaagtactctacgcatcatgtcgtcttgctggtcccgctgcggattggtgggatgcgtactgcgctgctcatgctgctgtcgatacaattacctgggcagaattctccactcaattcaggaattaccatattcctgctgggctcatgaagattaagagaaaggagtttttatcccttaagcaaggaagtatgtccgtgagtgaatatagggacaaattcatccagttatctcgatatgctcctagggatgttgaggatgatgagcaaaagcaggagctttttctggacggtttgattggacccttgcaatatcaactggtatcgcacacattcccatccttccaaaggctacttgacaaagctattgttgtagaaaacaagaggagtatatttggagagaaaagaagggctgctaaccaagggcaagctggaagtagttcccgtcctcgctatactaccactccaagtacaccagctagtggaagtaccggacaacaaactcaacaggcaccaactgctcctccgaaagcaagcaccccagcaggacccgttgctcctaacacaaccaccaacagggcatgcttcaagtgtggacaaccgggacactacgccaactactgtcccaacagggctgcctacaccacaccggctccgatgaagcaaggtcaagcctcggcaggaaagagtcaacccctatctgtcaaccggggacaagctcatcatgcagaagtagaagctaaaccaggtgaactggaaattcaagaagaagagctggttgaagatgaagtagtcggtgaagaagtcaacaaacaacaagaatagagataaacataaatatagatacatatatatattttactatttgtaagactagtttagctattagttagtattttactattttagtgataataataaggtctattgaccctatgttttgttaaagaattatgcatcatgctgagatttctttgtttgtgcatatgttccgagaacaatatgagtatacatccctttttcttacaaatctcgaggacgagatttctattaaggggggtaggatttgtaacgcccaaattcagaaattgggattggtagaagaaatgtgagcaaagtacccttgataaataattagactttataattcaccattttaaggtaaatgatcatgataaaataacgatagttaaaataaatcctaataaagagtagacattggaaaatgttcctatcaaaacaaagggagaatttgttttaatatacctttaatccaactacacactcaaaataataatgtggtgtgtgtacttcatgttgaaaacctagcctaaataaaataaataaataaataaagtaattgaataataaatattatgtagaaattgtgcatcatgtggagtttttcttatgcataattttgaaatttaaaaattaaacttggtttgaattggatttgaaataagaaaagaaaatagaaaaaaaagagaagaaacaaacctgcttgtgggccgaatccacctggccggcccaacttcatttcacatgcgtggcccacatagctcccgcgcttctttccctctctgcggctgcctggtggtccccactggacaggtttccactgcgcggtctgcgcgcttgtggatgacacgtgcgggcccacccggtcagtttcttccttgccgcgcatgtagcatccagtgactgacttgtgggccggcactgtcagtcatccacagctgcttcttcctcctggatttggtgcgcaacagaaatcgcgtcgcgtggattgacgggagggcctgtgccgcggatcacaggatgaatccgggtcgtcgcaaccctgtgttcctcccccctgctgtcatacgctcggaccggtgggcgacttccacgtggcggccgccaatgtcgcgggatccgcccgaaaatctcgctaacgattgcccttaatcggacttggtcgcggagtataagaacaagcgcgccgcctctgtgcatctcctgcgcgtcgcacaaagggaattcgtggcctcctcgaacgccgttgggtggccggaaccttgtaaattctcgctgtgctaccactttccgccgtcgctcggggtcagcagccatcgcgacacaactcacggtaataatacacccatctggatcgccttaccctctcgtacgcgtaacactggatagcagtggttttagtgcccagaatcgccgtgcggggttccgttggtgtgtgcaccgccgcggggccctacgccgtcgctgggtatggccgaggtaggaagaaacagcgcttgccattgatcctggcgcctacggtggagattagatcaagaccgtgatgaatccgagccatcgagatgagatcggaggagtgataatagattgggctataataaaatctagaccgttggttttagatccagtggaatagattgtgtaccgtttctgttttagatgagtctaatccgagccgtctgatgtagatcggacggttgatgccacccgatacctcttcggcgtggcaatttcgcttatgagcccttcgatttttatagaataaacccgccgtcctacttattgcgctctgtgtcttagggaattatacgccagggcccctgtgcttctagttattcatgcgcgcagtccagaatcataaaaaatgcagaaattcaattagaaaatgattttagtgttaaaataatttcagaaacttatttaattcatagaaaattcattctagctccaaattaattcattctagttcctataattttataatattattgtttatcatctagtgtcactattttgacatgaaaacaataataaaatttatctcctaattaatcttatatcaaatacataaaaactttggaaatttataacttcctcgttttaatttcgatttgactcgttccagttgcgttagttttgtataagtatttactatgcagtaacaatatttgttacaccatatctcatccttttctaattagatctttatttaatttatgtgggttagtcttgttaatctacttatcattataatctactagaagatgatctatggtcaattcataacttagattaaagttgagataattatttatagaataacctctcatatgaattataataaccaaattataatataatgtgacagttaaatcacatagatcttttataaaccataacttcttaatcgtaacttcgatcttagtagttctcaatcccgcgatctcgtagcacgtgtagatcattattatgcagtttattcttatgtttggtgtaatgtcaatttttgcctatacaatgtttgtttgtattgccacgactagagcgaggtcatgtgtcatctgaagagcatgttggtacctggaatctcaagtcccaggcaagttgtgcccttgatcacttctttttacccactcatgttctaattaatcataatgatgagcgtaggttaattttgatgggacccaataggttaccttagtttgattatctttataccttgtttaccactgaactttttggctagtacttgctagtgctttatgtggttttgggtatgaagatacattattcatgatcacacttttattatctatttattattactgttcatgataagatcattatgttaattggaacatggagcgaccacccgggaaaacagtgctaccacaagggtttatggacgcccttggctgattaattaggaaagctagtggaggactaccttacccgaaaggggcaagggcagtaggggagtggtcagtgtagggaagtccttggttgattttgctgcgatggcggtcaagcaagaaccctgcattggagcttcctaaaaactgtagcgggttttctgaagctagtggaactttgtaaaggcctcgtagtgttaccctgcctcgcctcctcggtagtggtgtatgagaagtcgcgatcccttggcagatgggtaacatgacttgtgggtaaatatgcgcaacctctgcagagtgtaaaactggtatactagtcgtgctcacggtcatgagcagctcggaccctcacatgattaatttatgaaactaaattcaatttgtcatatgcattgcatcgcaggtgatgttgttacttttgttctactacttaattgggttggtatttacttatacttagtaactgctaataaaattttgaccacagcaatgctcagctctaaccatcctctttcgtaagccttacacttcacgtgagctcccacctttggcgagttcatgcacattattccccacaacttgttgaacgatgaacgtatgtgagctcactcttgctgtctcacaccccccacaggtcaagaataggtaccgcaggatgaggcgcatggaggatgctgcgatgtgttcgtgagaggtctaggctgtcgtctcccagtcaactttgggttgctggaccgttgtctccttataatgtaattatttatttattttgtatagaactcctattatatagtaaagatgtgacattcgatcttgtgccatgattcatcatatgtgtgagacttggtcccagcacacctggtgattatgttcgcgcccgggtctgggtgccccgaaacccgggtgtgacaatatatatgcatatcgaccacaaggggagccatgaagccagcagctatacgatccagctaaagatcctaaaagaaaggcaaaatcgaaggattcgacatggaactattgttactggcctgatttgaacaaaaaagatgtggtgaagtgcatactttgtggcaaaatcgttcatgcaggtgttagaaggttgaggcagcaccttgttggtggt

SEQ ID NO: 252 - DNA, 2140 bp, Zea mays
  Intron number 1 from transcript GRMZM2G058451_T02 (locus G RMZM2G058451) derived from phytozome v7.0 (chr-ID 7; pos 1 55343296 to 155345435 reverse strand)
cagtctgtcgttgccgcgtcggctcccaacccgtaattgccggattacggtctcgatttgggctcggccgtggcggtggttggttggacttcgtggggttgggttgcatttggtcggggttcgttgccagcatatctgtagattctgtacgtatagtagttcgttatatggatcaatgacttgattggaattcggtgaagcggctgaactgtgggatttggaccgtgtccttggaatcgtgtttgcccaacattaatagtagaactgattatggttctttatgtttccaatttactataccagcgtcgtcctgtggaaggtgtgggctgtggactctgttggttctgccagtggagttgtgtgagaggactgaggaaatggttcacaggatgggtcagtggacctttactataagttctaagtagtatggcgtgaaaggactgttcccatcttatggtgtgcaagctggtaggtaggtgcatataggtagtctcatcaagcctagatgctttcctttgggcacacctttgtgtcatctatactcttgtcacaaaaacatattgtttattaaaacatttaataaagcattagaaactacaaacatcaataaccatcacattatttatttggaaatatgtaagttatatatgtgtagatttgtattcaaaatctgttaaacttgaaggattttaagaatttattctgtgtggccctgtggaatgtgtggatgagtcggtgtacctttactgtaataattctcggtagaacggtggaaaggattgttcacatcttatggtgctccgctggtgggtaggcaactaggcatatataaggcctgtttagtttagcttttttctgactattttttctaagaatctggatgtggagaaaatctgactgtgggaagaatctgaatatcgtggggattacacgcggaggaagatgaagtggtccaaagggtcaatgatctagaaagcgatgtatttctaatatcgtgacgactcgaccgattatgcgttcatgttgattttggacggtttttaccaaaacaattcttatagaagcggactgaaaagctggggcgtttggcagtccgcaacagattttggtggccggaagttgaaaaaagcccaaacaaacagggccacaggtagtgttatggctcctcatctagcctagattgcttttgtgcacactttgtgtcatctatactccctccagtcaccattgaaaatatttagctaaaccttggaaactacaataataactgtttagggttacattatttatttgggaacttaaagttttatgtgtagatttgtatcaaaatacttgcaaaatctcgtaaattcgaagaatttaatctatagaaaaaggtggtcaaatatacgtattgaagactactccaagtcaaaggtggtcaaatattcttgactgaagatagtagtttgcagaatctgttagaaacatacaatcctcattctgcaatcaacttgtggctgctctattgttgggcctttataaggctagttactacccttgttcacagagaagaatagataaattccttttgggtcagtatattctttatgtattgatctcttggttcatccaatagtctgcagaaacaggttgcacacaagttgttgtaattgaatccttcatgattggtgtggtgtgaagaggattaccatattgtgctggggttctgacagctccattgctctttagtacatacaagctcatctttgatgttaagttggagaagttttgaggtgtttggttggctgctttaaacagttgtattgtgtgctgtctgtggtaaattcttcttctatttttccacatatatttcgttagatgtagtttgtagggttatgacttgctatttgctaagttgaaaagcaccaagtagtgattttttatatttactaattattgtcttcgatttgcttgcatagatattttgtttaccatgctatgttatttgtctttttttgcttcttattatggcgcattatcttgatatttggcatcctaagggcgtacccagtgctgtaggcttcccgcactgtgcggggtctggggaagagtatctttaaatatttggcatcctaacattggcttttattttagcagt

SEQ ID NO: 253 - DNA, 12233 bp, Zea mays
  Intron number 1 from transcript GRMZM2G127455_T01 (locus G RMZM2G127455) derived from phytozome v7.0 (chr-ID 10; pos 87773787 to 87786019)
ccaggtaccacccgctccgcccttgtccgttgttcccgtgccttgtgttgttgatccgtggtccgtggacgcggttagagattcagtaacggtggtgaggtgacgcgcattgcgctggcgcggccgttttgaccctcctgctctcgcggggttgggtccgcattgctgcattgacgcttagcggcgaaacatgaagcttctattggttggcgctgggtgaagtctagtcagtgtagattgaattctattggtgttggtatagattgaattctattggtgttggtatgctcggtccacactaggtatattgatcgacgacctcatttcagctggcttgtttacattgcagccaggcgcgcttatgggacttcgatggggcagtgatttgtgtggaacacgttaagctgaagttactcactgatcaaaacctgaaagcttcgcccatggacttctgtacctgttcatttttttttttttgccgtgaacccagcttgcagtcccatagcgtgtaggtctaattgcaacactgctctgttaactgtgtatgatcagcacactaattgctgcaaagcaagtcttcgttgttgagctctcagcagctcataggtatgccttttatttttaaacaaggctatttgcttactaggacaggcagagagctatgagcactgcttatggaattttttgaaacgaaccggcaggagatctgcccgttatattaaaaagagaggagcccaaagtggcgaggtttaaaatacaaagacaccccacaaaagcatgaccaagccgaaaaacacaaacacacaagactaatataaaaggagactaggagaaaaaccaagctcaaacacacaaaactaaagagatgctaggagattagccagctggttggctcctgcacgtatccaggctgatgcctcagatataatagatgcgagaatctgagcacatgtggaggatttgtggtcgaaaatcctagcatttttctcacgccagacggtccaattcactagaattaagaggcttctcaagcccttcctgttgcaatcttgagttgtagctagggacgtccaccattgtaggacagactcactgcggtcctagttacttggactaaggccctccaccgttgcccatacaaccacctctccccaaatccgcttggttaaacgacactcaacgaagaaatgcaatcctgactccaaagtttgcccacacaatgcacagacatcgttgtggggccaatccctcttcgcaagacgatccgctgtccaaattctattttggatggctaaccaactgaagaatttacatttcggtggcgcccataccttccaaatgatccagttcatatttgtaagctcagagccgaggaattgggcaaggtatgctgattttgccgaatactgtcggtcttctgagagtttccaactaatagagtcgcaaatacccggttgcaaggatattctttgcaaaattgaccaaagcctacaatactccacaatgtgttgctctgtcacctcagcagaaagcaggttgaggtccctaatccaagtatgatttcacagcgcttcactcaaagatctgttctttcttcggggcacattgaaaatgagaggcaaaatgtccttcggtcttaacccttgcacccacgcatcattccaaaaggacacctttgtcccgtctcccaccgaaatcgaagtcgctgctgcgaagagctgtcgttcttttgtcgtgcaagggagttcaaaggccgtccagaacctagttgatgaagcccaatcttgccacaaccaacgcaaacgcaaggcccttgcaaatttggttaaatgaaggatacccaagcctccacactcttttagccttgcggaacggatccaatttaccttgcatttacctcccgtaatttgtgcacacccagcccaaaggaattttttccttctcgaatcaattaaattcaatatttccttaggagcccgtaaagcagagagaaggtagattgcttgggaggtaatgactgacttaactaaagtcagtctgccagccatagagaggtttttcccattccagccattgagcttgttcgaaattttgtcaattaagaactgaaattcgctcttcttcagtccggatgatgagagcgggaggcccaggtattttaaggggaaggtagcccttctggctggcatattccttagggccgcgttgaggtcaataccttgacaacagataggcacaactgtggacttatggaagtttgtcaacagccctgacgcctcaccaaatagcccgagcagctttagtattgtctcgacctcctctttttttggtgcaataaacaaggccgcatcatcaacgtacaatgagagacaaggcaaggcgagcggcccctaattttgctgagaagtcccgtctctattgccaagtctaaaattttctgcaatgggtcaatggcaagcacaaataacaatggtgagagtgggtctccatgtctaagtcctcgaccatgagacaaggggggattcgggatccgttaacaaagacccttgaggtggatgttgagaggatggctgcaatccaatctctccaccaagaagggaagcctagatgttgaagcagcgagagaaggtattcccatcggaccgaatcaaaggctttcgcaatgtccaatttgaggaagagcgagggtatgttcatgcgttggtagcgcctcactgcactacgcacggccataaaattatcctgaatagtccgtttcttgatgaacgcgctttggcatggtgagacgatttcatgcatatgtggcgctaatcggagagcaagagtcttgatgatgattttgacaaaggagtgaatgaggctaatcggaatgctcctcaccgagtcaaaacttaatgatggtgtatctgaagagagtgatgggtgtttttttgtaggagatgtggccattttcatgtttgtaccattctattagaaacactgtacagtggcaccgtgacatctattgagtgtattgcagctatcaagcaatctgtgtcgccttccatagcacctcgctctgcctccacacattcggtatgtaatttattgtttcagaccattactcaaaacatcagccgctgtaacatatctcaaaaacaaaccaaattggtgctatagacaagttaatttgtgttaccccttgaaaattaagaatcctcccacacaggtgcggaacacagagcttgtgctgccgagcttcagcccagagcctaggcccaaaacagaatttcactagcctctgtttctgcccatactactgatcttgctttaaatacatgatttgagtagaaactacctggcttgattatgggcatccctctttctctgggtctaatctctgaaccaatacttggccaatcagttttgtggatgctcacattttttataaactgtcgatgattgatgcctgcttcataagaacacctcctgaatgactttttttatttatcgagttgctactatctattacaatttttgtgcacattataggttgggatgaccttgtatttcaattatcattacccaaagcccttgataaaacacagtactgtgctagtgttctgttgcttgtttttttttgagaaaggggataaccccctatttcattacgaaatagaaagagacataagttcttacaataccacatgagcacccagaattttaaagctgacaaaacacacaactatcagctaaaaaggaccaaaccctgaccaaaccaaactactagtagcaacacaaaaagtaacacagagctgaccaacatcaaagttcacacagatcacaccaaagcagcaagcagcatttctatctcatagtttttcctgtagctaggcgctacaagggagaagaagtagaacgaccgcacagttattgaaccaaaataaccagataacaaaacatgtttcatttcatcggattcgtctgtcaactggcctccaaccacgagtcttgttgtagatctcacacgccatctttttgattttgagacttccgagctccaccaattttcttgccttctttttttgacgaatagcccaagtattaagccaaaaacaacaagagaaaatcacgttagtcggatcatcaattcggtcagtcccaaagcaacaattattgcgacatctccagatcgcccaaatgacagcaccacagccaaacagaaccagatttttttcagtcttattaaaactgttaatccaagtaccaaacaaatcatccacattatcaggaatagaatttaggccaagagcagagtagacaattctccacgtaaatctagctaccggacactgaaaaaacaaatggtctatggattctgaaaatccacaaaagatacattccagattacccttccaatttttcttgaacaaattatccttagttaaaatcttcttgtgcataacaagccacataaaaactttgatcttatgtggaagtctagttttccacaagaaactaggagccaaaggaatctgagagcacttgatttctttgtaaaaagaattaaagaattaacagaataacctttgctacccaaaagccaaacagatttatcttcttcctcagaaataatagtattattacattgtgtaataagattgttatactcaacttccaaggcaccataaatcctccttctgaaattcacagctctaaaatcagaagaaaaagcttttttcactgtgatatctttatcataagcaaaatcatacaacctagcatatttagaagacaaaggttctgaatcacaccaaatattatgccagaagctagtattactgccgtctcccactttttttttacaatacttgtaaaaattatctctagtatccaaaacacctttccaaaagtgagaatcactttgtctttttttcagagagataataggccttcctttgatatatttatatctaataatagtctgccacaatccattcgagttttccaacttccaaagccatttagcaagaagcacctcattcatcttgtgaagatccaaaacccccaaaccaccctgacctctcggagagcacaccattttccagtcagcaaggtggtatttcctttttgtatgaccaccttgccaaagaagcctttttctaaagatattaatattcttcacaatgaacttgggagctttatacatcgaaagcatgtatagggggacattggtgaggctgctattaatcaagactaaccgaccacccaaactaaggaattttccttgccaagcccccaattttttctcaactttctccactgtgggtaaccacaaagacttgcaaagtttcttatcatcaatcggaactcccaaatatttcattggaagacaattagaagggcaagtaaagatgtcagcataccagaattccttatcaacagcttcacctaaacagaaaatttcacttttatgaaaattgattttgagaccagacatctgttcaaataaacatagaatgaacttaagatttctggcaccctccagatcatctttgagcaaaaaaatggtatcatcagcatactgcaaacaacaacagccattaggaattatatgtggaatgagcccactgataataccttcatctttggctctgtgaaccatacaagcaagaccatcagcagcaatattaaatagcaaaggggagaaggggtcaccctgtctaacccctttatgggtggtaaaatagggacccactctgtcattagtcttgatggccactttaccacccctaacagttctcataacccaatcacaccatttgtcaccaaagccttttttcatcatcatatgatgaagaaagttccaatttaccttgtcatatgctttctcaaaatcaaccttaaagattatcccactctgcttctttttttcacctcatgaataatctcatgaagagaaaccactccatccatgatatatttacccttgataaaaccatactgaaaatcactgatcactttattgatacagctggccaatctgttggtcaaaactttagtaataatcttgtaacacacattaagtaaacaaataggtctgaaagctttaatgtcaatagcattaggaactttgggaataagagtcaccaccccaaaattaagtctctcaatgttaagagtgccagcatgaaaatcttgaaagaggttaaacagatcatctttaatcgtgtcccaaaactcctgaaaaaattcagcagggatactatcaggaccaggagctctattatgtttcatagaaaacaccacctctctaatttctttcatgtcaaacggcctggtcaagtgatctctgtcattatcatccaacattttcatatccaaatgattcagattcatactagattcttgagaatgaccaaacagattttggtaaaaagaagtcgccaggtgatttatctcatcatcatcatgagcaattctgtcttcatgagtaagagtcataattttaagcttccttctcttacacttggcaagtaaatgaaaatatctagaattttcgtcgccatccaaaatgaatttatcacgagctctctgcttgaccttaatattctcctcatcaactaacttcttaagagttaattccagatcaagcttctccatcctgtcattctctgacaagccacacacttcactaattttatcaaacatttctattttgtccaacagttcttttttcaattttttgtattgcccttcaatattaatattccaacctttgagcatttgcttcaaacgtttaattttcgttttccaaatgtcaatactctttttatctttcactggcatataccaattatctatcacttttttgtgaaagtctggtctagtcctccagcataattcatacttgaaatctctacttccaatcgagacaacatccgtttgaatgcacaaaggaacatggtcagaaaaggatctgttgagacctcgaacaataatattattgtaagcaagatcccactcaggactagccaggaatctatccaacttttcaaaagtagggtccatcctattattagaccatgtgaacaatctgttgttcaaatcaaattccacaagaccattctgctcaattatactgttaaaaaggaagctccacttattaacaccacccggtttgtttttttcatttgcttttctaataatattaaagtcacctccaacaagcaaaggagcacgacttctcgaacaaaaggaagaaagctcactcaagaatctgctcttgttctccttctgagcagcaccatacacattgacaaagttccatataagatttttttctctatgaaaaatcaaagtacgaatcatgaattcaccaatttcgttttcacgtacatcaaacacattagtattaaaaccaaccaataaaccaccagacctgccattaggggggcaaaaaaccaagcaaaaggcttgttgcccgccagcgaatcaagccaggaatcattaaaatggcttttttgggtttcttgcagaccaattagatcaactttctcatctctaatgagttctttcagaaactgaactttagaactcgccccaagaccctgacaattccagatgagacctatcatcagaaggggtcaggggggagaccaaaattcactgcttcccgctttctattaggtgtatacctaattttgggggaagcatttttttctgttttttacgatgtttgatttttcttccttttctaaggaccataacatccatgagatcataatcaatatctttctcagaatcaatatggacattgctatccacatcatcaatatcatcatcaactggttcctcacattttttgcttccacatgactgaatagccagaatctttctggacatttccaaaccctttatcagttcaatgttatcaatggcagaggaaacagaaggacccaaacaaaccccaattctactagaaatatcaagcaaactttcattactagcattaagtaaagagaagggattattgttcatacctttattgaggaaagcgtctttagcttcagctctagaaatagccttgtctgccaccttgatgtcttcattcttctctaatcttgaactttttcttataccatcagaagtagccatcagggtctcacttgattttttttccaccgaaatctgtttttcttccttagataatggaattgaaatcacctcaccaactttaacttggaagtcagtatgcatttcctccatatcatttgcaaattcttcaagttcttgagaacttaacagatcatcttcattaggatcaaaatcaaccttttcatcactaagatcttccaatctcatagcatcatctgaaatctttttaggactttccatgaaagcttctgtattcttaagataatctttgccctgggaggaggtttctcccactttaagattaggtaatgcatcttcgtcacaaccttcatcatcatttctaggttttttcccagatttatcaaaaaccggatcatttatcccatggatatcaacagaagctctcttacccaaattaattgtatcatcattccatccttcatcgctaatagattcaattctgaaatatatgtcatatagaaaaggtttcacagccacttcaacaactggcgggatcatagccacactcttaatatgaactttaaagcgcacaatatcctcggaatccaaagacataagatcaacttcctcaacagccccaatcatggaaccaatctcacagattgactgataattttgtagttcttcaggaacattctcagcaactatccaggcagtatgtaacctagatttaggtttagcacgagaactccatgggacaacaactatcttagctccagacattttcatcttaagttcaggaaagcttatcatctcgtcaagacgttcttgagaggggaattgcattaagaaaccagaatggcactttgtagccttccaagatttaccccagggaaaatggaaaccaaagtccttcaccaactcatcagcagatactaaaccctcaatcaccttaaccaatccaatgaaaaccctctttggttttttggaaaaaggtttagcaaagtgagagagatagaatccaagaccatcagcagccatgcctactatgggcatattcggtttgctctgttttggcaacacacatctagctgtgacatgagtatcttttcgacaaatatcacaccaaagagcattgaaacagtttctagcatgatgtccatcaaccccacatttttggcaaaaagcgggacgaaccggatcaatatctttcttcaaagaagatggagataagatgggattacctgattgaatgccatctccagatgaagaagacaacaatccatcctgagggtcagattttccaacctgcggcttcaatctccaactcatgttgcggttacggttccaagattgggaaccttgagcagaatctttttgtccccagcgatcccaagaaggattggggatattcttgttcttcggatccatctcaccaagaaacttgcaactacgaacaacaccagatcccaaccgaggccactcttcttcggaaatcggcgggcgcagagaagttacgcaccagccaccatgaaaaccagaacgagaggaaaccgggagcgaccaaagacgcgagagaaaggcggcgcagtgagggaaggagtgcgaacccacaaagtcaggaggaaaccctaacctcgactcgggagacgcaaaaccatgagacgcgaccggaggaagaaaccccaccgaatggtctagggttgaggcgagcggtgcgacccccgggctccaacccgaccaagaaaccaaattcccaagagcagcaggcgagcacttaccatgggcctcaaggcgagcagcaggcaccggcccagcggaaacaccatgagacgccacatgaacagggacgcgcggggaagacggagacacggcccagatggttttacgccttttctttttcgccatcctcaactctagtcaataccatgagaaaatcttccgctttccagttcttagcaataaaatttcaagtcgtgttctgttgcttgtgaaactcatttttggaagtacacagttaattccgttctgtattcaacctccatagaaaaggatccgacttacaaatcacaaacactattatctgcatactgcaattgttttttttcagttatgagttcagttcatagaatgggaatgtgttgttttgtttgtgtactatcgcatgtttttatctcagtacagatcgagtggactatgatgtggcttcaaatgcatcagaggggtggatatcaatatatcatcatatcttaatgcctcaacaaactctatatttgtgattgcacctttgatcatctgtgttggcaatttactctagaaaaatcagatacacgatctttgttttcttttttcatctggcattcctatctgggaattgggattatcatgtagaagcttatatacttagtctgataggacaggatacatcaataacatggttagttgtcaaaaaatcaacaaatttgcgctctctcctccccttctatcgggcgatcacctcatgtgacgtctcggatggccgggccaccgcgttctggctcgacgagcgacttcgccatctgcttccctgccttgttgtctcactgcgtcgacgccggtgctagcgtccacaacgtcctgtacgccggcatcgataacttcctgcaacgccgtctctcccccgcggcggaatccgagctgctcctactccgggtggccatcgacagcgtccgtctgtctatggggcatgacacccgccactgtgctctcccggatgacgacgacagaatccacacaggcgcgctctactaggttcttcgttcgatcacggttgaccccgcggcgcccgagcacctgtttggcaaaaccgtgcccccccccgtccggttcttcgcctagctcgcttgccgcgatcacctccaaaccaagaacaacttccaccgcaagtgcatagtcgccgattcgtcgtgcactgcttatggcaacgccccggagggcgtctctcatgtcctccttcactgcagcttcgcgtgcacactctggagctcccttggcgtcgctcgacctcctacgccccctgactcacttccacgcacggagttctcgacgttcgtgctgctctgcaagagaagaaacgccgtggtctttgatggagttcacccctccctcacggtgacccttcgccaggcaaggacgaggctgcgctgcaggcttcgtcgcgccgactttggtgtcgcggacctctggtgtcaggcatttgccgcggcgatgccctgacttttgagtcaagtatataatataattattcatttgggttgccccccccccccggccgttaaaaaatgtatgcaccttgcatttcgttggcactcttgagagtgctttcaactctattatcttcttcctttgctccttaattctttcttatgatttttaggccattccttttgatttagtggacctaacacaaattcagcagcacacactgcaagtttcatgtgaccttttcaataacatggctttagctctgtaaattgtttgcttctatttgacctggttatcactgtgactcatgtgacctatgcaccatggagaggccatgcttgtagcatggtgttaaatcgtccagttgtgacttgtgaggctaccaaccagggctcaaaccctggttcttacaaaaaaagaaattgcccccttgctgcgtgttcccgaaaagtacgggcgaagacccagcttgtggcaacagtgtccctttacagtaaaaagccatcttttgggtgcattttcccgacatttcaagtaatgcctttgggatgtgtctcactcttcaccccttgggtcgaggtttatgttttgtttttcttcattctgttttttttttttgcatcgctgctgattttcctagctgctcaaaggttaccagaatacaaatatcgctatgagccttgacatctgctggcacatatgtgtggtcacagttcaacggtataatttatggaactatttataatcacagctcatgcatatgacttgtctctaaaattgtaaatgactaatgggggctgttatgagtgttgaaagtaagagatttttttttcattgaggacaaaaaagtaactgaacttaacttgatttgtgcaggtccaaaattgagtgct

SEQ ID NO: 254 - DNA, 3925 bp, Zea mays
  Intron number 1 from transcript GRMZM2G140590_T07 (locus G RMZM2G140590) derived from phytozome v7.0 (chr-ID 8; pos 1 15015630 to 115019554)
tacgtcggatcttcgcgtcacccgggtcgaatcaggtggcgttccttggaatttggaaagagctggatcttggatgcgtttgtggtaggaaatgacccttaatttcttgtgaagtggcccgctgatgcgtgcaaagccgggatttgggtgggtagtgttacagaatgagcgaagctagctgttgtggccgtattttaactgtttatgttattggatttagatatgatagagctgaagttaatctctcctatttcgtttatcaaacggcatttagcatttgtggaattagtatttatgttggggtatatgatgaagtgatgttagcttaccttgttcgaggagtttaatatgtggaagagaggacgactatcagagttctatgcacctttcttcatgaaggggagagctttgtgcatcctttgttcataaagtagctgggataatatcccttaaactaaaaaaggaccataaccatcgccttggaagtcatagagtagtagagcttaggctcataaaaaatatgttctttcacagataagaactgacaaatatttgttgagtaaatttcattgaaccaccacatagatgatacaagtgggtacccaatgctattttagttcatctctccccaccaaaattagttattacatgtcatgctgttttagttcacttcagaaagttttgatcaccccagtgaacccagcaagtggaccttgcatccctaaccccagatccttgtcttaactgggaagactgaagccaaatttatttcaagtcagctcgtttcttgttttgtaaaacacgcacgaacatactctgtggacaatggggtgggtgggtatgttatatgtttatcttctattaatgtaaatacacaattctcctgtgtattcacagaaaaagaaaagaaaaccagactcatgtcttgccaagcgaaactaccactggttttggcccccttccacaaactaccactattctcctcctacattatcctgagcagtgagcatctgagccaactcggcagtgtcacatagtgcaaaacagagtaaaacaaagtagtggtaaaatgtgacaatgacaagtgggcccaggtgctgaggatactgtaggaggcatagctttatgagaagcgcccaaagtagtgtggttctgtgaaatggccttcagaagttatgtgacagttaggacagaaatgtggtagttttgggaaatttactctgatttgtttgatgatgattattgagcacatatctgcctgccatatcccctagattttgccctgcactctataatcatgtgatattgattagcatcagtagcttcggttttatcttttctttgtttgttatgtatttcaccagtagatttaagtatccctttatttatttatttttcttgaaagcgcaggagaactgcgcgataatatattaaagaagaggggcagatacaagaacaaactgggggcccctacggcggccaataacaggcatacagaaacccatccatgactaaaaaactaacaagaactaccacaatgctagctaactagcagggaggcccagaatgggggcggtgagcaaagacaactttgcacaagccatcttccaaaggtcaacctccaacccaactcttctaattgcgtcagcaatactggggctcttactgtcaaatacacagccattgcgctgcttccataaggtccaaactcccagaatgactagagaattgaggccatcccttgcaattccagagtccttagtgcataacgttctccaccattcaaggaaggcactatcctcagattggggggcaagaagctgaaggttcacttgaagaagcagtttgaaccaaaattctcgagcaaaaacacatccaatcaacatatggtccaaggtttcttgatcctggtcacataatggacatctctccggatggtccatgcctcttttctgcagcctataattatatgctgtccaaaccttcctgtgtgcgaccaaccacataaaaaacttggtttttggaggagcccaagttttccatattctatgaaaaggctcaaactcagaagatcccataaagaaacccctatatgcttcctttgaggagaactttccgtttgaagctaggcggaaaaaaaatgcttgtcttcaacttgaggtcttagaacaattgagtcaattaaatcccacaagatgagaaattcattgataattccaacagaaagagctccctgaatgtcagaaatccagctctgattagagatagcatccaccactgttctcttgttaacccttctcttaggaaaagtatccctttatttatcacttaattcttccagtttaaaaaatcagctgtattaggattttaggtagtcaaatttctttaacttagcccatcaatacatgcacagttacataagttgacaacacatgattgattttattagattttttgtagaccaaggcatttagccctgcttattttgaaagcatcacataagttttgctggggataccagtttacaagaactgcggagcccagttaaaactcacctccactaaaagccaacaccaggccctacccaaccagagaaacactaacaaaacaggtaggttgctacaacgaaaaacaaaaaggaggaaaccacagcaagagagaaattctgaatagcaaaatgaaaagaaggaacagctaagccacagatgctttgcctttagcctcctttttcttcatgtcttttggcaaccagacgctcctagttgtttgacaccatctttccgtctaggcacatttcactatcttgaaagtccatcctttatcttcaacaggaattcctccatcttgtctctgtcttccttcttcgtcgtcatctgccactggtttagaaaaccaagacattgaagccacttgtttaggagatttaagcatttttttggagaaaactagaccatttcttgttttccacaacacccaatccacaccaactactatcacccacaaggacttgttcctatctccaccatctttgttcaggcacagctcctggaatttatcaacgatggtggtattttcggccagcccaagctgtcctgacccagcaccaggccaccatcgctataaggcatctgaacagcagatggtccacttgatttttactagatagcatataacttccactatttcgaatgatatatcactacaaaaatcacaagtaaaagtgtcacattggagactgtcactttcttaaatgacttacatttggaatcagaaggagtactatgtttttagattaaagtccatatcagtgggaatgggatggtcaaactttgctctgagagactagatattcacattttaatcacgtgaaaaaacaaaatatatacactgttgcattatttggtgggcttagacactattgtacatcagtgggatatggaatgtgcatattagaattgttatagtttgttagttgcgtagttaatacatgtatgttttcagttatatatattagacctttataagaaacacaactctgtatatttgcaagtatggaacgtggccgacaatattattttacaccaggaggtgccttagcagcacaggtggcgccttagtctggttcctgttctagtaaggctgcatacaatgcattcttctttgtgtccatcaagtttgtgccttggaggagaatttggagatcctcggcaaccctggggtgtaaattttttttgtgtcttgctgtcaaaaagtggtctggatggctaatcaaaattgtacaaacaatattgtacaaacatagtttaacgcatcctgctgctagcttattgtgtgatcaagctgaagagaccatcctgcatattttagtttcttgtattttcgctcggcaggtctggaccttggtattacagaagcttggacttgt

SEQ ID NO: 255 - DNA, 7938 bp, Zea mays
  Intron number 3 from transcript GRMZM2G087741_T01 (locus G RMZM2G087741) derived from phytozome v7.0 (chr-ID 3; pos 5 3882390 to 53890327)
tggaagctcgccggcggctaccgccacgcactccggtgaggaaaggaaataaaacaaaccccacgcacgctccccatctctacacggcacaagttttttttttaatggcgaatatccaggacgctacgtcgcgttgcacgctggttttgttgccgtgtgtactcgtatgtgttgtgtgtatcaaaagacgcgagcctctgaaagaattcatgtgcatgcgtgtgcgcgtgttcttagcttgctgaagggtcaaatcgtgtccatgcaaatggggtgcaggggtgtcagagctaggctggggtaaagcattgggagggcggtgcttgcttgtgtagggttttgtccaaggttggaggcttcctcctctctctcacataggctttagctataggccgtgtgatggaacttgagagtgctgtggtggggagtgacattgcttggccatggccttgcccgcacgatgccagaatcttggtctggctggcctgctgcttgcgtttttactaccagaggatgcagttgaaagtagagaaatatctcgtgcttatacgagatctcttacggatccacttgtcgtactttgacaagacatatcatatcatcacggtagtggtaaatttctggtggtgccggttagatatccttattaccggccttcttttctttaaagacttttgccccggagaaggggaaaaaaatacaggcgtttaggttttcaccaaacaatattgcactatgggagagtgctaggatattaatattaatcattttatgactaagataatcgacccagcagttttatatagatccactattttatggaggtagccaagatcagttttctctcctactagtacaacaagagttctctacttcaatataaaagtatcattattagtgtggtgaagtcttgggtgcatatgattccatctgccaggacttgaatcctactgttcatcaatttaggccctgtttaattttacctcagctaaattttagctgaaagctagtattagttagataaaggttagttagcagtggagtgtttagttgcttagataatgaactagctaatacaaacaaaagattaaaaaaacgacatgagtactcttttgatttaaggtcaccaataaaagttatgggtatatataggtcaatcacccagtattagatgtcattagctagggttttaggagataatagaatttagtctctagctaaagtttgtctagtctattagctggtatgtttggtttgaaggacactagatgtttgtacttcgaattcaatggctgaatttatctcttgctaatctgaacatagctacggtgggaagttattcttcttcgtatagaaaaccataaacagattatttgggtccaaaacacagatagctagagcctttaaacagacgtgtttcatgataatgtatggaataaatgaatgatacacctaagggcagtattttttgtcagtattattagtgcaatgccaacaattatagggaaatattgtatgaaggtcacatgataaaaactgtaccattataaaaggaaaatcaagttgctgctttctaaagtgaaattctctccgggcagaaagtgaagcacgtatatattggactaataagatgctttaatgatgtcctgtcaaatcgttgctcagaacgtcagaagagctagctactgcttacaggccttataataaataaagataatattgcgtgcatgttactcgattggttggttcgggttctttggtagcaatattttgtgcaccccaatatttatataagtaatagactggcaatgctatgctttgacttgacaagaccttgtgggacccattttctgatgcataatgattttgtttttcggtaatgggggatgtaaaccgcgtgtctttagcctatggtcaacaacagaaatgcacggcaatcatccaagaaaactcatcagctattttgcatgcatgtgcctgattgccattaggaaaaacaaatatgggactggttaggcctgatccagagcttgttgatatgcttgaggttttgaaattttcgtcctctctgtgaaagaatagaattatatgtctgtttggttttctgcctaagtcgtcataacttgtctaacttttatgtctaaggttagtttttcaattcagcgagtaaacataggcatgttgtgatgtcttagataggcttgtgatgtcttacgtaggaaaccaaacatgccctcctctttcctagtacctccagcctccccaccaccaccaccacacaaacaaacacacacaatcgtctcacagatgatgaaattgtacaatacggtctatgaaaacaataaccaaatcatgtatcaaggtatttgcagtgccagacgtgtaaggactaaggtgcagtagtgtcgtggcctctctgaattaatattagatcacatggattaatacacaaaggttgtgcatcacataatgtcaaataggtgcaaataacaagaattttgttttcatagctataattaactttccgtaggcacaatatgtgtgtttctatttttaaaaaaggttagaaaatgacctttcagtgtaactataaaaaacaacacttatgcactcattgtcggccctaagggtggggcagaggggccgtcaccctagccctcaagtccatagggctcaactctaggtatatatatagttagattgtagaagaaacttttaaagtaatactataatatgcatcttttttatttacttgttgtttgatatgtttttagatgtatactgagtgcttatattggtcacatttatgtataaaaataattagaagggcctttattttgaattttgtcctgagcccctaaaatctcaagaccgccattgtatgcactacaaaaatacatgtccattatcttatcttgtacatttgtgacaggtaatgaacttcgtttattcaaaacaattaaaaaaagatgttccttcatgtacttgatctattttaaaaatagaaaattgaccgtagtttcccctcataaattctatattgttattctatgaaccaccttcaattgttattaatatgtcataatgttcgctacattattttttcataaaacctccaaaattttatatctaatggaattaatattgtttagaaactattagttttggatgcatgtgcatgcatgagagtttgtgctgagttctatgagcccatcatcaagtatcagtatttgtccaatgagttaaaaaggaaatgaaatagatgaaggttttaagtcctatctcttaggggaaactcatgtcctttgtgattttttgagttatcttctcccacttgagcgcaacatattcatgcgtgtttgcggctagatgacatcgattttgtagctagatcatgttgataggtgcattcttccttcattacaacatttttaggaatttgattttggtgaaaaaaagcttatacatcatataaaaattgtctgagcttttgtcacatattttgatatatacatatagtagatgaatagaatataaatatcttgaaaaataatcagaactcacttagaacgttggatttgtgggggaatgttgttggatttggatcctagtatttttcctgtgtggactaggaacaaatgactgaacatattagagtcctaccatggttattaaaactacgttaaaacaaagtttaaacgtcatctaaacgataaaactctattagggcagtgaaacgttggaacgttttacaattcgttgtaaaacaccattttcgtttaaacgtagcgttttagtgtttaaatgctatttgtagtgaaacgtcatgtttcgagcgttttatccatggcctatgacatttggcccagcctagtcttagaaattgagcccaacggcccatctcaccctctcgccactccaaaaagcctacacacactccggtcgccgtgacgcctccagactccagtcgcgcagtgtcgccggtacgcaagggcaaggcctgccattgtcgcctggtgctcagtcaccatcgtttcctagtgctcgatcgcgtcgttggttcagttccaccctcatgcaaggcctgcctgacgcacacaccaccgactcaggaagcacgcgcctacgccgatccacgccgacggtcgaccgacgtctgttgctcgcctgatcatctggtatgtgctccaagcccccaatgctcctctggtatgtgtcgtcgtctggactgtcctacaatattcatggggaccccctcaatctagaggaactttggaagaaatatataacatgtagggcctgtttggttcgctacctaacttgccacactttgcctaacttttctgcctaaggttagttcttcaattcgaacgactaaccttaggcaaagtgtggcgcagttagccacgaaccaaacaggcccgtaaaccttcatctctttctctctctacctctagagaagtttccaacaatgatttgtgttgaatagaggaattcaaacagatgtccgtcctgatgcttgattttctccaaaattcatatggattcattcataggaaaccatgggagttccatagggttccaagttgcaatcctttgttccaaaggggcatacatggatttttcttattgcggcaaatccctacaaaatggtttgcattaagggaagaatggtttgcaataagattattatgtttcagattggtttttattcaaacttcctagtgtgtgtgttttctagaatactcttccatcatctagaaaactatattgaaaaagtgtaggcagacgagttatgactggaagattacctgggggtcttggttcgtaggaaattaggaaatatggttgacgtttgtgtgatatgaactcagatggtgacttttgggtgcttgagtaatactccctctgttcacaaatatatgacgtcgttgactttttttcaaaactttgaccactcgcttattcaaaatatttattagaaaatgtcaaatttcaagtcacgctcaaacgatgttaagtgataaaataaatcacaacaaaataaatgacaactcacttttttttgaaagatgagtggtcaaagttttagaaaaaaaatcaacggcgtaatatatttgtgaacagaggtagtaaatagtttatatttctcccacttctatcaaataagcatgtttaacttttaccagttatgtccatttttaattgtgattcttgatctgcgcttcgggaaaataagctccagaaatgctaccatcctatttggtcatgccatataataacaataataataacttttatgttattaacaaaaggttaggaccatagggaatattgttctttttgaaaaaaatactaaatattggatttctagataactagtttatttattctagttgagtgggatgcaaagaaaaataaacactgaatgatgaaaatgcatttttttggtggggcagggaaaaagttatttgcattttttgtgctatggtggatcatgtaatgaagtactcaaagtagatctggtaatcgcacaatcagatctgcaagaacttctataattctcctaattgaataagtgcttgatgtttgaaaaaggtcttcccatatttttctttagaagcaagattcgctcttgggatagtgagaacttcgagttggaccattggtggtccaaagttggtattagggcatgtttggatacaaaagtcaattactaagtagctaaaaaatatccctagtgcatccaaacaagagggctactagatggactgtttttagccaagtctccaactacgcagccaaaatcaactagctaaccaaactcgactaatttgagctaattttagcctaaataataacccctagctcatccaaataggccattggtatgtgatagtttgagattaggatgacaaattatgttacatttgttttattcctaccataatatgcatataactatagttctacatattcttatttcagtcattttcagactctaataacttttaaatatggtaagaataattagatcagatcttgctaacgcaagatatttgttgaaaaactgttttgctatccagattggcagttagtttgtgcaggaccatgcgatagtaaccaggttcctggatcgataggattgaggaacgggaatgtggtacatggtacgctactaaaactaggttttaacactacgggaatgagattgttcccacgtccccggaactgaacaaacgttcccggaacgaggaacgtggccacgttcccggttaccatgggcggacccacaggggggtccgggtgggccctggcacaccctaagccaggcccatcggagaccccacacgttcatcccgtttggccaacgcccgacggctgttccaactttcatctctgaatctcctatccttcggcttcccacaaccacaagacgatcgctcctcctgcgcaagacggctgttcctggggctggcttcctgcgcggctgaccggctgttcctggcttccagctctcgtctcgtctcgccaaatccggtcagacaactgatctttatctatggattttgcgaagtaattttgtctgttactctcgacacctccgctgacgggcaaccgccgaccgccattcatccgttgtgcccattggctttagccaggctccccggtccccgctttcggccttgctgttcaacttgaacgacgccacagccggccagataatatatatttttgttgaattttgtctaatgcaaattggtattgcttttgccggtggcgacaacaagtgttgaatgggcattttctacaatgagtttggtaaatactaaattgagaaacaagatgtgtggtacttttttggatgattgtcttgttacatacatcgaaagagatattttcttcgaagtgaatgaagaagatataattgaaacttttatggtgttgaggaagcacagaccagataagtagtattattacaatctttatgttttatgtatgcaattttcatgcttatttgttgagtgtcaaactttatatctatatatcaaattgtttacccaatttactataaaattatatatacattagatagaattctacatgaaaattttgttacggcacaccctatgtaaaaatcctaggtccgccactgccggttactaaggtggaactgtataaatggatttactatctttttctaacgacttaagcttttggttctcaaccagtaacatggaccactccactcattggtaacatgaaccgacgataatgatggactatcaccaacggttattgttaccaaccattggtgataattgcccccattttcatcaatggttcgtaacatgaaccggcggtgatgagcataaccaatgacttggagcaaaccggcagtgatgatgagctatgtagttgtgtacgccataaagaatatcacacatgaattactgaaatgtcaaagatgactttaagggagacattgatttaaaaagaaaatcatttctgaaggtactgattgttgatttgctaatctacatgtcatgatatgtcatgtttatttctagttttctttctttttggcctccaatcatgtttcagagattaggaaactatatgttgactcgtgctatttgtcgtggatttacatcaactgatggatatgatgcccgtccatattttcatatacaatggtgcatgaacaagtaccattagtgttgtaactccaaaaaattataggttgggtaagcaaatgattttcatgttacaaaatgtaactaatcattattacatgggagcatcgttaagatgtgttcgtttcagttcctttctactcggcctgtctgcaaaacatactttcaggtgatatgtggatgcctagactacatggaaatgatttatttctgacttttatccttccttcccacttcccag

SEQ ID NO: 256 - DNA, 18090 bp, Zea mays
  Intron number 2 from transcript GRMZM2G312375_T01 (locus G RMZM2G312375) derived from phytozome v7.0 (chr-ID 1; pos 2 90526608 to 290544697 reverse strand)
gtttatttcagccgtacacatatttaggtgacgaggtaatccatgcttagtttttagatttggcgaccttgtgaaagggaaatagggtcaaacctttccctaaatgattttggtggttgaattgcccagcacagacatttggactaactagtttgctctagattatatgttctacaggtgccataggttcaacacaaaccaataaaaagaacaagttagggttcaaaacaaagggagcaaagaaaaccgaagtgtgccctggtctggcgcatcggacagtctggtatgccaccggacagtgtctggtgcaccagggtggatcaactctaaactcctcagcttcgggtttctggaaatgccactccactataattcaccggactgttcggtgtagcaccggactgtccggtgtgccaaatggagcaacggctactgtgccaacggtcgtctgcaaaagcaacagtgaacagtgcgcgtctacgcgcgcagagtcagagcagcgccagaaggtgcaccggacagtgaacagtgcctgtctggtgcggcaccggactgtccggtgccccatgaagtcagagctccaacggtcgaatccatcagaaccctaacggttttgtgatgtggctggcgcaccggactgtccggtgcgcccatcgacagatagcctccccaacaaccattttggtgggtggggctataaatacccccaaccaccacacttcaatgcatccaagttttttagacatctcactcaatacaagagctagtgcattcaatacaagacataaatagattgaatcaaagcctctccaagtcccaattccactcaaagcaattagtgactagagagagagttttcctcgtgttctttgagctcttgcacttggatcgcttttcttcttcctctttcttgttctcaagacacttgtaatcaaagcaagagacaccaagttgtggtggtccatgtaggggtctaagtgacccggtttgattaaggagaaaagctcactcggtctaggtgaccgtttgagaaagggaaatgagagcacctagagggggtgaataggtgatcctgcaaaattcaacactaaattccaacaagcttgatcaaagagatgttagcacgagttaatcaagtctatgaggcgagctcttgcgaacacagacaatcaaagagagaagcaacacaagagacacgcgattttatcccatggttcggccaagtaacacttgcctacttccacattgtagcgtcctaatggacgagggttgcactcaacccctttcaagtgatccaatgatcaacttgaataccacggtgttcttccttatagttttcttctcgtttgcgaggaatctccacaagttgtagcttctcgcccttacacgattgatcacaaagaacgcacaagagtaaggttgggaagagcaacacacacaagactcaaatcgcagcacacccacgcacacaagagaagaattgagctcaaaagacaacacggggagttctcgactcgaatggagctcaaatctctaacacaatgaaacgaatgcgcgggagcagagtctggatgccttaggatgcttagtgaatgcttgggtaactccatgcgccaaggggtcccttttatagccccaaggcagctaggagccgttggagaccaacaaggaaggccatccttgccttctgtcgagtggcgcaccggacagtccggtgcgccaccggacagtcactgtagacggtccagtgtggatctccttcctttttttggcgcagacgaccgttgcaccttcgggccagttggcgcaccggacactatccggtgcacaccggacagtccggtgccccctgccaaccgttggtgtgggccacacgtcaaccgcggattgcgcggccgaccgttgcactggtgactgttgactcaccggacagtccggtgaatttaagccgtacgccgccaaacttttccgagagtggcatgttctccggagtttagcctggcgcaccggacactgtccggtgcaccaacggacagtccgatgtgccagactgagcagagttttggttgcactgagccaagactttttgcggttcttttcacgatgtttctagcacttagacagaatatgttagtactcaaaacaatgtactaagtctagaaatgtaccttgttacatgatttgcacttcttgtttgtttggcacataatcaactaacttaatatgtgttggacacttaatcaccaaaacattatagaaatggcccaagggcacatttctctttcaatctccctctttttggtgatttatgccaacacatcaaaaagcaacaaaaataagtgcaacatcaatgcaaataaggaccaaattgtttttgactctaatttgacatatttggatcattctttgccaccacttggtttgtttttgcaaatcaaattcattttcctatctctaattcaaactcacttgtttgggcataaagagagataatccaagaatgaaattgatcaagagccaaaaactccccctttttcccataatcaaaattctccccccttaagagaccaaattctgcaattatagagtattttgacaaatcaaaagttctaactctattgttttcaaaattcacaagtggtagttgatccatttgctttggccttaatttctccccctttggcattaagcaccaaaacgggatcattcttggccctttaaccccattgcctcaccaaaattgtcaattaagagcaaaaaggcaataggagcataagaatgaacttggaattaagtacactaataccggagtgcagtggaagtctttgcatggtccaagttcacctttccttttcaattcacctttgagactacatcaagtatagtcaacaacaaaggttagtctcaaagggtcaagttgtagcacttctccccctaaatatgtgcatcattcacacatggacttgtgaggtccggggatcccttgcacagcttgagaaccataaataaacaacaaatcacataaatacatgaagtaacgtgatcaaaggcataaaacacatgtatgctatagatcaatccaagttacgcgaatctaagacatttagctcactacgcagcctgcaaaaggttttctcatctaagggcttggtaaagatatcggctagctagttttctgtgctaatatggaacaccttgatatctcccttttgctggtggtccctcagaaagtgatgtcggatgtctatgtgcttagtgcggctgtgttcaacaggattatccgccatgcggattgcactctcattgtcacataggagtgggactttgctcagattgtggctaaagtccctgagggtttgcctcatccaaattagttgcgcgcaacactgtcctgcggcaacatactcggcctcagcggtggatagggcaacagatgtttgtttctttgaactccaagacaccagggaccttcctaggaattggcacatccctgatgtactcttcctatcaaccttgcatccagcataatcagagtctgcgtatccaattaagtcaaaggtagacccctttggataccaaatcccgaagcaaggcgtaccaactaaatatctaagaattcgcttaacgaccacaaggtgacattccttggggtcggattgatatctagcacacgtgcatacacttagcataatgtccggtctactagcacataaataaaggaaggaacctatcatagactggtatgccttttgatcaacggacttacctcctttgttgaggtcgacatgctcatcggttcccatcggtgtctttgcgggctttgcgtccttcatcccaaacctcttgagaaggtcttgagtgtacttcgtttgggagaggaaggtgccatccttgagttgcttcacttggaacccaaggaagtaggtcaactcgcccatcatcgacatctcaaacttttgagtcatcaccctgctaaactcctcacaagacttttggttagtagaaccaaatattatgtcatcgacataaatttggcacacaaaaaggtcaccatcacaagtcttagtgaaaagagtgggatcggctttcccaaccttgaaagcattaacaattaagaaatctctaaggcattcataccatgctcttggggcttgcttaagtccatagagcgccttagagagcttacacacatggtcggggtacctgtcatcctcaaagccagggggttgttccacgtatacctcctccttgatcggcccattgaggaaagcgctctttacgtccatttgaaacaacctgaaagaatggtgagcggcataggctaatagaatgcgaatagactctagcctagccacaggagcaaaagtctcctcaaaatccaaacctgcgacttgggcataaccttttgccacaagtcgagccttgtttcttgtcaccaccccgtgctcgtcttgcttgttgcggaacacccacttggttcccacaacattttgctttggacgtggcaccaggctccaaacttcatttcacttgaagttgttgagctcttcctgcatggccaacacccaatccggatcctgcaaggcctcttctaccctgaaaggctcaatagaagagacaaacgagtatgctcacaaagattagctaatctgagcgagcagttactcccttgcttatgtcacccagtatctgatcgacggggtgatgtcgttggatcgtcgctcggacttgagttggaggggctagtggtgcttcttcctccaaaacttgtcctttcttgtgctcccccttgatcacatgcctcttcttgaggaacctgcccatcatcttgagttgggggatgcaccattgttgaggaagaaggctgatcttgctcttgttgttcctgtggtcgcacatcacctatcgccattgtgcgtaatgcggccgttggaacatcatcttcacctacatcatcaagatcaatttgctctcttggagagccattagtctcatcaaatacaacgtcgctagagacttcaaccaaacccgatgatttgttgaagactctatacgcctttgtatttgagtcataccctagtaaaaacccttctactgccttgggagcaaatttagaatttctacctttcttcactagaatgtaacatttgctcccaaatacacaaaagtatgagacgttgggtttgttaccggtaagaagttcatacgaggtcttcttgagggggcgatgaaggtagagccgatttatggcgtgggaagctgtgttcacggcttccgaccaaaaccgctcaggcgtcttgaactctccaagcatcattctcaccatgtcgatgagcgtcctgatcttcctctctaccacaccgttttgctgcggtgtgtagggagcggagaactcgtgcttgatgccttcctcctcaagatactcctccacttgcagattcttgaactcggacccgttgtcgcttcttatcttttttcactttgagctcaaattcattttgagccctccttagaaagcgctttagggtcctttgggtttctgttttatcctgcaaaaagaacacccaagtgaagcgggaaaaatcatcaacaataacaagaccatacttacttcccccgatgctaaggtaggcaatgggtccgtagaggtccatatgtagtagctccagtggtcttgatgttgtcatcatattcttgctgtgatgagtgctccccacctgttttcctgcctgacaagctgcacaaggtctatctttctcgaaacatacatttgttagtcctaacacatgttctccctttagaagtttgtgaaggttcttcatcccaacatgtgctagacggtgatgccacagccagcccatgctagtcttagctattaagcatgcatctagatcggcctcctctttcgaaaaatcaactaagtagagtttgccgtctagtacacccttaaacgctaatgaaccatcactccttctaaagacagatacatctatattggtaaatagacaattataacccatattacataattgactcacagacaataagttgtacctgagcgattcaactaagaacacattggatatagaatgctcggatgaaatggctatcttccccaatcctttaaccttgccttggttcccatctccaaagatgatcgaatcctgggaatccttgttcttgacgtaggaggtgaacatcttcttctccccgtcatatggtttgtgcatccgctgtcgataatccagcttgagcccccggatgcataaacctgcaaggtaatttacacttgggttttaggtacccaactcttgttgggtcctacaaggttagtcacaatagcctttggaacccaaatacaattcttgtctcccttgcatttggatcccaactttctatctactactttttcattcttacataagagcgcaaatgaagtagtgaatcaaaagcattatgatcataactcctatgagcattcctagaatattttctattatacataaaagcatgattcttttgaatactactagccataggggccttccctttctccttggcgagaatgggagccttttggcttgttaagttcttggcttccttttgaaaaccaagcccatccttaattgaggggtgtctaccaattgtgtaggcatccctagcaaactttaatttatcaaaatcaatcttgcaagtcttaagttgagcattaagacttgccacctcatcatttaatttagaaatggacgctagatgatcatcacaagcatcaatatcaaaatccttgcatctattgcaaataactacatgttctacacaagatctagtagtattagcttcctctagcttagcatttagatcatcattcaaaatctttaaactagagattgattcatggcacgcagacaattcagaggataacatttcatttctcttaatttctagagcaagtgatttttgaacgctaacaaatttatcatgctcttcatacaagatatcctcttgtttttctaaaagtctatccttttcatttaaagcatcaattaactcattaattttatctactttagctctatctaaacccttaaataaatcagtataatctacttcatcatcactagaatcatcatcgcttgaagtagtatacttaggggtttctcgaacacttaccttattttccttggccatgaggcaagtgtggcattcgttggggaaaagagaagacttgttgaaggccgaggctgccagtccttcatcgtcggagtcggatgaagagcagtccgagtcctattctttgccaagctgtgcctcgcccttcgccttcttgtaaaccttcttcttctccctcttcccatgcttttcttgttcctggtcattttcattatcggggcattgtgctataaaatgaccagtcttaccgcatttgaagcaggagcgcttcccctttgctttgttcttgttggggtgctccttgcgtccttttagagcggtcttgaagcgtttaataattagggccatctcttcttcatttagcccgacaacttcaacttgtgccaccttgcttggtagtgcctccctgctgcttgttgctttgagggcaacagtttgaggctcgtggacaggtagtggactgtttagagcattgtccacatatcgggtctccttcaccatcatgcgcccgcttacaaacttcccaagaatctcctcgggcgtcatcttggtgtacctgggattctcacgaataaggttaacaagatggggtcaattaccgtgaaagaccttagcataagtcggacgacgtcgtggtccgtccatcttgtgcttccatagcttctaatcttgttaaccagggtcttgagcctgttgtatgtttgtgttggattctctcccctgatcatcgcgaaccttcccagctcgccttccaccaactccattttggtgatcatggtggcgtcgttcccctcatgagatatcttgagggtgtcccagatttgcttggcgttgtccaagccgctcaccttgttgtactcatccctgcacaaagatgctagcaagacagtggtagcttgtgcattcttatgaatttgctcgttaataaacataggattatccgtactatcaaaatgcattccattttcaactatctcccaaatactaggatggagagaaaataagtgactacgcattttgtgactccaaaaagagtagtcttctccatcaaaatgtggaggtttaccaagtggaattgatagcaaatgagcattataattgaatggaatacgagaataatcaaatgaataattttgattaacctgtttctttttagacgagtcatcgtcgtcgtcgtctcttggtgaagaagaagattcatcgctgtcgtagtagacgatctttttgatgcgcctcttcttcccgtccttcttcttgtgactcgagccagagtcagtgggcttgtcatctcttggctcattgaagatggactccttctccttgtcgttgaccatcatcccctttcccttaggatccatctcttcgggcgattaatcccttatgtgaagagaacggctttcataccaattgagagcacctagaggggggtgaataggtgatcctgcaaaatttaacactaaattccaacaagcttgatcaaagagatgttagcacgagttaatcaagtctatgaggcgggctcttgcgaacatagacaatcaaagagagaagcaacacaagagacacgcgattttatctcgtggttcggccaagtaacacttgcctacttccacgttgtggcgtcccaatggacgagggttgcactcaacccctttcaagtgatccaatgatcaacttgaataccacggtgttcttccttatagttttcttctcgtttgcgaggaatcttcacaagttggagcctctcgcccttacatgattgatcacaaagaacgcacaagagtaaggttgggaagagcaacacacacaagactcaaatcgcagcacacccatgcacacaagagaagaattgagctcaaaagacaacacggggaattctcgactcgaatggagctcaaatctctaacacaatgaaatgagtgcgcgggaacagagtctggatgccttaggatgcttagtgaatgcttaggtaactcctccatgcgccaaggggtcccttttatagccccaaggcagctaggagccgttggagaccaacaaggaaggccatccttgccttctgtcgagtggcgcaccggacagtccggtgcgccaccggacagtcactgtagatggtctggcgcggatctccttccttttctggcgtagacggccgttgcaccttcgggccagttggcgcaccggacattctggtgcccctgccgaccattggtgcgggccacgcgtcacccgcggattgtgcggctgaccgttgcgctggcgatcgttggctcactggacagttcggtgcaccaccagacagtccgatgaattttagtcgtacgccgccaaacttttcccgagagtggccttttcaccggagttcagcctggcgcaccggacactgtccggtgtgccagactgagcagagttttggctgcaccgagccaagactttttgcagttcttttctcgatgtttctagcacttagcagaatatgttagtactcaaaacaatgtactaagtctagaaacgtaccttgttacatgatttgcacttcttgtttgtttggcacataatcaactcacttaatatgtgttggacacttaatcaccaaaacattatagaaatggcccaagggcacatttctctttcaggaaagggttgaaagagacccgatctttgtgaccacctcaatggggagtaggtttgcaagaaccgaacctcggtaaaataaatcatcgtgtcatccgcttcatttccttttgatttgttttttgccctctcttttggactcaatttttattctaacgctaatcctagcttgtagtgtgcgcttaagtttataattttcagattccgcctattcacccccctctaggcgactttcaattggtatcgtagcctggtacttcattagcctaaccgctcgaagtgatgtcgggagatcacgcctagaaggagatcgtgatcggcgagaagcccgccacaagccatggaaagactccatcgggagagtccggcaacaagatgaagggatccccttcacacaacaaatcgcatcggaacagcgaaaagaaaaagaagatgaagaaggtggtctactacgagaccgattcttcgtcgccatcaacatccggctccgacgcgtcgtccgtcacttctaagcgccatgagcgcaagaagtatagtaagatgccactttggtattcccgtatctctaaacgtactcctttactttccgtcccactaggcaaaccacccgttttttagggtgaagattataacatgtggagtgataaaatgaggcatcacctaacctcaatccacgctagtatttgggacattgttgagtttggagcgcaggtaccatcgccgggggacgaaggctatgactcggatgaggtcgcccaaatctggcacttcaactcccaagccactactatactcctcgcctctctaagtcgagaggagtataataaggtgcaagggttgaagagtgccaaagagatttaggatgtactcaagaccgcgcacgaaggagatgaggtgaccaagatcaccaagcgggaaacgatcgagggggagctcggtcgattcatgctcaaccaaggggaggagccacaagcaatgtacaaccggctcaagaccttggtgaatcaagtgtgcaacctcaggagcacaaaatgggatgaccatatggtcaaggttattctaagatcacttgtttttcttaatcctacacaagttcaattaattcgtggtgatcctagatacaagctaatgcctcccgaggaggttataggaaagtttgtgagctttgaattgatgatcaaaggctccaaacaaatcatcgagcgaggcaccacctcaacacctgaggtgcaacccgttgccttcaaagcaacggaagagaagaaagaagagtctacatcaagtaggcttcccatcgacgcctccaagctcgacaacgaggagatggcgctcatcatcaagagcttccgtcaaatcctcaagcaacggaaggggaaagactacaagccccgttccaagaaagtttgctacaagtgtggtaagcccggtcatttcattgctaaatgtgcattatctagttatagtgacaggggcgacgacaagaaggaaaaaaggaaggaaaagaagaaatactacaagaagaagggcggcgatgcccatgtatgccgggagtgggactccgatgagagctccgatccaccgactcctcctccgatgaggacgccgccaacatcaccgtcaacaagggacttctcttcccaaacgtcggccacaagtacctcatggcaaaggacggcaagaagaagaaggtaaaatctagaggctccactaaatatgcaacatctagtgatgagagtagctctagtgatgatgaagataacttgcttgctcttttgccaacttaaacatgcaacaaaaagaaaaattgaatgaattgataggagctattcatgagaaggatgaactcttggatagccaagaggaattcttaattaagaagaacaagaagcatgttaaagttaaaaatgcttatgctcaggagatagaaaaatgtgaaaaattgactagtgagcttagcacttgccatgacactatctccaaccttagaattgagaatgttaatttgattgctaaggttgagaaatcaaatatatgtgatgattctcttgtcaaccttaaaaatgataatgctagtttaattgctaaaattgacaagttgaatgaattaattgctagccttaagattgagaatgaaaaattaattgctaaggctaaggatttaaatgtttgcaatgatgttatttccaatcttagaaatgaaaatgccatgttacatgctaagattgatgaattaaatgtttgcagaccctctacatctaatgttgatcatgtttctatttgtactagatgtagagacattaatgttgatgctatccatgatcacctagctttaattaaacaacaaaatgatcacatagctcaacttagtgctaaaattaatgagcatgacttagaaaatgaaaaatttaaatttgctagaagcatgctctataatgggagacaccctggcattaaggatgacattggcttccaacacggaggcaatgtcaagcttaatgcccctaagaaattatctaactttgttaagggcaaagctcccatggttcaggataacgagggttacattttatatcctgttggttatcccgaacacaaaattaggagaattcattttaggaagtctcactctggctctcatcatgctttcatgtataagagtgaggcatctagttctaggcaatccactcatgtcaaattgcctaaaaagaaaactcctactgcatcaaatgagcctattgtttcatttaagacttttgatgcttcttatgttttaactaataaatcaggcaaagtatttgccaaatatgttggggccaagcataagggctcaaagacttgtgtttgggtacccaaggtgcttgtttctaatgtcaaaggacctaagaccatttgggtacctaagaacaaggcctaaacttgttttgtaggtttatgcatccgggggatcaagttggatcatttatagcgggtgcacaaaccacatgactggggagaaaaggatgttctcctcctatgagaaaaaccaagatccccaaagagctatcacattcggggatggaaatcaaggtttggtcaaaggacttggtaaaattgctatatcacctgaccattctatttccaatgtttttcttgtagattctttggattacaatttgctttcagtttctcaattatgcaaaatgggttacaactgtctttttacagatttaggtgttactgtctttagaagaagtgatgattcagtagcatttaagggagtgttagagggtcagctatacttagttgatttcaatagagctgaactcgacacttgcttaatttctaagactaatatgggttggctctggcatcgtcgactagcccatgttgggatgaagaatcttcacaagcttctaaagggagagcacattttgggactaaccaatgttcattttgagaaagacaggatttgtagcgcatgtcaagcagaaagcaagttggtactcaccatccacacaagaacatcatgacgaccgacaggccgcttgagctactccacatggatttattcggcccgatagcgtacataagcatcggcgtggagtaagtattgtcttgtaattgtggaagactattctcctttcgcttgcccttgctttttgcaggaaaatctcaaacccaagaaacattaaagggattcttgagacgggctcgaaatgagttcggattgaggatcaagaaaataagaagcgacaatgggacggagttcaagaactctcaaattgaaggcttccttgaggaggagggcatcaagcatgagttctcttctccctacacgccacaacaaaatggtgtagtggagaggaagaatagaactctacttgacatggcgaggaccatgcttgatgagtacaagacaccggaccggttttgggccgaggcgattaacaccgcctgctactccatcaaccggttatatctacactgaatcctcaagaagacatcatatgaactcctcaccggtaaaaagcccaatgtttcatattttagagtctttggtagcaaatgttttattcttgttaaaagaggtagaaaaaatctaaatttgctcctaaggctgtagaaggctttttacttggttatgattcaaacacaagggcatatagagtcttcaacaaatccactggattagttgaggtttcttgtgacattgtgtttgatgagactaacggctcccaagtggagcaagttgatcttgatgagttagatgatgaagaggccccgtgtgtcgcgctaaggaacatgtccattggggatgtgtgtcctaaggaattcgaagagcctccacaagcacaagatcaaccatcatcttccgtgcaagcatctccaccaactcaagatgaggaacaggctcaaggtgatgaagaacaagatcaagaagatgagtcacctcaagaagaaggcaatgatcaagggggagatgaagaaaatcaagaaaaggaagatgatcaggatcaaagaccgccacacccaagagtccaccaggcgattcaaagagatcaccccgtgaacatcatcctcggcgatattcataagggggtaaccactcaatctcgagtcgctcatttttgtgaacattactcttttgtttcctctattgagccacacagggtagaggatgcacttaaagattcagattgggtgctggcgatgcaagaggagctcaacaacttcacgaggaatgaggtatggcatttagttccacgtcctaaccaaaatgttgtaggaaccaagtgggtattccgcaacaggcaagatgggcatggtgtggtgactaggaacaaagcacgacttgtggccaagggttattcacaagtcgaaggtttggatttcggtgaaacctatgcacccgtagctaggcctgagccaattcgtatattacttgcttatgctacttaccatggctttaagctttatcaaatggacgtgaaaagtgccttcctcaatggaccaatcaaggaagaggtctatgttgagcaacctcctagctttcaagatagtgagtatcctaaccatgtgtataaactctctaaggcgctttatgggctcaagcaagccccaagagcatggtatgaatgcctaagagattttcttatcactaatggcttcaaagttggcaaggtcgatcctactctctttactaaaattgttgcaaaagatttgtttgtatgccaaacttatgtagatgatatcatatttgggtctactaacaaatctacttgtgaagagtttagtaagatcatggtacataaattcgatatgtctatgatgggggagttgaagtattttctaggatttcaagtcaagcaactccaagagggcaccttcatcagccaaacgaagtacattcaagatatactcaccaagtttggaatgaaggatgtcaagcccatgaagacacccatgggaaccaatgggcatctcgacctcgacacgggaggtaaatccgtagatcaaaaggtatactggtcgatgataggatctttactctacttatgtgcatctcgaccgaatattatgctttccgtatgcatgtgtgcaaggttccaagccgatcctaaggaagtttaccttagggccgtgaaaagaatcttgagatatttagtttatactcctaagttttgcctttggtaccccaagggatcctcttttgatttattaggatactcagatgctgactgggcagggtgtaaaattgataggaagagcacatcagggacttgtcagtttctagggagatccctggtgtcttgggcttcaaagaaacaaaactcaatagctctttctaccgccgaagccgagtatattgtcgcaggccattgttgcacgcaattgctttggatgagggaaaccctcaggtactatggctacaaatttagcaaagtccttctcctatgtgataatgggagtgcaatctgcatggcggataatcccgttgaacacagtcgcactaagcacatagccattcggtatcacttttttgagagatcaccaacaaagggaggatatcaagatagcctatattaacaccaaagaacaactacccgatatctttaccaaaccactagatgagaaaacctttaccaaacttaggagtgagctaaacattcttgattctcggaattttgattgatattttgcacacatagctcattcatgtacctttgatcatatctatttcatatgctatgactaatgtgttttcaagtaaattcttatgctaagtcatagattgaaagggaaatggagtcttcggcaaagacaaggcttccactccactctaccggtattatttacccttcgtcgtcactccgcaccgctctccaactctggcataatcttcactcatatattgtttgccaaaggggagagaatttttaaaagggctctaaagactccgtttttggcgattaatgccaaagggggagagagtattagcccaaagcaaaaggaccgcaccaccacgccaatttcaaaaaaattcgaaacaagtttaagtttttaaatgatttccaattggtatctttgaaattagtatttctctaagaaattctatctcaatcggtaaaaccctcttgaaagctaagaggagaatttcatttagagggagttttgtttgagtcaaaggaaaagcatttgaaacagggggagaaaatttcaaatcttgaaaatgcttcttacaatcttactcatatacctttgactatttgcaaaaggattttgaaaagaattttccaaagaatttgcaaaaacaaaactagtggtgcaagcgtggtccaaaatgttaaaatagaagaaagcaatccatgcatatctattgaaataatatattggtttcattccaagcaacctatgcacttacattatgcaaactagttcaattctgcacttatatatttgctttggtttgtgttggcatcaatcaccaaaaagggggagattgaaagggaaatagggtcaaacctttccctaaatgattttggtggctgaattgcccagcacaaacaattggactaactagtttgctctagattatatgttctataggtgccctatgttcaacacaaaccaataaaaagaacaagttagggttcaaaacaaagggagcaaagaaaaccgaaatgtgccctggtctggcgcaccggacagtgtccggtgcaccagggtggatcaactctaaactcctcagcttcgggtttctggaaatgccactccgctataattcaccggactgtccggtgtagcatcggactgtccggtgtgccaagtggagcaacatctactgcgccaatggtcgtctgcaaaagcaacagttaacagtgaacagtgcgcgtctgcgcgcgcagagtcagagcagcgccagaaggtgtaccggacagtgaacagtgcctgcccggtgcggcaccggactgtccggtgccccatgaagtcagagctccaacggtcgaaaccgtcagaaccctaacagttgggtgacgtggctggcgcaccggacagtgtccggtggcgcaccggactgtccggtgcgcccatcgacagacagcctccccaacgaccattttggtgggtggggctataagtaccccccaaccaccacacttcaatgcatccaagtttttcagacatctcactcaatacaagagctagtgcattcaatacaagacacaaatagattgaatcaaagcctctccaagtcctaattccactcaaagcaattagtgactagagagagttttgctcgtgttctttgagctcttgcgcttggatcgcttttcttcttcctctttcttgttctcaagacacttgtaatcaaagcaagagacaccaagttgtggtggtccttgtaggggtctaagtgacccggtttgattaaggagaaaagctcactcggtctaggtgaccgtttgagagagggaaagggttgaaagagacccggtctttgtgaccacctcaatggggagtaggtttgcaagaaccgaacctcggtaaaacaaatcactgtgtcatccgcttcatttccttctgatttgttttttgccctctctttcggactcgatttttattctaacgctaaccccagcttgtagtgtgcgcttaagtttataattttcagattccgcctattcacccccctctaggcaactttgaccttgttatgtataagtttttttactcatcctgatatttttaaccacaacttacacacttgcaggttatagactgttacataaatttgataaaagctca

SEQ ID NO: 257 - DNA, 1062 bp, Zea mays
  Intron number 8 from transcript GRMZM2G439198_T01 (locus G RMZM2G439198) derived from phytozome v7.0 (chr-ID 5; pos 5 9048262 to 59049323)
tgcttatttgataggtaaaaaaacctttccatcatgactgtcttacatatttttctcatactactatgctgctaagataattttactgaatttgctaatatatgctccaaaattttcatgctgaagtcacccttattcttacctgggggcatctaggtaggggttgtgctttttgatttgcttgtgtcccttttctgagcttaccaatattctgtttataattacttctagtctttactcaaaatgagatgttttaaaaaccaaatcatatttttctgctatctgtctttatttgaatctttcatcagtagtttatcatctgtattcatttctagcttttttcctgaactcacaatttagaaagctaaatgatatttctggaatctcttttccgtgttctttggagtttgctgttgataaatcttgttaagcagatcgctttttccattattctttgaattcaattgtatatttttttcctttttttcaggtccattgacatcatgttttttgttttaggtatagccctatgtgagaaagctaaccaagaatcactgctatgtgctatgtttgcattcgttgatttttttaagaaatttgcattcatttgtgtttaagacatattttcacacttgttagcatgatttgtgtttaagatatattttcacacttgttagcattagatcttttgtatcttctttcctatatttaaccatgagaaaattgttgatggcagcccacatgcaacagcatcccatgcttcactgtgtatttgcccatttcttaatcgcccaagcccaagcccaagcccaagcccattctctcggcctttctggcatgcatgtgctaagctcctatgtccaaacctttatgtagtctggtctgttgtctattcactcattggcatgctaatgaacacttgcatatcatctgagtgtggtgttatgcatcctcacgggtcaggacagattggtgtgcttccataacatgattagtaagttttagtttttcttccttcttacttcagagatcttctaaagattggaactggagcagcaaacc

SEQ ID NO: 258 - DNA, 3028 bp, Zea mays
  Intron number 1 from transcript GRMZM2G176358_T02 (locus G RMZM2G176358) derived from phytozome v7.0 (chr-ID 5; pos 1 75650076 to 175653103)
gacgttggcaggctagccgcgcgcgcttgttggaggttagggtttcgctcgaatcgactgatgcgttcgatgatgattcacgggggccatcctccacgcccttttcttgtctgtttggtcgtgccttcgcgtatacttgctatttttttgcgatttgccgtcctattattctttctgacgtaatgtcggtccttcaatctgatgtttcatatacaaactcaaggattagattcgaatgtatatttttttagagcggttgttattaggttggagattctgtgccatggcggctgcgtctcgtcccgttcgattgatccaactagatggtagatgcggttgcgaatatgaaaggtctgagagcacggatgcgcgatgtttaacagcacgtacagcagaatcatagtcgtagaagactcatatggagttccgagtttggttgggccgaccacgatgtagctcacccgtagccagaaagttgtacacccttagcagaatcatatttgtttgaagaaggattttgctatttttgtagccagtatagatgaatatgaatatactccctgcttcccaaattagtattcgctttagcacttagtatattcaaatagatgatgatgaatctagacacatacaaaacacatacattaattgttgtatgagtccattaaatgtctaaaacaaattttaatttgggacgtagagagtactattgatcctcacttgcaagttagcttgctctgagacgtcagatttgtttaggtcattactgggtgaaatgttccatgttttgtctggaaactcctttgcaatgttgctaaattatgaaactgggattcttgcttaggcacatttgtggtatggaatatgcagtttcaaacgctcaagtatttgaatgaaacttctgattatcttactttgtgtcctgtgtttgttatccaagccactaatgtactaacaatctggtgtaaggtgtttagtttttacgtgttcgataatcatgcattggttgaaccataattttttccctgtagtttattttcttggaaaatacttcatgcttatgtgcacctgcttttctgatgttcattaagatagtagttcatgcgacactgctcttgctatttatacatttaatattacaaagtttaaaatcaacactgtgcacacaagcaagtacataactaaattttatatatattcatgatagtgtgtgcaaaagtgtgaacaaaccaaacaagatctgtttatgaactagtttctgtagccagctaaccttgatgcaatgcaaggtaaggttgtgaggagaataagtattgttgacgatagtataatttattagatatggtgaactttgttggactttcttttttatttgaaacctggaaccatgcttaattgtttagctttatttacaaaactctttctatctttaacatttatatacagcaaacagttaggtaaactagtagcttatggttatgggtagatgcaacctgttaatggagatggaaaatttcgctccaattggcctttatgcatcacctttatgacactgctgttgctatttatgcattgaatattacaaagtttaaaatcaatactgtgtgtgagtacataattaaataagatatgcattctttcatgactgtgtgtgcaaaagtgtgaacaaaccaaacaagatctgttttgaactagtttttatagccagcaaaccttgatgcagggtaagattatgaggagaataaggaggtgtttggtttctagggactaatgtttagtcccttcattttattccattttaatatataaattgataaatatagaaactaaaatagagttttaatttctatatttgatgattttgtaactaaagtggaataaaatgtagggactaaaaattagtccctacaaaccaaacaccccctaagtatttgtgaatagtgatgatagtataattcattagatatggtgaactttgttggacctccttttatttaaaactgactaccatgcttaattgtttaactttatttagaaaactcattctatatgtaacatttgtatacagcaaacagttaggtaaactagtagcttatgcttatgcatagatgcaacctgttaattgagatggaaaacttccctctgcattggcttttttgcgtcaccttttcgcactattgcggagtaagagcatctccaagggaacctttatttttgactctcaatttagctctccataaagattaaactctatatgtagcatctcattcgaactgacttcaacatgcaagttagtttggctagccggagtggccagccaaatttgcctagtgagggagccaatttagggggtgtttgggattgcctccaggttccaactccagtgtggagctgtagtttataatatcaatttaagtagttttaaaaatatttttaatataaatgataaacaaaatgacttatctaaatgtcttctaaagactcacagctccagctccacggttttctagagcacttaatgacctgctccaccaactccaccaaattttctggagctgtcccaaatagggtcttagagagctggatagattggtgagttggatggctggtccgttaaagatattttgctattaagtagctaaaatttagattgacaagtcatttggctagtctcttggagatgctctaactggattacttttgacacatcgccttttattttcatgttattgtgtgtggagtacctgacttttttatatttatcaccctttttttactttgactgtcttaggtgatgagctgtgactgccaaaataaaaaaagaataattatgctttgatacttcctttaggtaacatatataccaggtgtgaactaacctgagacttgtggactttgcttgaatctcttttgtggggaagatctgttcactgagcatgatctgtagccagagcttcattgtatatgctcatttcattgtgtggttatttttgtaattcagtcttttgtgtaggacatcatttgctag

SEQ ID NO: 259 - DNA, 791 bp, Zea mays
  Intron number 5 from transcript GRMZM2G439049_T01 (locus G RMZM2G439049) derived from phytozome v7.0 (chr-ID 1; pos 1 0384207 to 10384997)
ataataaatgtaagtatgttattgatgttgattattagtccctccgtttcaatttataatttgtttgattttttaccctaagtttgaccgactcgtcttattaaaaaaatcacaattattataattttttactgtgatattgtttaacatataatatactttaattttggctttgaatttttcagtttttcgcgaaaattttgaataagacgagccggtcaaacttggtctaaaaaagtcaaacgaattataaattgagacagagggagtattattttttgaaatgagttcagtcattcaggattgtgttcatgccataacaagagagcctgcaactacggtattagtagttacaatcatgatatgttgtattgatgtatactttagtcaaattgtgttaagagttgagcgaaacaaaaatattaggaaaaaaatgatggcttaccgtgttaaaaatgtccattttttcctcttgattattgtgtagtatttgttattcaaggagcatgtgggtggtgcatgtttaaaagaacgtatttccctattgctgcgtccagtcttatgctcatagaggttgcagcccaggcctgtgatggttccttgtacactgtaggccttttgtttgtgtttgatacttcagtttgctagttccatatcagtttttaaagtacggagaatctctctaagtatatattaagaattttttctctgtattttcttaggtcaagtatttagatgatgtactatttccctgagaactaatcttgtgttgtccttcagtttttggcaga

SEQ ID NO: 260 - DNA, 2462 bp, Zea mays
  Intron number 1 from transcript GRMZM5G875201_T01 (locus G RMZM5G875201) derived from phytozome v7.0 (chr-ID 4; pos 5 4531378 to 54533839)
acacatctgatctgaggtttccaccttgtaactccaattagttttcagctgctgagttattgtcataacattcttttgttgcttaccaattgatttgataattaattagcatgatttacttgattcattgaagtattgaaaaagcttgttactgaaaataatcgctacataacaatggaactttgaagttaggaaaaaagaacaaacagtgcaataagagttcaagagaaattgtattaaattatgactggaagtaatttggcagaagtgttgaattgtgagtgcaattgttcaaattttctatttttattttggttttaactttgagagaacttgtttcatgtcgaaaaaacttgaccaacctaggaggaactaggtctaattacatcttagaagcaataggcactgattagagttgaagaggattgaagcctaggttgtaggtgtgtacagccatacttctcacccagctaggattagtccctacttgttggttcaggaaagtcagctacttgcatcctattgatattgtacaatggtacaaccaaacttggtcgaaaggggtataccagggctgattctgggaaaactggtttcccaaattggatttcatcattgtgtttctctcattgagacgatcgaaatgcatatatagaagtccagatttggagtctggatgaggaatttacgttccagggtagatcaaacctgtggaaactggtttccaaaacaggataagccagttttgaaatcagcccagatctatttgaggtttgtttttgtaccattgtaaggcaatctctagcagccttactcatcacatatctagctgagttggttaggtggtttgagtagcacttcttgggtcctgagttcgactccccgtgggaacaaattttaagccgtggttaaaaaaatccccttgtctgtcccacgtcgaagcacaggtctgaggcccagcttcggtgccgctgtgtatgggtgaggcaggggttcgggagttttctcgacctgtatgagaagatattcttcttaatataatgtcatggggcgattttacccccgcaggtcgagttttttatctcttatttcaaactcctctctgtaaatagtacattctatagtgcaaaacagtgcaaaacaatgttttgcatggccatatgcacgatctgctggccacagcctgaggaatctcgactcctcgtgagattcccatcctataaaatataaacggtcatggctagacatccagtctattaaatcaatctattttttaatcctttttcttatatgaattttacgttttcctctttgcccaaatatcttccactcccatatgctgttctagaagaatctcggtggttgttgtgagcgttctaggtagccttgatggccctagaacaacccttggtgtgcctctgtgacatgctccttccgggtaggcatttctaggttcttcgcagaagatctgcctccttcattgcagctcgatccttgagcagtcctcatgcgatctatgcttgctactagccctttgggtgtaggaacatttttgcgtcaactgatattgttggaatagaagtgaattggccatatcttcatatcggcttaagcttttgggttgaactgattgcatgtaacttaatatggtatcaaagccagatgtttcgagttcaaatcttggttagctctattaaacaaaataattgttgctcgttcttattccacgtgtgaggtctgagagagcctcgacgtgagggggagtgttggaatataaatgaattgccccacttcttcctatcagcttaagtttttaggttgaactggttgatgcatcaacttaatatatataatgaaccttatgggggataattatacattccatgcatccaaccgaatgcttagattctatactagaatggagaaatcacaatagtgattatttacctctgctgcttatgatttgtgactagaaccaggtattaacctgaaacatatttgatattgtgacgtttcagtagaagtttggtatgctgaaagaaacaggtacaacaattgcatgttttatagtattcttgaggtaacatgaattggtgattggtattgcctttgctactgttgtctttgctatagatgaaacatggatccattctttctcttggaaactgaattgtcgtttgggcccactaacaaataattactatgctgcttttgttatatagtattcttgaggtaacatgaatcggtgattggtagtgcctttgctactgttgcatgtcttataattattttctttaatctagacatttactttatctcctttgccactgctgcatgttttaggttcaaagaagattcaagttagaaatcaaaaagacctttcagattactctgtaatgtctttcttttttttaaaaaaaattgcagaaaattctcaaggcaagcgtacctgcaaaagcgac

SEQ ID NO: 261 - DNA, 1892 bp, Zea mays
  Intron number 4 from transcript GRMZM2G119546_T01 (locus G RMZM2G119546) derived from phytozome v7.0 (chr-ID 9; pos 8 1643766 to 81645657)
tccgctcccttgatcgcatacaagaggttggcaacaaattttccttcatttctgtgaactggttactgattatggatataattatacatgtcacacattttgatctgtagactattctgtggacatctttcttgtgaattggggacttggtgttagagatccaatttcttttgagatatctatgttgatcgttgaagtctgcatagacataacaggtctggctgtcaagacatagatagctccgtttattaaatatatctgttaggtaggttagtaaggaagaagattgcatatggaatccccttatgtcttattggttaactcgggagattttgaaccttctgatttgcatctgcatggaccaaaacacattggtcctgtttgtttcagcttttttgctaattctggccgccagaagctgatgcggactgccaaacacctcagcttttcaaccaacttctatgtgaataactttggtgaaaaccgtccaaaatcaacgtgaacacaatcggtcgagcatggttatcaaggcgtccttgaagcgtcgccttagcgtcgcttaggtgctaaggcgtgcctggaaaccaaggcgtctaactcgccttgccctcgagcgtaaggcatttgccacgacgcagggcgtcggcggacaacgccttgggggaggatagggctgcggcggtggcggcgcgtggctccagacggctagacagaggagagaaggagctgcggggagggaaagaggagctgtgatggagggagagcgacggctgagggagagcggcggcggctgcacgggagtggagggagagcgacgaccatggtttttaaagcggtaaggcggtccaaggcgttggaccaccgcctggacgcctaggcgaggtaggcgggcaaggcgcctaggcgttagaccaccgcccggacgcctaggcgacgactgagggagtggctgctgcagtgttgctgcacaggagtggttgtaggcttaggttttaacctaaaactgctattgggctaggttggttgggcctcttggctgactggttgtaggcttttttttctttttctttttttcctatctctcttctactaggctcaaatgggcctactaggcttgtgctaccttgtttattaattttgaattagtgttatataaatgatatttgatctaatcttttatattactgtataattagggtgttgcctcgccaaacgctttactgcctaaaaggtaaaaggggtcggtcgccttataccgccttaataactatgcggtcgagtcgtcgtgatagtagaaatccgtcactttctagatcctaaaccctatgaaccccttcatcttcctccgcatgtaatcctcatgatattcagattcttcccacagccagattctcagaaaagctcatcagaaaaagctgaaacaaacaggctctgtcttgtctgattgtgagaagaaccttagaaactacaagtacagattttagaattatctgttcactttgttgcagttgggtggttgtcttaaaaaacagaagcgattcgatccattttccatctttgcatgataacttttttcctagcttagttgcattgagaaagagatttaagggctttttggttgcctggcttagattttggaccagctatagtcaggccaggtagagaagaggctaagagggggttttgttcggttgtatggctgtagaagcctacgatatttcagctattcagtttcttgacactgattgttcttaaatgatttacaaatgatatctcaattgagatttaaggtataaatatcatagtttttgtatataatattttgctgatttctcattttgtcttccttgattaatatttcctctgttatttaaaatggctgtaggtcccgc

SEQ ID NO: 262 - DNA, 9281 bp, Zea mays
  Intron number 6 from transcript GRMZM2G362021_T01 (locus G RMZM2G362021) derived from phytozome v7.0 (chr-ID 4; pos 2 38338202 to 238347482 reverse strand)
tgtggttctgaaagggaattaggcttacacatagtccctaattaattttggtggttgaaacgcccaacacaaacaattggactaactagtttgctctagattatatgttctacaggtgccaaaggttcatctataactatactaaatcgactgtccggaataccgtagattattccggacaggagaagctttttggaaaaacaggccaagcgcggaccgtccggtcctctacggcggaccgtccgcgacaccaggatacccttcggacagaaccaatgcaaaaatacaagtgtccactatggaccgtccggaagaaaagcaaggaccgtccgagccctcgcgcggaccgtccggcctcaagcgcggaccgtccggtaggtgagaaaccgaaaaaacccgaaggtaacgggttcggagaaatgaattatagcggcctcgcggaccgtccgggccaggcgggcggaccgtccgcgactggctttatctgacatctgacgacgcattaaatgcgatatagccgttgatatagccgttactgctgaccgttgtgttttcagccgttgatctacaggggcggaccgtccggaccaggcgggcggaccgtccgcgctcagcagaatggagcaacggctaggaagtggttggtggctataaatacaaccccaaccacctccattcacttgatccaagcattccaaccttcaacattcaatataagagctagcaatccattccaagacacattcaaagcctccatctctccaagtttcacaattgagaaaagagatcattagtgattagtgacttgagagagaaagtgatccgtgtgttatttgtcgctcttgtcgcttggcttttgcaatcgtgctttctttcaatctttcttacgttcaactcaattgtaaccaagacaagagacaccaattgtgtggtggtccttgcgggggaagtttgttcccgtttgattaagaagagaaagctcactcggtccgagggaccgtttgagagagggaagggttgaaagagacccggcctttgtggcctcctcaacggggagtaggtttgcaagaaccgaacctcggtaaaacaaatccacgtgtcacactcttcatttgcttgcaatttgttttgcgccctttctcgcggactcgtttatatttctaacgctaacccggcttgtagttgtgtttatatttgtaaatttcagtttcgccctattcacccccctctaggcgactatcaattggtatcagagtcggtgcttcattagagcctaaccgctcgaagtgatgtcgggagatcacgccaagagggagctggagaccggcgacaagcccactacaagccaagggagcacttcatcggaagagtcccgcaccaagaggaaggagaagaagaaggactcctccaaacagaaggagaaaagatcttcttcctcacatcacaaagagaagaaggaaaaatcttcttctcacaagtcgcatcggaaaggcgacaagcacaagaggatgaggaaagtggtctactacgagaccgacacttcatcaacatcgacctccgactccgatgcgccgtccgtaacttctaagcgccaagagcgcaagaagtttagtaagatccccttacactatcctcgtacatctagacatactccattactttccgttccattaggcaaaccgccaacctttgacggtgaagattatgctaggtggagtgatttaatgaaatttcatctaacctcactccacaaaagtatatggaatgttgttaagtttggagcgcaggtaccatccgtaggggatgaagactacgatacggacgaagtggcccaaatcgagcacttcaactctcaagttacaaccatactccttgcctctctaagcaaggaggagtacaacaaggtgcaagggttgaagaatgcaaaggagatttgggacctactcaagaccacgcacgagggtgatgaactcaccaagatcaccaagcgggaaacgatcgagggggagctcggtcgcttctgtcttcgccaaggggaggagccacaagatatgtacaaccggctcaaaaccttggtgaaccaagtgcgcaacctcgggagcaagaaatgggatgaccacgaggtggttaaggttattttgagatcacttattttccttaaccccactcaagttcaattaattcgtggtaatcctagatatactcaaatgacccccgaggaagttatcgggaattttgtgagctttgaatgtatgatcaagggctccaagaagatcaacgagcttgatgaaccctccacgtccgaagcacaaccggtggcatttaaggcaacggaggagaagaaggaggagtctacaccgagtagacaaccaattgacgcctccaagctcgacaatgaggagatggctttaatcatcaaaagctttggtcaaatcctcaagcaacggaaggggaaggattacaaatctcgttccaagaaggtttgctacaagtgtggtaagcccggtcactttatcgctaaatgtccattatcaagtgacagtgacagggataacgacaagaagggaaagaggaaagaaaagaagaggtaccacaagaggaggggcggcgatgcccacgtatgccgcgagtgggactccgacgagagctccaccgactcctcctccgacgaggacgccgccaacatcaccgtcaccaagggactcctcttccccaacgtcggccacaagtgcctcatggcaaaggacggcaaaaggaagaaggtaaaatcaagatcctccactaaatatgaaacctctagtgatgaggatgatgctagcaatgaggaggataacttgcgcgttctttttgccaaccttaatatggaacaaaaggaaaaactaaatgagctaattagtgccatccatgaaaaggatgacctcttggactcccaagaggacttcctaatcaaggaaaataaaaagcatgttaaggttaaaaatgcttacgctctagaagcagaaaaatgtcaaaaactatctagtgagctaagcacttgccatgagatgattgacaaccttagacttgaaaatgctagtttaaatgctaaggttgactcacatgtttgtaatgtttcgatttccaatcctagagataataatgatgatttacttgctaggattgaagaattaaacatttctcttgctagccttagagtagaaaatgaaaatttaattgctaaggctaaagaactagatgtttgcaatgttacaatttccgatcttagagataataatgatatattgcgtgctaagatcgttgaacttaattcatgcaaatcctctacatctagtgttgagcatgtttctatttgtactagatgtagagatgttaacattgatgctattcatgatcacatggctttaattaaacaacaaaatgatcatatagcaaaattagatgctaaaattgccgagcataacttagaaaatgaaaaatttaaatttgctagaagtatgctctatagtgggagacgccctggcatcaaggatggcattggcttccaaaggggagacaatgtcaaacttaatgcccctcctaaaagattgtccaactttgttaagggcaaggctcccatgcctcaggataacgagggtttacatttttataccctgtcggttatcccgaggacaaaatttaggaaaattcattctaggaagtctcactctggttctaaccatgcttttatgtataagagtgagacatctagctctaggcaaccaacccgtgctaagttgcctaagaagaaaattcctaatgcatcaaatgaacatagtctttcatttaaaacttttgatgcatcttatgtgttgactaacaaatctggcaaagtagttgccaaatatgttgggggcaagcacaaggggtcaaagacttgtgtttgggtacccaaagttcttgtgtctaatgccaaaggacccaaaaccatttgggtacctaaagtcaagaactaaacttgttttgtaggtttatgcatccgggggctcaagttggatactcgatagcgggtgcacaaaccacatgacaggggagaagaagatgttctcctcctacgagaaaaaccaagatccccaacgagctatcacattcggggatggaaatcaaggtttggtcaaaggtcttggtaaaatagctatatctcctgaccattctatttccaatgtttttcttgtagattctttagattacaatttgctttctgtatctcaattatgcaaaatgggctacaactgtctctttactgatgtaggtgtcactgtctttagaagaagtgatgattcaatagcatttaagggtgtgttagagggtcagttatacttagtagattttgatagatctgaactcgacacatgcttaattgctaagactaacatgagctggctctggcatcgccgactagcacatgttgggatgaagaatcttcacaagcttctaaagggagaacacattttaggactaacaaatgttcattttgagaaagacagggtttgtagcgcatgccaagcaggaaagcaagttggttctcatcatccacacaagaacatcatgacgaccgacaggccactggagctcctgcacatggatctattcggcccgatcgcttacataagcatcggcgggagtaagtactgtctagttattgtggatgattattctcgcttcacttgggtattctttttacaggaaaaatctcaaactcaagagaccttaaagggattcttgagacgggctcaaaatgagttcggcttaaggatcaagaaaattagaagcgacaacgggacggagttcaagaactctcagatcgaaggcttccttgaggaggagggcatcaagcatgagttctcttctccctacacacctcaacaaaatggtgtagtggagaggaagaatcgaactctattggacatggcaaggaccatgcttgatgagtacaagacttcggatcggttttgggcggaggcagtcaacaccgcttgctacgccatcaaccggttgtatctacaccgaatcctcaagaagacatcatacgaactcctaactggtaaaaagcccaatatttcatattttagagtctttggtagcaaatgttttattcttgttaagagaggtagaaaatctaaatttgctcctaagactgtagaaggctttttactaggatatgattcaaacacaagggcatatagagtctttaacaagtccactggacaagttgaagtttcttgtgacgttgtgtttgatgagactaacggctctcaagtagagcaagttgatcttgatgatataggtgatgaagagactccatgcatcgcgctgaggaacatgtccattggggatgtgtgtcctaaggaatccgaagagcatccaaatgcacaagatcaaccatcctcctccacgcaagcatctccaccgactcaaaatgaggatgaagctcaagttgatgaagtagaagatcaagcaaatgagccacctcaagatgacagcaacgatcaaggggagatacaaatgatcaagacaaggaggatgaggaacaaaggccgccacacccaagagtccaccaagcaatccaacgagatcaccccgtcgacaccatcctcggcgacattcataaaggagtaactactagatctcgtgttgcacatttttgtgaacattactcttttgtttcctctattgagccacacagggtagaggaagcactccaagattcggattgggtggtggcgatgcaagaggaactcaacaacttcactaggaatgaggtatgacatttagttccacgtcctaaccaaaatgttgtaggaaccaaatgggtctttcgcaacaagcaagatgagcatggtgtggtgacaaggaacaaagcccgacttgtggccaagggatactcacaagtcgaaggtttggatttcggtgaaacctatgcacccgtagctagccttgagtcaattcatatattattagcttatgctacttaccatggcttcaagctttatcaaatggacgtgaagagtgccttcctcaatggaccgatcaaggaagaggtctatgttgagcaacctcccgactttgaagacagtgagtatcctaaccatgtctataagctctctaaggcgctttatgggctcaagcaagccccaagagcatggtatgaatgccttagagatttccttattgctaatggcttcaaagtcggcaaggccgatcctacgctctttaccaaaacacttgaaaatgatttgtttgtatgccaaatctatgttgatgatattatatttgggtctactaacgaatctacatgtgaagagtttagtaggatcatgacacagaagttcgagatgtctatgatgggggagttgaagtacttcttgggatttcaagtgaagcaactccaagagggcaccttcattagccaaacgaagtatactcaagacattctaaacaagtttgggatgaaggatgccaagcccatcaagacacccatgggaactaatgggcatctcgacctcgacacgggaggtaagtccgtggatcaaaaggtataccggtcgatgataggttccttactctatttatgtgcatctcgaccggatattatgctttccgtatgcatgtgtgcaagattccaagccaaccctaaggaagctcaccttacggccgtaaaacgaatcttgagatatttggattatactcctaagtttgggctttggtatcctaggggatccacatttgatttgattggttattcagatgtcgattgggcggggtgcaaaatcaataggaagagcacatcggggacttgccagttcttgggaagatccttggtgtcttgggcttcaaagaagcaaaattcggtcgctctttccaccgccgaagccgagtacattgccgcaggtcattgttgcgcgcaattgctttggatgaggcaaaccctgcgggactacggttacaaattaaccaaagtccctttgctatgtgataatgagagtgcaattaagatgtcagataatcccgtcgagcatagccgcactaaacacatagccattcggtatcattttcttagggatcaccaacaaaagggagatatcaagatttcttacattaatactaaagatcaattagccgatatctttaccaagcctcttgatgaacaaacttttaataaacttaggcatgagctaaacattcttgattctaggaatttcttttgttgacttgcacatatagctcatttatatacctttgatcatgtctctttcatatgctatgactaatgtgttttcaagtctatttcaaaccaagtcataggtgtattgaaagggaatttggagtcttcggcgaagacaaaggcttccactacgtaactcattcttcgccgtcactccaagcaaaaggactccatctttggtataatcttaactcatttatttatgaccaaaggggaagaaagcactccgagggctctaatgattccgtttttggcgattcatgccaaagggggagaaagtaagagcccaaagcaaaaggaccgcaccaccaccaatttcaaaaacttcgtgtttccaagaatattatcaattggttttcctatcgtgttcaaaaggggagaaagtagtatttcaaaatgatatatcaaaaccctcttgaacactaagaggaggatctcatttagggggagttttgtttagtcggaggaaaagcatttgaaacagggggagaaaatttcaaatcttgaaaatgctttgcaaaatcttattcaattacctttgactatttgcaaaagaactttgaaaaggatttacaaaatagtttgcaaaaacaaaacatgtggtgtaagcgaggtccaaaatgttaacaaaagaagaaacagctcaattccaagcaacctttgcacttacattatgcaaactagttcaattatgcacttctatatttgctttggtttgtgttggcatcaatcaccaaaaagggggagattgaaagggaattaggcttacacatagtccctaattaattttggtggttgaaacgcccaacacaaacaattggactaactagcttgctctagattatatgttctacaggtgccaaaggttcatctataactatactaaatcgactgtccggaataccgtagattattccggacaggagaagctttttggaaaaacaggccaagcgcggaccgtccggtcctctacggcggaccgtccgcgacaccaggataccctttggacagaaccaatgcaaaaatacaagtgtccactatggaccgtccggaagaaaagcaaggaccgtccgagccctcgcgcggaccgtccggcctcaggcgcggaccgtccggtaggtgagaaaccgaaaaaacccgaaggtaacgggttcggagaaatgaattatagcggcctcgcggaccgtccgggccaggcgggcggaccgtccgcgactggctttatctgacatctgacgacgcattaaatgcgatatagccgttgatatagccgttactgctgaccgttgcgttttcagccgttgatctacaggggcggaccgtccggaccaggcgggcggaccgtccgcgctcagcagaatggagcaacggctaggaagtggttggtggctataaatacaaccccaaccacctccattcacttgatccaagcattccaaccttcaacattcaatacaagagctagcaatccattccaagacacattcaaagcctccatctctccaagtttcacaattgagaaaagagatcattagtgattagtgacttgagagagaaagtgatccatgtgttatttgtcgctcttgtcgcttggcttttgcaatcgtgctttctttcaatctttcttacgttcaactcaattgtaaccaaggcaagagacaccaattgtgtggtggtccttgcgggggaagtttgttcccgtttgattaagaagagaaagctcactcggtccgagggaccgtttgagagagggaagggttgaaagagacccggcctttgtggcctcctcaacggggagtaggtttgcaagaatcgaacctcggtaaaacaaatccgcgtgtcacactcttcgtttgcttgcaatttgttttgcgccctctctcgtggactcgtttatatttctaacgctaacccgacttgtagttgtgtttatatttgtaaatttcagtttcgccctattcaccccccctctaggcgactatcaggttcccatagccagcaccaaaggatcacccctggc

SEQ ID NO: 263 - DNA, 8513 bp, Zea mays
  Intron number 5 from transcript GRMZM2G098227_T02 (locus G RMZM2G098227) derived from phytozome v7.0 (chr-ID 8; pos 1 08045019 to 108053531 reverse strand)
aagcagtaaggcctcgtgctattctccagttttgattatgaggcactgaatattctgatgtcaactccacttcactaagagcatttttcacactgttgagatgcatcttttgactgattacgagcaggctaatgttgttacagataaatgatcatatcctttgaaattgtgccattctacagttttgcacaatccttaagcagcattaattattgcaaggctttatgaaatataaaattttaatattccatcttgaaactttatgctggatcataacgctgtatatttacttgggaatttttcatgctggaccatgttccatcctcggtacatggaaaatttagaatgtatttctgaagttgaatagaaacttaatttcgttggctgttagcagttaccttacaaatattatgttgtcctagtgtcctacaacacatttatatcataggctctgcataatttattcaatatttcctgccatgtaagatgcagtttgattaatatttttctgattccatcaatgaaattatattaattttgattcatggctaccctgaatttttgcactgatattgatctgttgcatacagccaaccttagcgaaaccactagcagtgcgtttggcaactactgggaaggggcatgggaattggttgtgggagttgttggagcgaattgtgagaatttgttttttaggcccaaccagttgtttggttcaaataagatagggaatttaagaagaaattcatgtctgtttggcataattgctgcttgttgaaaaaaacagcttatttgagaagttggtgaaaagcaacttctgcttattgactgcttttagttcattctaagaagtagcttctgcttattgattgcttttagttcattctaagaagcagctgaactgataaccctacatgatcggcttccatgtgagctctcttctttcccctgcaaataccttggtctgcctctgtctttaaaaaaactgtccaaaaatcaggtgcaacccattattgacagagtggctgatcaattgtctgggtggaaaacggatctaatgacaagggctggcagaagagtacatgtccagtatgtgatgacatgcatgctcatttatttagccatggcagttgacatacccccaggatcactcaaagttattgacaagatcagaaaaggctttatctggcgcggaaggaaagatgtaagaggaggacattgtttagtggcttggggcagagtctgtagacctctcgaaattggcggtcttggtatttctagtctcaaaaaattgggatgggccttaagaatgagatggctgtggctgagcaaaacagaactggataaaccgtggtctcaatgcctatgcggttttccaaaaaaatgaaggccttcttttccactgccatgctcactgaaattgggaatggttcttcaaactcattttggcaagatcgttgggtccatggaaagaaaattgaagaccttgctcctcgactgcttgcagctgtgccaaataagattaagaacaacagaactgttcttgaggccttaacagatagaaaatggttaactgatattaaaggggccttgacagtaggagtttttgctgacctcctagatctctgggatgcacttcaaacaatccagctacatccagacatggaggacagacatattttcaggcttgctactgatgggaattactcagcaaaagcagccaatgagggtttcttcattgggtcaacccaagctgaacattgggaattaattttgaaaacttggtctcctcctaaatgtaaattcttcatatggcttgctgatttaagaagatgttggacagcagaccgtctagagaaaagaggtttaagccatcctgacaaatgtcctttgtgtgaccaagatcaagaaagcatagaccatatgattggtgggttgtgtctttgctaggaacttttggttccagctgctcggacaagtcaatctgcctggttttgctcctcagctgggggaagagagcactatgcagtggtggagtagaaccagtgagcagctgcaggggattgcaaaaaaaagggtttaattctttaatcaccctcgggctatggactctccggaaccatagaaatgggtgtgtctttgacagaattaaacccagcctggaggtagctataagaagagctgaagaagatattgatttatggacgtttgcgggggccaaacatctagctcttcttacagctcccattccaggtgtcttacatgggtctggtagagggagcagatgataacatcatagatgaagatgttgtctggtgctaggctggtgcgtcgggtctgtgtaggtggtggcctttttaggtgttccttcatggatgttttcatgtattctaagttgcggccaccatagagtgtcctttctttgtatttgtaattggtctatttttggaccctcctttctctcttaatttaatgatacacagctctcctgtgtgttcgagaaaaaaaagatgttgcagaagcgccctgtttggtacaacttttgcttaaatctgtaaagaagctgtaagatatgccaaacaatgtcccccctgtttggtgtgttttttgtgagaaagggaagtgattggccctctaaaaccacttttccgtctcaccaaacaaacaaaagattcctaaactcttaccctccaaccacccattcccttgtaccaattgttactaaccttgattaggcgagataattaccccctcgggtactgtagcatatatataggcagacaagagtatatgggctttatgggccttaacaccccctgtcaaactcaaggcggaagtggaggatttgaagcattgagtttgattagatgaaactgatgttgtgccctagtttgtgcttttgtgaagaaatctacaagctgtaattctgagggcacatagtgaagatcaatggtcttctgatgacaatgagatctagtgaatgatacatcaacaccaatgtgttttgtgagttcacgcttcactggatcatgacaaatttgtatagctccagtgttatcacagtgaagaagcgtaggcgagtcacaagaaacgcctagatcagccaagagccaacgaatccagataatctcagcagtagtagtagccagggctcgaagttctgcttcagtactagatctagacacaacaacttgcttcttagatttccaagcaacaggagatgatccaagaagaatacagtaaccagtgatggagcgacgatctataggatcactggcccaggtagcatcagagtaagcatgaagctgaagtggggaatttgagtcataaaataaacattgtgtttttgtcccccgtaaatatctaagcacacgaagtaagtgcccataatgaactgatgtaggagcagagacaaactgactcaagatgtgtactgcatgagcaatatctggcctggtgacagtaaggtaaactaagctgccaacaagatgtctatatcgagatggatcctccaaaggtgtcccatcagtcggacgaagagataagtgaagatccataggcgtggcaacagtgcgagtatcactaagaccagaacgatcaagaaggtcttgtatatacttggcctgagaaagataaataccattttgagtctgcaaaacctcaatgcccaagaaataactgagtgcccccaagtcagacatttgaaattccttactcagatatgccttcacatgagcaatatggtctggatcatcgcctgtaatcaacatgtcatcaacatatagtaatagtaatgtgcgtcctcgtgaagaaacatgaatgaacaatgcaggatcatgatcactagaatagaaaccacaagccttgatgacagaaacaaatctctcaaaccaagcacgaggagcttgtttaagaccatacaaggctcgacgtagacgacatacatgccctgatggaacctctatcccaagaggtggatgcatatagacttcctcatgtagatcaccatgaagaaaagcatttttgacatccatctgagagatagtccaagaagatgaggctgcaacagcaagtaaggctcggacagtagtcagatgggccacaggtgcaaaaagtctcatcatagtcaataccctgagtctgttgaaaacctctagccacaagacgggctttatatcgctcaatagacccatcagatttggttttaaccttgaagacccatttgcacgtgataggtacaacaccagcaggtaacggaacaacatcccatgtacatgtgcgatgaagggcattcaattcatcagtcatagcaagctgccactcaggtataccagaagcctctttataagatgatggttcagcaatgactgcaccagcacggaaaaacccataacgttctggagctgcaatagtgccacggtcacgaagatgatacccctgattaaaaacaacatgagagtcatcattgttagtacaagtatcagcaacaggttcatcatcaggactggccatgggagtagagcgaggacgacgaatgtaagtctgagtgacaggtggtttggaagagtaagacggaggtggtgtggaagttgaaggtggtgtgatgggaatacgaacatttggggtagaggcagtatgcggtgatactgatgaattttcagaaatgggagggaggctcatgaaggaggtagactctgtgctatacaaggaagaatgagtggaagagttgtaaaagaagggtcgattttcattaaagctcatatctcgagaaatacgcatgcgacgagaagatgaatcataacatcgatagcctttatgttcagggctatatccaagaaaaacacactcaacagattgagcagtcaatttagtacgttcacgaggtgataatagaacataacacgtacatccaaaaactcgaaggtggtcatatcgtggaggagttccaaaaagaacttcaccaggtgttttgccagagagtttggatgatggttgtctattgatgaggtaaaccgcagtagaaactgcttcacccaaaaatgtgaagggacaaaagaagatatcaacaaagtgcgagcagtttctataatgtgacgatgtttgcgttcagccacaccattctgtgcatgggcaccagggcaagaaagctgggcaagagtaccctctaaagtcaaaaactggcgaaaattatcagataaatattcaccaccagaatcagaacgaaaggttttaatatgagtggaaaattgagtgtgagtcatgcgagcaaagtttttataaatagaaatcagctcagagcgacgtttcatgaaataaatccaagtgtaacgagaatgatcatcaataaaaatgacatagtatctatatccaccttttgacacaaaaggtgcaggaccccaaatatcagagtgaaccaaatcaaagggttcgacagaagaatcactagtaaaatatggaagttgtatttgttttccaagatgacaacccttacaatgaaaatcagactcaaccgaagtatgacctaagcaacctgactttattagagtagacaatctagatccacacaaatgacctagacgatgatgccactgggcaaaagacgcaacagaagcaagggtagctgaaagcacatgcgctggagatgtagccaaggaaggaagccgcaaagagtccaagatgtagaggcgaggggcagctctacggcgacggccagtcccaatcacttcccctgtgcgaaggtcctgtacaaaacaagatgagtcatcaaatccgacgaagcaattatgatccgtaatttgacctactgaaagaaggtccatagatagctcaggaacaaagaaaatattaggtactgtaaaatgtggatcacaaagagaacccttatgagtaatgtggcatacagtaccatcagctgtctgcactgaagcaccgtctgtgataggagtagtagaggccaactttgactgatcagatgtgacatgaaaggaggctcctgaatcaagtacccaggccgactctgaggtacaagcagacgaagtggcagcaacagcaactgagcctctagtagatggtcctggaccacgaccatgagcagcacgtcgggcacggaaatcagtcaacttctcagggaacttgataaagcaaagctcagatcgatgattggtcttgccacaatgatcacaaggcttaaaaacactcttaggtttctgggcagcagccaacacactgtgagtattactaccagtagaagacagagcattaagacgagtctcttcagccagtaaatcagacaacgccttagccattgtgagagtgtcagaatcctgaagtaaacgagcacgaagagaatcaaactcagcccgaacgcccataacaaatctgtaagtgaagaacttttcaataaacttatgagccggacacggatcaacagtacaagcaggcaccatagatatcaaagcactcatcaggcgatcaaaagctgagtagtactcatcaatactcatatcattttgctcaataacatgtgtctgctgcatgagagtgtgtaatagagcaccactgtcctgaacaaaacgctccttcaaatgagaccagatggctttaacagttttaaatttagacaaactcataatcatagatggtttgacgctgtttaccatagcagccatcactttaccatcattaagctgccatgttttgatatcagcagcattgcgacgatcatccgcaagaacaggtgccacatcagtcaaatgaaagagtaatccatgtcctctgagtgcagtctcaacacagaaagcccactccggataattttggccatcaagagtgatattggccacaatagcatttgtcgccatactgaattcaatgaaaatcagggaacaagagaccgaaaaccaaacaaaccagaggagccgcagctgacagcagcccgagtacgagttggcggaggtcctgagcgcggaagccgagttggacagcggctgctgtcctgatgactctgcccgcaatggcagcgaccggcgcagaagcaggaacggcgcagatccagatctgtggaggcgacagacgacacagaaatcgacggcgcagatctggttctgcagcccttgtggcgtgcagcaggcagacaactgcagaggtacggcaggaatcgacggcgcagatccggttccgcagcccttgcggcgtgcagcagttgcggcgtgcagcaggcagcaactgcagaggtgcggcagggcgcagaacccaggcgcagcaggcaaataggcaacaggtgggcggcggctgaggcagggcgcagtgcggcgcagcaggcaacaggtggaagacgcagcaggcagcaggcgggcggcggatgaggtgcggacggcggacggcacaagagctcagatccgcagctcgcgggactgaaggaaaaccgcgacggcgtggcagaggaagcgggaaccgcgatggcgcggcagaggaggcgggggaactgcgacggcggctgcgggtggcagatggaggccgcccagatccgccgcgacggcggcagaggaagcaggaaaggccggccgcgacggcggctgaggatggaaccgtgacggcggtagggcggacggctggaaggctggccgcgatgggcggacggcgcagcagcgacgcgatggcgccaaagaaaattgatcagggacggattagatgtaaaccctaaccctaacctcctctgataccatgttactaaccttgattaggcgagataattaccccctcgggtactgtagcatatatataggcagacaagagtatatgggctttatgggccttaacaccaattactaaccaaacatgccatacaggttattgaattggctaaggtaaatatcttgaacacactttctgttttttttgtcaactggcaacaaaccttaatggctgtattaagctagttcaggccattttgagtctgaaattttgaagatatgaaaactcaacaatacacccaatgacccaaataagtttgagggccagtggtgcggccatgcaggttaagcctatatcatggtccacatacatggatgcttgaagagttaaatgtttatttgaatgcataattgtgtggcaagtactgagacgacactagaggctgatgctatttactacctggttcctgaaatatttcaaaaagtagtctgcacctgctacttgtgacatgtttgctaagtaaacttgattgtagaagcttatgcaaaacaaataagttgaatgaaactcgtccgaggctctgagttacctccttatattgacttactgttctatgctcttttatccgtgaataaacttctacctggtgcaaggatacctttctgtactaacttccttagcaatccaacatgtttgcttccaagcacaatcttggatcgaatatattcacgatttctttaattttattggaatacactctaataattttttccactggcatgttaggttggtgtcattggaaatttggttcattcatcacc

SEQ ID NO: 264 - DNA, 1308 bp, Zea mays
  Intron number 3 from transcript GRMZM2G408710_T01 (locus G RMZM2G408710) derived from phytozome v7.0 (chr-ID 10; pos 106932022 to 106933329 reverse strand)
accgtgaggtactaccttatccaagatgtatgtactaagatcagatttgcgtgtatgttcgttggtttgaaacactgatgactgatagatgctattgcttaggagctgatcgatgatacacttgttatttatggcttatagaattgggtgatcgaggggtaagataaatcacgcaccttgataaggtggcatattttgcctttgcctaaatctctctctctttcaagcgctcaaggtttgtgcaaatatgtacaaatcaatttcttattatttggaatgttcaatttccgtataggtaatcaggttccgtaattgagaggtgctcccatggaaccccattcaacaggttagactatggcacgaacataacattttagcgatttgttatggatgacacacagtcagcacaaggtttgggaaaaggtaaatatgttggatttaagtataaagaattcgttgtacttgatcatcatcgtccaaaactaaaaaaacttggatttatcgtattgttgagatgaaggaaacatagatgtaaggtaaatatgttggatttaagtataaagaatttgttgtacttgaccatcatcatccaacactagaaaaccttggatttatcatactgctaggatgaaggaaacaaagatgcacaattatctaaccattgcatgccaaacatagtagtcatttactacaattcatcaaggatttgcttattagaaatttggtgtacaattgtatttctttcttttctggctctatggttggtatttgccaagcactcatgacacgttaacgttagaaaaaacaagtagcattatagagtaatcaaagaattcatggttattttataatgtagatctttcttgttaggtgaatatgaattaccaaacagtgatgaatacgctaactctagctactactactcgatgtctgccaattccattcgaccaaacaatcgtgtgtttgtgacccttctaagaaaaaaatccatgttcagcgtagaaacaactgtctggtgagtttgttcatatagctaaaagtaaatgaaaatgattggatatttaatctacatatgcgagttctagttagattttgatttgttctatagaaaaaaagctttcctctttcaaatggtgctattatggtgggactttgctagcaggcatttgaatggtgcattgtttttatgtctgaaactaccgaatggtagctatttatgcagtctgtgtcatgccaatctgacaatgtccaatattgaaaccacccaactacctaaggctagctaactgcttttaatctctggatagt

SEQ ID NO: 265 - DNA, 3393 bp, Zea mays
  Intron number 1 from transcript GRMZM2G446881_T01 (locus G RMZM2G446881) derived from phytozome v7.0 (chr-ID 5; pos 7 598466 to 7601858 reverse strand)
tgtacacagtgttgccacctggtgacgttacctgtatttacaaaaactaaaggttaatatcgagcatcatatcaagtgttctaggtgtgtggtgtttatggttgcaacgaaaccgggtagtctttgatggtgattatccttccatcggcaagatgcagttcgatgagttggcatgctaggtgctagctggacccaaacatcttctaagtttaggcttagctgaagcccttattgtgattgggtcaaattatgtaactagtatgtaatagctctaagtgtgtgtaatctcggggtttctgcgtagcaggttttcccttcttttctctctaatatataaagattcatttgtgtatttttgtctttggcctccgtaagggccttttgatttgctgtttgggtctattctggacctcttttttctccttaataatataatgatgtatagttctcttgcacgttcaagaaaaaataatatataaagatttgtagctctcgcgcgtcttcgagaaaaaaaactgtataacatactttaccaccccgcacattaaacaaagcatgctgaaaaaactatatgcaggtacatccacattaatttttgaagcactaataaaactaataacaattgtaattgcagtaggaccaattcagacatttccaaatgtaacaaacatcattggtttgttgcctggttgggagtaagaggtgaccagtagttgactatgggcctgtttggtttggtacatcttttttctaaagagctattctaagaatatggattcgtggataatctatctgtcacgagaatctagatatcgcggggcttgcgtgcggaagaagatgaaagggtccgtaagatttaggattaaggaagcgacgaattcctcctgttgtgacgactcagtggattttgtattcatgttgatttggacgattttcacagaagcgattctcacaaaagcagactgaaaaacgaagtatttggcggccaaaagccgacccaaacatgtcctatagatgacatagtgccaaggccctcaacctcgatgttggtgacatattggatataggagcactccaagacaaaaatcagggcaacaaatgaaaacatcagtaatgcaataagtgaaaaggaaaattagttctcaagcacggaaagttgccaaaaatcgtaaaatgccaccaaaatgtcacgccaaggtaaaataccattgagacatccaataacccgatctagcactccattagctcttggtgcctgatccaactaaaaccgaaggacagagtccagaagattcatctacagagcagctgtttatgttagtatctctggctgcttggggaggtacaaatgtttctcaaactttgaaatttcaaggccaacttcagaatcattcagttctgatattgatcgatagtggtagtccacataccttcttgcatgagaagtttcgtgcatggttccagcatgtggatctggtggttgctccattgcaggttcgcgtggctaatggagaattgttacattgccagcacaagatactgcagataccgtggcaaattcagactttcagtcacatacaggacacgacgatcccttcaaatttggactgtttttggtggtgcacatgggatgcattttacaaagctgttgaaccatgtgggattgaggaggaccttcaaagtcggcgtgaaggtggtgtgccaccaaggtttctgattatagatgatggttggcaagagacagttgactattatccaaagacgttgcatcagatgtttgttgcgaatgctggtgccagtttcaagctaccagggaattctgtgaaagactttcttgactctaaaactgcttgaagatacatattttgggaacaaagtttcagaacaagcttcttgaaaaaagcttgggcgtttggctgtgcaactagtgccggtggtacagttcaagaccttggaacacatgttgcttcactccgggcatcaggatcctggatgtgctcagattctgcatcgacttgagggcatgtcgaattttgaggagggaatgttacaccgccattggttatggaagcagcgcaatggctgtgtttttgacaataagagccccagtattgctgatgctattagaagagttgggttggaggttcacctgtgggagatggctggtgcaaagaagttgtctttgctcaccgcccccattccgggcctccctgctagttagctagcattgtggtagttcttgttagttttctttagtcatggatgggtttctgtatgcctgttactggccgccgtaggggctccagttgtttttcttgtatctgtccctcttctttaatataatatcgcacagttctcctgcgctttcaagaaaaaaaatgttacaccgccattgtcagatactccatagaaggaactccatcccggtgagcgtggaagacgcgtgcgtcacactaatgttcgagtcgcaggtcctgagtgggtgtaactaactgcagccttgttgttgcggtcctgtctgggggtaagtctctggcgcgtggggctgtgtccctcggtcaccggttggtgaggcatgttcctaagtagtcgcatatatgctgttggcttggggagtaggaacaaccatgtatgaactttactctgaaacaatacagtctgtctctagttcctcccccattctcggctcctacctctgctccctctctgctatcctctggattcccttcccattgctaacatcgtgtcctacttccgttcacaaggccttggcgcttgaaggcgctgagcaggtagtagcctctggacatgccttccctcatcagctgaagctgcctgaggccggagcatcgcatggttggtgaacagcagtgtgagctagtcttgcatacttgcttgccgtcaggagagtgcctcaggaccttctccactctgtgcctacctaggaccttctccactctgtgcctacctaggcttcgattcagggctggctctcgcaaggcacccgcagcagatcgtataccaaagcagtggctattctctgaaattccgcaaaaagggtccgaacattgcaccaaacccattactgaatcaactcctatgcagcgaacactctaattcatcaagctaaactatataaatccttacgccagccataaaaatatttgttttagatccccaaccttgcggtacataaacaagagaccgcgtcaggggatcacgagtcatgaaagcacccgatccccaatccaattccaccccatggccagatccccatcaaaacaaaccataaacccaatcgaaacacgatcctccgatcgagtttagccgcgcagaattggactacggctgtggaaagggggatcggttgtgtaccgtgaggtcgattcctgg

SEQ ID NO: 266 - DNA, 6887 bp, Zea mays
  Intron number 6 from transcript GRMZM2G321153_T03 (locus G RMZM2G321153) derived from phytozome v7.0 (chr-ID 4; pos 2 03698433 to 203705319)
tttgcctaggggaagccttgacaagtatctttacggtattctactctctcattccctctctggttgtagtggaatattggccttctgttgtattgtatgttgtatcaaacatgcatttacgcttaacagtaggctgatttatgtaacaagttgtggaaacaccaggaaaaatattatacttgtgctccatacgtttagaataaaatgtaacttcaattagttaaattttagcataaggtgcgctcgctagatagtccatcattcataaagtatagtgcaatttaatactacaacaacaacaaagcattttggtcccaaacaagtttaggtaggttagagttaaaacccaactgaacctacaagtcaagattcagacacatagataattgtttttcatgtacttctattcatggctaaatctttaggtgtattatatcctttcaagtctccttttactgtccttgtttctcatgtcaactttagtctctcttcctctattctcactaatatcacaccttaggattccattacgtagtagcatctctggaggcctccgttggacatgtctaaaccatctcaactaacgttggataagattttctctaattggtgctacccctagcctatcacatatatcatcattttagacttgttcccttcttgtatgaccacaattccaacggaacataggtatttctgcaacacacatctactgaacatgttgtctttttattgaccaacatttcataccatataacatagcagatctaatcattgtcctataaaacttatcttttagcttatttggtacctttttgtcatatagaaagtcagatgcttgacgccacttcatccaccttgctttgattttatggctaacatcttcatcaatatctccgtctctctgtagcattaatccaaaatacttaatgtgtttttcgtagtcactacttaacattccgagctaacatctccttcctagtttcttatttatcctgctcgacttttatcaactagcactatatcatctgcggaaagtatacactaagtgatatccccttgtatgtctttaaagatttcaatatatcttgagtatggatcaccaagggaaaaaaggtaagagctcaaattatctttgatatagtgttattttaatcgggcatccatctgtgtctccattgttaaggcccattaggcccaggcctactggctatatatattacctacagtccttagggactaataatctattatcaatcccaaggttagtaacatggtatagagcaggttacgaaaccctatttttttgccgccgtcgcgactgtttcccgcccagccgccgtcgcggctgtcctcccacccagccgccgtcacggttcttcctcttcctcgtctagccgccgccgtcacggatccggccgcccctgcgctcctgtccgccgccgaggccctgcgctcctgtccgccgccgaggctgctctgctccgacgcgacgttgcggatctgccgcacgctcctgcgctcctctgccgcgcgctcctccgccgtgtgttcctgtgcgcgaggagctgctctgccgcgcgcaaggaactgtgtgcgctcctctgccgcgcggcgcctcggatcgcggatccgccgtgcgctcctctgccgcgcgcgaggactcctgtgcgctcctctgccgcgcgcgaggagctgctcgcctctgtgcttctgcgcgcgaggcacagcgtgctcccctgttcttccgcagtgcgttcctgctgtccctgtgccctgcacagatctgctctgcttctccaacaacagggacgccgtctgcctgctgtgctctgcaccaacgcggtcatcttgcctagatctgtttcggcgacgtggttctctccgatcagtcaagaaatcgcctgccacttgtgctgatctgcttggagtcagtctacccaccagaaattttggtactctctgactgttttcttgctcttcaatatgtcgaccaatgctattgttgtcaatattgtgcttgatggtcagaattatcccgaatgggccttctgtgttcagactgcattaagaggtcatggtttactatttcatttgactgaagattcaccagtcctagcagccgatagaagcaatgctgctgcaatcaagacttggcagatcaatgatggcaaggtaatggctgctatggtcaatagcactaaaccaactatgattatgagtctgtctaaattcaccactgctaaggctatctggtcacatctgaaggatcggtttgttcaggacagcggtgctcttttacatacccttatgcaacaaactcatgtcattgagcaacatgatatgtccattgatgaatactattcagcctttgatcgtcttatgagtgcattgacctccatggtgcctacttgtaccactgtgccttgtccagcccacaagttcattgagaagttctttacctacaaatttgttatgggagttcgacctgaatttgattcccttcgtgcaaggctgcttcacagttcggatactctcaccatggctcaggcattgtccgaattgcttgctgaagagactcgtctaaagtctatgtcatctattactggtctgagttctcacagtgtgttggctgctgctcagaggtctaaaaacaactcctttcagccttgtgaacactacaaaaaaaagaccactcatcggtctgagaactgctttgccaagtttccagagaagctggctgattttcgtgttcgtcgtgctactcgtggtcgtggtacaggaccatctcctagaggctcagttgcggttgctgctacttcatctgctggtgctttgtcatcatcctgggttcttgattctggagcttcttttcatgtgacatccgatcagtcacggctggcgtctactacacctgtcaccgagggcacttctgttcagactgctgatggtacattatgtcatgtcacccacaagggttctctttctgatccaacttttactgtcccaaatatattttgtgtacctcagttatccatggatctactatcagttggtcaaattaccgatcataattgttttgttggatttgatgactcatcttgttttgtacaggatcgcaaaacaggggatgtgattgggactgaccgtcgccgtaaatcttcacctcgcctctacatcttggacactttgcgtcttccttcatctcctaccactacacctcatgtgcttgccgcttcgggacccacgacgtcattcgcccagtggcatcatcgtctgggtcacttatgtggatcccgtctgtctactctaataaagtcaggatgtttaggctctactcatgttgagtctagttttcattgtaaaggttgtcatcttggaaaacaaatacaacttccatattttactagtaattcccattctgctaaaccttttgatctaattcactctgatgtttggggtccagctccgtttgtttctaaaggtggtcataaatattatgtcatttttattgatgatcattctcgttatacttggatttacttcatgaaacgccgctcggaattgccttctatttacaagttctttactcgcatggttcacacccagttttctgctactattaaaatttttcgttcagattctggtggtgaattcctatctgataattttcgccagatattgaccatagagggtactctagctcaactttcttgtcctggtgctcatacccaaaatggtgttgctgaacgcaaacaccgtcatattattgagagtgctcgtactcttttgatatcttcttttgtaccttcacacttttggagtgaagccgtttccactgccgtgtatctcattaatagacaaccttcatctaaactttctggtaaatcaccgggtgaagttctttttgggacttctccacgatatgatcatcttcgtgtgtttggatgtatatgttatgtcttgttaccaccacgtgagcggactaaattgactgctcaatctgtagagtgcgtattccttggatacaatcctgaacacaaaggttatcattgttatgatccatctactcgtcgtattcggatttctagagatgtaagtttcaatgaaactcgccccttctttcacaaccagtctactcactcaacctattatcccacagaatccacttctttcatgtgtcttccttccattcctgcatctgaaccatcatcttctacatccacaactgatgttctcattcccataacaccaccttccacctccacgtcatccacctcttactcttccaaaccacctatcatccaaacctacattcgtcgttcccgttctattcctacggctggtcctgatactgatcctgtacctgattcttgtactaacaatatcgagtgtaatgatgtttttaatcagggataccgtcttcgtgaccgttgtaccattgaacctccagatcgctatggttttccacgggctggtgtggcaattgttgaacccactacatatcaggaagcttctgggattcttgagtggcagctagctatgattgatgaattggctgctcttgaaagcactggtacttgggatattgttcctttaccctcgcatgctgttcctatcacatgtaaatgggtcttcaaagttaagacaaaatcagatggttccattgagaggtataaagctcgtcttgtggcccgtggttttcaacagactcaaggacttgattatgatgagacttttgcacctattgtgcatatgactactgttcgaaccttgattgcagttgcaacctcatcttcttggactatatcccagatggatgtcaagaatgcttttcttaatggcgatctacaagaagaagtttatatgcatcctcctccaggggttgatactccctcagggcatgtttgtcgtcttcgtcgcgcattgtatgggctgaaacaagctactcgtgcttggtttgagcgattcatctctgtcatcacagctgctggtttttcttctagtgaacatgatcctgcattgtttgttcatgtatctccacaaggtcgtaccttactactattatatgtggatgatatgctgattacaggtgacaactcagaacatatttctcatgtcaagcaacatcttagtaaggaatttcagatgtctgatttgggaccgcttagctatttcttgagcattgaagttcagcagactcaaaaaggcttttatctgtctcagtcgaaatatatacaagatcttcttgatcgctctggacttactgatacacgcactgttgcaacaccgatggatattcatttaaaacttcgtccgaaggatgggaccccactagcagatccaactcggtatcgtcatattgtgggtagtcttgtttatctcaccatcaccagacctgatattgctcatgctgttcatatgttgagccaatttgtatcaacacctacttcagttcattatggtcatttgcttcgtgtgcttcgatatttacgtgggacaagatccagatgtttactctatgcttcagatagcccacttcagcttcatgcgtattcagatgccacttgggcaagtgatcctgttgaccgttgttctactatgggttactgtattttccttgggtcatctcccattgcatggaaatccaagaagcaagcagccatatctcgttctagtgctgaagccgaacttcgggcacttgctactaccactgctgaaattatttggttgcgctggctcttggctgatcttggtgtctcttgtgacacttatacacctctgttatgtgataacttgagcgctatacagattgctcatgatccagtgaagcatgaacttactaaacacataggtgttgatgcatcctttactcgatcacattgtcagcagaagactattgatcttcaatatgtgccctcagaatatcaattggcagatttcttcaccaaagcacaaacaagagcacaacatcagtttcacttgatcaaactcaaagcttcagatcctccatttccaccttgagtttgaggaggggtgttaaggcccattaggcccaggcctactagctatatatattacctacagtccttagggactaatcatctattatcaatcccaaggttagtaacatccatcacttgttcaaacactagtcacaacattgttgtacatgtctttaataagtctaacgtactttgtcgggactttatgttgtctaaagcccatcacatatcattccttgatattttgctataatccttctccaagtcaatggaaactatgtgtagatccttattttgttctctatactcctctaccacttgtcttcttaagaaaagggcttctatggttgtcctttcagacatgaaaccaaattggttcaaagagatgcacattattcctctcagacaatgctcaatacctctctctcatagtttactagtatggctcatcaacttaattctcaggtaatttatataactttgaatatctcttattcttgtagatcgataccgatatacttatctacttgttagatatcttgttcgaccggaagatatgattgaacaacttggctagctatactataactatgtccttggggtatcttcatagctcaatactcaattaaaataccatcaaggcacatcgccttacccatttcatcttaagatttcttagaggtatatttccatattacatcttaaaaattcttaaagatttcaatatatcttgagtatggatccaaaacttatagtagtaagtctgcattcaaagtgttttagtttgctagtactaatgcaaaattatgagtgcaacaaaaaaacacaactttctcgagtttttgactcactgttttatgtatctgtacacaggtgcatctc

SEQ ID NO: 267 - DNA, 4580 bp, Zea mays
  Intron number 5 from transcript GRMZM2G014282_T01 (locus G RMZM2G014282) derived from phytozome v7.0 (chr-ID 10; pos 4905502 to 4910081 reverse strand)
catttcaggcggtgagaagaagagacttaccacaggtgattccacgttatctagaattcttttatattagggtgatgtcatcatcccatctacagttacgtaggcattggattaaaacggcactaaaagtttgtaattatgatgggatcatatgcttcatttcatttattcttcttgagttcaagggacaccgcccctccaatgcattgcaaacatgcacaacaattttaagggccatctagaacataggaagttcacaggtagtatacatgaatttcacaacaatcatttttcgtttcacaaaaaaaaattgtaggattcagagggaaaatcacattatatctcactagtacaaaaaggctcaaagcctgcggggacgatatatttttacaggcggtttcgcttcaccaccgactgtgctatttctagtggcggttttcttaaggaaccgccactagaaatcatttttatccttaatttttcgagtttttcaaacggcctcgtatgacaaaaccaccaaaataaaagttgtagatctctaaaagttatgaaactttgtagttgacaacttttttatttgaactcatttcggttctcaaaaattgaatctaagtatgtcaaatttaaaattcaaattttgcaaactacctcggatgaaaaaagtgtcaaaataaaagttgtagaacttcaaaagttatttatctttgtagttgacaacttgtttttttgaattcgtttagggtctcaaataagcaatttacactcaaatggttgtaatatgtggagaaaacaactacaaactagacacaagacatgtcatagacggagtggtaggggagggtacgcgcgagggtgaggtcgccggttcgaatactagcaaccgcgtagcgcgcgaaaaatgccgcgggtggggtgggcctaataaaaataaattttttaactatttttaaaatatgttttatgtttcctggaaacgatttgcactggcggttttattacgtcgaccgccagtgaaaatcgattttcactggcggttttattacgccgaccgccagtgaaaatcgattttcactggcggtcctcagttacccgcctgtacaaatgatgatttctactggcccctagcactggcggttacgaaaaacgccactataaataggtttacaaccgccactatagaacttctctgtactagtgtctattgtttctggccttagcataatcatgtaattaaacattaccatgctcttaaatttaggataattataatcatacttatatgattatgctactaactatagtactatacctcatagataccattgatgtctttgaatcggtgtaggagttgatgtaggtgtatcataactgatctattcaccaccttagggctttgatgccctttgttggtgaagaacatgtgatgttgagaagcaccagccttctcgacgtggagatcatgtttccaagaccctctagtgtctaatagactggttcagagtttgatgtatgtgtttatcatgttggaaagtttcacgttatttatatcactatgatattgtaggatcaaggaggccaactagaggggatgtgtgaatagtaatttttaaaactaatcacgaacctaggcaaaaatagtacaaaaaacaaaataatgaccaaactatgacttctccccccaaagaccttagctcgcaaacaagttaatcctaggttgaggtttgtgtccttatgtgataagcaaaagtaaaatgaatttctacacaaatctagtgaccaaaggtaaaacaaacaagcaacaaactaaaaggcaacaacaacactagcaagatgaataacacaaagtaaaggctaacgtagatgaagcaaaccgcaagtagaggagacacatgatgtatcacttggttcgctaacttgctggtcacctactccacattaaggcaagtccaaggatcgtctctcctccactatctcaactaccctgcaaggtaggctccgacatgagcgatagattgtgagctagctcaatcacgaggcacttcacaagactccaatccactagagttgcttgtcacctttctctggcggggatgagcacaagaaccccttacaaattcttctctggagctacctcacaatctccacttcatgcttcaatggagtcacaaccaccaagccatataggaggcgacaacgtccgagagtaaaaagcaaattgcttgcaaatcaatcactagtgatagtagatgttatatatctctctctcaagcaaatagacaagaatccctcttatctcaccatgaatgcgatctcaactaagcatatgtgagtggagatgtttcttgagatctatatgttagcatatcagcatgaggtctcaacagacgtgccaagcctagccacactatctctctgtacatccgctcaagaaactatccatcgccaaccatcaatactttctatgggaccactagaagctcgggtaacccaccagagttcatcaccgaagaatgtccaataaatatttcaatagtcaccggcaataggtcaagactagttgatgcatgctaatttatatggtgctctatccttagtctcatcaaagaaaaatggtgcacatagtgcacctctgtagaaggttttgtacttccgctcaaagctccattgttcctcaaggtcaccataagataaatcaggtggcccccagatgcttctgtacatagaaggtttctaagcctatggagaacactagtaggttttggtgccacattcaaacttttcacgcactactcttcacaccgaacgccgccacacataaagaacctaatctctagtgccttcaccctagtgggcactagaagaataggtctttactaagaaaactcactattttggcttgctaccataaggtttggcggtctactctcaagtgaccatgaggatatttaagcgaggcttgcacattgaaccaaaaacaatcaaatagttccaactaggatggtctaagctttggtggataccctttgataaccaccaaacttacatgatgagtgtaatagtactctaataagcctctctctcaaacccatttcaaatgtgctaactccaaatggttcccacaagataaccaacacctttagcattgatttagtattttcataaggttttctcttgcatatattcttgccacttgatcctgacacacatgcaatgtcagatcactcaagtggaattagataaccgacatacaaacacatttgcccctcttgatattaggttgtctagcattaaacctagataaatcacttctctacacaccttaggtcagtcaaataaaatgtcctacatttcatatttttccttgtgcatatccacttttcaccaagttaatgtccacaagcaaacactctcgatatcaccatcttaattttgatgttcaatggtcataaacactcatggcccatccctgccacttgactatagtcaacactagatactccttcaatctttcttctttaaaccatttgacatccattcttgatatcaacacttcaactccttcatattaggcacttggtatcttttacacatcttaacttgggcttgtgtacaagattgatatagatcactccatagcttcacatggcctttatagtccatcaaccttagccttgcttactcctctatgttgtgttgatcctttagcactaacctctctactttcacttcattatcttgatggtctattgttcccaatcctctagtttcctgttcatctttgcatggtccatcatagctaagccttgtattagtcttcgccatatatccaaacaagactacttgtatctcatatactcaactatattcttcatcatcttgatcaccacatcgatcatcaatccatccatcttccactcttcacaaattgagactttacaacatatgcacacttgtcatccacccagtctccgacaatggccttcatgatggtcaactagcttgtggaccaaccaagcttaatcatttcaatatgaaagcattagtccactagttgtaactcaattaccaaaacccaaatgggcctttaggatactagggaggattctataaaggacttaggggttgtgcctcatgtagggacttagcttatactccatttttacttgttatatcggctttgtcttaactcaaacatttgtacatttgagcatgtttgaaaaaatatatatgttcatgacatagatttatgtttttagattcattatgagaaatattttaataatatataattcatatattgcgaaagtatattgtttgaaatatgatcaaaggtagtaatgtttgacttagtaaagttgttaacccaagttgttaacttatactccatttttacttgtatatatgttatagaattattacttgtgtaccaagttaaaatgttggttgtgcggagatcacattccaacaatatctattgttatataattctaagctcatcaattggtctaaataggtagctaactttagtgattcgaatgtggatgcttgttctttactaaaggttctgtcttgtaggagaa

SEQ ID NO: 268 - DNA, 21446 bp, Zea mays
  Intron number 2 from transcript GRMZM2G037743_T02 (locus G RMZM2G037743) derived from phytozome v7.0 (chr-ID 7; pos 4 9292339 to 49313784)
gtatagtgagcatgattacctaacctatcgaccaaaatagatgttagctcctcaaacaagtttgttccttgttttctgttatcttccagatcttttcctttttttcccaaagcctttatgattaactgcgttactcaggagccttgttacttgtttgctgttgaaagtttgaaactactaaagctaactactccctctcttccaaattgtaagtcgttctagcttttctaggtacatagcttttgctatgtatcgaggcataacctatatctaagttcacagcaaaagctatgtacctagaaaacaaaaacaacttacaatttggaatcgagtttttggctatttgcaatactttagttcatataaataactcctctgagcctaatattagaacagtgccttcaccgccttgattcaacttgaatatgtcatgtgctctattttacttcttgcacttttagatggtattattaacttatgaaacgtacgcatttgcatgcctttaggagctatagtaaggctaactgctgttgatattgtgcaacatgtgttcttacactggcttggcctttagaataagattgcatacatacaacccctagaggggcaagacctgataactgagatgacaggaagaaaaattagaaacgcctaacgcccatacagtcaaggacatatgctgcggagccctttggctcccaccataaaccacaatttggcctcatccctggtatcctgcattatgttattcaaactaggccaacttccctcaaagacataatcacttctatgcttccaaacctaccatgccaccaggacgaccaatagcttgaaactagggatgaaagtgggcatctgaattattaggacaaatttaatattttaaaattgatatatatgaaatttgatgctaatcttttcttatgttatcaatcacattattacaaataaaaataaaattttcctaaattgttttatacattatttgctccctacaacaaaaaggtgaaaaagtatccgtatctgtattcaaattgtatccgaattttatatctaccattcagagtaaagtgcgctggcgatccctaaacttgttcaggtgtgtcaagccagtccctaaattcttagaacaaccgattaggtccctaaacattgttatgatgtcattttagtccaatcggctatgaacaagactcgattagctgacgtaaccttgccatcgtgttgttcatgtggcatgacatcgtcgaagaaggacgcggtgaggacgaggaggaggccatatggcaaggccgtgccacgtggacaacaccgtggcaaggccacatcaactaaccaggtcctgttcacagcctattggactaaaatgacaccagaacaatgtttagggacctaatcggctgttctgatagtttatggactggtttgacactcctgaacaagtttagggatcgacaacatactttactttatcatttaagaagatatatgataaatttaaggtttaacttttatgaatccttacaagctcaatgctataaacaagaatatgaatttgcatagcagattctatatcatatttattaaagaaaaagaccaaaaaattgatatccgattaaggccttgttcggttatttcaattccatgtgtattggtgtgtattgggatggattgggatgtattttgacttgctatggaattaaaccggcttaataccacccaatccacatggattaacggcgaaacgaacaagccctaagtattcgttttcatgcctacttgaaaccctcgtgatggtctttaggaacagtttcatgcattgttttcaagtcatccgattaatcgtccaagtcagttgggaccaatcacgattaatcactcaagtcatccggctaaccatgattaatcgcgattaatcggccaagtcggtcatccagaacgtccagcaagtcatctgacttgaaaacattggtttcatgagctaagagcatctccaagagtcattctagttttcgctctctaaattatcatttgaagagtcatttgcataaaaattactttctatatcttttcaatttcaatcagcttttctatatcttgtttgcattctagagtcattcacgttttctatatttggccagtgagaaacttggaatacaaaatggctgtatttggatagccatttagataagctattgtattgtattttttttacaaaaacctctatttatatcaattaggaagaatataaagggcctcttggagttgctctaacttagccacttgtgcattttaaccacaaatttattaagctgcaactatcattctgaatatgctgtgctgactgtacccctgtttatggaacgtccttctactaattctcagagtaaagggcacggctagtccttaatgttagatagatagcctattgggccgcagccacagggatatgtgccacacctggctcataactggtgcgcctcttatagattgatcaattgtattgaatggaaaggattatccagtggtggctgtacttctataaaccgaccttaggtcatccttgcctatgtgtttgtaccctacaactcatacataatcaatctattaatttccatacaatacttgcttgaacttaaacttgaccggccatgttatcctagctttatcatcctggtatctgaactcccaaatgcagttttgatatataggtttcattgttggtccaattggcacatgacgtgctgacatggtttgccatgatggatccatcatggagcaccttctcgtcccatgtgttcttcccctttcctctgtcccaattgcagctgctacctctgttcagatggccactagcaacagcccatcccctccatgtacttcgtctccatggcagcagcgacactctgacccccttcccctccattgatgttggctggattcgaacacaagcgaccaccatgcactcatttgatctcccctctcgtttttaaatctgagcagaggaacaactagctgcttccattgatgctccacccagctcctcaatgtgagcaaccaacaaacccacatcaagctggagacacatggccattcggtgcatagaggcacaattggttgatgcccacaagatgtgaaggcgtatggcgcgcaacagaggcagtacggagatgggggcatgtggcgcagctgtttgttgatgtttttggtggttatggacaacccctccgtatggttcgtatcgtatcaccattggcagccaccacccaaattcacagctagtagctcctgcatcccatccaattgtattcacggcaaatgcctcgcacatgaacaccacgtcctccatcatgcctggcactgatactgtcatgtgcggacacatatgccaggcgcggatgcgcccgcgacatgcgccgcgcggctgagcgcgctgggcaggcgccatagggtttagattagaaagttttggaaatccctagaatcaaggagagccttctccatgtcggatgggccattggctatatatatgcttgtaatcacttgacaatcaattaagcaagaattatatccttaatctctttctctgttaagcttgtggttgagggggataacctcaccggagaggacggtcgacggctacgagctgcgtagccgcaatccggctagtcgggggctcgacgcctttgacaacctagtatcatggtcacgtcggtcctctcccacccgctccacccattcttccacagtcgccgcccaccaccatagccctccaccatcgccgccagcagccatgagcgatcccaccatcgccgatgtgatggagatgttgaaatccatcaccacggagatgaaaaccatgaaggccgacatggaggctatgaagtagaagtcggccttgtcggcggacagcggcgctggcggccgccgggaggggccgcgcgatcttgatcgccccccaaaattccaaaaattagattttccctgctacgacggcaagaccgattcgatgctcttcatcaacaagtgtgaatgctattttcgccaacaacgcaccttggcggaggagcacgtgtggatggcctcgtacaatttggaggccgtcgcgcaactttggtacatccaactccaggaggacgagggtacgcccccgtgggggcgattcaaggagctcctgaacttgcggtttgggcctcccttcgctcagccccgctgttcgagctcgccgagtgccggcgtacagggaccgtggagtactccaatcgcttctaggccctcctgcctcgcgcaggtcgtcttgatgaggcttagcgtgtccagcccttcaccgtcggactcctgccgtcgctcagccacgccgtccgcatccacaactcgaagatgcttgtggccgccatgagcatggcgcgtcaagtggagttgatggagattgaccgccccgtgcagcccccctcgggcgcccccgcacggcctccttcccgttcccgcgccccgaccagcgctcccggcgccccagcagtcgttggcgctccctgcccctccggtggccggccagcagggtcgcggcgagggcaaccagagacgcctcaccccagacgagatggtggaacgacgctgtctgggcctctgttttaattgcaatgaaaaatatacccgtggccataacaggttctgccggctcatcttcttccttgaaggtgtggagatcgaggacgccgctggcaacgcggagcacgatgccgaggcgccctgtttttccctgcaggccgtggttggggttcccatggcgggcaccatgcagatcgtcgtggcactaggcgccgcgtccctcgtcgccctactcgactccggcagcacgcacaacttcatctcagaggaggcggtgcggcgctccggtctacccctccgccaacgcccccgcctcacagccttggtagccaatagcgagcgggtcacctgcatcggtgtcatccgcgacgcgcccgtgctcatcgacgaagattcgttcccggccgacctctacgtcatgccactggccgggtacgacgttgtcgtccttgacacccggtggctcaacgagttggggcccattgtttaggacctcggctgtaggtgcatgtccttccagcgccaggggcagcccgtctcctggactggcgtggccagcccctctgtgcaggccctggacgcaacaacagaggtcgatcccctcttggaggcgctgctgctttcgtttggggggcgcttcgtggacctcgtcggtcttccccccaagcgtgcgcacgaccactgcattattctcaagcccgacggctagccggtcgtcgttcgcccctaccggtaccccgcagcgcacaaggacgagttggagcggcagtgtgccgccatgattgatcaaggattgtccgccgcagcgactcgccgttcttgtcacccgtcctcctcgtcaagaagctcgatggttcgtggcgcttctgcgtcgactactgggcgctgaatgcgctcaccgtcaaggatgctatcccgatcccggtggtcgacgagctccatggcgccaagttcttcaccaagctagacctccggtctgggtaccaccaggtgcgcatgcgcccggacccggaggacgtgcacaagacggcgttccgcacccatgacgccctgtacgagttcctggtgatggcgttcgggctgtgcaacgccccagcgacattccaggccttgatgaacgacgtgcttcgcccgttcctgcgtcgcttcgtcctggtattttttgacgatattctgatttacatcaagatgtgggctgatcatcttcgccacctctgggccgtccttgacgaactacgccgccaccaactcttcgtcaagcgcaccaagtgctcttttggtgcttcttccgtcgcctacctcggtcatgtcatatccgcggcgggtgtggccatggacccagccaaggtgcaggtgatccatgattggccgactccacgttcgcccgggctgtgcgtggtttcctcggcctcgccgagtactatcgcaagttcgtccacaactacggggcgatcgcgacaccactaacagccctactcaaggagggcttctcctgggacgacacgacagccgcgacattcacagcgctcaaggccgccgtcacgtccgcccccgtcctcgcctagctgttcaccgtcgagtgcgacacatcgttgttcggcttcggcgcggtactgttggtactggtccagcagggccatccggtcgccttcttcagcaggcctgtggcaccgcgacactgctcgctagccgcctacgagcgtgagctcatcgacctcgtccaggtggtacgacattggcgcttgtatctgtgggggcggcgcttcatcgtcaaaactgaccagtactgcctgaagtacttcctcgatcagcgcctcgccacgatccctctgcaccactgggtcggcaagctcctgggcttcgatttctcggtggagtaccggtcgggcgccacgaacgtcgtcgctgacgccctctctcgccgcgacaatgacgtaagggaggtgatggctatttcggcgccccgctttgacttcatcaagtgcctccgccacgcccaggccactgattcggccctggttagggctgacaatgggctataaatcttgcactataagatttaaggattgaatcgggttaggatcggactctatttctagccattttttaactataatttatttagggccttgacattttgtgaagaactatttggatcacgatccattaccacccctagccctgatcgccatccacgatgaggtccgggctggcactcgcgtcgctccatgggcgctggtggacgatatggtcgccctcgacggccgcctgtacattcccctggtgtcgtcgctgctgcaggagatcttggccgcagtcaacaacgatggtcataagggcattcatcgccccctccacaggctccggcgggatttccattttcccaacatgcgtcgcttggtgtaggatttcgtgaaggcctgcgtcacctgtcagcagtacaagttcgaccacctcaggccagccggtttgttgtagccactatcggttccgtctggtgtgtgggctgacatcggcatcaacttcatcgaggcgctgcccaaggtgcaaagcaagacaatcatcctctctctcgtggattgcttcagcaagtactgccatttcattcccctggcgcacccctacaccgccgacgtcgctcacgccttcttcaccgacatcgttcacctccatggtgttctgcagcccatcgtctcggaccgcgatccagtgttcacctcggcgttctggcaggaactcatgcggctcattgggacgaagctctacatgtcgttcgcctttcacccgcagacagatggccagaccgaggccaccaaccgggtcatcgtcatgtatttgaacaggcacaggcggtacagaagcgcgtctacgaccagcaccacatgccagtgtccttccaggtcggcgattgggctcttcttcgccttcggcagctggctacatccctcccacgctcggcaacagggaagctcaagccgcgatacgtcgggccgtaccaggtggcggagctcatcaacgaggtggcggtgcggctacagcttcctcccggcgcttgcattcatgatgtgttctatgtcggcgtccttgatagaataagtcatgtggtcttgtgtggtgaacaggacagcagacaacaccttttgactgttgcagaacagcaacagtgcagttggagacaacatcttttgactgctgcagaatagcagcaatgcagttggagacagcagcagttgcagtcttttgactgcactgcagtagcagtcttttgactgctgcagccagcaggacagtagcagttaggcacagcagcaagacagtagttgcagttttgactgcactttagcactttagtatctagaggacatcacctgtgtgctgcggtgtgtagtgtagtatgtagtgcagtgtagtgcagcccctagggctataaatatgtgtccccaacccttctaagggtctgacattgtgtcatgtacgaccacacatacgccaggcgtaggagagcccgcgatgtgcgccgagctgagcaggcagcaaaggcacatgcgcagcaggtgagtggctaggatggaaagtagccatctgattgattgcgcatgcagcaaacatagaaggcgaccgcctgattgattgtgcatgcagcaaacatagaaggagattggctaggagagaaagtagctagctgattagtatccttcctattttgattagatcttcaatcaaggagaaccttctccatttgtgtaagccgccggctatatatagccatgtatgggggcacttggaaatcaataaagaattacccatcaagtctcttcctctcttctctaaccggcgaccaggagaacttctcctgtcgacgggtagctcggcgtgggggcataaccctgccggcaaccacgggtcaaggctacgatctacgtagccgaggtcctcctaccttgggcaataccgcccttgacaacctggtatcatgaagccgacgatcctcgtcttcttcacaaccatcaacttccaccaccgcagccactaaacagccctcaaccccaccctcgccctcagcctccaccacttccaccggtcactccaacaccatgtcggagccctccatggccgacctcatggagatgatgaaatcatggcattcggagctcaagatggagatcaaggagatgaagatcgagatggcttccttgaaggacaaggcatcctcgtcatctggcgttggtggcggcaatcgcatggagcctcctcgtgaaccggatcggccccccaggttccagaagtgggactttccccgttttgacgggaagtctgacccgcgcctcttcctcaacaaatgtgagtcatattttcgtcagcagcgtaccatggccgaggagcgcgtcgggatggcgtcatacaacctcgaagacgtcgcccaggaatggttcatgcaacttcaggaggacgaaggcacgccgtcgtggggacgtttcaaagatctcattgatctgcgattcggaccaccgatgcgctcggcgcccctcttcgagctgacggagtgccgacgcaccgggacggtggaggaatactccaaccgcttccagagcctcctcttccgcgctgggcggctcgacgaggcccagcgagtccagctcttcacgggaggtctgcttccacccctcaaccacgccgtccggcttcacaacccggagacgctggccgcggccatgagcctcgcccggcaagtggagctgatggagctcgacaagatggcggcagccccggccaggccggcgcaccgcgctccaccggccaccagtaaacctcagcaggcgcccccactccttgcgctgccggcaccaccggcgggtgctgcgccagccgcacgcgagcggcaaccgggccgccgtctctccgtggaagaacagcaggaacgccgtcggctcgggttgtgcttcaactgcgatgagcagtactcccgcggccacaaccgcacctgtcgccgcctcttctacgttgaaggcattgaactggagatggcagtcgacgccgcgggcgatgctgtcccagcagaggagggccccatctactccctacatgccgtggccggagtgccaaccttcgacacgctacaagtccgtgcgttcctcgggaccgcagtgctggtcgccctcctcgacacgggatccacgcacaacttcatcggcgagcgtgcagcgtaccgctccgggatgcacatccaaccgcgcccaaggctcaccgccaccgtggctaacggcgagcgcgtcacttgcccgggggtcatccgcgacgcgccgatcagggtgcagggcgacacgttccacgtcgacctcttcgtcatgcccttggcaggtttcgacctcgtcctcggcacgcagtggttgggaaccctcgggcccatcgtctgggatgtcgccgcgcggactatgcagttccagcgcgagggacgcgctgtctgctgggccggcctcgcatcctcggacaagccggccgtctgcgcagtcacggcgccaccgacgccaacactacagctccagccagcccaggagcccctcctcgacgccctcctgcactccctcggccacgtcttcaccgagccacgcagtcttccacccaagcgctcccgtgaccaccgcatcatcctcaaaccgggagcgctgcctgtggcggtccgcccgtaccgatacccggcggcacacaaagacgagctcgagcggcagtgcgccgccatgatcgagcaaggcattgtccgacgcagcgactcggcgttctcctcaccagtacttctcgtcaagaagccggacggctcctggcggttctgcgtcgactacagggcgctgaacgcgcttaccgtcaaggatgcgtttccgattccggtggtggacgagttgctggacgaactccacggcgcgaagttcttcaccaagctcgacctacgctcgggctaccaccaggtccggatgcgcccgggggacgtccacatgacggccttccgcacccacgacggcctctacgagttcctggtgatgccgttcgggttgtgcaacgccccagcaacgttccaggctttgatgaatgacgtgctgcgaccgtttcttcgtcggtttgttcttgtgttctttgacgacattttgatctacagtaagagctggggtgaacacctttcgacacctccgcgccgtcctcgaggagctccaacgtcaccagctgttcctaaaacgcaccaagtgtgcgttcggcgcgacaaaggtcggctaccttggccacgtcatctccgaggcaggcgtcgccatggatccggccaaagtccaggccatccgggactggcccacgccgcgatccgcacgggcggtacggggtttcctcggactgacgggctattaccggaagttcgtccaccactacggtaccgtggcagcgccattgacggccttgttgaagaaggatggattctcttggagcgcaggagccgcggaggcgtttgtcgccctcaaggacgcggtcacctcggccctcgtcctcaccatgccggacttctccaagccattcgtcgttgagtgcgacgcatcgtcccacggtttcggcgcggtgatggtccaggggggccaccccatcgcattcttcagccgggctgtcgcaccccggcatcaggcgctggcggcttacgaacgggagctcatcggcctcgtcctggcggtccgacactggaggccgtacctttggggacgccggttcatcgtcaaaaccgaccactacagcctcaagtacctgctggaccagcggctcgcgacgcttccgcagcatcattcggtcggcaagctcctgggcttcgatttctccgtcgagtataagccggggtcaaccaatgtggtggcggatgccctctcccgccgcgacacgccggacgatggggcgctgctggccctctcggcaccgcgtttcgacgtcctggaccgtcttcgtcaggcatagctcaccgatccagcactcactgccattcgtgacgaggtgcaggccggcaccaagcgcacgccgtgggaggtggttgacgggatggtccagtacgcgggctggctctacctacccccttcttcaccgctgctccgtgaactgctcgcagctgtgcatgccgagggccacgaaggggtccagcgcacgctacatcgccttcgacgtgacttccatttccctaacatgaagcaggtggtccaagattatgtccgggagtgccctacctgccagcgccacaagtcagagcacctacacccggccggactcctccttcccctaccaattccgcagggagtctggacggatgtggcgctggacttcgtcgaagccctgccccgagtgcgcggcaagtccgtcatcttgacggtggtagacagattcagcaagtactgccactttattccactggcacacccctactcagcagagtccgtggctcaggcattcttcgcggagattgtacgccttcatggggtgccacagtccttggtgtcggaccgcgacgtcgtgttcacctccaagttctggaaggagatcatgcggttgatggggaccagtctccacatgacgtcggctttccaccctcagtcggacggccagtccgagtcggcaaacagggtaatcatcatgtacctgcggtgcctaacgagcgatcggcctcgccagtggctccaatggctcccatgggcggagtacgtcttcaacaccgcctaccagagctctctccgcgacacgcctttcaagatcgtctacgggcgtgagcctccgtccatccggtcctatgaaccgggggacacacgtgtcgcggcagtggctagaaccatggaggagcgcgaagagttcctcgctgatgtccgccatcgactggaacaggcacaggctgtccagaagaagtattatgaccagggacaccgcgccgtcacgtatcaggtgggcgaatgggtgctgctccgtctccgacaccgctccccggcctccctcgccactgactccaccggcaagctgaagccccggttctatgggccctaccgtgtgctggaactcatcaacgaggtcgctgtccgcctcgagcttccgggccgcgctcgcatccacgacgtatttcatgtgggcgtcctcaaaaagtatcacggcacaccaccgtaggttacaccgccactacccccacttcaccatggggcagtcaccttggagccagctagggccatccgaacccggctcaaccgcggtgtacgccaggtgctggtgtagtggaaagatcagtcgcctgcatctgtgacttgggaggacatggacactttcaccgacaaattcccaacctttcagctcgaggacaagctgcttctcgaggagcggagagatgtcatgtacggccacacatacgccaggcgtaggagagcccgcgatgtgcgccgagctgagcaggcagcaaaggcacatgcgcagcaggtgagtggctaggatggaaagtagccatctgattgattgcgcatgcagcaaacatagaaggcgaccgcctgattgattgtgcatgcagcaaacatagaaggagattggctaggagagaaagtagctagctgattagtatccttcctattttgattagatcttcaatcaaggagaaccttctccatttgtgtaagccgccggctatatatagccatgtatgggggcacttggaaatcaataaagaattacccatcaagtctcttcctctcttctctaaccggcgaccaggagaacttctcctgtcgacgggtagctcggcgtgggggcataaccctgccggcaaccacgggtcaaggctacgatctacgtagccgaggtcctcctaccttgggcaataccgcccttgacacattgtgtagtgtttgaggaaataaacagaaaattgccccaactcatagtgtcatcctcttgatgagagttagagtccctctacttacaattggtatcagagggaaactatcctgcagcctaaacatctcgtgctcatctccttcccgcgcctctccccacactcagtcggcagcaagagctccaactgttccttcctctcctgctcagacgagcaacctttcgtctgagacagcctcttccgcacgtagcgacccctcactagcccaccatgttcctacgctcagtcacttcgagtgcgcggcgccagctggaagccgaggtcgccgcggcacaagaaagagagcgagcagcagcagcggctgcagcgacaacggcgagggcagcacggctggcggcagcggaactggcagcagcgagagcggaagtagaagcagcggaggcggcggatgctgcacgtgcggcggcagcagagcttgaggtttcgcgcggcagtagagctggcagctctgcttctgtcgacgacaacaccgacgaagagctcaggctggcgagagaagcagcgcgagagcaggcggcacagtgggcagccgcgcacccccatgggggcgcgtgtggctgcagcccagattggcgccgacgcgctgacggcgctccgggcgagggcgcacgcggcggcagcccagacgggcgtagacgcgccggcggtgctcccggtggcggcgaccgggtcgacggagatcgtggcctctacaggcggcgcgactctccctccatggatcggtaccatggtcgccgcatggcccagaccattgtcagggacatcggtcctggcggtgggtggcctaccctcaccaagaccaactacgtcgagtgggccgcggtgatgagggtacggctccaggttcgctaaatgtgggaagcagttctgtacggcgacgttgactaccacgaggatcggcgggcgctggatgccctcattgctgcagtcccgtccgagatgcagttttcgctttcccagaagcggactgccaaggaggcctgggacgccatcgctgcgacccgcatcggcagcgaccgtgcccgcaagaccacactgcaggcacttcgcaaggagtgggagaacctggccttcaagccagatgaggatgttgatgactttgctctccgcctcaacactctgttgcagaagatggtgcagttcggcgacgacacctacgatgaggagagagctgttgagaagctcttccgttgcatccccgagaagtacaagcagatcgctcgctcgatcgagtctctgctagacctctccacgatgacgatcgaagaggcgataggtcgtctcaaggtggtcgacggcgacgaaccacaggctccctctggccctatcactattggcgggaagctacatctcactcgggagcagtgggaggcctgccagggtgaccagaagaagggggagtccttgacacgtggccgcaaacgcggcaagccgcgcaaggcgcgtggaggcgcccaggccggggcgcgaggacatgctgagggtggtgcccgtggaggtgcccaaggcggcgccgtcggcaacaagaagccggcacgagacgatggctgtcacaactgcggcaagcttggccactgggccagggactgtcgacagccacgacgtggccaggccaacgtcgcacaggcggaggcggaggctctgctcctagcacatgcaagcatcgagccatctccagcggcaccggccacagcggcactcctccaccttgatgagtcgaaagcacgcgctttcctcggcgacggctccaacaaggacatgatcgaaggatggtgcctcgacaccggcgccactcatcacatgaccggccaacgggagttcttcactgagcttgactctagcgtccgaggctccgtcaagtttggggatgcctccggcgtagagatcaagggtgccggctcagtcgtcttcaccgccgcgtctggtgagcacagactgctcaccggagtctactacatccccgcgttgaggaactctatcatcagcttgggacaactggatgagaacggttcgcgcgtggaggtcgagcatggagtcatgaggatctgggatccctctcgttgccttcttgccaaggtacgcaggagtccaaatcagctatacatcctcaatgtgaaggtggcacaaccttgctgccttgctgctcgtcgagacgacggggcatgacagtggcacgagcgcttcgggcaccttaacttcgaggccctgaagcggttcagtgccaaggagatggtacgaggcctgccgtgccttgaccatgtggagcaattctgcgatgtctgcgtgttgacaaagcagagacagctcccctttccccagcagtcgagctttcgagccaaggagaggctcgagctcgtgcatggggacttatgtggcccggtgacaccagccacaccaggaggacgacgctacttcttgctgctcgtcgacgatctctcctgctacatgtgggtgatgatccttgggagcaagggagaggctgcgaacgccatcaggcgtgtgaaggtcgctgcggaggcggagtgcggccgcaagttgcgcgtgctgtgcaccgacaacggcggcgaattcacggcggctgagttcgtgtcgtactgcgcggatgagggcgttcagcgccactactccgcgccgtacagcccgcagcagaacgacgtcgtcgagcggcgcaaccagacggttgtggggatggctcgggctctcctcaaacagaggggaatgccggctgtcttctggggagaggcggtggtgacagcggtgtacatcctcaaccgctcgcccaccaaggcactcaacgggatgacaccgtacgaggcttggcatgggcgcaagccgacggtctctcacctacgggtcttcggctgcctcgcgttcaccaaggagcttgcccacatcggcaagctcgacgacaggagcaccccgggggtgttcattggctacgcggagggctcgaaggcctaccacatccttgacccaggaacacagcgtgtgcgcacggcgcgcgacgtagtgttcgacgaagggcgaggatgggcgtgggacaaggcggtggacgacgacacgactccgacgtacgacgacttcaccatcgagtacgtccactttgagggagctggggggagtaggcaactcttctccgagcaggtctaccccagcccccaagtctccaccgactccagcgccacgctctccagctccggctacaacgagctcttcactaccacgcactccagccacgacctcgactacaccgagctcttcgccaccacgtactccagcaccgacggtgccctctccgggaatgtcctctccgacaccagctcgtgtcgagcacgacccaatggagctcgtgaccccgctctcccgcgacgaggagcgcatcgacgcgtgctacgacggcgagccgttgcggtatcgaagggtggagggccttctcatcgactcgtcggtgccgggccctgcgtcccgcattctggcaggagagttgcatcttgcatgcgacgatggtgagcctcggtctttcgaggaggcctagaaacatgcggcttggcgtgccgcgatgcagtcggagatggaagcggttgagacgaaccgcacttgggagctcgctgacctccctcatggtcatcgcgcgatcacccttaagtgggtgttcaaactgaagagggatgaagccggcgccatcgtcaagcacaaggctcgcttggtggcacgcggtttcctacagcaggaggggatcgacttcgacgatgctttcgccccccgtggcacggatggaatccatgcgactcctcattgctgtcagcccagcaggggctggcacgttcatcacatggacgtcaagtcggcgtttcttaacggcgacttaaaggaagaagtctacgtacaccagccgccaggttttgcgatccctggcaaggatggcaaggtgttgcgcctgcgcaatgccctctacggcttgcgacaggcaccgagggcgtggaatgccaagctggattccacgctgaagaggatgggattcatgccaagcccgcacgaggcggccatctatcggcggggcaatggagaaaatgccctgctggtgggtgtctacgtcgacgatttggtgatcaccggcgccaaggatgtagaggtggcagcgttcaaggaagagatgaaggccaccttccaaatgagtgacctggggcatctctccttctacctggggattgaggtgcaccagggagactccgggatcacacttcgccagaccgcctacgccaagcgcattgttgagctgggtgggctcaccaactgcaacttagctctcactccgatggaggagaggctgaagctgagtcgcgatagcatgacggaggaggtggatgctacacagtaccggcgtcttgtggggagccttcgctacctcgtccacacacggcctgacttggcatactccgtcggctacgttagtcggttcctgcagcgaccgacgacgaagcatgagcaggctgtgaagaggatcatccgctatgttacggggactctcgaccatggtctctactacccaaggtgccctggggaggcacaccttgtcgggtacagcgacagcgaccacgccggcgacatcgacaccagcaagagcacaagcgggatcctcttcttcctcggcaagtgccccatcagctggcagtcgttcaagcagcaggtggtggccatgtccagctgcgaggccgagtacatagcggcctccaccgcttcaactcaggcgctctggcttgctcgcctactcagtgatctcctcgggagagacgttggagcagtggaacttcgggtggacagcctgtccgccttggcattggccaagaaccccgtgttccatgaacggagcaagcacatccgggtgagataccactttatccgtgactgtttggcagaagggagcatccatgcacgctacatcaacaccaaggatcagcttgcagatttgctcaccaagccccttgggaggattaagctccttgagctttgttccaggtctgggatggctccactttcccacaggacgacgcacaagacttagggggagaatgatagaataagtcatgtggtcttgtgtggtgaacaggacagcagacaacaccttttgactgctgcagaacagcagcagtgcagttggagacaacatcttttgactgctgcagaatagcagcagtgcagttggagacagcagcagttgcagtcttttgactgcactgcagtagcagtcttttgactgctgcagccagcaggacagtagcagttaggcacagcagcaagacagtagttgcagttttgactgcactttagcactttagtatctagaggacagcacctgtgtgctgcggtgtgtagtgtagtatgtagtgcagtgtagtgcagcccctagggctataaatatgtgtctccaacccttctaagggtatgacattgtgtagtgtttgaggaaataaacagaaaattgccccaactcatagtgtcatcctcttgatgagagttagagtccctatacttacagtcctcaagaagtttgttggtaccccgccggtcgttccatcgctgctgcctctgctcctgcacggtgctgtggtgcctgcaactgtctgggtgactcaagctcggctggcccgaggagtgcgccatgtgctcgttgaatggcagggcgaaccacttgtttcggctacatgggaggatctggatgacctccgggctcagttcccttcctttcagctccaggacgagctggacttcgaagcggggagagatgtcatgtggggacgcacatatgccaggcgcggacgcgcctgcgacgtgcgccgcgcggctgagcgcgctgggcaggcgccgcagggattagattaggaagttgttttggaaatccctagaatcatggagagccttcttcatgtcagttggaccattggctatatatgcttgtaatcacttgacaatcaattaagcaagaattatatccttaatctctctctctgataagcctgcggttgagggggataacctcaccggagaggacgaccggctgctacgagctgtgtagccgcggtccagctagtcgggggctcgacgcccttgacatataccactgtgcttctgcacccgagaagctcccttgctttgatgcagttgcattagacatcccagcaactgctgcttgctttcaccttctagccttcctggccctgcatcatctctccacactcgttcacctgttctccctgaaggacattggcagcagacagggtgaccaaacaggacttgcacctgatgaataagtcgagggggtctgtggcctcggcaaacgctatctagtgcgacaaacaagtagaaggacatcaccataccgtctgggagcaggtgcacactgtgggttttgccggcggttgtcagcgctgagcaggagcacaagtgagttgaggatggaccttgtgagggtgttgaggatgatgagtgtttagggcctccttcgtgtccgagaggggagatgatggtgggaaggtggtgggtgcggagagaggggaggcatggggacctaaggagttggaggctgcagtggggtaggagtgggacattgggagcaggtgtggctacacaggagggtttgaggagttgaggccagtgtctcaaggagggagatgacgaccatggtggcgttttggcaccaccacccatgtgaatgtgatgcacaggtgtggacatggagctgcatgacggatctcatagcgaaccacaacagcgcaccatgttggtctataccctattggaccatgagtgagatccatatcaaggtcagtgagtcaattctgcattttggaatttagggacttacaacagacaagttcattgaccggccacacagtgtactctagttttcgcattttgtccttccgtcataccatctcctagctttaacaaaacattctcatccactcaatcccattgcattctctaagtcatttataatcgattaaaaagcaaagacacttggatgatgttagtgagaatttggagacctgtgtagtgtaacagatctcagatttatgttggagtgttggtcatctatcttcaatctcctgctcttgtttatctgctaccacagtgtatggacattaggattggtcagtgttaagagtagacgcactaaccagttcaacccaaaagtttaagctgttaggagaagataggcaatccacttatatatttcaacactcccactcacgtgcagctagaaaggaaggcgcaaacgtggaagtaaaggggctctgctaggattcgaactctttgactttgatactatattaagttgcatgcaccaattggttaaacccaaaagcttaagttagtgtgtccactctaatagtcagaagtcattgctgacccactagcagcattgtctttgtattgctgattccttgtagacatccaaaaggcatataatgtgttgtcagtcctccacagaattgggtttgggcaaggtgttacacttctgttttgccctaatggtctcgcaggtgaatccaatgttgagaaattccagtgttaagggctttatgtaaaataggagtgaaaagtagtatgtggtgaagtatctgttacaattgatcactccgtccagatgacttaggataagtgaaacagatcattcttgtataaaaaattacaaatattttttataacaaggataccaataagttaggatgaaaactgtggtgcagcagctgttgattttctgtgtaggatgtggtgcttctgttacatactgcatccatggtaacggcatgttctcctctgtgctcttccaactgaactgctaatttttttccaaacactgttttgaaaaggttgacaggcaccctgagttcaagtcaag

SEQ ID NO: 269 - DNA, 1579 bp, Zea mays
  Intron number 1 from transcript GRMZM2G161019_T02 (locus G RMZM2G161019) derived from phytozome v7.0 (chr-ID 8; pos 1 19735278 to 119736856)
ctgctcctcttcatctccgagaccagtaagtgactctccggcggccggcagttgtctgatttgatttttttccttttcctactttgcggccttgttggcccggcatggttgtagaattcgagatgtaagctcttcaaaaaagaagcaaagaaaagactgaattttctgagctcctcttggggactcattgttgctgcatgctgtgattatgtggagagaaaaaaagagataaatttcgataagctactgtgcgtttgcatggtaccgtctagattaatgcagcagacttctgggcttaagctctggtgctgttgacggtgtatggagggaagggatctgtgttttgttatgttatgccgaaattagtgttgagcatggacgcgaatcctaataatgcataacgtggacggctatttatacgctctatttgggagtgagactcccagatgctggaatatttcaaaaaaaggctggattttcagttgctttcggttccttcagttgtcccaatttggtggggacaatactctttatccggtagacacctggatttaagtactgacgtctccttttgatctgtttgagttttatatttcttttcatgttacaatcacgtgtgcaaacaattacatactgaggattagctctactttgctcttaggggatgtttgaatgcactagagtgaatagttagcggctaaaattaggtagaaacataaacactagctaatagttcagctattagctattttttagtaaattagttaatagttagctagctatttgttagctagctaattcaactagcaattttttagctaactaactattagctctagtgcattcaaacacctccttattaattgtgtgtcagtattgagtaaactctacttgagggaaagcttctacttttagtcaggaaatttggactgacacgaacttatatcaccttttctggaacctgctgtgctagtacctgagttacattttgggtaaaaattctttttgtcaagtgtttccttcagagtactggataatttatagccgtcgcttgtggcacacaattcatatttcctgtggcaagctcatgtgtatccacctaacatttgttctgaatttgtggcaaagctgcaaagtttaggctaaaatggctatagaaatgaggaatatgtccattatcccagaataaatacaccttacttttgcaagtgtttgtccaaaaaaattggactaaataaggtatgtagtttggatagtattatgccttgtagttttctgtcattggcaaattctaatgtcctgtcttttagcgtcccgttatgaaattcatggcatttgtcatctctttttttgcagttctttattgctctttgaaaaacttaacctcatcttgtttctacctctaaaatctatgatctactgatgttgttcctcgtaccaacatgccgttattgtcaaggaaatgctgttatgttacatattgtgcttaaataagtggaatgaagcgtcacctaatggtttttctgtgtacataatgtgtttagggtcatatttttattcgtcaacagagactaagtta

SEQ ID NO: 270 - DNA, 3109 bp, Zea mays
  Intron number 6 from transcript GRMZM2G334225_T01 (locus G RMZM2G334225) derived from phytozome v7.0 (chr-ID 6; pos 1 12215542 to 112218650)
gaagtcttaaaggagcaacttaggttatacacaaactcccaacaatgcatgcatcggcagctttcctcaaacagaaatatacaatatcttgcaatccctaataaagcatatgtgactatatgaataagacatttcaaatattttatcaattcattagtttcttttaagcagctaacatggtaacaactaagatgtgatgtattgaaaaatataccatctatcattactccttactccttagtacatatatgtgtagtatttaagaataattaagcatatgtatcaaacatacccatgctgaaaaagcaacaacgttttattaacaaaagtgaaaaagaaaactgtaatatacaaatacaatcttatgaaaatactttctcatcaattaataatgtaggaaatttagtttcaaaacaagataaacaaacttgtatttatttataatatattcttttggtactttatctgattttaacttgtaagaaaaaattagaaccaaacacacaaaatttagacattcgtaaaatataaataaaacacaatattatttaaattggagggttaatgattcaaatagtataaaattactttaaaccttaatgttgatactataaaatttgtgctacaactaggattttggaaaaaaaattctctattggtctttatactgtaataattatggatcctacattttgtaaaagttatctaaaattattaggttattttagacagtgaatagccacttacaaacttaatttaatagtagataacatgatgtttttactatcactaatattacaaaaaaattgtattctttataattctttatatttcaacaattataaaggaattcatgagtgttttaatcaattagattattttaggtatataatggtgtaacaacttttgtgaattggattatcatgtaccacctattactttatccatttgaattattgtaagactaccttagccttacacccaatctaatggtctatttctttgctggcaaaaaaaacttttttaaaataataacttttatataagcatataatactattataaggagagatattcacatgaaaataatgtggatattgagttcctaaacaagtaaagtcgatctttaatcactcaaatgcatttttttcaacaatggttatatttgttgtagtttcctgcatttattactattgctgctacattaattgttaggtgggaaggcttaacaactaatgtcgttatatgtggcatcctatcattcactatactcggagcatctactacatcctttctaaatttcaatctctaaattatcatttggagagtcatttgcataaaaactactttctatattttttcaatctccaacaacttttctatatcttatttgcagtctaaagaatcattgaaattttctatctttgactagtgagaaatctggaaatagaagatggctataatctgttgagagtattttttttacaaaattatgtatttatatcaaatatgaagaatatagagaacctcgtggagttgctcatcctagttagattggtgacaagtgacaactagtcaaaatatcacatacaaaatactctttcaatcccaaaacttgttgttttaggattcaaattgtattctgaaaaaaataatgtttcagcattataactaggttgtgtccttataaactagagattgtagtctgcatgcatctataaatttctttgatcaatttattccttaattagtatggatcgcctttaataaataaggttgtgtgggtgattttgatagatcaccaataagtctaaaaatcctaaacatcaagttttttattctctattggtctttataatgtaataattatggatcctacattttgtaaaagttatctaaaattattagcttattttagacaatgaatagccactaacaaacttaatttaatagtagataacatgatgtttttactatcactaatattacaaaaatgtattctttatatttcaacaattataaaggaatttatgagttttttaatcaattagactattttaggtatataatggtgtaacaacttttgtgaattggattaacatgtaccacctattactttatccatttgaattattgtaagactaccttacacccaatctaatggtctatttttttgctagcagaaaatctttcttaaaataataacttttatataaccatataataatactattataaggagagatattcacatgaaaataatgtggatattgagttcctaaacaagtcgatccttattcactcaaatgcatttttttcaacaatggttatatgtgttgtagtttactgcatttgttactattactgctacattaattgttaggtgggaaggcttaacgactaatgtcgttatatgtggctatcctatcattcactgctcggagcatctactacatccttttctaaatttcaatctctaaattatcatttagagagttatttgcataaaaacactttcttcatcttttcaatctccaacaacttttctatatcttatttgcagtctaaagaatcattcaagttttctatctttgactagcgagaaatccggaatagaagatggctatacttggatagccatttaaataatctgttggggtatttttttacaaaatcctgtatttatatcaaataggaagaatatagagaacctcatggagttgctcatcctagttagattggtgatgagtgacaactagtcaaaatatcacatacaaaatactcttttaatcccaaaacttgttgttttaggatttaaattgtattctgaaaaataatgttgctgcattataactaggttgcgtccttataaactagagattgtagtctgcatgcatctataaatttctttgatcaatttattccttaattagtatggatcgcctttaataaataaggttgtgtgggtgattttgatagatcaccaataagtctaaaatcctaaaacatcaagtttatttagaggataattttcttactataaataattgattatctattttgtgccattataaatatctagcgctagaacataaccttggttcttagg

SEQ ID NO: 271 - DNA, 4912 bp, Zea mays
  Intron number 2 from transcript GRMZM2G068128_T01 (locus G RMZM2G068128) derived from phytozome v7.0 (chr-ID 2; pos 1 6547499 to 16552410 reverse strand)
tccagtaagtattaattccttcatttgaattaaatgttagttattattgtgcttcagtatgaatgtgctcccattgccattggaacattttcaaaattatcatcactgaaaattttctaattcactagaaatgtgaaaactgagctaagtagtctgtcacttgtgattgatgctgcaacctacctggagtagctctagacccatgatccttgagcagttgagctatcaatacaagtcatataaatgcaactcttatgtacacataagatatgttccttattcgtttcttttcttagaccctagccttgtttttaaatttaactgaagggtcgaatcaggtaaccagaggggatgaatgggagccaataaaattctttgcactttaggcattcttggcttgcttaccaatactacacccaaacctccaaaacttcaaaaaacacaaaagagatgcttaagcctagacgttctcggtgatagccgaagaacacaacgaagcgctcaaatcagctagaaatgtgtttgcgaggaaacttccaaaatcgagagattaagcacttaacttcaatggagatgaacaaaatactcagatcaaaaacatatcaaccaactagtggtgcatgttttggaaatgttcttggagcatgcatgtgtccaacaaaacaaaccgatcgcaaaatagacactgaaaacttcaaaacttcccaaaatagtgacactcgcttagtccgttttcaactgcccgaatcaaagttccaaaatgtaaaatcgatccatatggactccgattgagctgaaattttgcacacgtcttcacaagtgagtttcaaaggtgaccacaaaatgtaagctccaagttttaaactttaaagtcagattgaaatataattttggatcagggttttcacaaaatcgctcaaggaattggaaaatcgtgctccagatggattagcccataccacttcgtggtaatgatccgaataggtttagttagagaatgaaactccacgctctatattgcatagatgatggttacatatatagatccaggggaaaccctaaccctaatgggctggcagcccaacagtggtgttagcccatctacacatacatggataatatagggacacactcttacatcctcccacaatcacaacgggggcaccacacacgatgagactggagaagagccaaaggtagaagccgacgagctgaaatcccaccgcagtcgcagcgtcgtgtgggtgcgaatgttgtggctggagtagagaccggtgtaaactccatgaagatggtagcccctggatgccaaggtagccgaagtcgaggtggtgcgctgttgcggcttggagacatgcagtagatgcctcgttcttcggtggggtcgatgttcgagcgtcaacggtaggtggggtgacacaaaaaggacaacatcagcctcgtggtccttcttgcttctttttgtgtccggttgtcgaggagccccgccacggaagccggaggcagcgcacacatttgcgctagtcagggtggtcgcgctgactagagggaccgctccaacctttaggcaggggaggcggtgacggcaaaatagaaggggcagtggcagatccagcagggaaggccacgacagggacggatccaaccgtggtggcgaggaagaaagggcggcggcagggctggtctagccaggtacggagctgcgtcggatccaaccaggcatgggggaacggagctgcgtcgtatccaaccagacatgggggaacagagccgacaacaggaaaagcttgaagaagaggaaggcgctaccggtcgttagcgcaggcagggaggaggtggccgacgctaggggagaggtaggcggaggttggtgcgtcgccgctggacatggtcagggagacggtgactgctagggtgcttgcctgttgccgaggctattgcggcggccagcctccatggcggcagtgcccgcacgtgtgcctggctagggtctgcggcgtcctcccactagttctgccagcgacggcggcgtttgcacgtggctgctcaggcagcaggccggtggcgctcagagagtggggggccaccaccgacgttgtcgaagataggggaggaccgcggtcggaaagacctagtttctcagttaaaacgaatagcttggaaagactagttctttcaccgctctcccaattcatcgacacaaacccgcataacattcaacttcgccatcgactattgcctccggactcaacacatgcgcatcacaagccaagagacatgttgcacaaactaatgccccgattaatccacacgactcaacccaagacgtcgccctgttgacaaaccacaaaatccgcattggagtacccacacaaaggtatgactgaagaatagaaatatcgaagtccaaactcaggagtgaaacgaaggtacctcatgtttcttttaaccgcccgcttgtagaatgtgcgtggggaagcctaaaacccagcaaatagacacacaacaaagtgtatgtctggtctcgtcatcatcaagtatagaatcgagccaatcatgttcatgtacttcttctgatccactggctcactatcctcatcggcctccaaaggcgtcgtggtggatatggacacaaaagagtcatagcgccatccatgtcaaacatcgttgaaagaggttggacctcatccatatcaaacttcttcgagacatccttaatgtacttgccttggtgcacaaatttctcgtcttgagtctgtttgatttgctgcctaagaaattgagctctctcttcgtgctcatctcatactccctagtatctgaaaaatttaaaacaagagaaagaaaagaactccaaagatgatatcatccacgtaaatctgaatagtttgtgttcgcattaacattttgtttctatatcccctaatcattcaaagctttgttggttccattaacaaagcatagaaacataagaagcccacacgtttgtgggctgtggacatgcatttattggagataatattaaccatattttgcttcatcacgtaaattagaattgaacggcttgatcaccttgctgcttcatgttttggtacacttcctgcatttcttaagccttatatatgctatgtttggaaacacagaacgtgcaaatttagaagcttacaagaattatcagttcattttgcattggtgtatacttgcagccgattcaacttaaaatccacataaatttggaacgaatttgcatagttgagtttattatctattggattattaatgggtgccatttgctgtaccgcctatcaactatcaagtaataagtaaatcttgagcactgccgcactgttcagcagtagggcactctcctactctcaagtcccaagtttccaacccataaactagagttgtttctatgtttatttattaggtaccaatctctactaatattatattaactagtagtttctccgtgcgtcaccccttccatgcacctctccatgctcccccacatttaaatggtaaaaaacagtttaaatggtaaacacaagtggaggttgaaccatggttgttggttccaaatacacatttaaaaaaaaacttgacctgcggggggtaagacagcccccgggtattgtattaagaagaagacattctcacacaggtcaagaaaactctcgaacccctgccccacccatacacagcggcatcaaagcccatgtgagaacgaccacaaccggggctgagccttagacctgtgctttggcgtgggacagacgaggggatttttttaaccacagcctgaaattcgctcccacggggagtcgaacccaggacctgaggagtgctactcagaccacctaaccaactcagctagaggccctttcgcccaaatacacatttacacctacctaaccaatagaatacacatatttttatgtttaatatactaaaacataatataaatattttttttatgaaaaaacatgcgagaataaaattgggccgtgtcgggtctaacccctgtaccgcacctaaggacgggtcggcacgggtcgagctaaatcgtgtcgagccacgcgaggaccttgccaccattatgcttgcaagccgctcgggactttttgctgctttggtggcggcaaggcgaagtggggaggaggaaggggcagcggcaactagggttttgtaccgcgtgagccactttatggaagatgacgcaaaatggaattatggttttttattcggcatatgaaatacatttatgcatgttgtatggtagacgtgttgagatcggacacaacgaccagtttaaatagagcacaaattattgtaaacgtttggaatgcgtatggacaattatcccaattaaacaaggtctacctaaatgatatatatgagtcgtagtaatgcacgggcacctaactagtaaacaaaataatgatgtggcattgtaaataaagaagaaagaggaaaaggaggagagagagggagagaagaaatggtaaaaactatatgtacacgggaatgaagatatgtgataggtagataatggggaaagaagatatgtgattggacaaacaaatagtctgaacaaactatatattggaatttctatgcgaaatggtggtatagcattcctccagggttcggtctacgatgccattgtgtatgggtgggactggagttctaggggtttctcgatttgcgtgagaagatcttaatataatgctcggagattgttaacccccacaggttgagtttttatgggtaatgtctacataattttatagtcatacaaattagttgtggtttactcgtagtcgctgtgatgcctacagtgctgtgtaaattattagtctaagacaactctaagcaatttaatgtttgtttgttttaacaggtgctcaat

SEQ ID NO: 272 - DNA, 5806 bp, Zea mays
  Intron number 1 from transcript GRMZM2G134042_T01 (locus G RMZM2G134042) derived from phytozome v7.0 (chr-ID 6; pos 1 62525283 to 162531088 reverse strand)
gtcgtcggtctcttcgcgtctgcttcctctctcgggtgagtcgtctcgtttgttgtcttctccgcccgcaaaaccctctccctcgctagggtttcctctggattttgttggtgcgcattcttttcctcactgtgccgccttcctctcgcacctctggtctctcccgtcttcggtgaggtctagttttggtgggggttggtgcgtttcgtcctttcgtcctccggtagttgaggaggagtggccgcgtctgggttctggtgttcttcgttgccctgcgaatatcgctgctatggatccgaaaggagagaacccccagaactcccaatgggatcgttggggtccgtcggagaagccgcaaggttctcatccttggaacagaccaagaaaccttagctggaagcttaagcctaatatcggcaagtctgagcagcagaagggtgtcttgtctcctcatcctgttgagggaaatcaaccaggtaacccttctgtctcccctgttcctttgaagaaagatctcgatctcgttcgccctgcgttctgtcaaaaatgtggtgttgaaggacatcatgctagaaattgttttaacgctttgtggtgtgatatttgccgcaaggagacacatgtcacttctcgttgtgttcttcctaagcaaaacaaacccaccatgcccattgttggtttggctgctgatggtttagggttttatctgtctcacttcgctaaacctttgatcaaaaagccaaaaagggttttcatcggtctggttaaagtggttgagggacttgtctcagctgtagatcttgagagagatttcgggtttcacttcccttggaacaagaggtggaaagctaccaaatgccattcaggatttctgatgcagtttccctcccaagaacgtcttgaggaaatgataagcttcccggagctgaaaatgaagatgtctggggccaagatcactgttgtgccttggagttctagggccaaacctaaatctagactccatactgtgtgggttattgctgaaaatgtccctgaggaattacagaattaccaatctatctgtgaaattggttcaatgataggcgctgtggaggaagttgaccttatgtctctggattctgatgatattgtgagatttaaaatccacattaaaagtgtggctatgatccctcctgtggtggaagtggctgtcaagccttttctttatgatatcttctttagaattgagtctatttgtgatgaaggatggaatgatgattctgtgaatttgggtaagagagcctcggttcaaattcatggatctaatgatccactctttgataaatctgggaaaaaacccaagaatctggatgatgttacccccgaagaggagcctaatcctattctcaaaattggggagtcttcttctcaaggcaaagagtttgccaaaatgtctgaccctaatcttgtgccttctaaagatatgtctgatgatgagcagaaacttgataacctttctgatgagaaggtggattttgatccaaatgaagatgatctgcttagctctcaagaattggaagaattcgctaaggatatggaggaagatccaactgattttcagtcaaaaattggtgctatgatctcgattccccccaatgatgagatggttattgaagggaagaacaaaaagcctctggacttgcctgctaacacggctggtggcgtcagaaaaagctctaggttggagaagaatgatgaggtgaaggtggctgataaagcgatatacagagcagaagccaaggatgccttcctcaataaaggtatgtgttctaattccttttctttgcttgattctaataatgatgatttgatagatttagcttgtaaacttggagtttctttgggcccctctgactctgatgtcattgataatttggagttgatcaaagatctggaacgttccaggaaaattttggccttccaagcttgcaaaaataaaatgaccccaaatgtggaggtcccttcccctgttgatcacataaatatggatagtagtgtccatgatgattctgacctgaatattgatcaggacttacttgatgtgatggttttacgaaaaggtaggaaaattaagcatcggaaaaaaacgattaaaaaaaaggcttcccctaaaagtagaggttcatctacgaaaaaaggggagtctgtctgttctgacctccctcctgatccgttttaaatcatgagaggacttatttggaattgtcagggtttgggtcgcgattctaagtttgattttctgagggaaatcattagggaagagaaaattgacttcgttggtttacaagaaactaaaaaagaacattttaatgactctcttctgtcctcgctcgcgggtagcaagctttttgcctggttctcctctcctcccaatgggagatcgggaggtcttttagtgggttttaattctgaggtgtttgatgttagagaatttgatgcgggtgaattcttaactcgctcccttgtcctccacagaggaaaaaattttatttggaatttcgttaacgtttatggggctgccccaaaatgagcacaaatctcgctttctcagtgaattgtctgcagtttgttcgagaagccaggtccccatgcttattggtggtgatttcaatattctcaggaaagctgaggaaaaaataaacctggtaccctcagcaaatggagttttctgttcaatagtattatagatcatcatggtctagttgagtttgatctgaaaaatagactatacacatggtctaacaatcgtaatgatcctacttttgaaaaacttgacagatttttggccagtcctgactgggaccttgcttataataatattagtgttatcgggttaaatagatccttttcggatcatgttcccctttgccttcacactgatttcctgcccatggtgcgtaaggattttcgttatgagctgtgttggaagattaggcctgattttcacaaattagtggaaaatgtttggactcttccggttggtgtgtccaacagtcttgatgtttggaaaataaaattgaaacgtctgcgtcagaagcttaaaggttggaacagtaatatggtaggtcactacaaaaagttgaagaaaaacttgattgaaaaaattgatattctggataaggccagtgagatgtctggcctttcggatgctgacagatatatgaaattagatttggaatctaatctcaggaagattgttgatgaggaaaacattagccttagacaaaaagctagggataaattcttattagagggtgatgagaattccaagtattttcatttgatggctagacacaaaaaaaggaagttgaaaatcttgactctttctcatggtgatattgtggctcatgatgatcatggcattaatcagttggcgacttccttttacaaagatctctttggtccttcccgtgattcgaatatttctttgaataacttggacatgaaacagctgggggagggtgatagaaatcttctcaccaaccatttttctttggaagagatcaaagatgtggtgtttgctttgaaacacaatagtgcaccgggccccgatggcttcccttctgaattttttcaggagttttgggatgtgatcaaaagtgatctgttcaatctctttaaagcttttcatgatggctctctcaacattgaaagacttaattttggtattgtcactcttattcctaaggtccctgatgcgactgatattaaagcttttcgccccatttgcttgcttaatgtttgctacaaaatcattaccaaagttcttactaacagattggctcgttgcattacttctgtgattagtgacctccaatatgggtttataaaaggaagatatattatggatggtgttctttctttgcatgagattattcatgaagttaaacggaagaaacagaatggggttattttcaaagtcgattttgaaaaagcttatgacaaggttaattggaattttcttcataatatgatgataaaaaaagggtttggagatttgtggagtgattgggttttgaagactgtgaaaggtggcaaagttgctatccgaactaatgatgtggttgggccctactttaaaactcataaaggtgttcgccaaggtgatcctttctcccccctcctttttaatgtggctgctgatggtcttgcttgtctgatccaaaaagccaaggatgaaggtgttatcaaaggtcttattcctcatattgtcactggtggctgctgttgtcttcaatatgcagatgacaccatttttctgtttcaggatgatttggaaaatgctagaaatttgaagtttattctttgtatctttgaacagatttctggcttaaaaattaattttcataaaagtgaaattatctgcctgggaaatgcctgcaatagagaacatctatatgctgatatcttcacctgtcctcccagtggtcttcctatgaaatacttaggggttcctattgataacaaaaaattgtgcaaatctttgtgggatcccatagttggaaagattgataacaaattgggctcctcgcaaggtcggttccttagtttgggaggtcggttagtcttgcttaacagcagtctcaccaacgttcccctgtatatgctttccctgtataaatgccccaaagctgtgttaaaaaaaatggatatcttcaggaaaatattattatggcagggtgggcatgatcagaaaaaatatcatttggctgcttggaatttagtctgctcccctaaaaatatgggcggtcttggtgttttggatttgcaaaaaatgaatgaagctttgttggctaaatggatttggagactagaaaatactagtggtttgtggcaatccattataaaaaagcaaatacattaagaataaacctattattttcggtgaaaggatagaccttcagattctcatttctggaaaggtattctctcggttcgagacaaatattataaatactgcaaaataaagattggtgatggtaagagttccagtttttggaaaaatatttggtgtggcaatatgacgctggctgacaaatacccataatttgtttgaggtggcttatgataaagatatcactgttcataaggttgtctcctctaattttcagttgctgactttcagaagaagacttattggtgctttaggtgaggcctatagtgaccttatggatcagtgtagccaggcctcgctttctgggaatgctgattcttcaaattggctgttggggtgcaaaggttattcggtaaaatccttttacaaaatgttaaataattccagaattgtggttcctgtgaattttatgtggaaaaccagacttccgcaaaaaattaaagtgttcttatggttggtcagaaataataagattttgaccaaagacaatttggttaaaaggcactggcacgggaatacggcctgtaacttttgtggattattagaatccatagatcacttattttttcattgtcctgtggccagattcatttggagaatcatccaaattgctttcaaactgtcttctacccctaaaaactcagctgacctctttggtccctggattgacagttttcataatcctgaaaagaaactgattctttttggatgtggtgctgttgtttggtctattttgcgtactcgtaatgattgctgcttcaacgctaggctgattgatgatccatctaatgtgattttctcctgctgttattggattgatgcttggtctattcgacagacaaagaagggaaaaagactggtggaacaaggaag

SEQ ID NO: 273 - DNA, 10573 bp, Zea mays
  Intron number 6 from transcript GRMZM2G464782_T01 (locus G RMZM2G464782) derived from phytozome v7.0 (chr-ID 1; pos 2 77035271 to 277045843)
actactggtgtgctgagaagtcgaaggaagattgaatggaacttcttgcaaaggtttgtatgcataaatatacaaactttatctatgtggtagtaaaaacaaatggtattcttgtttatgcactttcggatggccttcaaacatgtttttaataggaatttgtatgacttatttgtcaatgaactgaaatatttgttatgattgtaggtcactttaaatgtaccacacacttttagatcattattcttataattatgatattatgttcaattccatattgtaccagtgacttacttttttggtgattggctcaatttaatggttggtgcactcatgcaattttgaactaaaacaacagcttgtttgcactatccatgcatattgatattgctattgtagcaactgttataaataactgtggcaccatttatgcatacactccactatatatacgttttgatttgttatgatcagaaattccattattaacgactgaattttggtgtgctgatgctgttgggtccatgcttcgtcgccgaaggtcttcaagggagaagcggcttaaaatgtgtgagcaggtattttcggactcgtaccagaaagggaaaagctacaaaggttgacacagcgccgaagctgtgaagcaggaaagcttcggcatgttcgcagaaaagggaaccgacttaaagatgaaaaggccatttagacctcgatagagtgctatagaattatcaccaaatgtaaagggcatgtatgtaattttgtatgggttgtaccccgtgcctataaataggtgaacagtacccccgtactgttcacgttgacttggcatttgcttttgcgtcacacttgtattttcatctccttccaaaccgaaggtacatttataatttgatattgtctctatttctctataatgatataataaagttaaatgaatgatgttatatgattattcgtgctatcttttatgtttcatatgcttcgtctttcattaatgtatactgtgatgatgaaggttcgtccttcatgaccttcgtccggagatcgttatatcctaagggaaataatgcctcaatggacgaaggactttatcgtttaacattttctgtgttgccttgttcttaactcatagcatttgagaacaagtccccaacattggcgcccacctccggtgaactcacttccactttttgagctgatggcttcgttcaacgaccaagctggagctgcttcggacccgaagctggtgctcccgatcacaggtggctcgtcctcagagccagctaacaagaaacagaagaaggaagcacagagaagggtacagcatgttggggtgcaaggacccttcattaagtcaaaatggtctcacattcctattacattctcccaagaggaccttcagctcaaagactacccacacaacgatgccatggttatctcgtgtgttatcaaaggatttctggtccacaatgtcttggttgatacaggcagtgcagctgacatcatttttgctaaggccttcagacaaatgcaagagcaagaagataagattcatgatgctacacatcctctctgtggcttcggaggaagacagatcgtagcactgggcaagatcaccatgtcagtgaccttcgggttcatcaacaacactagaactgagcaagttgtgtttgacattgttgacatggaatacccttacaatgcaattattggtcgtggtactctcaatgccttcgaagcaatccttcatcctgcctatctttgcatgaagataccttcggatcagggacccattgctatccatggaagtcaggaagctgcaagaagagccgaaggaaattggactgactcaaaagcaatccataacatagatggagctgaagcttgtgaacagtacaaattcagaagggagaaagcagcttcagcagatcagccgaagcctatgctcttatgtgaggacatagcagagcagaaggtgctgttaggctcccaattatccgaagagcaggaaaaaaccttgataaggtttttgttcaataacaaagatgtttttgcatggtcagccaatgatctatgcggagttaatagggatgttattgagcactcgctcaatatcgatccatccttcagacccagaaagcaaaggcttcggaaaatgtcagatgataaggccgaaggtgctcgcaacgaagtcaaaagactcctcagtgcaggagttattagagaagtgaagtacccagaatggctggctaacactgttatggtaaaaaaggccaatggcaagtggcgaatgtgcatcgattttacagatcttaacaaggcttgtccgaaggatgaattcccactaccaaggatagactctttagttgatgtagcagcttcgtcagagctcatgagtctgttagactgctattcaggctatcaccaaatttggatgaagaaggaagatgagccgaagactagcttcatcactccaagtggcatatattgctatcctcggatgcctgaggggctcaaaaacgctggaggaagtttcagccgaatgactgcgaaggttcttcaatctcaaataggcagaaatgtgctaacttatgttgatgacatcattgtcaaaagcacgaagcaggagaatcatattgctgatctgcaggagaccttcgccagtttcaggcaagctggcttaaagttaaatccagaaaaatgtgtcttcggagtgaagaaggggaaatttcttggatgcttggtttcaacaaagggaattgaagccaatccaagtaaaattgaagctatacttcggatggagccaccaactacaaagaagggggctcaaagattgacaggaagattggcatctctcaatagattcatatccagatcagcagagagaaatttaccattcttcgaagtgctgaagtcggccgaagtctttcaatggggatcaatccagcagaaggctttcgaagaactgaaacagtatttgatagatctaacaacattgactccaccaatgccaggggctcctttattattatatgtggcagcttcgcactcagcggtaagtgcagcgcttgtccaggagaagcttgatggtcaagtcaaaaggcaggtcccgatatattttgtttctgaggtccttagtttatcaaagaaaaattatacagagttggagaagatactgtatgctgtcttgatggcctccaggaagcttcggcactattttcaagcttacaacataattgttccttcatcacaacctctgaaggatattatgaggaaccgagaagctactggaaggattggaaaatgggctgcagagctcaatgaattttgtattgaatatgttcatagatcttcgattcagtcacaggcactggcagactttattgttgattggacgccaggggctcaggagggggaaatgaataaagacaacgaagcctggacagtgttttgtgatggatcttggggaaccttcggagcaggagcggctgctgtgttggtttcaccttccaaagtcaaaacttgttatgcggcaaagcttgattttaattgcacaaacaacattgctgagtacgaagcattgattctaggtcttcggaagttaaaagcaatgggaatcagaagagccatacttaaaactgattcccaggttgtttcgggtcatattgacaaaagttgcaaagctaaggatccgaagcttgaaaaatatctggatatggttcgaagagttgaagcttccttcgaagggttttctgtcaaaaatatccctcgaggacaaaatgagcatgctgatttgctagctaagtcagcggcacaggggctgcctttaccttcggatgtatttttcgaaacaataaaagcaccttcggtggaacttcttgaaagagcagttcttaatatatctcctgtttttagcgaagattggagaaccgagatcatctcttaccttcagggtaaatttctttcagatgacgaagcttataacaagaggatagaagcaagagctcgtccatatgtcatgatagaaggggagttgtataaacatggagtttgtgctccgctgctcaaatgcttatccagaaccgaaggtatagagttaatgaaagaaatacatgcaggcctgtgtggatctcacatcggatctaggccgttactcggaaaaattttccgtcaagggttttattggccgaaggcagcttcggatgcagcagaattggttcaaaattgcgaaggttgtcagaaatgtgcaagagatcaaaaacaaccttcgtccttgacacagctcatacaacccacttggccattgcaaaggtggggccttgacttgttaggtccgttaccaccggcccaagggaacctgagatatgttgtggtagctgtggaatatttttctaaatggattgaggcgaagcctttagccacaataacttcggctaccgtccaaaagtttttctggcagaatattgtttgtcgtttcggggtgccaaaggctatcactgtggacaatggaacacaatttgactccgaagctttcagggatttctgtgaccaaattggtacgaagatccattttgcatcagttaggcacccggagtcaaatggactcgttgaaagagccaacggcattataatgacaggaataatgaagttaatcttcaatcaacccagaggaaaatggccagatcagttaatcaaagtggtgtggagccacaacacgacaacatcaaggtctacaggcttcactccattcaagttgttattcggtgacgaagcaataactccagaggaagctaaaaccggatcaataaggatagtagcttcggcagaatcagattccgaagctgcttattctatagaaaaagatgctttagaagggatcagactgcaagccgtggagaatatcaataaatatcaagctgaaacagttaaatggcgggatagaaaggttcggctaaaaaatattgggccagggcacttggtgcttcggagggtggccaactcggaaacagtgggcaaattgcagttgaaatgggacgggcctttcttagtagcatcttcgtcaagacccggttcatacagattgaaagatatggacgacaatgacattcctagatcttggaatgcggatgagcttcggcgatattatgtataattcgatgtaatttttcatattttttgttttttagttcttctttcatggcacccttttcctttccgaaggggggagaaaggtttttaatggggccatcacgtgtaattttcttttttagttctataagagcaaaatcccccaaagaatgtaaatgtaaaagctgataatgcaccatcgagtgccaaaaagaaaaaaaaagaagctccaaagacgttcctaagggaatgcagagcttacagcgaaaagtcaacgctgattccgccaaaagtaaaggcgaagaagctccaaagacgttcctaagggaatgcagagcttacagcgaaaagtcaacgctgattccgccaaaagtaaaggcgaagaagctcaaaagacgttcctaagggaatgcagagctgaggtgtgattgtttttaagaaaataatagctatgaatatggcttcggatacgtgtttggccattcatttgcacatcacattacatcatagcatttgcattcataaacattcatctaggcatatgtaggataatcatcttcatcgcataaaatggtcgcttcggcaagaagaggaaaaagaaagggaaaaatttctatgaaggagagcttcggagaaaaggaaaatgttgttttctatgaaggagagcttcggagaaaaggaaaatgttgttttctatgaaggagagcttcggaaaaaaaggaaaatgttgttttctatgcttcgttgcgtacgaaaagaagggaaggtgttttttcgccttcggctcaaaaaaaggaaatttcgtccacatcaaagcatttctcatgcatcagtgaaaggttaaggatatattacaaggtatgaacaacatacattaaaaacaagtttttgtttacatttacaaaagttatctcaagtttttcaagtactgtctgcagtctactatctaaatctccaaggagcttcggcttcggcgttatttttgatcatcagcttcggcttcgtcatcctacatgaataaggtcgttggaagtcagaatcaagtttacaggaaaaggtaagcacaaggtatgatttcttactggatcaaggtggctacgagcttcgtctccagctttctctcgaccaccttttgtccatatcatttttacaaatcgattcgagatgcttcgggcgagatcagggatgtcatccaggattgatggtgacaaagtaaaatttggcctattgacaattttcccatgatcacagccagccttcatgaaggctgcagcagtccctcgagaagccacccaggcacaaaagtcaccatgcccagctatgacttcgtcgagctcgtcaatctccccctcaatgtgttcgaaggtttttggtagatcttcagctgagggggtaaatttttcgctgctggctccaactgagtgaaaaatctttcttagtcgttgaatgcacttgttgctaaattccaggcatttttcttgaagatttgtcagtagttttctcaaatccgaattttgctgagcttcggcttcaagttttgcattgagatcttgtttttcttgttcgaactactcagactggcggagaagcttcgtgttcagttctgatatttttgcttcagcttccgccagtaaaccttcggctgcctggagctcaaagttctttttctcaaaagcatctgattgctcctttattttgttttccaaatttccaattataacttcatgctttttatcttcaagatcttgctgcatttgcaaggctttgctcaatagcatactctacacaaacacaaaacacaaccttcgtcagatatgcttttattagaagcaataaaagttaagggacaagtcatttaccttgaagttggagtaaaataaactaccaacgacatgttgtcgtcggtagcggctgatatctgattctagcttcgggaatccaatactcttggacaaagtactaataactttggcccctatttggtctcgaatacactctaatttctcatcatcaatgcctccgaagaggagtgccccaggtttgtatccacaggattgggcatactctttaagctcttctatttcagcttttgttagatgttctccaaccaagttttggaatgcgaaggcttcgtttcctgaagcttcgtcagcaatttcttttcctttctttgacgctgcggtcacggcctcttcggcagcagtggtagcttcttctgcggccatgtctagtagcatttggtcaatatattcaattgtgctctccaaattcaaatcttccgctgaggtaacttcggcggctgcggcctccgaaggtgcaatttcaatatctgccccctctgctgccgcttgtgttttttgggccgaagctcttggcggcgttttgtcaattacctctgtcacggtaatgattctttgtttctttgccttgattgttttcctcgatttctcaggctccttgtccttctgaaaaaactttgtcagttgagggcccagtggacttagcttcgcaggtaaggattcagtcattaccttcagaatttcctcaacaacagcagcagaaggcgatgtgggggtttcttctgcttcggatatttgttgcttcggagaagaagctttccttttcttttgaattttcttctttattggctctttttcaccttcatctaaggcttcagttgcccttttccttttttggcctccggcacctttgttcagattttcgtagtctgggtattcgaaacccaaggcgtccaacactcgatttagccttcgtttcggacgagtgccgaaggctgcggtcatcaattgatcttcttttttggaataattgccaagtatttcattacacattgcttcaatcgtatctagccactcttggcaaggtgctttaaagtactttttaaacttgaaatagtaaggtaaacgtacgagttcaccttctttcttttccccctgtagcttcggcatttcccattctctcaaactgggaaaaactttgaatgctaaaaactcttgaaccaggtcccttgtgctgatgtgctctgcaataattctgaattcactcattgcttgttgtgttggaccttcgggtgtcatattgcagcgaggtcgggtttctccgaagattaattccagcgggctttgtacaagcttttccttgtcgtcatcaaccttgacatagaaccactctgatttctagcctgctgcccacttgcttcggtagctaattacaggaaactttgtagttttccgataggcaaagttatagcaaccaaaattatcgtgtaatccatcttttctagcctttgtttgataatgtagctcgtgaacccggcagaagctgtctgcaaatggttccactgcttggcttcggagtgcccagatataaacaataagcctaacgatagcgttaggggtcagctgatgaaaatagatactgaacctcttcagtacctctccaataatcccatgtagggggaaccttaatccagcctttagaaaacttttaaaaataacaatctcatccttctctggcttcggggtagtctcttctccaccgaagcgcaacaacttcttctgattttcagtaaaaaagcccgcttttaccatcttggacaaatcagcctttggaacagtagattttccgaagtccaagtggctcggcttgcttggcatggcaatgcggtaatcatcttcggaatcagtttcctcaatatcttcttcctctgcttcagcgattgcttgttctgcttgttttgcatcatcatgagggatcttttctgaagtcactagacccgatcgttgcatggcttcggagatgggaagagtctccgaagcttcagtttcctccccctcgcgctcaaccctggcggtagagcggactctggccattcaattatgaacttgtgaaactttaaaattttcttcctccgaagcaggtttcaaactggagcttcgttcgtttctaacagacaagcttcggcgatggttaaaaattttggcaggaaaacagtgcaaatagcaatgaatgctgtggtaacttcacacctactcgtctgtttatatagtgctgcaggtaagaaggcgaagcgccagagtttttacaccaggcgcacacccgcttgcgctcgctgcgcggtggaccgcagggacaaacagtaaactctgcaaggtgggaccgctgcgtgctgggaaattaaatcgtttctcggcaacgagctcagggaaggtgttttttggaccttcggctccccgaagcttaagagacttttttcacggatcaagctcgttacgaaaaacgatctagcaccgcgaaaggggctactgttgggtccatgcttcgtcgccgaaggtcttcaagggagaagcggcttaaaatgtgtgagcaggtattttcggactcgtaccagaaagggaaaagctacaaaggttgacacagcgccgaagctgtgaagcaggaaagcttcggcatgttcacagaaaagggaaccgacttaaagatgaaaaggccatttagacctcgatagagtgctatagaattatcaccaaatgtaaagggcatgtatgtaattttgtatgggttgtaccccgtgcctataaataggtgaacagtacccccgtactgttcacgttgacttggcatttgcttttgcgtcacacttgtattttcatctccttccaaaccgaaggtacatttataatttgatattgtctctattactctataatgatataataaagttaaatgaatgatgttatatgattattcgtgctatcttttatgtttcatatgcttcgtctttcattaatgtatactgtgatgatgaaggttcgtccttcatgaccttcgtccggagatcgttatatcctaagggaaataatgcctcaatggacgaaggactttatcgtttaacattttctgtgttgccttgttcttaactcatagcatttgagaacaagtccccaacagatgctataacctgtgacatccagctatttgcttgatttgttacatctttttgtcaatcttaatcttattttctttgatttattgcatcatccatttgaatatagatgactaaataaatgtataataaatgctctggtttctgcaagaggtttgcacataaacaatttttattgcagtctaagctccaacctttggttgataaacactctcaccataagtaacgaaggaataagaataaatgatgggagatacaagaatctgaaaatgaataaataacgtgacaggttgttgtagagcagcatgatctaagtgaatgcataactctactcttatattatatcattcctctcaatccatgtcttttaactggtgaatcattttaggtttctgtttgatttacttatgcttgttctgacgtgtctttatgctttatataggcttacacatacctgttttgacaagagccgagcag

SEQ ID NO: 274 - DNA, 2085 bp, Zea mays
  Intron number 1 from transcript GRMZM2G347623_T01 (locus G RMZM2G347623) derived from phytozome v7.0 (chr-ID 10; pos 91786067 to 91788151 reverse strand)
tctcgagccctcggggttcccctactccgctccgggtaagatgttcccctccctgctcctggaggccgcgctctcgactcggcccgtttcggccgatttgctgcagggtctcgagcaatgctgatgatttaggggttctttcttctcgtgtttccgcttgcatcagcgcacgatatcagctgtgttagggcgctgttctgggtttcaaattgtgagctgcgcacatctgcgcgtccgattttgcggggctcgagcatttgaaggatcaagtgttgggggatggcacctgtatttcggcttgcctcagtgcgcgatttcggctgtgttgggccgtggttacggggttcaaatgtaaatctgcttcggaggaggtgtgcgcatctgtgcttcgaattttgggccatttcgaggtggaaatgttggggttctttttcaccagtagcagtatggttggtcttgtacgaatgctgcattctgtgtctgtgcacctcgagtggtatagctgggaaaaaagggttaatcctaagctctcatgcagtacttggagatgccagtgtgtgttcagaacttcagatatgcatgttgtggcatgaaccactggcttcttctagtcagggtttagggttttttcacttctagatgtgcttatgttgacgtgttgggtgcctgcaactagttaaagggtggcccgtggcctaggtgaccttgtaggaaaatgtttctggcccaggatggttcattttacttagcttggtgatgaatccaatttatgtgggatcaatctgcccttggaactgtgttgtcagtctaaaactacccccacacagtttttctggtgtcaataaatatgtctattccaaacacagacccttataactactaataaaatgcccgcaaggggaggtgccgccgtcctcgcgcatcttgaccaaccaccctacttaactatgtcaccatcgtgccctttttcgaccaattgttagtgacacggcgaagatcttcaaaaactcaacgcatcggtcatacaagcacaaagttcgaccaaagttgtatttgaaattttcatgtaagtatagtagcatagatgctttgtgaagcatcatcatcaagtgctcggctgcaggaggctgcatgctgggtcaatgtggtgccacatggaccacctgccgaagtaactgtcccaagcgccctcgccgcgagctcctccccagcattgcgcggcgctggccgtgacaggcgccgacaaagcccgcctcgtagggcgccagcgtgctcgcaaacacaacctcctcgccgtcctcgtccacgcctcgccttgcgcacttgctgatgaatcatcccacctggacaccgtcgagcctgtcgccatacgcgctactgttggcctcaccgatcacctgcagcggaccgaccttggccttcctttcaccgcccacgagcacgacctccttggtcgcgccccgctccgcggtggcaaacaggcacgtcgccgctcccgcgcaacagagggaggtggaggccacgagcagcagaaggtcgcagctcgcagaaggctgcaggggtgggggcgcaggtgtttgtccaggcagacacagggctagggcggtggcggcgttgatcgcgagctctggggtgttgacgggggctgggggatgaggaaggaggctagaggtgggtgagggatgaggggatgatccaaaaaacactcacggttggatgcgattgattaagagagaggagggtaaatgaagcgatttggatcgttggttttaatggtgggatttagctgagggtaatttattgtgtgcactcagtgatgttttaactgatggattatataggggtataaataagacatgttgacctcatttgaaaattggaactatcaatcaaagtttcatgtctgatttcgtggtttctttatgtttgttgttggttggtattatagttcagttgcgacatctgatgtcaggactctacttattgtgaaatactgaaattcattttcttgcatcggtggtttgcagaaattccttgactaacttgtttatattctcttattatcaatttcagctggagttctcg

SEQ ID NO: 275 - DNA, 15607 bp, Zea mays
  Intron number 17 from transcript GRMZM2G158043_T01 (locus GRMZM2G158043) derived from phytozome v7.0 (chr-ID 2; pos 108650752 to 108666358 reverse strand)
tgcaacaaggtttctctactggattgttcttagaggtaatattgatgccatacacctccgctgcttttatatttccatataatcttgcagtttctttttttctttttcttttgtgtaaagctgtaatattttacatttgtccttttcggcacatatattttttattaagaaaagtttatgtacaagccaaacaaagtaaataattacaaaggagaatgagaacttttaggtctatccaaataagagtttactgttttcaagactcatttacttgtgcatgcaaagggccagaatgaagactattcctctgccaattgctgcttatatctgaaacctgttactgttagaaactgtatcctggctgacgcctggcagatatgccggccgccctatatggaagtattgtctgatatagatagagaggattaggggaggatctcaatcactatgattgaggatctgattgaggatctcaatcactatgattgaggatctgattgtactctagatctttccttaggtgtagaaggctttcttttacctctcaccttcctcccctatatatacctgtacatgtgctgtctatcattatcaatatacaaacacacgcttccaactctctcacatggtatcagagcctaggtcctgattcctgccctccacccccgcgcgcctcctctacggcgctgcttttccccatggccgacctccagccaacttctccggccatcaccgatcctgacggcgacgcctctgctgattctgagcgcgcggccctggctgctcgtgaggctgctttggctcgcgccgccgctgcagagcaggacgccgccctcgcccagcgcgagcgcgacgccgccgacgcccgcatccgtgcggccctcgcccgtgcagcccacgagcgcgcggcggcggccctctctccccccatcactgacctcacctccgacgacactggtgctgactccgtcgcccagctttctgccgctcttctccaacacgaagcggctgcacttctcaatctgcacgctcaagccgtcgccgtgcagaacatccgggccctcgttccactcctcctcgacgtcaactccaccttctactctcggtggcgtgagtccttcctcctaaccctcaccaaattctctctggattgccacgtgctgtctgatgctgtccaccactcgcccgactggactcgcatgaacgccgttgttctgtcttggatcaacggctccatcaccgacaacctcgccgatacgatctccgagcgcggtgcatctgctcgtgtcctgtggctcgccattgagtcccaatttcttgggaaccgcacgacgcgcactctatacgccgaccaagctttccgctccttcactcagggcgacctctccgcagctgattactgccgccgctacaaaaagcttgccgaagatcttcgcgatcttggcgagccggtctccgacaagaccctttgtcctcaacatcattcgcggcctcaacgaacgctttcaagcgctcggccttcacatccgtcgcacctctcctctccccacttttttgcaggtccgcgatgatcttactctggaggagctcaccatgaccaatgctgctcctgcagcagctctcgctgctgttactacaccacctggcgagaacagcaactccaagtcatctacacccaccgctcccgctgggcgtccttcacatcagcgcccgccctcccaccattccgggggcggtcccggtcatggctcctcctccggacaacgcggcaagcgaggcaagcgcggtggtagaacctccagcaacagcagcagcgacatcattggccctgcaccctcctccaactacaactactacaacccttggacgggggccatctacatgtggcctggccaacgtccaccttcgactcctcgtccgcctgctgcctcgcccccaccaccacatgccttcgtcgccggcactcctggtcagtgggctgtccctgctgcagcatatgggccgccccctgcctacgccgatccttctacgcctgcacccgtctgggatcaacacaccctcgctgccaacttccaaactgtcactcttcagcagccaccccaacaagagtggcactttgacactggtgcctccagtcacatgacatctgacgctggtataatatctcatcccccctcttcccagcatcttcctactcatattgtcgttggcaacggccatcttatccctgttacctccactggcaccactcgtcttccctataacctttctcttcataatgttctagtttccccctcgctcattaaggatctgatttctgtccgtcaatttaccactgataataattgctctgttgaatttgatccttttggctgctctgtgaaggatcttcccactcggcgcgagatcttcagatgtaacagctctggtccactataccccctgcggttcccggcctctgctcttcttgcatctaccctatggcaccaacgacttggacatcccggtcacgccgttttatcacatttagcgcagtcatccgcaatttcctgtaataaaaatactagtactcatccttgtcatgcttgtcaactcggacgacatgtccgtctaccatttcctatttcttcctcccgcgccacctgtaattttcagttaattcactgtgacctctggacatcacccatcaccagtgtgtctggccacaaatattaccttgttattttggatgactgctctcactatttatggacatttcctttacgtctcaaatctgacaccctttccaccttaaccaatttctttgcctacgtttcgtacgcagtttggtgtccctatccagagcatccagtgcgacaatggtcgcgaatttgacaaccttcaagcccgcaattttttctcctcccatggagtccgtctgcgcatgtcttgcccctacacttcagctcaaaatggtaaggctgaacgtgtcatccgttccatcaacaatgtcatctgcaccctcctcgttcaatccagtgttccccccaatttttgggctgcggctcttgggactgcaacatacctcctcaacatcctacccaccaaaacactcgcactttctacaccgcattttgctctcttcggtcacaacccatcctatgaccaccttcgcgtttttggctgcaaatgctaccccaacctttctgccaccactccacataaattatcccctcgctcaactctttgtgtcttccttggctattccccccaccacaaaggttacctatgctttgatcgccactccaatcgcgccattatctcccgtcatgtggtttttgatgaaacctcgtttcccttttctgaggcttcccatccacccccaccagcggccttcgatttccttgacaattacactaacccggttgcagctccttttggactgtcgtccgtgtcttctttttcaggtactcgtatgccaccaccacccccaccggtggccccttcgccggttgtgcccctcgtctcctcagaggtggcatttcagccacctgccgcgccagctgggcctgccccgatgtcccagtctcctgcccggatggctggtctcccaggcgcatcggcaccaacaatactgccgcctgggtctactaccgtgcccgacgtccatagaacgacagctcctgctgatcgtttctgcggacgggtctactctcgacgcccgcccactgctactgctccagcaccttctccgacgaccgccactgcaccacctattcctgctggtgcagtccctgtcgatccagtggtcaaccaccacaggatgacaacccgtggcaagagtggtcttcggtttcctgctctttttgaagccgccgcactgtcccccattccgaggacatatcgcgcagtacttactgattcaaattggcgctccgctatggaacaggaatattctgctcttattggtaatcacacttgggatcttctgcctcgaccgccgaattgcaatgttgtgactggcaagtgggttttcaaacacaagttcaaagctgatggttctcttgagcgctacaaggcaagatgggttcttcggggtttcactcaacgacctggtattgatttttctgaaactttcagtccagtggtcaagccagctacagtccggaccgttctttccctggctctttcacacagatggccgattcaccaacttgatgtcaacaatgcttttcttcaggggaccctgtcagaaactgtttactgtgttcagcccaccggttttgaagattccactcatcctgattatgtgtgccgtctcaatcggtcactttatggcctcaaacaggcccctcgtgcctggtacagtagatttgcttctcacttgattcaaattggattcgttgaggccaagtctgacacttcattattcgtctaccacaagggcacagatatgatttaccttcttctttacgtagatgacattgtgctaactgcttcgtccatgaatcttctccggcggactattactgctctccaacaggaattttcactgaaggatcttggcccccttcatcacttcctgggcatgcatgttcaacaatctgcttctggcatcactctttctcagcgccagtatatgattgagatacttgagcgagctggtatgagtaactgcaaaccctgtacaacccctgttgatatcaaccccaaactttcagccgacggtgaccctgtctccgatcccacggaattccgcagtcttgccggcgcactacagtacctcaccttcacccgtccggatattgcgtatgctgttcagcaagtttgtcttcacatgcacgatcctcgggaacctcatttggctgctctcaagcgtatcctgcgctatatccgaggcactcttcagatgggccttcacctcagttcctctccgcaaatggaacttgtggtttactctgatgctgattaggctggctgtccagacactaggaggtctacttccggttatgctgttttcctcggtgctaacctcgtctcatggtcttcaaagcgccagaacacggtctcccgctccagtgccgaagccgagtaccgcgctgttgccaatgcagtcgctgaagtatcctggttacgacagttgttgacagaactgcatgttcctctccccaagtcctcattggtctattgtgacaacatcagtgctgtttatatgtcctccaatcctgttcagcatcagcgcaccaagcatgtggaaattgatcttcacttcgtccgtgacaaggtcgccctcggtgttgttcgcgtgctacatgtcccgacgacttcccagtacgccgacatcttcaccaaaggcttaccatcagcagtcttcactgaatttcggaccagtcttaccgttcgctccacggacgctaacactgcgggggggtgttagaaactgtatcctggctgacgcctggcagatatgccggccgccctatatggaagtattgtctgatatagatagagaggattaggggaggatctcaatcactatgattgaggatctgattgaggatctcaatcactatgattgaggatctgattgtactctagatctttccttaggtgtagaaggcttccttttacctctcaccttcctcccctatatatacctgtacatgtgctgtctatcattatcaatatacaaacacacgcttccaactctctcacagttactaacctggggattgataatggatgattagtccccaaggactgtggtaatatatatagccagtagacctgtgcctaatgggccttaacacccctcctcaaactcaaggtggaaatggaggatctgaagctttgagtttgatcaagtgaaactgatgttgagctcttgtttgtgctttggtgaagaaatctgtcaattgatattctgagggcacatattgaagatcaatattcttctactgacaatgggatggagtaaaggatgcatcaacacctatgtgtttagtaagttcatgcttcactggatcatgagcaatctgtatagcgctgaagttatcacataacagaggtgtagaagtgtcacaagagacaccaagatcagccaagagctagcgcaaccaaataatttcagcagtggtagtagcaagtgcccgaagttcggcttcaacactagaacgtgatatggccgcttgcttcttggatttccatgcaatgggagatgatccaaggagaatacagtaacctgtagtagaacaacgatcaacaggatcacttgcccaagtggcatctgaatacacatgaagctgaagtgggctatctaaagcatagagtaaacatctggatcttgtcccacgtaaatatcgaagcacacgaagcaaatgaccataacgaactgaagtaggtgttgatacaaattggctcaacatatgaacaacatgagcaatataaggtctggtgatggtgagataaacaagactacccacaatgtgacgataccgagttggatctgctagtggtgtcccatccttcggacgaagttttaaatgaatatccatcggtgttgcaacagtgcgtgtatcagtaagtccagagcgatcaagaagatcttgtatatatttggattgagacagataaaagcctttttgagtctgctgaacttcaatgcccaagaaatagctaagctgtcccaaatcagacatctgaaattccttacggagatgctgcttgacatgagaaatatgttctgagttgtcaccggtaatcagcatatcatccacatataatagtagtaaagtgcggctttttggagagacatgaacaaacaatgcaggatcatgtttactagaagaaaaaccagtagctgtgatgacagagatgaatcgctcaaaccaagcacgaggagcttgtttcagcccatacagtgcgcgacgaagacgacaaacatgccctgagggagtatcaacccccggaggaggatgcatataaacttcttcttgtagatcaccattaagaaaagcatttttgacatccatctagaagatagtccaagaagatgaggctgcaactgcaatcaaggttcgaacagtggtcatatgcgcaacaggtgcaaaagtctcatcataatcaagtccttgagtctgttgaaaaccacgggccacaagacgagctttatacctctcaatggaaccatctgattttgtcttaactttgaagacccacttacatgtgatagggacaacatgcgagggtaaaggaacaatatcccatgtaccagtgcgttcaagagcagccaattcatcaatcatagctagctgccactcaagaatcctagaagcttcctgatatggagtgggttcaacgatggccacaccagcccgtggaaaaccatagcgatctggaggttcaatggtaccacggtcacgaagacggtatccctgattaaaaacatcattagactcattattgttagtacaagaatcaggtacaggatcagtatcaagaccagccgtaggaatagagtgggaacgacgaatgtaggtttggatgataggtggtttggaagagtaagaggtggatgacgtggaggtggaaggtggtgtgatgggaatgagaacatcagatgtggatgtagaggatgatagttcagatgcaggaatggaaggaagacacatgaaagaagtagattctgtgggataataggtggagtgagtagagtggttgtgaaagaagggcgattttcattgaaactcatgtctctagaaatccgaatacgacgagtagatggatcataacaacgatagcctttgtgttcaggactgtatccaaggaatacacactctacagattgagcagtcaatttagtccgctcacgtggtggtaacaagacatagcatatgcatccaaacacacgaagatgatcatatcgtggaggagtcccaaaaagaacttcacccggtgatttaccagaaagtttagatgaaggttgtctattaatgagatacacgacagtggaaacagcttcactccaaaagtgtgaaggcacaaaagaagatatcaaaagagtacgagcactctcaataatatgacggtgtttgcgttcagcaacaccattttgggcatgagcaccaggacaagaaagttgagctagagtatcctctatggtcaatatctggcgaaaattatcagatagaaattcaccaccagaatctgaacgaaaaattttaatagtagcagaaaactgggtgtgaaccatgcaagtgaaggacttgtaaatagaaggcaattccgagcggtgtttcatgaagtaaatccaagtataacgagaatgatcatcaataaaaatgacataatatttatgactacctttagaaacaaacggagctggacctcaaacatcagagtgaattagatcaaaaggtttagcagaatgggaattactagtaaaatatggaagttgtatttgttttccaagatgacaacctttacaacgaaaactagactcaacatgagtagagcctaaacatcctgactttattagagtagacatacgtgatccacataagtgacccagacgatgatgccactgggcgaatgacgtcgtggggcctgaagtagcgagcacgtgaggtgtagtggtaggggatgaaggaagacgcaaatggtccaagatgtagaggtgaggcgaagatttacggcgacggccagtcccaatcacatcccctgttttgcgatcctgtacaaaacaagatgagtcatcaagtccaacaaacaattgtgatcggtaatttgacctactaatagtagatccatggataattgaggtacaaaaaatatatttgagacagtaaaagttggatcagaaagagaacccttgtgggtgacatgacataatgtaccatcagcagtctgaacagaagtgccctcggtgacaggtgtagtagacgccagccgtgactgatcagatgtcacatgaaaggaagctccaaaatcaagaacccaagatgatgacaaagcaccagcagatgaagtagcagcaattgcaactgagcctctaggagatggtcctgtattacgaccacgagtagcacgacggacacgaaaatcagccagcttctctggaaatttagcaaagcagttctcagaccgatgagtggtctttttgcagtgttcacaaggctgaaaggaggtgttcctagacctctgagcagcagccaacacactgtgagaactcacaccagtaatagaggacatggacttcagacgagtctcttcagcaagcaattcggacaatgcctgagccatggtgagagtatccgaactgtgaagcggccttgcacgaagggaatcaaattcaggtcgaactcccataacaaatttgtaggtaaagaattgctcaatgaacttgtgagctggacaaggcacaactgtacaagcgggcaccatggaggtcaatgcactcataagacgatcaaaggcggaataatattcatcaatggacatatcatgttgctcaatcacatgagtctgctgcataagggtatgtaacagagcaccactatcctgaacaaatcgatccttcagatgtgaccagatagccttagccatggtaaatttggacaaactcataatcatagtgggtttagtgttgttgaccattgcatccattaccttgccatcgttgatctgccaactcttgattgcagcagcattgcttctatcagctgctaaaactggagaatcttcaatcaaatgaaatagtaacccgtgacctcttagtgcagtctggacacaaaaagcccattctgggtaattctgcccatcaagcacaatgttgacaacaatagcgttggccgacataatgcagagtaataaaacactgaagaataacagctgaagggtaccgacgtgggcagacaccagcagaaaatgatgtgaagaggagataaccggtgctgcgatctgaagagtagaaaatcggtgatgcgtgctgactgtccgcagcggcagctagcgtcgtgtggcggcagggactgcacgcacgacagacgcagagaggtgacgcacagggaccgcgcgcagagggcgcagccggctgacgaagacggcgggtggtgcgtgctgactgtccgcggcggcaggcctgcacgcagagggccctcgcagacgtccccgcacgacccgcgcagggaagccggcggacagtggcgtggcccgtacacgaaggccggctgatggcagcgcaacccgcacagggaggccggcggacagctgcgcggcccgcacacggaggaagtgcggcggcggcgcgacccgcacacgatgaagggcggcggcggcgcgacccgcacacggaagaagaacggcggcggcggactgctgaagaatggcggcgcgaatgcagacgacgcgctggtggtccgcgacggcggctgctgcaggggagatccgggacgccgcgacggaggatgggggagatccgagccgcgacggcggctagggtgggtaacagccgcgacggcggctaagaaattagggtttacggtttcgtaacctgctctgttaccatgttactaaccttgggattgataatggatgattagtccctaaggactgtaggtaatatatatagcaagtaggcctgggcctaatgggccttaacaaaaccttgctggttctttcaattaaactattcgaaagaacgatgcacttactgttctaattttcttaacaacaatatttgggaccaaattttgttttaaactacgatagtatatgccaagaacaatttccttgttgccttttaaggcctggtacagtggtagtgtcttcgcttgtacaatccatggtcatacaactttgtttcttgtaccatggttgagtcggggatatagggagtataccttcgcatagattcgataaaggattttggtgtatcaccctatgcctacatgaccggttaggccctgctcgggttatgtgggaggagcatgtcaaacacacaggggcacaatgagggagatcaaggtttggagaggttcgggctgctgggaggcataaaaccctacatcctttttgagtggattgaatggttctggaaagcggccaagtcctgtttacaaggatgcttgtgagcatgaaagtgtaaaatgcatgaggttggtaccccttaccccctctcccttgtagtccaaaggagaggaggttaccagtaacaagtgaggccagacagtcagcctatccctagcctatttaatggaagccatgttgatgtcagtttgaggttctgtagccattagtccaaggtcctgttggagtgtccgagaagctatagattcatgccctgcctttaccggatgacccgagcatgagcggggcgtgcgcacgttgctggattcttaggacatggcaggtggaggagtgggcatccacaccgctataggagccctcgtaggctgtggtgacgtcacagatgacatggagcgtgataggccatggtgtgtactgtccgtgtcaccacaggggttgtcgtaggtcgtggcataagcactcaactttgatttggattataacttgattagaaatcatactttagtcaaattataattatagacatgtcaaccttgattagtaaaataaatctactactcaaagggtaaacaaatatctaattataacagtatgtgatatatcaaaataaggttcgctactgtgtagaaaattttattacaaagccaacgcaactggaacggactaaaacagagttaaaacggacgagttatagaataaacatgttttagggttcattttctattaaataaggctttcagaggtcattttgcaatttctagggactcctgcgtaatattcctacttttagatggatggcgggttgttttatctaaactccgagtgccaaactgcaaaacgggatcggccgaaggggtacaagacgagatcggccatccgatctaactcctacgccccagattagttccgtactgattataaacccgcatccactcacaatcgtcggatatgagatccacgatccacggttcatgatccgctcgctctctcactgccgcacgatctggtttgacggcccagatgggattggtcaaccattatgcacgctctaatctccctcgtccgtgaccccatcaacggacagcggccatcctccccacccgagctcccaggcggcggcgcaaggagtttccccacggcggcaccatggccggccgacagccccacctcgcacacggtcgctagaactccgatcccaatgatgctacgcatagaggaggtcaaggcgaacccatgggtggcttaccctcgattgcctcgcggcattgctggcccgtgatgcgatgcggctctgcggcgaagcaccattgatggcgacaaattccattagactgggttcttcccgtcagggatcttcactggccgcgtgcatgaccccgatcgatggtgatccctggactccatcgcagtggccctgcctattttctctcttcttccatctctctctaccatggcgcccggtctctcactctgcgttcggcgaagccctcgatggcgctaaacctcctttcctggcggcttgggatgcagagaggatgaggcggtcaaggattttataccggagcagagtccgattcggggggggggggggaggtcgacgaaaacaacggcgaggatctcgggcgatcagcgtttggtttgttacggcagggaagaaaggtctggcgaggaggccccacgcgtcagtgggccccgctcgtcggtgtgacagcccgtggacgcatgcgttggttgggccgcgccaggcaatggagagttgggccgggagtagagaagggaaggtgggccgaggggaatggctgggacgacctggtggtttctcttttgccattttttttgaatttcaatctcaaattccaaatttgttccaaattcaatttgatttggggttcaatttccaggttgaatgcaccacaaacaaaacccccagcatgaatgcaactattatattttacttgtttattttatctctttaagcatagaggcataaaaatatatataattcaataggaatgattgtattccaaacaaacatattctatatcattatatatctatatattttaattagaattccaatttcagtattcaaactatatatatatatatttgaacaatttaatattatcatttatgtgtttcaagaaagtattttcggggatatgaatatctttatctaagacattttaattcacatcttttggagaaagtattttcatttatgtgttacaattcctgagaaagaattcggagagctggggccctctaaaatgcaagtttttcctttggttagtaatcaatggccctgtttttttcggcttttgcctggattttttttatcgaacgcacaggagaactgcgcatcttatatattaagaaaaggagaaaaaggtctaaaatagacctagaacaaggtgccaataaaaaagcctagatagaaaaagaagaaaacaaaccgcacaaacagcagaacagcacagaggggtaccaaacaacccccagccccaccaaggacctaaggccacaacctccttaaatctttagcccttgccaagccccacagaacaacatcctcatgaatatgttgcatgatgatgttgatgttgggggatgctccatcaaacacacattcatttctatgcttccatagccaccatgccacaagaatcaccaaggaattaaatcctcttttctgattttttggcacctggcactctgcttctttccaccaatcttgaaaagttgatgttgccaatcctggagtcaagcgatgcaaccccaccttgttcagagtttgccaccaagtgtccctggcaaacacacaagccactaggatatgctgagctgtttcctcctgctggtcacaaagggggcaccttacaggatgttcaagacctcgtctgcttaatctatccgctgtccaacaacgatttagagaagctagccaaatgaagaacttacaccgtgggggcccaacttttccaaattcttgtagccgactcaaaagtgactgaaccagccataaaacggtcatatgctgattttgtggtataatctctagatgcagttggtaaccatcgatgcacatcaggagtccctggatgtaactgaaaaccttgtactaggtcccaaatcacaaagaaatcgatgataatctgcgctgacaggctgccagatatgtcatttacccatctattgtttaccagtgcttcctgcacagatctgcttttcttgattcttcctgtaatacggctgaccagcgaaggggcaagggcagatattgattgtccatgaatccaacgatcagaccaaaacagggttctagagccatcacctactgtagtgtgaaccgaggcagagaagagagcttcgacattgggatgtaccttgaacataaaatctgtccagggcctttctggttgagtttttctgagccaaagccatcttagatttaaagcccatccaagaagttctgcaactggtcgtcagaatcggcttctggctgccaaatgctttgcttctcagtccgcttctgtgaaaatcgattctgtgaaaatcgctcaaatcaatgtgaatgtagaatccgccgagtcgtcgcgatgggaggaatctggtgcttcctaaaccctaaatcgtgcaggcctttttcatctttatttgcgtgcaagccccgcgatatctagattctcgtgacagcttgatttttcatgaatccagattcttagaaaaggtcttcagaaaaaagctatcccaaaagccccaataactggtgttggacaatcagttgcctagccaagcgtggtttgcccacaccagcctgccttcccgttcagtgattaggccgaggaaacaattgaggatattcgtatctcctgtgtgttcactcgacagatctggacaacagtgttcttaaggcgtcgcctaggcactaaggcggttgtctagtgcacttgctcgcctaggcgccttaagaacactgctggacaatattttttcagaaaattcccatgtcagctgtagcatctccagtcgctgcaacttgcttcttcagatcgtggggtaacgcgatcagaagcactcctaacttctaaggagaaacacaacactgtgttctctaatgatatagtggcctgggatggttggaaacataggaatctctatatattttagggagcctcgccaaacttttagggtctcctgcaaatagtggttgctgagtgtagtctttggtgcatggcgggtggctctaatctttaggacctgctcattaggtcgttcagcctagatctttaggctctgtcgataggctaccgcccccttgttatattttgcaccagttgcagacacctgttgtttttgtttctagccggtgtgtttctgggtgggtcagttgcccactcctgtacccgtctcttaatgaaatgacacatagctctcatgtgccattcaagttaaaagataaaaaaatatctgaaatctttctgaattagcccaaaatttaatttgctttattagttttgtcttggtccttttctgcagccaa

SEQ ID NO: 276 - DNA, 2136 bp, Zea mays
  Intron number 6 from transcript GRMZM2G034773_T01 (locus G RMZM2G034773) derived from phytozome v7.0 (chr-ID 3; pos 4 587828 to 4589963 reverse strand)
tgcaatttagtttttgataagtcctccaagatttggttagttgcttcatgctttctctttttctctcttaatacttagctcaattttgttcatactggtatgtttgatctgtgctataatgctatgtgctattttatttcagtctaggaggttacgacagagtctcattcgattttcagtgattcagttttcagtgaaaatactactaaactgaattgtctattctcctccttgttctggtgcttgtttctagaatctctatttgcaaggatatcttttgagactatgtttctgctaaccccaggtttcttttcagcaccacaaattttcttattagtcttcttcactatattcttttttagcaatgctagatcatccttcaatatagagctaatgaagcacctggtttagtattattaagtttagatgagtgacccatattttgaaactattcttggaaaactgcaccaatagccagtctcgttaggagaaacatagaccgagtcttcataatctttgtttttcctctgccttatgtcaattttcacccaatatctaaaagcaaatgttttatcttgttactgagatcctacttatgtttgttcaggggtcctccccttggcttcttcatttcaaccttgttgagcacatggccagatgtggcttgcagatcaaccaccttagtgttcttcattgaaatcctatcgtccccagtgtcttcatccaccttgcaatcattactctccatcacaacgccattgttcttcggcaggagctttaaaacacctctttattggaatcctaccattaccagccttcccatccacctcagtttgacttgacagaatcttaccatcaccggtaataccccttttcccttgcaaccttaaaacctcctattggctagaatcagttgctttgccctgatcagtctcgaaaacatgctactgctaaactgaaacatgctactactaagcaacttgcttaactgatactgctaagccactactacttgctaattagaacttgttcaaacttgttaaactgctatttgctagctgaagccactggtaactaaaaactgctattgctaagccactgctacctactaactgaggtcaaccttagctgtttcttctcagttttggctgactcaattttctaaacccaacctttcattatctcaatttctcatgaggatattacctgatgttgtgcaaacatacactagagactaatcaatatcgctaaaaaagaatagattagtgtacggtcgtcaaaagagtctatattgattctttagaaataatttgtgcgatattgataatgtttgttcgacatcaattaagtctatttagattggcatatttataataatattatggcgcattttgtccaacaaattttgcatataatagtattgtttgtcgtaccatatatattttatactacaactgatatgattatttaacttgcagtattctagaatttgctaccctacaactcatatgattatttgactatgcacatgtctccaagaatattgtagggaaactacaacagatttgtgccatgttttactctgattttggagttttctgcttaactgaggcgaagcgcaaccaccaggttggctgttttagatctgtctcctagactgccctttgctcaagggaaatccctccttttcatttaacgcaaaagaaacttattctatttatttgtatctacgaaatctggcgtcaaatgttcagttgaactcagatgtgtgagactcaactgaagatcccaaatcatcacattatttccccgtcgaaatcatttgtgtttcttagagagaaaaaatgttttatgcttctgtctcctagactgacctttgctcaagggcaatccctccttttcatttaacgcaaaagaaatttattctgttgaacagtattttcatctttatacttatttggtactgcaacagcaatgagaggagcaatatccttgacaccttaattttgtattgccttacaaaggattttttagctgtcgcttgccaagtataggtcgtattgtgggtagtcacaccaaaactaaaactaatggcaattggtttgcaataggcagtgctctttctgttagctctgg

SEQ ID NO: 277 - DNA, 23886 bp, Zea mays
  Intron number 1 from transcript GRMZM5G879184_T01 (locus G RMZM5G879184) derived from phytozome v7.0 (chr-ID 4; pos 8 6601322 to 86625207 reverse strand)
tcgaggtggcgtggcggcggcgcggcctggcgctggtgagagaggacagaggagcgtgtgtgggagggatgagacagggtgagagagagccgcgcgcgcgtgggatttttagatctactaggtttttttaggattaagttcgacggtgtccacaagcccgatgaacttaacttaagaacgtgggtacccacgtttctaactcgttaagttcgacggttttatccagaacccacgaacttaacttaaaaaacgtgggtacccacgttcttaacataacccatgaacttaactcaagtaagaacgtgggtacccacgtttttaattttacccacgaacatttatcagtttcttgtagtgtgtttccaatatcataccattagccctttccacctgaccattagctcttgggtgtgctactgatgcatacttgatctggattctccgttgttcgcagaaatcaaagaattcatagctagtgaagttggatcccaggtcagttatgatgctattcggtatcccaaacctgaatattatgtattgtattaattctactgccttggatgaagttagagaagcaatgggtttgtactctatccatttggtgaatttgtcgatggcgaccagtacgtgagtatagcctccctgagctttcttgaagggtccaatcatgtccaatccccagcacgcaaatggccatgttataggtatggtctacagctgctgtgctggtaaatgttgttgctttgacaagaattggcaagcttcacatctctagactaactcggctgcgtcactctttgctgttggccaatagaaaccagacctaaaaactttccagaccagagttctggatgctgcatgtattccacactgtccagagtggatctcgtctaatagttgtttcccagtaaccgaggagacgcacttcatgaggactcctgtcgcaccccttctatacagtgcgcccctatgatggtgtagtgggccgactgtctcgcaatgcgttctgctgcagccttatcatccggttcttcttcattccttatgtacctgatgataggccctctccagtcattagggtctgattcttgttggctcagggtgttgcattcttccgcctggtctgagggaatacttgggtgtggcacttcctggacgaaaactccatgtgggacctgggtccgactggatcctagcttcgacaactcgtctgctgcggcgttgcgatctctttccacgtgatggaattccagcccttcaaacttgtcttctaattttcggacggctgtacagtacttgcccatggaatctgtcgagcaatcccagtctttatttatctggcttatgaccactagtgaatcttcgtataccatcatcctcctaatgcccagtgatatggtgatgttcaacccatggatcagagcctcatattctgttgcattatttgatgctgggaataataactgaagagcatacttgagttgttcacctccaggggcaatgaagaggatccctgcgcctgctccttgcagtttcagcgaaccatcgaaatacattcgccatacttcagtagcttccgggttgttaggaacttgttgctcggtccactctgatacgaagtcaactagtgcttgagttttcactgctgtgcgcggccgaaattctatgtcatgagctcctaactcataggaccacttggctattcttccaatgacttctttgttgtgaaggatatcccctattggaaacccggtgactactatgactttgtggtcgtcaaagtagtgacgaagtttgcgagcagttagaagtactgtgtacagtagtttttgaacttagggatacttctttttagagggtcccagaacttcactgatgaagtagactggatgctgtattggatatgtgtgtccttcttctgcccgctcgactaccaacacggtgctcaccacgtgagtcgtgcaggagatgtataacaacagatcttccgccggttgatctggcgtggctcggcgcggcggcttcagtactggtggcgtggtcaagaacttcttcaatgcttcgagagcttcctgtgctttctgcggtccactcgaacttgtccaccttcttgagcaatttgtagaatggtaagcctttttcgcctagccttgatatgaacctactcaaggctgccatgcatctagtaagcatttgcactttcttctgtgatcgtggcgcttccattctcattatggcctcgattttttctgggttggcttcaattcctcgggtggcttacaatgaatccgagtaacttccctgctggtactccaaagacacatttttctgggttgagcttccaccggtatcgcctcaggctgttgaagaccagctgcaaatcttcaatgaagttttctgagttttctgttttaatcaccacatcatcaacataagcttctacccgcttgcccagtgatcggctaagcatgtttgaatggctctctgctaagtcgctccagcattcttgaggacgaacggcatgggggtatagcagaaagctccaacggggtaatgaatgcagtttttcctcgtcttcttttgccaggctgatatgatggtatccagagtagcagtccaggaaggacaacatagaacattcggcgatcgaatctaccacctgatctattctagggagtccgaagggatccttcggacagtgtttgttgagatctgtatagtcgacgcacatgcgccaatccactttattctttttgagtacaagaacaggatttgctagccactcaggatgcagtacttctctaatgaaccatgctacgactaagcgagctagctcgaagcgaataacctctctcttgtcaggcgtgaaacgatgcaatttttgttggatcggccttgcctagggatagaccttcagtttgtgctcggccagttctctcgggactcccgacatatccgctggctgccatgcgaatacgtctcggttatcttgcaggaactggacgagcgcgccttcctatttgtcgttcaggctggagctgatgatggcagtcttgcgttcgtcggcgaacccaaggttgattctctttgtctcctcagtcggccgcatagaggtcacggcttgagcttcattcgcaggtatcgcgaggtcttccttaggctttgagtttgcctgcacggaggaagtcatcggtggtttggtagtgagggccgcctgaatggaagtcagcgcgtacggtgatgatcccttatggtcccggcatcttcaatatcatgtacgaatagtgcggaatggccatgaattttgccaatcctagcctgctgatgatggcattgtatccgcagtcgaagctcaccacctcgaacctcaggaactcggttctgtagttttccagagttccaaaggtgactggcgtgtagatgtgtccaagcgagtattctccttcagtcggcacaatgccgaagaaaggggtgtctgactcgtggagctctttgagtgcaactcccaaccctaagagtgtccgggggaaggtgacgttgatgttgcttccctcgtccactaataccttctttaccctgctctctcggatcactggatcgacgaggtgcgggtacttgcccgaatgatcgaagttgagccatttatttgcccgagtaaaggtgatcgggtgttctgaccaccgaaagggggcgggaacaccggtggtcgccaccagtatctttcgatcgttgagcttctgctgccttttgttctcttgtgacccgtgtcctccgaagataatgttgacctctccatcgatgcgcgggaatgctccgcctcctcccccttcctgctgctgaggtttttgaggttctccgggtcctcctcgtggtgggggaggtggtggaggttggaagggtcggctattcccgacggagtgcttgaattctctgcagttccggagggtgtggcgcatatctttgtggtacgggcactgggcgtcgatgatgtcgtccaatgttcgttcacctcagtggggtgcccctcgggcatgagagacgggtggtctagcggcgtggacctcttcacgaggcctcttctcccagcgcttgtcggtctgctggtttgcgtcacgccgtggtgcagacggagcgggcttcgttcccccgatgaggtcctgagcccgttcgtcggcgattatgtagaggtccgcctccctgaatagctgctcggaagtggtcggcgccttttgtagtatggctcagacgaaggccgagtcattggatccccggtagaagtcctcgatcactgctgcttcagcgacctcgaggattcgatttctcatggtctgaaatctcttgaggtacgaccgaagagtctcatcccctcggcgcctaatagatttgaggtcccatggctgcgccggcttattggagagggattggaagttggcgataaaacgctgagtgaagtcgctccaatcatcgatgtagtgccagggtaggtgtcgtagccattgcagtgcatcttgcccgaggatgatgggcaagtatgtagtcatcacatcttaagttgccccagtggccccggcggcggtcgtatagacggccaaccagcctctcgggtcctgttaggctcatatttgtcgacgttggagaccttgaagtttggggaccattgaatggccctgagacgcagagtgagcgcagatactccacacgtgtcttcccgtcgatgaccgtggtgccggtcccggggaggggagttgccgatgtgctatctcgaccgtccccaggttgtgccaccagttgaagccatcgccgactcaactctagtggcctgacttcgtgctggaatgccatgatcccgatcgtactcctctcggcgccgtatctcattctcatgtcgtcgttcgcgtgaagcgttgatggagctccgcgcatcccgccgactgttgatggcgtgccgtagatcgctcggaggatgagcgagaggtagaagatgattagctgcccgagtgagcagccgtagatagccctcagcgtctggagtccgggggaggccatcggctatccgagccaatactccaccgacctcactcggtgtgttcatggcttgggcaaagtcagggtttaggtttcgtccgaagagagggttctctcggcgttgcctcgcatcctactcggcttgctcttgagcctgccgacgatcacgtcggcgggagttcctcctttccctgaagattcattcatgaggagtttctcccacctccgagatctcatctcaagatacgggctgcgccgggtctcgttctccagcttcatgatgtcgtcgtacattctagcatcggttcctccgtcggcgagcttctcgctgaggaggttcttcctcagccatggttggctcgtcatcggagatgggggacgattccactcttcccccgatgaagagggcgtcggggtagaatggagttgttgtggtgacaagcttctctctgtctcctttgagggtgaaggcgccagaagaccagcttgacgggcttctatcccttttgcttcttttttcctcataatcggtgtccactctttggtggatgaggtggaaaacgaggttcttcaggtgaacgaactctctgctctaggcttgtaggaggtagtcttcgcccggggcgctagaggttgcgctatttgctgcctcgttccggctttttcggagatttttgaggaaggcttcttcttcagtggatccgctatacgatgcagaattccttcttcgtctaccacggatgagatggttccgaagcagaacacggatccagggcggagagcaatcttgtgctagaaggtgatggccattgagctaacttggatcagcgacacaccccctacctggcgcgccagctgtcggtgtttagggcccgaccgtgcacccggggttacccctagaggtgcttttgggtaggacggtgttgctgactgtagctcgatggttagtggtaggacgatatacgattttctataggttcgggccgcttagagaggcgtaacaccctacttcctggtgtggatctttatgtggtgggttacagggggattgtctagtatgaaggatgctagagaatggagtagatggctgatgaatgacctgtcttcgatggggtgccccctaggccttatatatccgaccgtggggcattacatgcgtgcatgataacgttgcatgcctaagtaatagtgaaccgactgaacttatcttcttacgagcttgccgacttatcctcacttagttccgatgtccaagggtgctgcgcgggagaatcggatctatgatgcggataatgcttaaatccattgagccgtctagacccgagtatatccaatcctgcgtcaatccattccgccagcagttcctcccctggcccatgaagggatggccttgcgaaataatgggcccaaagcctttcgtgaggccttctaaccttctagtggacccgggggatatctgtcccccacaccgatgacttgggagagtcatcacactaccgataatagccttatcaaaaataatgaaaaacttaacgcaaagttagctagctctcaagaaactattgaaaacttgctagagaaaatggaaattcttagcatacacaataatgagctaacttctaagttagaaaaattcagtagcaccccaagagcatctttaattgaaattcctaaaattattaagaaatatgcttctatttcttgctttgatttaattgatgattttaactcctgtaaccaagttcttattgagaatattgttatagaaacatgttcgaatgaggttgcaaagaagaatgagcaattaaggcatgaagtggctcgccttggcaaggctttgtatgacaaaaaggcaaagataaacaaatccaacctcctcatgataacaccattgtgggagtaaacaaacctgtagagggagaaactatgatttgtaggctatgccacaagaaaggccacaagtcttaccaatgcaaggcgaagacctgggataagcaaaagctcatgcaaaaggcaacaagcaaaatctccaacacctacatcaacaagatggacaaaatggccgctacaccatatttgctcaagaaaaaatgaatggaaatgtgatagcgatcaaggccaacaagcaagccaacaaaggaaaggggtccaaacgcatctaggtgccaaaggaaattatttcaaccatgaaaatcaccaagaaggtttggatcccaagaaggaagtgacaagtccgaaggacatcaaggaattatgagacttggcaaaattgggatctatatcatgtgattcatcatactagatcaactctattgccaagtaggttagtgaatactttggacccaaattccccacccatgactaaggtaactagatttattgcatttccttgtttttagatatgcatatctattcacttgtatctagtgtttaccttacatgcctagttttacatgtagtatttacttttgattataattgcatgcatactaggacaatcatatggtaggaatgctcattttgaattcatattcttgagcaaacctacattgtttaaaatgtttaattaaagcacgacacatagcttatttaacattcccatgtaaatgatactccaattggtatcttcatatggtatatcctacaaataatatactacaactggtattcatatggtatatcctaaattaatatgcttcatttggtatgatttaacttatatgtgccaaagctcggattaaagataatttgtcactcttgatatcaaaatcaaagtgcatgtctcctacaagtattcaaaacttgtatgcaaacattcaggggttggttactctataatctaagtctttgagactaatacttgttttcatgtctattatatgtagtaagtatcattgaaggaaaatagagtcccaggagaaaagacaacaagcttccactgcaaatctacaagaattttcaaaatctttaattgattccacaagtggttcattccacaattggtatgatttacatgttttctctaaagtttgattagactatattacatatcttactcttcccatgatgctataattgcatatgatgtcaaaatatatcttttacttatgcataggaggagttagtctaatcaagcatatcttgcacctctcagtctcatgtgcttttcctatgtagagatctctgacagggggagtatttcttcgtctataacaaagggggggaatattctttcaaagggggagaatacacttttagggctagattgggaactccattttcccaagagaattctattttcccaagggaaaatgaactaatttcccttaggaaaatgaaaatcccttgggaaaatgtggttcccaaactagcccttagggggtaatcttttagaggtacaagtggtaaatcttttagatggcaagtcttatttgcttcctatatgcttttaatgtcttccttttcggtgttttattccaaagggggagaagttttagcgaccaaagcaactcaaaatttatcaaacaccaaacaccacccaatttcaaaaaattaaaatcttgatcttacaggtggtttttggttcttcaagtatctttggtctaaaataggaagtaggtggattatggagttagtgggaggcttaagtccataatctcaccttgtggggacattcatgcatcctagcaagtagattgcatattttctttaaaatgtttgttatatttgcttgctttggttgtgttgtcgtcaatcataaaaggggggagattgtaaggaaaatggacgtcgtcccatttgtctaaatgattttggtgtttgatgatcaacataacatgtggactaatgggtttgctagatgtttgtgtttatagttcacagaatgtgaacgggattggactgaggctctaaggatgcaacacctcaaaagaagacataaaagatgtgaagaagtccaagactcaagaacaaaagaagcccaaggaaatagcgaagaaatccaatagggcagtcagccaatgctctggtggcgcaccgaactgtacggtgtgcaaccgaacagtctgcgcagagaggctcgcaactagggactctcgggttgtagcaccgaactttccagtgtgcacaagacagttcggataacagtcggatccaacgatcgactgctacagacctcaacggtcggctgtcgtggctagggcactagacatgtctggtgtgcaccggacagtctggtgcacccgatgacagagcagtcagctttctatccaacggctataattgagagggaggctatatatacccctccatctgttgaaggtgcgggggcccaagcaatataccaagacatattgtagaaaattccaagggctcacacacccaagtgcttaatagaatcactcggtgattagtgtacgtgcttttgcgaagtgcttaggttagttagaccgcttatgcgcttgctctaggtaaatcctagctagttgagtgttgtcggggaccataattaggggtaccctcaagactcctaattcttagctggtaacccccatcagcataaagctgcaaaggcctgatgggtgcgattaagtcagggatcagtccattcgagcgactcgatcatgcctcgcccgagcctagcctcggacaaaggggcagccgaccccggagaatttccgtctcgcccgaggccccccctcccaacggcgggacacatctccggctcgcccgaggccctgccttcactaataagcaaccctgactaattcgccacactgatcgaccgaatcgcaggagcatttaacgcaaaggtggcctgactccttttatcctgacacacgccccccggcagagccgaagtgaccgtcgtcacttcgccgctccactgaccggcctaacagaaggacagcgccgcctgcgccactccgactgcagtgccacttgacagagtgagactgacaggcagtcaggccctgccaaaggcaccataggaagctccgctccgcccgacccaggtctcggactcgggctaggtcccagaagacggcgaactccgctccgcccgacccagggctcggactcgggctacgtcccggaagacggcgaactccacttcgcccgacccagggctcggactcgggctaagtcccggaagacggcgaactccgctccgcccgacccagggctcggactcgggctaagtcccggaagacagcgaactccgctccgcccgacccagggctcgaactcgggctaggtcccggaagacggcgaactccgctccacccgacccagggctcggactcgggcaaagtcctggaagacggcgaactccgctccgcccgaccccagggctcggactcgggctcagccccagaagacgacgaactccgcttctcccgaccccagggctcggactccgccccggcctctgccgaacgacctccgcctcgcccgacccaggggctcggactcggcctcggccatgcaagacagactcgacctcggcttcggaggagcctccacgtcgcccaacctagggcacaagccagccacgtcaacaggaagcgccatcatcaccctaccccgagccgactcgggccgcagagaacaagaccagtgtcccatctggctagctccgccagataggcaatgatggcgccccgcaagctctgtgacgacggcggctctcagctctcttacggaagcaggaggacgtcagcaaggactcaaccactccgacagctgtccctccgccaggctccgtcgctcctccgacggccacgacatcacaccagctggttgccaagatctctccggctgccacatcggcatgtacttagggcgctagctctcccccgctagacacgtagcactctgctacacccccattgtacacctggatccactccttacgcctataaaaggaaggaccagggccctcttagagaaggttggccgcgcggggacgaggacgggacaggcgctctcttggggccgctcgcttccctcacccgcgtggacgcttgtaaccccctactgcaagcgcacccgacctgggcgcgggacgaacacgaaggccgcgggatttccacctctctcacgcccatctccggccacctcacttccccccttcgcgctcgcccacgcgctcgacccatctgggctggggcacgcagcgacattcactcgtcggcttagggacccccaggtctcaaaacgccgacagttggcgcgccaggtaggggcctgctgcgtgttgacgaacaacttcccgtcaagctccagatgggcagtctccagcaacctctccaacccgggacggtgctccgtttcgggagtcttgagttcatgtccttcgacggcagctacgacatgatactccttccaccgccgcgcgacaacgacaatggcggccgacagcccgcccgccggcggcggaatcgacgacgtcttccccgcgtggtggaagaacaacattcgagctcgccccgtcctctcccccgccaacggaggaggaggcgaggcaaccaaggccaagcgggaggccgcgcctcgtcggctgtcgagcgagtcgacgtccccagcgccccaacagggggcgcgtcgggcgtcgacctcgcgtttgagacgaaggcgagcgccgtctccccgcgacacgccaatcccgagcaagtggacgacgccagtgcgctcgcggagagcttgcaggacgtcgccctcgtacccgagacggcggtgcaatcagtccccgacgtgactatgtcgctgctcgccgaccgaaaggtaccaaccaattcccatcctacgtcatttcgactcagcctcaacccgcctagcgaccttgctttggcgggcactcttgtagaggcgagatcaaaccctctggggtttcgcatgcggtcgccttgggaccggttgatggacgtctcgacctgcgggccctctgggtccgaggaagatgacgaccccaacatctgttgggatttctctggatttggcaaccccagtgccatgcgggacttcatgaccgcatgtgactactgcctctccgactgttccgacggtagccgcagcctcgacgacggggactgtggcccaagccacgaatgtttccacgtcgagctaggggatccctccgaaggcaatcatctcggcatgccggaggacggtgatctccctaggccggtgcctcgcgctgacatcccgcgggagctagctgtggtccccgttccggcggggggtcacgacccacagctcgagcaagtccgcggggcgcaggccaggctcgacgagggagcaggagcgcttgagccgatccgccgggacgtcgggcaggtatgggcgggccaaccctcggccggagaaatacgtcacctgccccaaggtttccagcaccgcgtcgccaacgacgtcagggtcaggccgccacccgcatctagtggggtcggtcagaacctggctgcagtagcgatgcttctccgcgcgatgccggagccatcaaccaccgagggtcggcgaatccagggagagctcaagaatctcctggaaggcgctgcggtccgacgggtcgagagctccgcctcccgaaggcagggatacccctcgggacctcatgccgcgacttcccgattcatgcaggaagcctcggtctacaccgggcgcacgcgcaacaccgcgcctgcgaccccgggccacctcggcaacgagcaccatcatcgcgaccgtcgggcccacctcgacgagagggtgcgccgaggttaccaccccaggcgtgggggacgctacgacagcggggaggatcggagtccctcgcccgaaccacccggtccgcgggccttcagccgggccatccgacgggcgccgttcccgacccggttccgacccccgactactatcacaaagtactcgggggaaacgagaccggaactgtggctcgcggactaccgcctgacctgccaactgggtggaacggacgacgacaacctcatcatccgcaacctccccctgttcctctccgacaccgctcgcgccaggttggagcacctgcctccggggcagatctccaactgggatgacctggtccaagccttcgcctgcaatttccagggcacgtacgtgcgccccgggaattcctgggacctccgaagctgccggcagcagccgggagagtctctccgagactacatccggcgattctcgaagcagcgcaccgagctgcccaacatcaccgactcggatgtcatcggcgcgttccttgctggcaccacctgccgcgacctggtgagtaagttgggtcgcaagacccccaccagggcgagcgagctgatggacatcgccaccaagttcgcctctggccaggaggcggtcaaggctatcttccgaaaggacaagcagtcccagggccgcccatcggaagatgctcccgaggcgtcaactccgcgcggcgccaagaagaaaggcaagaagaagtcgcaagcgaaacgcgacgctgccgacgcggaccttgtcgccgccgccgagtacaagaaccctcggaagccccccggaggtgccaacctcttcgacaagatgctcaaggagccgtgcccctatcatcaggggcccgtcaagcacacccttgaggagtgcgtcatgcttcggcgccacttccacagggccgggccacccgcggagggtggcagggcccgcgacgacgacaagaaggaagatcaccaagcaggagagttccccgaggtccgcgactgcttcatgatctacggtgggcatgcggcgaatgcctcggctcggcatcgcaagcaagagcgccgggaggtctgctcggtgaaggtggcggcgccagtctacctagactggtccgacaagcccatcaccttcgaccaaactgaccaccccgaccacgtgctgagcccggggaaatacccgctcgtcgtcgaccccgtcgtcggcgacgtcaggctcaccaaggtccttatggacgggggcagctgcctcaacatcatctatgccgagaccctcaggctcctgcgcgtcgatctgtcctccgtctgagcaggcgctgcgcccttccacgggatcattcccgggaagcgcgtccagcccctcggacgactcgaccttcccgtctgcttcggaacgccctccaacttccgaagggagactctgacgttcgaggtggtcgggttccgaggaacctaccacacggtactggggaggccatgctacgcgaagttcatggccatccccaactacacctacctgaagctcaagatgtcgggccccaacggggtcatcaccgtcggccccacgtacaaacacgcgttcgaatgcgacgtggagtgcgtggagtacgccgaggccctcgccgagtccgaggccctcatcgccgacctggaaagcctctccaaagaggtgccagacgtgaagcgccatgccggcaacttcgagccagtggagacggtcaaggccgtccctctcgaccccagtggcgacacctccaagcagatccggatcggttccgggctcgaccccaaatagaaagcagtgctcgtcgactttctccgtgcaaacgccgacgtcttcgcgtggagtccctcggacatgcccggcataccgagggatgtcgccgagcactcgctggatattcgggctggagcccgacccgtcaagcagcctctgcgccgattcgacgaggagaagcgcagagtgataggcgaggagatccacaagctaaaagaagcaaaaagtgtcaagctcaaccctgaaaggtgggtcctcggggcgccccagggcatggtcttggagttcattatctccaaacggggcatcgaagccaaccaggagaagaccctgaccatcgcatagcaccccgagcccttgctgggggtacccgggggctgcacgcacccccgggaaaggccgcttgtcaccgccgacgttttggagcctggaacgtacaagctggccggcggtcaaggcgaggtctacggcaacgcttggaacgtccgacagctacgttgcttctacccttaaggtgttttcaagctgttcgtatacctcgctcccacacaagtctcagtcgtcaaggaagggtcggcctcgcctcggcagagcccgaccctccctcgggggctaaaaagggggaacccctctgcgtcaagattgggtgtacctctccgcatccaaaatcttcgatcaaaaaaggcttttgcgttctcccggctatgtcaaaagcagggccccgaggagcgaacgtgggtacatgtaagtggcgaggccgactgagccgaggaactcctatgcctccgggttaggaacacctcactcatcacccgccacgaaaaatgacccaactcgggaagccaccctattattgacaggctaagccggacacgcaaaataaaaggaagaagagtacgacttcatgcaatgaaaacaaagtgttcaggcctcagcggccgcagtaagacacacgcacatccaacagaaactgttccaacaagagttaggcgccgccttgggaaggagccgcgccttcagctccgtccccgccttcgataaggtccatctcggcttccggcaatggcgcagggggaaggatctccgcctcaaaggtggtcgacagcactgcgctcggacccgcggcgaccgcgtcgagccgctgaacttctgccagggcagcttcgtcttcgtcaggaagacaatacccctcactaacccgctctaggtccacaacgtagtggaagcgagcacggcgaaggcccgcctgacgccgtggtgtagcgcctcgcggactctgccgcgcgcgtgatcacccaaggcttgaaggcggctttgaggggagcttcctgaagggacgtcaccggagctaaggatccgataaacgtccgagacggcctcggacatggccgcgaggtcagcctccctctgcttggcagctccggaaagcgcctcggcaagcgccttggcagactcgtcaagggcggactcgagctctgcgaatagccagaagaaagatctcaaacacaagcagaggaaacagacaagaacaagaaccagggacggccaaggcgtacctcctgctcgggcacgctgctccgaggtcgcgacctgggctgcggctaagtcggctgcgagggtttcagcccggctttcggcctcggcagcccggccccgagattggtcccgctcctcgacaacctggacgaactccgaccgctgccgttgcgcctctgcgcgcgccgctgccgcctccacgcgcgctgctgccgcctcggctctcaggtcagtgcagagcaactggaggtccgctaccttggcaccctgctgagaaaggcgcgcagtagccccggcgagtgaggtcctcagggatcgcagcgagccccagacatcgacctcgcggcggatgaacgacgacttggcggcgctccgatccgtcagatcctgggggaaggaaacagggcgtcacgaagaacgcctcgttcacagaaaagaaaagctatgcctgaaaaccgttacctggaggattttggggacgtccctgcagaaaacctccagcgacgaccggagcgaccccaccgttgcctcagcacactcgcggagctcatcccaggattggtcctcctgttcatcatcgagaatgaagacagggtccgaggcctcgcgggtccgaaaccggagcaactggcgccgggccccggggctccgccgcatagcgatgaggctgccgcccggctggacggatcgcgcctccacgcccacctcttccgaggcactgggcgccgacgcatcagccgtctcgacgccggcagcaaccggtcgctctccgactgggacggcggccacttcggtagcggcaggccccagcatggccggcacgtcaggtgggctcgggaccacgtcagcgtcagccacctcccctatcacgatggccgcctcggcagaagagtcagcctcgggaacctgctccacagcgacaggtgccgcccgagccccctgcggtgaaacgccctgcgaaagggtcggctgaacaacaaggcccggagcggcgctggccgcgcaggccgacgccgtcttaagggccttccggggtgccaggtcggtctggccatggcttcgcttgctgagggaaaaaggaaaatcacggccgagacatatgaatgggaagccaggacgaagacattccgagatacctacccgctccgtgccatgatccaccgcgcctggggggaagtctcttggatcccggctcccggaacagccgccgaggtccgcttcgccggcaacttcggcgccacccttgctttcgacacccggggagcagattgcccgggcactatcacgatgacttgagggtcacctccatgcgctgccggcacgagcggcggctcttggggaacagacgccctgatctggccccccggagtcacctcagctcctccggccgaggggtcaggtgtcctctcgggttgcccccgtgcctcggaccgggaccccgacgccccgactccggggactgacggcgtcagcccgctcgggggctggctcgacggctcctggccacaccccaagacggggctgaggccgagacgggcggccatgtcgtcctcctcatcatcatcgtcgtcgtcgtcgggcgtttccggcgacggctccctcgggagtccctccctctcctgctggcgacggcgcttttccaaggcgtctcgagcccgcctccgctcacgggcccgggccttctccgcgtccttcttcctcttcttctcctccgcggcgacccgccgcgctgctcggtccaccgcatcctgcgggacccatggccgggaaggcttgtgccaccccacctcttggagaaggggggaaagaagcccgatcgtaagaaccaggagcaacccaatgtatgaagaaggaaggagcgaacactcaccagagtcacgcacccctggtcggggcgcatccaaagctgggagaaggcgtgggggtccggcttccccaatgcagcggacacccgccattggagggcgtcgaagggaagaggatcaggggacatccacgagccctcccagtcagcctccggggtcatctcccaaagcgacagccgtcgctccgccaagggaagcaccctccgacggtggatggcggcaatcactcccgcagcagtgagtcccccctcccgcaacgcctccaaggcctagagaaggggttcgaggttcttctgtctttcgtgcggggtcccgtgacgccaggcgtcggtggcggtggtgactactcgctgggagaacggcgagagcaactcgccgtcgttccggaggtagaaccaccggcgctgccaccccttgttcgaggacgcgaggatggcaggaatatattgcgacgcccgcgactgcctcagcaggagggtgcagccgccagcctgcaccgctgcgcggaccttcctctcccccgtcggcgaggcaaaaagctcggcgaaaaagagatgggtccacaaatcccaatggggggcgatccccaaatacccctcgcacaccgctacgaagatagcggcctgcgagatggagttgggggtgaggttgtgcaactccaccccatagtggtacaggatcgcccgcataaagcggcccgtcggcacaccgaatccccgctcgtggaaggagacgaagctcacgacgtaccccggcggtggggatggagcggctccgcccacgggaggaatccattctggtcgctgctcatcggtgagagggcgaagcaaaccctcgccgaccagatcctccagatcgctcgccgtcaccgtggaaaagggccatggatcgcgcggcgagatgatggtcacccggtcagccatcaccaaacggaggggatggcggcgcaaggggcaggaagggtggttttctcttctctagctaaggtctctcgggttgcaaaaacctaagaaggaggcaggaagcggagcgaagaaccgtcaccagaccctctcccaggtatataaaagaccaaggcgagaccgttttcaacgttccgcccggaccggatgcgggattcaaaaaacgcgaagcgaaacagccgttcctcgaacggctcgcgcacgcgcaacgaccgccctgccagcaactcgccccgtcgcattaactccgcagagggacagacggcgcttctggcaggagaagcgggcgacgcttcgccttcgccgtaataaccgcgccaaaaaaggtacgccacgtcgttcgatttcgtatccttttccttttttcctctttctctatctcttgcaacagggaccgggaaagggggataccccggaaaggatccttccccatgaaggaaccgggctccgagcctccctactgatcagaggttcgaaggctggccccccgaagggttcaacagccgcctcagatcgcgtgggccctacacccactactggtcagaggttcgaaggccggccccccgaagggttccacggccgcctcaggctactcgggctccgcgcccattactgatcaggggttcgaaggctggcccccgaagggttcacagccgcctcagacgccgagcgagggatgaccaggggtacgttcgatacataaccaaggctcgggctgcgctcccgaggtaccctaggacatttccgagaccagcgggagcgatcttgtaatggaatcccatcagagggaggcatcgagccctcggaccccgtcgccaggggaccgggtccggcagatcacccgcaggtacttttgggcgtgcctctgggcccctagccgacccctaacgaacggggcacggacgtccactcggattacccgcttgcagctcaccggagacaccatgttcggcgcccatcgagggtaacatggcgctttccccccctcctccttgcggaaaggcgacgcaggggcgtatgtaaaaaagccgagtctgtccctgatcgccctctcgccctgtgcagaggctcgggggctgctctcgcaaacccggctccggccgaaccgttgacagcgtcaacataccagcccgagaacttgggccccgaccgtacacccgggctacggccagttcgcatgagggaacaaccagactggtcgaagcgttacgcaaggcattaagacctcggaggagtgaaaccactcctccgaggcctcgggggctacacccggcgggtgcgctcgcgcgcacccaccggaacaaaatgcaaccgagaaaggctggtccccttgcaaaaaaagtgcgacgaaagcctccaagcgagtgataacactccctttgaggctcgggggctactgtcggggaccataattaggggtaccctcaagactcctaattctcagctggtaacccccatcagcataaagctgcaaaggcctgatgggtgcgattaagtcagggatcagtccattcgagcgactcgatcatgcctcgcccgagcctagcctcggacaagggcagccgaccccggaggatttccgtctcgcccgaggcccccctccaacggcggacacatctccggctcgcccgaggccctaccttcgctaagaagcaaccctgactaaatcgccgcaccgaccgaccgaatcgcaggagcatttaacgcaaaggtggcctgacacctttatcctgacacacccccccccccggcagagccgaagtgaccgccgtcacttcgccgctccactgaccggcctaacagaaggacagcgccgcctgcgccactccgactgcagtgccacttgacagagtgagactgacaggcagtcaggccctaccaaaggcaccataggaagctccgctccgcccgacccagggctcggactcgggctaggtcccggaagacggcaaactccgctccgcccgacccagggctcggactcgggctaggtcccagacgacggcgaactccgctccgcccgacccagggctcggactcgggctacgtcccagaagacggcgaactccgctccgcccgacccagggctcggactcgggctaagtcccggaagacggcgaactccgctccgcccgacccagggctcggactcgggctaggtcccggaagacggcgaactccgctccgcccgacccagggcttggactcgagctaagtcccggaagatggcgaactccgctccgcccgaccccagggctcggactcgggctcagccccagaagacgacgaactccgcttcgctcgaccccagggctcggactccgccccggcctctgccgaacgacctccgcctcgcccgacccaggggctcggactcggcctcagccatggaagacagactcgacctcggcttcggaggagcctccacgtcgcccaacctagggcacaagccaaccacgtcaacaggaagcgccatcatcaccctaccccgagccgactcgggccgcagagaacaagaccagtgtcccatctggctagctccgccagataggcaatgatggcgccccgcaagctctgtgacgacgacggctctcagctctcttacggaagcaggaggacgtcagcaaggactcaaccgctccgacagctgtccctccgccaggctccgtcgctcctccgacggccacgacatcacaccagctgggtgccaagatctctccggctgccacattggcatgtacttagggcgctagatctcccccgctagacacgtagcactctgctacacccccattgtacacctggatccactccttacgcctataaaaggaaggaccagggccctcttagagaaggttggccgcgcggggacgaggacgggacaggcgctctcttggggccgctcgcttccctcacccgcgtggacgcttgtaaccccctactgcaagcgcacccgacctgggcgcgggacgaacatgaaggccgcgggatttccacctctctcacgcccatctccggccacctcacttccccccttcgcgctcgcccacgcgctcgacccatctgggctgaggcacgcagcgacattcactcgtcggcttagggaccccccggtctcgaaacgccgacaagtgtgtttacaaaaaccacacaacccctcggctcttgcacgagccattgtaattgtaccgagtggggcgggagtcttacgagaccgtgacaaccgagtttgtgtcacgacctcgaccgtgtaccggagggaacgaggcccggcagcgtttcagtcgggagcttgatagtgcagatagtggggagtgaccgagaggagccgaaagcggagcaccacttgcatgtggagaaggtccgcagctctctatggagttactcgaccgaggtgcttgggcctcacgtgggctactctttgcgtaggggcactaacgaggattagtcggaaccttgcgtggttccggatacctcggtaaaaatactagcgtcatccacgagagtttgctttctctacttgctctttaccttccgcaattatattacgcacttaagtttccatctctcctttctaagttagaatacttaggattcaaacttagtctttgatgtagagatagcaacacttagacaaaacctagtttgcacattctagattgtttatttgcataggatttattctagggatttaattgtggcctagtttagagacagtttttagaagtccaaattcacccccctccttaggcgtcaccgtttcccacaagttgtttgagaatgcaaacttggactcaatagccataagccgagacacgaaaataaggacagtcactttcgtgtgctcgtgcaacatctttttgacagctttaaggagctcaaagaacttctgaacctcaggcgtaggaggatccttaaattcgaggggttgagggggttctcgaaacacgtcggtctctgatcgacacttgctacaagggcacctaacatcggttccggtctctgatcgagcaaaagcacggtccagaaacacgtcggtcttcgcaacccactcacctgatagagcacctctcttctttcaaccttcatacatccctcgacgatcctccgccatactagatatgagacgtttacttaattagttaagtaatgcacgaaccatccattattacgaagaaatcatgcccctacatctataggaaaggataattcctaaacccacctaggagtgaccgacgagccctgtatttatgacaaggcatgtgctctataaagcccaaaatttgtaatagggaaaaataatgaaataaataaataaatatacgtatatgaaaaagttcttagcaaataaataaatacagaaatatgcatctcatggtaaggttcttgtatttttcgcatttgggtttaaattcacaagaccagtttaagttgaaattttgaatttgaaaataaaagagaaaaggaaatagaaggaaaagaaaagaacacacattataagataacaataataaataaataatattattgaaaatagtaggatttatattcacattaggattatgtttgagattgggaatctgaaattcaaaacagaaatttgaatttggttagaatacttgaaattggaattgaaaacaaagaagaaaaattaaagaaaagaaaagaaaatgcaaaaggctagatcttcactattttccctccccggcagcccacttcctcattccacatctgcgcactgacgacgatgtcccaccggccagcgcctcatcatgctcgtgcactaactctaccgttgtctggcgcgtgggcccctcgcgcgaggttcgccttcgtcatactggaggccatgctgaacctccgtaccggtggccgcattcatgcgggaaattggatgtcctccacctcacagcagcgccactcctcctcctccatcccatccccgctggtctcctattgctgtcgcacagagtgaagcg

SEQ ID NO: 278 - DNA, 33719 bp, Zea mays
  Intron number 5 from transcript GRMZM2G411771_T01 (locus G RMZM2G411771) derived from phytozome v7.0 (chr-ID 5; pos 1 93685805 to 193719523 reverse strand)
gttgaatcttcttttcttggtgagttattgagatagatattgtatataggaacagaaatataacaacacatctttataaaagcagatttatgttcaggtctgttagttagctactatttataggaatagaaacacaacaatgcgtcattatgaaagcaaatctatgtttagttcaggtagagtggcatcttatagttgcaaatcatattcatactacagtacagacgatcatttttggatagaccatataccatcgaaaatagcttattttcggtggtatatggcctattttcggcatattctgaccacaaaaaatagccgaaaattagcttctatttttggcggccacacccaggcctattttcggcggtttcactcggaccgtcgaaaatgacttgtgaattccgtcggtctgactgtagccgccgaaaagtatacatgcttattttcggtggcttagacatggtcgccggaaaaagtaatagagtgtttggtttgaggaatgagctagtccatcatcttttcactcctcactatttttgtttggtttgtggaatggaatgagttgatccatcactgtcggcgtttcgaacccgaggggtccctggaccgacgagtaaattatcgccgcgtgccccagcccagatgggtcggcgcgagacggagcgcgaaggggggaagaagccggagggagacatgcgtgagaggtgaaatcccgcggccttcgtgtttgtcccgcgcccaggccgggtgcgcttgcagtagggggttacaagcgtccacgcgggagggagcgagcggcctcacgcgagcgtcgtcccgtccttccccgcgcggccaaccctcgtaagagggccctggatcttccttttataggcgcaaggaaaggatccaggtgtacaatgagggtgtagcagtgtgctaacgtgtctagcggaggagagctagcgccctaagtacatgccatcgtggcagccggagaggttttggcactcggttcgtgtgatgtcgtggccgtcggaggagcgtcggaacctggcggaaggacagctgtcggggctgtcgagtccttgctgatgtcctcttgcttccgtaagggggctgagagccgtcgtcgtcatagagcgtgcggggcgccatcattacccgtatagtggagcgagccagatgggacaccggtcttgttccccgtagcctgagtcagcttggggcagggtaatgatggcgcctcctgttgacgtggtcggtccgtgccctgggttgggcgaggtggaggctcctccgaggtcgaggtcgagtctgtcttccaaggccgaggtcgaatccgagcccctgggtcgggcgaggcggagaccgtcgactgatgccagggctgagtccgagccctagggtcgggcgaagcggagttcgtcgtccttcggggctgagcccgagtccgagccctggggtcgggcgaagcggagttcgtcgtcttccggggctgagcccgagtccgagccctggggtcgggcgaagcggagttcgtcgtcttccggggctgagcccgagtccaagccctggggtcgggcgaagcggagttcgtcgtcttccggggctgagctcgagttcgagccctgaggtcgggcgaagcggagtttcccatggcgcctagggccggacttggctgctgtcagcctcactctgtcgagtggcacaacagtcagagtggcgcaggcggcgctgtcctcttgtcaggccggtcagtggagcggcgaagtgactacggtcacttcggctctgtcaactggagggcgcgcgtcaggataaaggtgtcaggccacctttgcattaaatgcccctgcgatttggtcggttggcgtggcgatttggccaaggttgcttcttggtgaagactgggccttgggcgggccgaaggtgtgtccgttgctggagggggtcctcgggcgagacgtagatcctccggggtcggctgcccttgcccgaggctgggctcgggcgaggcgtgatcgcgtccctcgaatggaccgatccctgacttagtcgcacccatcaggcctttgcagctttgtgctgatgggggttaccagctgagatttaggagtcttgagggtacccctaattatggtccccgacagtagcccccgagcctcgaagggagtgttaatactcgcttggaggcttttgtcgcacttttttgcaaggggaccagcctttctcggttgcgtcttgttccggtgggtgcgcgcgagcgcacccgccgggtgtaacccccgaggcctcggaggattggtttgactccttcgaggtcttaatgcatttcacaatgtttcggccggtctggtcgttccctcatgcgagctggccgtagcccgggtgcacggtcgggtcccaagttctcgggctggtatgttgacgctgtcaacggtttggccggagctgggtttgcgagagcagcccccgagcctctgcacagggcgagaggacggtcaaggacagactcgacttttttacatacgcccctgcgtcgcctttctgcaaggaggagggtggaaagcgccatgttgcccttggagggcgccgaacatggtgtctccagcgagctgctgacgggtaatccgagtggacgcccgtgccccatttgttaggggtcggctagaggcccggaggcgcgctccaaaagtacctacgagtgatctgccggacccggtccccttttgacggggtccgagggctcgatgcctccctctgatgggattccgttacaagatcgttcccgctggtctcggaaatgtcctagggtacctcgggagcgtagcccgagccttggttatgtatcgaacgtacccagggtcatccctcgctctgtgtctgaggcggctgtgaacccttcgagggccagcctacgaacccctgatcagtagtgggcgcggagcccgagtggcctgaggcggccgttgaacccttccgaggggccggccttcgaacctctgaccagtagtgggcgcggagcccaagcgctctgaggcgactgttaaacccctccgaggggccagcctttgaacctctgatcagtagggaggctcggggcctgtttccttcacggagaaggatccttttcggggtatccccctttcccggtctctgttgtaagagagagaaagaggaaaaggaaaaggatatgaaatcgaatgacgtggcgtaccttttttgacgcggtcattatggcgaaggcgaagcgtcgctcgcttctcctgccagaggcgccgcttgtcccgccgcggagttaatgcgacggggcaagtggttcgcggggcagccgttgcgcgtgcgtgggccgttcgaggaacggaacacgggcgcgtcgtcttcacgccgtgagagagggttctctcgctgtccccacgaggtgacgtgagcttggctgacgacgtgaccgctgcttctgcccgcctgccaccgccattactaccggcccatttttggccgcatcgaccgtcgcgccttctcccgcggctgactggcccgtgatcgatgcgcctggctggcactgttgggtcatacgcagggttgccttgagtcgcggtattggttccgcagtcgaggaggcgcgatagtggcgcaaggggcggcgcggctgctcgcaccacgcaactggcgcgccggttgcgtgacgtgtgggcctaggcctccatgctgggtgcgttggagtcgaaggggtgcgcccacttggcgcggttgcatgccgactgcatggctgtccgccctttcacccgccggtctgtgcgaaagtggaggaatgctcgtaaccgctgggcagttgcatgcaccgcgcgcggcggtttgacttcttctgctctgggccagcctgcatgacgcgtgggacccagcccccgcgccgtagggggaggaccttggagcgtgttggagaagactcagcccgcgacggctggggacgcaagtagggagagttgcctttaaaaggagggtgacccccttgaaaggcgaccatgtcttcgcactcccttatgcatcgtgtctttccaccttccgagcccccggatgggaaacacccgcaatcctttcgccttgtcgttggaggaacgtaacttcatggaagttggtacctttcagccatcgttcggcttcaaggattttcatcatgcagcccggccgcatcccctcgccggtggtcacccaagacggtgacctccagttcgatggcggggaaaagcaagccgggctgtggcctctgcccctccctcagcttcaaggattttcatcatcagtgctggggaggggagtgcgccgagttggggtcggtccctgcgcgggcggcggcccgctccttcccttagtgatcggggggaagggcgttcatcgttcgtggcgctggcagctgctgcgtgcctggctctctgacccgagtggcttcggagccgctcccggcgccgccttccgccacggcagccggaagaggtttctccgccgacgagatagtcggtgccgcccacggactgacctccaactctacggctttctgcccgtccttgcctctcgagtgagggcatgggtgagggcctcatggcagcagcatccgccctgaggtcatcgctgctgctgttcggccccccggagcagaagtcgtcgtcgtcgttgctgttggagcgggcgatggcgagccatccgtcggccttctgttgctccgcaggcccccctatcgtgtggggttgttcgtacctgcggagacggaaccggagttccgtttgtaatggcaccttgaatgccggtgttttgttcattgcggctgtcggggcctgaacatgtatgcatttttggcgcggagccgtgttttttcctcatttcgagcactaagactcgcctgtcggctatctgaaccgcttcaccaagcgtgagttgcctcgtgcaaaggtgacgagtgaggtatccgtatcccagaggcgtaggagtccctcggctcggtcggccttgctgtccgaggcttctcttgcttagttaaaggaaaccctcggccgctctctgatgagccgaagccggaggtagcagtgtcagcacggacagaggcagagttggctcgaaaagaagatttggtcggccggagcctgaccgggtcgtccactggcgggaccgacgccggagttgaattgccgaggccacaaatcgagccgatgtcctcgggggacggctggctgaggcttcggggtgaccggcccgagccatctgctcgagccggattcctggagaagaccctggcggcgatggtgtagttgacgccgagggtgctgctgctcccttcaaatgtcaagatccgagcctgcaggatcggattatcttgtagtgtgtgttttctgcggccgccgaggcccaaacacaccatcgtcgtgttgtaaagctgtgtttcttttccccttgtttcgaatatctggacttatttgtcggtaacagaattgtttgcgagagcgagagttacttttcacggaaggtgatgagtgaggtatccatatcccggaggcgtaggaatccctcggctcggtcggccttgccgcttacgcgcacccttgttcgtccatagggttctgtcaccgacgcagtcgagaaggcccgaagaatcgtttcggcagaggagcttttgagcgtgaagacttgttcggttcgcggaatcacctatccgagcgcgagttacttatcgcagaaggtgatgagtgaggtatccgtatcctggaggcgtaggaatccctcggctcggtcagccttggctgcttacgtgtactccgtcgttttcaggatccactttcgaaatagtcggaaagcacgaaagacattctggcagaaaagatctttttccgaggaaaattttgacgcagagggggttccccccttttagcccccgagggagggtcgggctttgccgaggcaaggctgacccttccttgatgactaaactttgcgtgggaatgaggtatacgaacaacttgaaagcatcttaagggtagaagcgacgtagctgttggatgttccaagcgttgctgtagacctcgccttgattgttggccagcttatacgttccgggcttcagaactttggcgatgacgaacgacccttcccagggaggcgtgagcttgtgccgccctcgggcatcttgtcgcagtcgaagcaccaggtcgcccacctagaggtctcgggaccgaacccctcgggcgtggtagcgtcgcagggactgttggtaccgcgccgagtgtagtaaggccatgtcctgagcctcttccagctggtccagtgagtcttctcgattagcttgattgctttggtcggcgtaggccctcgtcctcggggaaccgtattctaagtctgtgggcaagatggcctcggccccatagactagaaagaacggtgtgaagcccgtggctcggctcggcgttgtcctcagactccagaccaccgaagggagttccttcatccaccgcttgccgaacttgttgaggtcgttgttgtcggtgttttgggtccgaccgcacacccggggttgcccctcaaggtgtttcttggagtaggacggagtcgacgactgtagcaaaatggttcgtgccgatcgcacgagggacagtggacaagatttacaggttcgggccgcttagagatgcgtaacaccctacgtcctggtgagtatgtgagtgtggttacaagagggctctctggactgaagacacaaagagttgatgtgggtggctaagtaagatagggttgatcattctgaaggggtgccccctaggccttatatactcgaccgtggggcagtacacgtggatatgataacaacaagtagctaaaaggtagtgaacctcttgagtttatccctacgtaaccctcgccgacttatcctcgcatggctccgttgcatgggggcttcagcgcgggaaagtcgggtctctgttgcgatttactcgctcgacgttgtgggccatccgggtttgcaccaatccggtatcacgtcgctctgctttgttggttgtttctccccaggcccacgaaagaatgaccttacgatttattgggcccttgggcctttcgtgaggtcttttactcctttagtggacccgggggatatctaccccccacaagcccccaatctttgggttaatttagaagtaatcagcccaaagattccaggtccaacttgcgggtgttttgaagaagaacgtcttcctgctgtcttctcttgctccgatcactcatttgaccgaagtttggtttcatgcttgtgccttagaggtcggcatttcaattttgtaggattctgagctttattgggtgtagcccccgagctttgagtagattttagaaaacaatctactcgaaggtcttccccagaaattatctccatttgtgctcctgcatcttggttgagggttggtcttttaatcttgtcccacgccttagaagtcgacactatctcggcttggaatgataatccatggggtgcatcggaggtgcacccaatgggtgtagcccccgaccttcaaatggattttttaaggataatccattcgaaggtcttcctttcgtgcctctttgctgaaaattatccctttcgtttgtagaaattggcatgaagctatttgcattacgctttggaggtcagcattatgtcatcaatattttgctgcagaggtcagcatatattttgtctttagcagccgagtttgcaatccatccgtatcttgctaggtagtgcaatttatttgctcctgcgactgattggacgtttgatggacggtctctgtctagtcttcacgtcgcttctgtcggccatatattgtacttcgctggctatatttggctttcctctgatccttactgatatctcatttttgtcttgaggtattcactgcgtgccctgcacagatgtgaccgttttgaaaaatatactgataattcctgggcgtccccccccaatgggtgtgggcaagggatggcttggtacgctgagtgttttagccggctgcttctgagtagtaatgtgatgggacggcgagtgtaatcatatcctttgcgctgttgactggagtcccaatgggtgtagtgttgcatgaaacagcgtcagccgtctgacgtgtcttcagacgggtggaagtgcctattgaatgctttgcgactgttcagtgaccacagttggaggtgagcggttgcctttcccttctataaataacgtcgttgcccctctggttttttcacatctcttcgctgttctttactgcatccttttcttctctcccatctgcttccgccatgggcaagagtaacaaatgcaagcgcgagccgactcctccgtcggaggacttcggcgactcggaatactcggaggaggagttctcctccgagtccgaggggtctccagctcccgtctctcccccggcgtcgtctgatgattcagacgattcccaggggattgccacggaagtctggacgtacatccgggccgtcgagcgctccgggctcgagggctcggatgagtcggagtactcctcggatgaggaggactcggacggcgacgaggacgaggatgacgacgacggtgacgacgacgacggtggcgacggcgacggtgacggcagcggcagcggcgggggcagcggcggcggcgacgggagcaagggcagcaccagaggcggcagcagcaagggcagcaccaggggcggcagcagcaagggcagcactaggggcggcggtggtggcagcagcagcaaggccagtggctaagcgccactggtctttagatattagtatagtgtagttagaataatgtagtagtaatgtagagtagtatagcgtagtatagtagtagtagtaatgtaatgtagtaatagtagggaagcatcaactcgcaaagagttgatttgtaagcttattgtcttcccttaatgaaagaatgacgttggcttcttcttgatgtctcgctttgcttgattataaaactgattcttttgagacagtagatgaataacttggggatcacactgatgcttccagaagtagctgccgagtaatcttgtagtcggtatcggcgttttagaggcaacgcagagcgattgaaggtcgtcgtcggcattttagaagtaatgccgagcgatcgaacacgagatcagcgttttagaggcaatgccgagtgtttgaaggtcgacgtcggcattttagaagtaatgccgagcgatcgaacacgagatcagcgttttagaggcaacaccgagtgtttgaaggtcgacgtcggcattttagaagtaatgccgagcgtttggacacgagatcagcgttttagaggcaacgccgagtgatagaaggtcgacgtcggcattttagaagtaatgccgagcgattgaacacaagatcagcgttttagaggcaacgtcgaatgactggaggttggcatcggctttttagaggtagtgccgagtgaccggaggtcggcatcggctttttagaggtaatgccgagcaactgaatatgaaatcagcgttttagagtcaacgccgagtgactggatggtgacgtcggcattttagaggtaatgctgagcgactgaatatgaaatcagcgttttagagtcaacgccgagtgactggatggtaacgtcggcattttagaggtaatgccgagcgactgaatatgaaatcagcgttttagagtcaacgccgagtgatagccggccgcatgagttattttgaggatgataaccgagtgatgaggtggcacatcggttttttggaaataactgccggatgaccacgtggcatgctggggtttcggaaataaccgccgggtgatgactgggcactttttgaaacggtatctagctcgagaatatcccataagagctgcgcttttagccgcctttgctttccgtgccctagttcttgcattcccgcttctaaatcctctctgccattcgcctcctactttgttcgctggtgaaaatcgagatggcgcccaagaggaaaactgcgagctcgtctgctgcggtgatccctccgatcgaccccaacagccagttgcctttcgcaggtaaccatatgtccatcatttccgaagctgaacttctccaccttgtgtccatcggggttcttcctccgcgggaactctgttcttggcggatttgccacgggactactgtcccgacagaggatacccacgagtctgtagtttacgctccttttcttctccgcggcctcggccttcccatctctccctttttccgcggcctccttgatttctaccacattaacttgacccatttgaaccctaattccattctgcaaatctccattttcgttcacttatgcgaagcctttcttggcgtgctgccgcattttggtttatggaagtatttatatcattgtcgccctgggatggccgggggacaacatcagttggtcggaggcgccagtttggagatgcatcgcgggcggaaaactgagtattttgagattcccctcaaggacagtattaaggggtggcgtctagagtggttcatagttgataattatggaaattctctcccctcccggtcgggaagacagccagacgttcgcactccgagctggaccgagtctcccacagatcaggaagtggctgaggcaggtgtgttgctaactgaagttggactgctgaaagagagaggtctaactgccgaagctgtggtcgctgactttgttttcaagaacattcagccactgaaagacagggcctatccagcatatctgtatcgagggctagccgactcaactcgggttaccaataggagaattccttctgtagacttggtaagccgacttgaaatgatcctcaggggtaaggtgtcaaatgttggtgctccagtggcatactcggcctggagcctgcctcctcccaaagctttcaccctttttgtgtcaaatccgcctgcgactgatggcaatttgggccttagagtgcgaccctctgctgaagaagtcagtactttggctgcttcgcttggggagattcctgatgatgaacgacaggttcattttgaggtgcccctgaaccctagtgatgcggatataaatgccatgcttgatctgctagctgaggattcctccgacgctgctcctactggtacgttggcagtggtgccccttccagagcttgatacaactttggatgtccagaaacctgttagtactcgcccgaggcaccctagccgaaccagtcagcctgagccttctgctgatgagcaaaagaagaaaagaagacgcctccggcgagtatccagttttgatgaggacgctggtacctcagttcctgctgctgaagaagtgcctgcaactggcctcactgacgctgaccccaatgggtgtacccaaactgctactgatcccaatgtgggtgctccatctgttgctgaacccaatgggggtgctgcttgtgttgtcactgtggaagatgagtgtggcagaacctcccaagttatcggacccacatgcacctgcccttgtcttaaagacctcagactgctatgcatgtgcaccagatagcttaacaggatccgtccgattgccccaaggacatcggataaaccacttacaaccagaaccgcgggattaagtaacacaaatcacacacaccaatattgttgcagcggaaatcttactaccaaattttacaggttacaaaaattttacattagtttatcggagtgattacgaaagtataagtttaaaatatatatgctagctcaagggatcatcctcaataagaagtatagaagggttacttagacttataagaaggccgagcccaccggcacttaacaccatcaacaacagcacaaagttagaacctgaaaaacaacagggaataaaaccctgagtatggaattactcagcaagtcttacccgactaaagaaaagactctcaagggtatgctggttatatgggagtcaaggtatggcttatcaagaatcaaagactctgttttgcagaaaagcttactacgagtggatccttaaaatccaattttattgtcaagttaagtaaaattacctgcagctagagttctttctaccctagttcagtcacttatcctgaactagccaagttcttaattcttccttcatcttcactggattgctacgtgtagggcagtgaccaagtcttcataaccgcgaaggtacggcgatccgaatcgattatactcagctgaggatctccgatcacacgacatatgtagcacttaacccttgcatatgtcaacccgccaccggggttcttaagaccggatcaggttcacgcaaaccgagagcacagctacaccaccgtccagcctcttgccacggagggtacacgctactctcgccaccgctccacgcccatttcgtgttatcttattccggccttagtctgcccgaggcaaggcttacccatgacgaggcatgtgaccagttaaagggtcctcgatcatcaagcctacatcgagacggtccttaatcgactcagacggagacactacaccgagactctcttctcgtgcaagtcacccgcccggtctcagcttaatcatttcaaacccaaagttggtacctggcagaggtacatcttttccgatgttgaacctatcaaggcctttgatagatccatcatcaagttttattttcgaaaaacatcccacccacttttgccacatcatattttgtaaaaacaaaaccttttgtttttctaaagcaaagctaagcattaaaaagcttttgtaaaacaggtgatcaaggaaggtaattaaattcaaggaaggtaatgcaggaatggttttatcaagcaactcctatcacctaatgcagcaatcaagtgagaaagattttaaaatagcaagggaggtggcaaatgcaccggggcttgcctgagtaacactaggttagtgttagacgacgtccacttggcgaacatcttcaggtttgtccatcagtatcatcctgcggattagcccgcgcttggggtcgacttggctcgtctttcgcatcacgcgatcatttatcgtaccttatgagatgcatgatgcacatgtatgagcacgagtatacgagtatattatagataatctacactaaaaaggatgaaacacttaaaaacctagcgttaagcaccatggatatcacagcagggcatcgactacatccattaaccaaattgacatattacactagaaaatctatttttattcctagctttttattaactctttaaactatgtatcttaattacttgatttaccgatttatctaaatcaatcatcacaatatacgcatgctaaattaataacatttattgagaccaataattctattcactctatttatagactcagttaacgggaatacaaatcaacttacgctgactaattcgacgcgatagtcgcaagcacgacgacgattccggttgacgccatctagggacttttttttggtaatcaattgctgcagatcttttcctcgactgaataactttgacgaaccgaacttgagtcgcgcaggatgttcgagctttttgtcgcgcacttggtaaacaccacgctgctagcttcgtcttcatccgattcttcggatttcttgctgacgcacggaacaacgacgagatcatgtttagagcgagctggtgaggtggggatcgagctgggatgacgggtttgacgactcgacgataaacgcgagcacacgcgaaatccgatggacgaaaagcgagcgcacacgtggctggcagcacggatttgaggcgtggaaaaattgcccacgacgaaatcagccgagcaaggagcgctcgtgaactttatggcggggtcggcagcagccagagcgcacggcgaggtaatttcgtcgatggcgaacagagagcttcgcgcgcccaacagagaacttgcgcgcgcagtgaagaacgacgagctggaaaagctgcacgcgatctcggcgcgcagggaaaacactaaagcagcagccgcagcgagatggacaggggcgcggctggagcttggagacggactggggcagggagaggcgaccagcgcgcaagggagacgagctggggcgcggcaccaggctgaggctctgcgcagggactccagggagttgagcgacggcacagggacgagcggagcttgggatgcgcgagggagcagccataggggagagacagggggatgagcgcaggaatccaagcaggaagaacgagctggagctgcgacggcgacttggaacaaggagcacagggaggtgggcggcgtccatgggagggagaggtcacggcgccggggctggggcgagcaccagggagtcgccacgggagaggggaaagggaaccagcgagctcagtcgagcgcgcgcagggagaagctgggcgcggcaactggagttccaggcgagcaggttggacgcgtgccatggaggaacgccggtgaggaagaaaccaagctcggcgagcagagcagagcagggaggaagggagcggtgttcctgtgtactgcacgcatagatagaaggggcgccgtggggaggagccgctcggcagggatggagcgaggaagctccagcgcgcagagagaaattgggagaaggctgcagcgctgggaaggaaaacggctgtagaagaagataaagatgatgctcagcggtggaaaggatcagacagagagacagggcggctgggagatgaagatgccagcagaaaaaaatcagaggagggagaggatagggatggcacgccgtcaggaacaaaaatcaggaagcagatgatttgctgctgcgcgaggaagagccatttggctgggaagaaggagctgggcgacttcagcagattttcctctgcagcgcctagagataaccacggctggattttcttcgtggacgagcggcagcaaaaaaatcaggaagctgatgtggtgactaatagagaagaaaaaaaaatcaaaggagagaggggtgaaatatttgagaaaaacatatttttctatttttccgtattttctttacacaagaacacaaagataatttaattctctgattaaatcgacgtgagatgtaacccgggcaaaacaaaagatatccgtcaactagtacagactgcgcttgatttaatttagagtagataattttatccgcagtctgaataggaaacagattagttatgaatactcagctcggttctaattttcttagcaatgcatacgatatagacatgacatggttttgatttagcgaatgctttggaatcagatgagtttgcgctgttatttatatccaaagttttggatcggggcgagaaacgacggcccgaataagacggatttcgtcttcgagaatttgttctatgggattcgactaaaattagccgaaaccatatctaaattattaacctcgcgcccgatttctctcggacgatgtgcgattcagattattttgccccgaaactttattcgtcgagttctaaataaatttgctctggatcaaaatcgtaagagtgggtcgagcttacgatttcgtattcgcgcgagcgacgaattttaaataatcatcggacgcccgattttcagaacaaatatgttccgaacagcacgaaaattttacgacgagcccgaatagataaaaataaaaacgatgtcgcgcttgcgacagacgacaccgatgcgatattaaaatcacgatgaacgaagatgtttaaaatttagcacccgtttcatccactgatattacgtgcttaaattcatactcgttgtcgagcgaaatataaacacctggggtgttacaatgaggaggaagaaaatgaagctcctttaactcggaaaaacagtcgacagttcgtcgccagcggtgaaagtagtggagttcattctcctgctttgtctgccctcattggtctgcaagaactgtccctggccaactttgatcaaactcttgaggatatggtcccagaggacttgctatcagagccagtggatgatgatgcaacggaggcttgcgctgccgtgcctgatgctgggttgaggtcatcccgtgcttcgtcgaccttagagcgcgatctcgagggtcgggatgctgacttggattgtcctggtcccatggaagtggctgaaggcccgttttttcttagaggtggttactgcggagagtttggacctcaagaatggtgctgacacattccccagcccccgaggatgtcgccggggatgacttagctcggtgaagaggttaagccactgcccagccccgaagggtgctgccggggatgatccggctcaagtggacagtgccaactatgacccagtccccgagggtgcccaagcagggtctccttcctgcacttccatggacgttcacgcgggatcacctccacactctggctgcatggtggtagcccaaactttggaccagggagtcactttagagggcagcgtccccactgatcgggcgttttggctctgttgaaggcattgagctgattcctactggtccgttgcaagctgcttcgggtggtggccttgcgcctggttatcagctgatttctcctgatttggagatcccttcgttcttttccaacctccaggtactgtgctgtattttagcttgttctttatgttgcatgaacttttgtcattatgttcatctgttcttctcatcaggctttggtggatgggatggccagccagctgaggttgcagggtgcttccgtcccagaaatggcttcgtctcttgcgtgttggaatccagtgtcacttcatcgtcgtgtatccgaattggaggcaactaacgccggttagtgccctttttcttctcttcgcctttgttgtggattgttttaccttctgacctcgttttgtttgattacctcttgctaggaatgactcggcagattgcaattcttgaggaaaaacattcccgagatcaggctgaaatggttcaacggtgcgctgagttcgaggagaagtactctcagagccaaactgaactaaatcaggtcttcgctgccttggatgacgccaatgccctgagttcttctcttcatgctcggcttgactctgaaaaggtaatttacaaaactgtgccttgccttgctatgctcttattacttgcttggtttctgaaggagttgatttttgtttgcaggaagaaaaacgtatccttgctgcttctcgtgacaatctagacagattgtatcgtgattctagcagctcgctgtcaatcttggagaggagtcaccgctttacaatggaggaactagacaatcagcgttgtaagctgcaagaatctgcggacgaagtgacccgccttaagcaattgatatcagcgaaggatgccaccatcaaagaactccgagcttccaagaaatccattgcccaggagttagaggctgctcggctggctgctaaagttaccgaagaaactgctgctactctcaaagcccagcgcgataaagccatggacaaggctattcgggctggacgaatcttaatgaggagacccggcgtggttgttcctaaagacataaaggctgacgtgaatgctgcccccgattcctcgagtcgtccttcttcgtcggtcgctcctgagaaagacattgcgaaatagagaaacattttgcgtgctctgagcgcgtggttagcatgatcgagtatttgttagaggacatcagtttatcatttgaatgacataattactctcttattgtatcaaaatttattggttcgtaaatttgtggtaatgacgcatgatgattatgaaatttgtttgcgggatatggaagtcatcccctgaattacatgggcgcgagtatgttgcaccggcttaagccgccactgactttagccgatagctccgttagtagggtatagtggtcaccccaagttaagtaagcgtgagcatgttgcaccgccttaagtcgttgccgacttaaatcgattgccccgtttgtagggcatagtggtcaccccgagttaagtaagcgtgagcatgttgcaccgccttaagtcgttgccgacttaagtcgattgctccgtttgtagggcatagtggtcaccccgagttaggtaagcgtgagcatgttgcaccgccttaagtcgttgccgacttaagccgattgctccgtttgtagggcatagtggtcaccccgagttaagtaagcgtgagcatgttgcaccgtcttaagtcgttgccgacttaagtcgattgctccgtttgtagggcatagtggtcaccccgagttaagtaagaatgcaagtcaattgtaaacgagccgagtatctttgaaatctctctttattgatgacatatttccactttacagaatacattgttgcctcagcagttttgaaatatagctagggataaaactttctgaggtgctctatgttccaggagttcccaacttctgtgccatccatctgagtgaggcgatacgatccgggccgagtgacttctgctactatgaagggtccttcccataagggtgataacttgtgccgtccctcccccgttagaattcggcggaggacgaggtctcctactgaaaagaaccgttgccgcacagccttgtcgtgataacgccttagagtctgctggtaccgtgcagattggattaccgcattcaaccgttcttcctcaagtacgtcaatgtcctccagcctggtggcctcagcttctgctatgctttcgaagatcaaccttggcgccccaaacttgagatcagcaggtagcactgccttcgacccatagaccatgaaaaaaggagtgtttccatgcagagctcgactaggttgggttcttaggctccaaacaacataaggcaattctcttatccactttcctgcgaatttttcattcttatcgaagacctttttcctgagtgcctccaatatcattccgttggctcgctcaacctgtccgttggctcttggatgtgctacagatgcgtacttgatctgaatgctcttttgctcgcagaagtcgaagaattctgaactggtgaagttggatcctaagtcggtgatgatgctgtttggtatcccgaatctgaatattatgtcttgtatgaattccacggccttagcagaggttaaagaagcaatgggcttgaactctatccatttagtgaatttgtcaatcgccaccaatacatgagtatatcccccttgagctttcttgaaaggtccaatcatatccagtccccagcatgcgaaaggccaggttactggtatggtctgtagttgctgtgctggtatgtgttgttgctttgacaagtattggcaagcttcacacctctggactaactcggctgcatcgttcttcgctgtcggccaatagaatcctgacctgaaaactttcccgactagtgttctggatgccgcatgtattccacattgccctgcatggacctcctccagaagttgcttcccagtggacgggagaacgcacttcatgaggatgcctgatgcgccccttctgtacaatatctccccaatgagtgtatagtgagccgactgcctggcaatgcgctctgccgagttcttgtcgtctggttcttcttcattctttatatacttgataatcagccttctccagtcatcagagtctgactcgggttgatctatgatgttgcactcttctgtttgatccattgagatactcggccgcagaatttcttgcacgaagactccgggtgggacctgagttcgactggatccgagctttgacagtacatcgactgctgtgttccgatctctttctatatgatgaaattccagaccctcgaatttatcttccagctttcggacggcagcgcagtattttcccattgaatcgcttgaacaatcccattccttgtttatctggctgatgactaccagagaatctccgtataccatcaatctcttgacgcccagtgatatggcgatgttcaatccgtgtatcaaagcttcgtactcggccgcattgttagaggccgagaatagcaactggagggcgtacttgaggtgttcgcctccaggtgcggtgaagagaatccctgctcctgctccctgcagcttcagcgagccatcaaaataaattcgccatacttctgcagtttctggattatccggtacttgctgttctgtccactctgatacgaaatctaccagtgcttgagttttgatggcagtgcgaggtcggaactcgatgtcgtgggatcccagctcgcaagcccacttggctattcggccaatggcttccttgttgtgaagaatatcccctattgggaaaccagtaactactatgactttgtggtcgtcaaagtagtgacgcagcttgcgggcagttagaagtactacgtataatagcttatgaacctgaggatactttttcttcgaggggcctagaacttcactgatgaagtaaacgggatgttgtactggataggcatgtccttcttctactcgctcgactaccaacgcggtgcttaccacgtgagtcgtgcaagagatatacagtagcaaatcttcagccggttgagtcgacgtagctcgccggggtggtttcagtactggtggtgttgtcaagaatttcttcagtgcatctagagcttcttgtgcttctgaagtccattgaaacttatccaccttcttgagtagcttgtaaaatggcaaacctttttctcccagcctggatataaatctgctcagagctgccatacatccagtaagtcgctgaaccttcttttgtgaccgaggagcttccatcttcatgatagcctcaattttatctggattagcctcaattccccggtggctgacaataaacccgagcaatcttcctgctggtaccccgaaaacacatttttcgggattgagcttccatctatatcgtctcaagctgttgaaaaccagctgtaagtcttcgatgaagttttccgaattttctgttttgattaccacatcatctacgtaagcctccacacgcttgccccagtgatcggccaagcatgtttgaatggctctctgataagtcgctccagcgtttttgaggccgaacgacatggaggtataacagaaagcaccaaacggagtgatgaacgccgttttttcctcgtcttcttttgccagactaatctgatgatacccggaataacaatctaagaaagacggcacagaacatccagcggtggagtccaccacctgatctatcctcgggagcccgaagggatccttcggacagtgtttgttgagatcagtatagtcgacgcacatgcgccaatccactttattctttttgagtacaagaacagggttggctaaccactcggggtgcaatacttctctaataaatccagccgcaaccaagcgagctaactcggcgcgaatggcctctctcttgtcgggcgtgaaacgacatagcttttgccggattggcctggcctggggataaaccttcaacttgtgcttgggccagttctcttgggactcccggcatatccgcaggttgccatgcgaatacatctcggttatcttgcaggaactggacgagcgcgctttcctatttgttgtccaagctggagctgatgatggctgtcttgcgctcatcagcgaaccccaggttaattcgcttggtttcttcagtcagccgcatagaggtcgcgacctgagcttcgttcgccggtacggcgaggtcctcctcaggcttagaattcgccagtgtagaagggaccgttgacggcttggtggtgagggctgcttggatggccactcggaaacattctgcggcgccttggaagtcggcgcgcacagttatgatccctcgcggtcctggcatcttcagtatcatgtatgtatagtgcggaatggccatgaatttggccaatcccggccttccaatgatggcgttgtacccgcagtcgaagtttgccacttcaaacctcaggaactcggttctgtagttctccggagttccgaaggtgactggcatgtagatgtggcccagcgggtattccccctccgtcggcacgatgtcgaagaaaggagtgtccgacttgtggagctctttgaggtgagcccccaaaccttggagtgtccgggggaaggtgacgttgatgctgctccccccgtccactagcaccttcttcacccggctctctcggatcaccggatcgacgaggagcgggtatttgcccggatggtcgaagttgagccattgatcctcccgagtgaaagtgatcgggtgttctgaccaccggtatggggcgggaggaccggtggtcgccaccagtatctggcggtcgttgagcttttgttgtctcttgttctcctgcgacccatgtccgccgaagatgacgttgacctccctgtcgacgcgtgggaaagctcctcctcctccctcctctggctgatgaggttgtcgtggttcatccggtcctcccctcggcggaggaggaggtagaggttggaagggtcggccatgcccaacggagtgcttgaagtcacgacagttgcggagagtatggcgcatgtccttgtggtatgggcactgggcgtcgaggatgtcgtccagcgtgcgctcgcctccgcgaggtcctcctcgggcgcgagaggcaggtggtccggcggcgtgtacttcttcgcgaggcctcttctcccagcgtttgtcgggtggctggttcgcgtcgcgtcgtggtgctgccggtgcaggctttgctcctccgatgaggtcctgagctcgctcgtcggcggtgatgtagaggtcggcttcccggaacagctcctcggaagtagtcggcgccttctgcagtatggctcggacaaaagccgagtcgttggatcctctgtagaagtcctcgatcacggccgcctccgtgacctcggggatgcgatttctcatggtctggaaccttttgaggtacgaccagagagtctcatccccccggcgcttgatggatttgaggtcccacggttgcgctggcttgtcggagagggactggaagttggcggtgaaacgtcgactgaagtctccccagtcgtcgatgcagtgtcggggtagatgtcgtagccactgtagcgcatcttgcccaaggacgatgggcaaatacgcggtcataacgtcctcagatgccccggccgctcgagctgcggtggtgtagacagctagccaaccccctggatcctgcttaggttcatatttgtcgacattggataccttgaagttgggaggccattggatggccctaaggcgtggagtaagagcggacactccgcacgtgtcctcctgtcgtcggggacgatgtctgtcccggggagaggagttgtgattgtggttcctcgaccgtccccgagtggtaccgccagttgaggccgttgccgactcagtcctggtggcctgactctgagtcgggatgccatgatcccggtcgtactcctcccgacggtgaatctcgttctcatgccgccgttcgcgtgaagcattgatggagcttcgcgcgtctcggcgactgttgatggcgtgtcatagatcgttcggcgggtgagcgagtggtagaagatggttggctgcctgggtgaacaggcgtcggtaccctcggcgtcgggagttcgaggaagttcgtcagctatccgagctagtacccctccgacttcactcggcgtgttcatagctcgggcgaagtcgggattcaggttgcgcccgaagaatggattctcccggcgttgccttgcgtcttgctcggcctgttcctgagcccgccggcgatcacatcgtcgggagttccttcgttctctgaagacgcgttcttccggagtttctcctatctccgagacctcgtctcgcgagacaggctgctccggatcccgttctccggccgcgtgatgtcgtcgaacgttcctgcgccggttcctccgtcggcgggattctcgttgaggcggttcttctccgggcgcggtcggttcgtcatcagagacggtgggcgactccactctcccgatgaagaggacgtcggggtagaatggtgctgctgtcgtggcgactttctttccgttctcctttgaggccggaggaacggaaagaacgacttgcttttccctggtctccttcctcgtgatccgtgtccattcttttgtcgaggaagtagacaacggagtcttccgggtcagcgagccctcgacccccgactttccggagacgatctttttccgaagagctggaggttgcacctctccggcatttttggagttcgttggaggagacttctttttcggcggatccgcgatacggtgtagaattccctcttcgtccgctacagatgagattgtcccaaagcagaatacggatccgggacgcatggtgatcttgctgttgaaggtgacggccattgagctagcttggatcgtcgacacaccccctacctggcgcgccagctgtcggtgttttgggtccgaccgcacacccggggttgcccctcaaggtgtttcttggagtaggacggtgtcgacgactgtagcaaaatggttcgtgccgatcgcacgagggacagtggacaagatttacaggttcgggccgcttagagatgcgtaacaccctacgtcctggtgagtatgtgagcgtggttacaagagggctctctggactgaagacacagagagttgatgtgggtggctaagtaagatagggttgatcgttctgaaggggtgccccctaggccttatatactcgaccgtggggcagtacacgtggatatgataacaacaagtagctaaaaggtagtgaacctcttgagtttatccctacgtaaccctcgccgacttatcctcgcatggctccgttgcatgggggcttcagcgcgggaaagtcgggtctctgttgcgatttactcgctcgacgttgtgggccatccgggtttgcaccaatccggtatcacatcgctctgctttgttggttgtttctccccaggcccacgaaagaatgaccttacgatttattgggcccttgggcctttcgtgaggtcttttactcctttagtgaacccgagggatatctatcccccacagttgtagatccgaggcttgagtccttgtagaatcatgccgttggcatgttctacctgcccattcgtcatggggtgagccacggcggcccagtccacccagatgtggtgatcctcgtagaagtccaggaacttcctgccggtgaactgggtgccgttgtcggtgatgatggagttcgggaccccaaagcgatggatgatgttggtgaagaatgccaccgcctgttcggacctgatgctgtttaggggtcggacctcgatccacttggagaatttgtcgatggcgaccaacaggtgcgtgtagcccccaggtgccttctacaaggggccgactaggtccagaccccacacagcaaatggccaggtgatgggtatggtctgcagggcctgagcgggtaggcgggtctgccttgcgtagagctgacacccttcgcaggtgcggacaattctagtggcgtcggccaccgccgtcggccagtagaaaccttgtcggaaggcgtttccaacaagggttcgaggtgctgcgtgatggccgcaagcccccgagtgtatctcttgtaagagctcctgaccttcggcgatggaaatgcatcgctggaggatgcccgaggggctgcggtggtagagctcctttccatctccgagcaagacgaatgacttggcgcgccgcgccaaccgccgagcttcggcttggtcgaggggtagctctcctcggtggagatattgcaggtatggggtctgctagtttcgattaggcatgaccccgctccgctcctcatcgacgcgcagtgcctcaccctcgagggccgagggtgcctcgggccgagccgagggtacctcagaccgagccgagggtacctcggaccgagccgagggtgcctcgggctgggccgaggccttctcgagctcgggcgtgtcgtcgatcttgacggagggttggtgcaggtctcgggagaagacgtctgggggaaccgttgttcgccccgaggctattttagccagcttgtccgcagtctcgttgtagcatcgggcgatgtggttgagctcgagcccgtagaacttgtcttccaggcgccgaacctcatcgcagtaggcttccatctttgggtcgcggcagtgggagttcttcatgacttggtcgatgacgagctgcgagtcaccgcgagcgtcgaggcatcggacccctagctcgatggcgatgcgcaacccgttgaccagagcctcgtactcggccacattgttggatgccgggaaatggaggcgtagcacatagcataggtgcttcccgaggggcgagatgaagagcaggcctgcgcctgctcctgtcttcatcagcgacccgtcgaagaacatggtccagagttccggttggatcagagctgttgggagctgggtgtcgacccattcagccacgaagtccgccaagacctgggacttgatggccttccgaggggcgaacgagatcgtttcgcccatgatttccaccgcccactttgcaattctacccgaggcctctcggcactggatgatctcccccagggggaaggatgacaccacagttaccggatgagactcgaagtagtgtcgcaacttccgccgcgtcaggatcaccgcatacagtagcttctgaatttgtgggtagcggatcttggtctcggacagtacctcgttgatgaagtagactagcctctggacgggcaatgtatgcccctcttctcgcctcttaactacgatcgcggtgctaatcacctgagtggtcgcggcgacgtagatcaagagggcttctccggcagcgggaggcaccaagatgggcgcgtttgtgaggagcgccttcaggttcccaaggtccaagtgaagcactcggccttccttaagaggcggtacagaggcagacctctttcgccgaggcgcgagatgaaacggctcagagccgcaaggcatcccgtgacactctgtacgcctttcaagtccttgatgggccccatgctggtgatggccgcgatcttctccgggttggcctcgatgccccgctcggagacgatgaaccccaagagcatgccttggggaaccccgaagacacacttctcgggattgagcttcacgcctttcgccttgagacatcggaatgtcacttcaaggtcggaaaggaggtcggaggctttcctcgtcttgactacgatgtcatcaacgtaagcctcgaccgtttgaccaatgtgttcgccgaacacatggttcatgcaccgttggtacgttgcacccgcattcctcaaaccaaacggcatggtgacatagcagtacatgccgaagggtgtgatgaaagaagtcgcgagctagtcggactctttcatcttaatttggtgataccctgagtagtcatcaaggaaagacagggtttcgcacccagcagtggaatccacgatttggtcgatgcgaggcagagggtagggaactttcggacatgctttgtttagaccagtgtagtctacacacatccgccatttccctcctttctttttcacaagcacagggttggcaagccattcgggatggaatacctctttgatgaaccctgccgccattagcttgtggatctcctcgcctatggccctgcgcttttcttcgtcgaatcgacgcagaggctgcttcacgggtcgggctctagctcggatatccagcgagtgctcgacgacatccctcggtatgccgggcatgtccgagggactccacgcgaaaacgtcggcgtttgcgcggagaaagtcgacgagcactgcttcctatttgggatcgagctcggagccgatccggatctgcttggacgcgtcactgctggggtcgaggggacggatttaaccgtctccgctggctcgaagttgccggcgtggcgtttcacatctggcacctccttagagaggctctccaggtcggcgatgagggcctcggattcggtgagggcctcggcgtactccacgcactccacgtcgcattcgtacgcgtgtcggtacgtggggctgacggtgatgaccccgttggggcccggcatcttgagcttgaggtaggtgtagttggggacggccatgaactttgcgtagcatggcctccccagtactgcgtggtaggttcctcggaacccgaccacctcggaacgtgagggtctcccttcggaagttggagggcgtcccaaagcagacaggaagatcgagttgtccgaggggctggacgcgcttcccgggaatgatcccgtggaaaggcgcagcgcctgcccggaccgaggacagatcaacacgcaggagcccgagggtctcggcgtagatgatgttgaggctgctgcctccgtccatgaggaccttggtgagcctgacgtcgccgatgacggggtcgacaacgagtgggtattttcccgggctcggcacgcggtcggggtggtcggcttggtcgaaggtgatgggcttgtcggaccagtctaggtagactggcgccgccacctttaccgaacagacctcccgacgctcttgcttgcggtgccgagccgaggcgttcgccacttgcccaccgtagatcatgaagcagtcgcggaccttggggaactctccagcctggtgatcttccttcttatcgtcgttgcgagccctgccaccctccgcgggtggcccggccttgtgaaagtggcgccgaagcatggcacactcctcaagggtgtgcttgacgggcccctgatgataggggcacgactccttgagcatcttgtcgaagaggttggcacctccgagaggtttccgagggttcttgtactcggcggcggtgacaaggtccgcgtcggcggcgtcgcgtttcgcttgcgacttcttcttgcctttcctcttggcgctgcgctgagttgacgcctcggggacatcttcgggtgggcggccctggggctgcttgtccttccggaagatagcctcaaccgcctcctggccagaggcgaacttggtggcgatgtccatcagctcgctcgccctggtgggggtcttgcgacctagcttgctcaccaggtcgcggcaggtggtgccggcgaggaacgcgccgatgacatccgaatcggtgatgttgggcagctcggtgcgctgcttcgagaatcgccggatgtagtcccggagagactctcccggctgctggcggcagcttcggagatcccaggaatttccagggcgcacatacgtgccctggaaattgccggcgaaggcttggaccaggtcgtcccagttggagatctgccccggaggcaggtgctccaaccaagcccgagcggtatcggagaggaacaaggggaggttgcggatgatgaggttgtcatcgtctgttccacccagttggcaggccagccggtagtccacgagccacagttccggtctcgtctcccccgagtactttgtgatagtagtcggggtttggaaccgggtcgggaacggcgcccgtcgtatggcgcggctgaaagcctgcggaccgggtggttcgggcgaggggcaccgatcctccccgctatcgtagcgtcccccacgcctggggtggtagcctcggcgcaccctctcgtcgaggtgggcccgacggttgcggtgatggtgctcgttgccgaggcgacccggggccgcaggcgctgtgttgcgcgtgcggttggtgtggaccgaggcttcccgcatgaatcgggaagtcgcagcgcgatgttccgaggggtacccctgccttcgggaggcagagctttcggcccgtcggaccgtggcgtcctccaggagattcttgagctctccctggatacgccgcccctcggtggttgatggctccggcatcgcgcggagaagcattgccgctggagccaggttctggccgaccccactggaagtgggtggcggccttaccctgacatcgtcggcgatgtggtgctggaagctctggaggagatgacacacttttccggccggaggttggcccgcccattcctgcccgatgtcccggcggatcggctcaagtgttcctgctccctcgtcgagcctggcctgcacctcgcggatttgctcgagctgtgggtcatgaccccccgccgggacggggaccacagctagctctcaaaggatgtcaacgcgaggcacaggcctagggagatcatcgttctccggcataccaagatggttgccttcgttgggaccccctaggtcgacgtggaaacattcacgacttgggccgcagtcctcgtcgccgaggctgcggctaccgtcggaacagtcggaaaggcagtagtcgcacgcggtcataaagtcccgcatggcactggggttaccaagtccggagaaatcctaacagaagtcgggcttgtcatcttcctcggaccccgagggcccgtaggttgagacggccgtcagccggtcccagggtgaccgcatacgataccccagagggtttggactcgcctctacgagagcgtccaccaaagcgaagtcgcttggcgggtcgaggctgaatccaaaaggtgtgagatgggaatcggttggtacctcttggtcgacgggcggtgacgaagtcacgtcagagactgactgcaccgtcgtctcaggtacgagggtgacgcccaacaagtccttcacgagcgtgctggcatcgtccgtttacttggggttggcgtgttgcggggagacggcgctcgtcttcgtctcaggcgcgaggtcgatgcccgacgtgccccccgttggggcgccggcgctgtcgactcgctcgacagccgacgaggtgccgcctcctgcttggccttggttgccccgcctcctcgtccatcggcgggggaggggacggggcgagctcgaatgttgttcttccactacgcggggaaggcgtcgtcgattccgccgccggcgggcgggttgtcggccgccattgtcgctgtcgcacggcgggggaaggagtatcatgtcgtagctgccgtcgagggacatgaactcaagactcccgaaacggagcaccgtcccgggctggaaaggttgctggagactgcccatctggagcttgacgggaagctgttcgtcaacacgcagcaggcccctacctggcgcgccaactgtcggcgtttcgaacccggggggtccctggaccgacgagtaaattatcgccgcgtgccccagcccagatgggtcggcgcgagacagagcacgaaggggggaagaagccggagggagacatgcatgagaggtgaaatcccgcggccttcgtgtttgtcccgcgcccaggccgggtgcgcttgcattagggggttacaagcgtccacgcgggagggagcgagaggcctcacgcgagcgtcgtcccgtccttccccgcgcggctaaccctcgtaagagggccctggatcttccttttataggcgcaaggaaaggatccaggtgtacaatgggggtgtagcagtgtgctaacgtgtctagcggaggagagctagcgccctaagtacatgccatcgtggcagccggagaggttttggcacccggttcgtgtgatgtcgtggccgtcggaggagcgccggagcctagcggaaggacagctgtcggggctgtcgagtcgttgctgacgtcctcttgcttccgtaagggggctgagagccgccgtcgtcatagagcgtgcggggcgccatcattacccatatagtggagcgagccagatgggacgccggtcttgttccccgtagcctgagtcagcctggggcagggtaatgatggcgcctcctgttgacgtggtcggtccgtgccctgggttaggcgaggtggaggctcctccgaggtcgagatcgagtctgtcttccaagggcggaggtcgaatccgagcccctgggtcgggcgagggcggagaccgtcggctgatgccaggggctgagtccgagccctggggtcgggcgaagctgagttcgtcgtccttcggggctgagcccgagtccgagccctgggggtcaggcgaagcggagttcgtcgtcttccggggctgagcccgagtccgagccctggggtcgggcgaagcggagttcgtcgtcttccggggctgagcccgagtccgagccctggggtcggccgaagcggagttcgtcgtcttccggggctaagcccgagtccgagccctggggtcgggcgaagcggagtttcccatggcgcctagggccggacatggctgctgtcagcctcactctgtcgagtggcacaacagtcagagcggcgcaggcggcgctgtcctcttgtcaggccggtcagtggagcggcgaagtgactacggtcacttcggctctgtcaactggagggcgcgcgtcaggataaaggtgtcaggccacctttgcattaaatgcccctgcgatttggtcggttggcgtggcgatttggccaaggttgcttcttggtgaagactgggcctcgggcgagccaaaggtgtgtccgttgctggagggggtcctcgggcgagacgtagatcctccgaggtcggctgcccttgcctgaggctgggctcgggcgaggcgtgatcgcgtcccttgaatggaccgatccctgacttagtcgcacccatcaggcctttacagctttgtgctgatgggggttaccagctgagatttaggagtcttgagggtacccctaattatggtccccgacaatcaccacctcattcctcatagttagttagttagtactaatatgaggaatggggtcatcccaccaaatttgaggaatgaacccatgatgcaccacctcaatttggatgtagtgatttcttaaaccaaacaccctctaatttgagagcaaaaaataaaaaaaatataaaatcaacaacaatttcaacaatgatataatcacaatattatgacaacaacagaaattttagaattacacacattcaacaaaaaatatcacatttcaccataattcctcacaaatacatcacagtccaccaaaataccttacaaatccattacaatctaccacaaactcacgattccattacaaatataatccatcacattgatcaaattcaccacaagagttaagtcatcacatatgggggttgtttgagttgtgatcactacctccagaagcgaaaagttgtttacaaagttgtctatctggtttggagtctgaaagaaagaagacattaataactatagtgttaagttgaccactattcaaacgaattgtttgtcaaactaacctttttttagtagctccctccctctagaagctcctcctagtgatggtatcaccggtggtggcgtgttgtggcccataaccccggatttctacaaaatcaagttaagtcaagattggaaaggttaatacaaacgacgacgacgacgagctcatgggcgggcgaggggcaagagagaaaggggcgcgcgttcgacaaagccaggggcgcgcggtcgagcacagagaaagggataaaaggattttaaaacgttaattttcggcggccttaggttggctgtcaaaataacgattattttcgatggttgtgtcgacgttgaaaataaggctattttcggcggcagttgcagactagtgaaaataaccattattttcggtggccaggacctgaccgccgaaaatagccctagccaccgaaaatgcttattgttgttgttgtgtcaaatatcatgttgtagcaaccta

SEQ ID NO: 279 - DNA, 19408 bp, Zea mays
  Intron number 1 from transcript GRMZM2G178681_T02 (locus G RMZM2G178681) derived from phytozome v7.0 (chr-ID 2; pos 2 7872041 to 27891448 reverse strand)
gtccgcatcggctgggacgcagccaacgtatccgcgtacgactccttcctctccactctcgttcggggcggcctgttggacgaggccttcaaatttctgcaggtgatgcggagcaagggctgcttgccggggatcaattttttttctacagctgtggatctggtcgtccgcaagggtgactacctcaacgccgtagccatctggcacatgatggtctctgaagccggcctcgttcccaatttctcaatgtacagcgccatgattggcctccactgcaatgctggtagcatagacgatgctcttgggttgcttgatgaaatgcccctcaacggcgtctttgcaaattctgtcacatacaacaccatactggaaggattcatcaagcatcgcaaggctcgtgaggctgaaagtttcctaacggagatgagcaagaatgagcaactgcctactgcatccaattgcgctgctgctatcagcttgttctttaaggagtttaacccatctgcagcaatcgacgtgtggcgctgtattgtggagcacaacattaccccagctgaggactctgccaaagagctaatagcagggctgcttgaatttggcaggtttactgaggtgacgaagcgtgctgatgagatgattgacatgagagttgagttgtcacggtccacaatggagaatatgaagcgtggttttgctaaggctggcaggcaccaatcatatgacaacattgcaagaaggctaaagcgatattagctgcacatgaatgctttaatcagctggtatgttttccttccatatgggtgtaattgattgtgtacttcagtaccactgtttgtatgtgattgctgatcatttgcttgtgtcactcacttcctaattatgcactgtgacatttgttttttgaactaccaagtggtagtattaactattaagttcttgtatgtgtcaagttttggttggtgttactctccttgtcttggtaaatagggccctttaacacaatgcaagacctatagaaaggactgtaatatgttaacatatttttttgattgcctcacacctctttctttgccaagccattgaatgtttattcctttttccattaccatttatggaatgtcgaatcagtttgcacccaaaccttttgaggaacttgaataaagagagaactcacatttgattcactgaatgtagcttgttccctcgcctttgatctaatgactccatggttatgtccttgttctaggcttttccgtttttcctcttataactatcataagctatcttggtcttaccaaaatttcttacaagtcaagcgatcttgatattttgattacctcgcaaggcaagcgattcatgatctaattcaattctttgagaagaaaacctaagaacctacaatatggactggacaacaactttgagaagaaaaaaggcaaatagaaggtgggaagatacacatacatgagcaaatgtactccaactgtgatcacagtcagaagtcgaacaagaaaggctcacaattatctttgctagacattggagctcgaatgtattagcaccatatgatccccatcagttaactgcatgtattaccaccatatactccaaaatagccagataatacttataagcagagactggtgataggggaagtctaaaaatcacaacgtattaactgaaaaattctagcagccctagaggaggacgcatgagggcttgtccgattagaggtggattgaaggggattagagaggattaaatttcttcatagtcaaaattgaatagaaagagatttaatccccttcaatcccctccaatccagatgcaatcgaacaaagcctgaaagggaagactgacatgctggcctaactgacaagcatggcacaaaggagtggtagcacttttagtacaggaaataacacaagactgtgctaggtgagataaggcgatgtgatcgggggtgcccaagacgctggtgccacaaggacgaagtggacacatggagtgtagaagtaggaagccacagaggctagagggtatgtgcgatgaatatgcagaccaagcgtgaggaagcgctcattgaggccttggacaatgttgaggacgagggtcctgttagagacaggctcgccaaggtcgcgaaggtcctcgacaagcttcttatagcgatgacaatattcagcgacgagaaggtcgccctaggagaaagagcggaactcttggtcgacgtaaagggcatgggtggtgcggttccctaggaattgggacttcatggagatccacataatgcgggtagtggcgccacgctaggagcctggaacactgtgtcgacgaattcgttggagatggtgccgaggaatcaggtgcggacaatgacgtccatgtgtacccaatcatgcgaggcaggagcgacgatgctggggaggaaatggtgttccaaggagaacttggtgagggtgagaaggaatgtgtcataccatcgagcgtagaacgtggagttgatgtcgaggaggagcaacatgaggacgcggatgttcaacatggtgacgacttgtgcatgcagatcgaacagggttgtgaccccttgttgtcgaacggcggcgttcagggacgaaacaagggcctcgttgtcaggatcgccattggaggcgacattgccctttgggaggggcaccgctggcaacatgttctagggtcgcgctcgcgcgcatgcgagcgtcggccgtgtcgctttcctgatgggaaagggctgcctctcgatcagcatcgggagcacaagccaaggcgtcatcgcggacaacttgggccaggcgctcgcgttcctaggcagcatcgacattgtcgaggacgtcggtgtcctgaggaagctcggggtcgacggatcatagtcacaagaaacaggtacagtggtagcgacctccgacctggatacacgtggtcatttttgtttccaccatgtaaaagtctctcacaggcagcgtaccacgttcatcgaccctatcggttcgggaactttgtgactatgcgacaaattcgatgccggatacgacgtgaggcgacgacggaagaccgacagccatggagcggcgccggaacggggcttgctggagcggaagcgtcagacaggtataaaaacctagactcgtgatactatgaaagtaatgtagatttggaggaatagtagattgattgagagacaatacatatacatatatgggtggaggacgtgaggcaaaaggaaacctcctgaatctaatgagccagtaggatcctacgtcctacccaatcttgcagggcctggactcctccccccaaatctctctaaccaactataccagaccggtcggttggaagctaggctccaagccgcacaatacacgacaacatataactgtctaacaatcaccaaacccccaacaatatattgtttgaacgttttgattcttgtagggacaactttttggcaaaaatacattgaaccaatctgtctagaatccataattccatcccgagtctgaagatcgagcctttctcttaagatccttagccatctcaagcatttctagggataatgcagaatttgctttctcttttatgtaagaactagttgaagttgcaacattagatgaagttgttgcaactgattcacatgtggcttgaattgtgccatcgcgctggggcaacacaaattctaaaaagatcgattctatgtcattacgtcgggtcctatccctatctgtagcggcataataagcaaaggaggaccagacttagcaatggaccaatggtagaacaagcaatggaactagtatacaacagagaaggatcaaggatcctaagagaaggatgagaacaaagaaggtgaggattactgtctgaagaggtgcttattttctaggaggcaggcgacacaaccacgcagggacgacaattggaggcgagtggcataggggtggcggtaggcggagggcgccgtactggagccgacgataggaggcactagagctgacaacaacaacatcctggatacggcgagactagggtggggaccacaatgtaaagataaataaaaagaacccttacccattgcgtccaacaaaaaaaagactagcggttcaggctagaaactggcccaaaaacttgcaattagtcggttaaactcttaatcagacgactaatcatgattaactgatgattagttgaatgatcataattctagtcgccctagtcgtacaccctaattgaacttacaatggggataaggccgacttatcgtaactaatcatgatgacctctattttcttcatttctcttgcacaattcaaccataaatattttagattcgtagatttgatccatagttgttaaggcaacaaggcgaggtaaggcgaccgtcctcctttttacctttaaaacgataaggggtaaggcaaggcgaaaccttagtaatatataaaaatagaaattataggaatatagtctcaaatagagggataatagtactatagcaactaatagtattatagcgatagcaatgagaagagaaagaggaagactgaagttgacatgggaaaagacaattttaggagacttgaaacgatgtgatatacccaaagatttagccttgaataggagttcatggagaacaactatccatatgatcgaaccttgatttttgggttttgttgggtttttaactctagcctactccaatttgtttgggactaaaaggttttgttattgttgttgttgtgtgtcgtgcttgtcagcttggtcgtcatgacctcaaacaatcaaagccacttaccattttgttttgatgcaaactcaatcataagggccacacaagtactagcagtaaaatcattattggtctggtgtatattcaaagtggtgcatcgttattggtctggtgtatattcaaagtactagcagtaaaatcattatttgtctggtgcatattcaaagtactagcagtaaaatcattattggtttgatgcatgggcaatccttaaacttttcacattatgccatctaggctgcattccctagcatttattcttttcaagtgctgcatcactagttcatacccccttgacatggggcctagcgtcggcctaacatgctaactaggtttgtcgcatgaggcatctgagcatagaacaaaaagtgctcttcgtcctttgctttacaatgcgagggaggatgatgaatgagagcccaccacaagtgagaccttgttcatgcgctagttgagagttgtctcgtggagaccaatcaacatgccattttagaactactgcctacatggagggtatggtcctatagtgcatctactaaaaagattagggacactagaatgcactttcattgtcggtggacctaaatgacacatttaagggctacttatgtatttttctcttttctctaaatgggtatttagagaaccttgatgaagataagcggcatatatggtgaaatatgaggcataacaagcaccaagcaatattcaacacaaggcacatatgtacttgacataacgtagtcattagatgcaaggttgaggctcagatctgatcagggatcaatcttagatggtttgcctgaaacaatgtcatcatggcttgggcaaaaagcgagaaagagagagggagtagcttgaccaactcttgttggctatcatggttgttgatagctgaagttgacatggttgccatcattagtgtggagtaagaagcaagaaaagacacgagggagggatgaaaggttgtgcgagtggttgaagcaaaggaggacgacaaggcaagagaggcagcactagggttgaaagaggtgacatggtgctagcatgtagtgaggaaagacatgctcaaccaaagaggagttgaaaggagatgacatgaagaacaaaggttatgctcgttgaagttgattgactatttttccatcttccaatggctctaattctcattttccattttgttttgatttaggggtttctcatctcttctccattagattttgatcatataattgttatctagctttatttgtgaaaaggatattcatgcttaattaattttttctatcggtttagtgagtcatgtttagggatggcaatgggtcgtgttcgggtcgagcaaaaacctgcccacgatcgcacctgaacccgtcgggttttcgggtcacccgcgggttttacttattgtacacttttaaacaatagttttgctataagcaattaagtagcagcaataattgagttacatgtacgaagtttaagcattttcacgttgaacaacaaaacatttcatgaatcattagccaagttacttatttaaaataattactactgtatcttaatcatttttgtgcaaaacaaataatgaaccaaatttcaggtcgggtgcgggtcacccacgtgttgaaatagaaacccgcacccacacccacacccgcgaaacttcgggtcgggtgcgggtgcacccttgggtcaaaatcttcactcatactcgtgttttggattcgcgggttaaaatttgtgatatcctggccccagtggatagtgatatcctggcccaaggcttaatagaattaatagagtattcataccaacaaggtgcatcttcttttttggaagcctatctcggaagaacctccaaattagaggtcgtaaggacattatatcctgccccagtggatagtgcatcttcttcaatatgaggtcgtaaggacattatatatacaccgatacatgagggtaaatatgcactaaataaaatttggtcggtgggggaaagaccgtccccaccacgatatttcactaagaagaggacaattagagctcagccgagaaaagcacgaaagatgcccccctcatacatggggatgctgtgctttgaggcctaacacacacgaccaaccccttacatgagggcccgcccactgtaggtcggttcacccatgccgacaaggaaactagcaagtgactttttttaatcttagcctgaaatccgctcccacggatagttgaacccaagacctaaggagtgctattgagaccatctaaccaactcagctagagactccttcgcaggtaaatttgcattaagccccttctacaatgtggaaatatagaaaacataaatatacatctaacaccctctctcaaactcaaggtggatcaaccacactgagtttggacaattagaactgatgctgagctctggtctatgctttggtgaagaaatcagctaattgaagctctaaagacacataacaaagatcaatgacatcatattgaactgtgctcgtgtataataagcatcgacaccaatatgcttagtaagctcatgctttaccggttcacgagcaatactgatagcacttttattgtcagacaaaaggggagtcgatgtagacacagaaacatcaaaatcagccagcaaccatcgtagtcaagtcacttatgcggtcgcaagagccatagcacgctgcacgcaactcaacttatgtactctaactgaaaactactaatttcttcttagtctttgaagcaatgagggaaccactaagaaaaaatacaataggtagaaacagattgacaatctgaggaatcactagcccaagtcgcatcacagtaggcatgagagctagatatcgagtcagctcagctcggttcgaccgagcttgagctggctcgtttagcacgtgagtcacaacaaaaaacaatatgcatatatagacaacaatataatcaattgttaattaattatgcactaatttaacactagaaatagagtaatagtactcataatttcatgatcacatcaattcaactccaaatcaacaaatcatcacttattagttcattcaactcaagtgaaggcttcattttgctgacaaatgctagcttgttcgagctaacgagctggctcgagctcgtcttgagctgactcgttaacaattcgagctgagatactagctcagctcatgacaaaattgaaacgagccgagttgagctaactacgagccgagcgaactgacaagccacgattattttgtccagcccttgaagctgcaaggatctagagcgaggaaagaacataatcgagaaatagttccacgccgataacgtagaacacggagatgatgtagcgaagctgagtgggggcagatacaaactgactcagaatatgcatagaatacgagatatcaggacgagtgacaccaatatagatcagactaccaacaatgtgacaatagcaagtaggatctgaaagaggctcaccatcagtggcatgaaggcaaacgttgagctccataggagtcttaaaaataaggtgatcattaagagaagtccttttaggaaacctcaatcccaagaaaatactaaggaggaccaagatcagacataagaaactgcttactaagacatgccttcacaaaggcaatatactgaggatcatcccctgtaataattatgtcatcaacataattaaggagaagagtcctaccacgagatgatgtgtgcacaaacaaagcaggatattgagtactggcagaaaaaccaccaatagtgatcatagaagcaaatgttgaaaccaagcctgaggagcctgcttgaggccataaagggaacgacgaaggtgacaaaccatgcccataggaacagaatacctaggtggtggctgcatataaacctcctcatgcaacttgacatcaaactcagagatggaccactcacgattagaagccacaagatgggtgtgaacaatgttcatgtgagcaacaggagcaaaagtctcatcataatcgcgcccatgctcatgctggaaaccacgggcaacaagatgagccttataacactcaagagaaccatcagagcagatcctatccttatagacgcacatcataatcatgcccatgttcctgccggaaaccacaaccaacaagacaagccttacgctcaagagaaccattagagcgggtcttaaccttatagacccacttacatgtgataggctgtacatgaggggatgatgaataatcaaccaagtgccagtacgctcaagagcaacaatctccctgacattgcaagttgccattcaatatgaagaataacatcatgatagggagtcggctcagaaagagcagttctaacaaaaccctgccatgtaacagggccaaaactaagcgatctataggttgacgagtacgaagaccatgtcgtgtaatcaactcgggagagctatcactagaagaagacaacctagccggagaagatgaatcagcgggagaggctgaaacatcaagagaagagggcacatcagtggaagccaatggggaagtagtcaaaggacaatgtcatgtatagacgtgtgtcacaggaggcttgacaatgtagtcgggaattataacagaagtctctgaagaaatatatatgggcatatgaggaggaacatgaggtggtaggcgggagagcaacacacatgctagcagagtcagcgataaacatgacagatagaggatcatcaaagatgcagaggaaacaacaatagaaggacaaggatagaaaggatgtcagtaaagacaacatcccgagaaatccgcattcgatgagcaactggatcccaacaacgatagcccttatgctcaacattgtacgaaagaagacatactcagctgactgcacagtcaacttatagcgctcatgatctgcaagaagcacataacacacaataaaaaagacgaagcctagagtaattaggcatcttgctacaaaggcgcgctcaaaaggaatgccaacttgaagagccgaagaaggctgaattttggtcaaataagcggtagtagagacaaccttggcccagaagtgagggaaacaaaagaagcaagcatgggagcacgagtagtctcaagaagatgatgatgctggcgctcaacaacatgagcaccagaacaagaaaactgagcaagcatacagtgcgcaacaagaacattacgaagagacccagaaagttattcttctgcagaatcagcacgaaagacacgaatggatgtgtcgaattgagtgctaaccataacacagaaaatcctatagatggataaagcctcactacgtttttttcataaaataaatccatgtatggcgagaaaaatcatatatgaaaaccatacaatattgatgacccccttttgaagcaaagggagtcgagccccatgcattagagtggacaagattaaaaggacactcagacacagactcagtagaacgataacgaagctgaatctgcttgcctaatcgacaatcctgacactaagctaagaactcattacctgaaaccgaacctaggagaccacgacgaatcaatgtactcaaacaagagccacaaatatgacatagacgatgatgccattgagcaaaagacgacatggacaaagcagctaacacagaactgccaaaactgggaggtgcagcggaaggaagatgaagctagtcaagcttccaaaggcgccgagggtgacgacggtgagggccagtaccaaccaggtgacccgcagtacgatcctgaacataacaagaatcaagataaaaaataacacaacaacaatgaccagcaagcagatcgatggacataagttgcatggtgacgaacataaccctattttattaaaattaaagtatttgaaaatttgaaataattgattttcaaaatttatggttggatttatgtcatacttgtactctaaacttttatatcaaagtgagggaaaatttgcaaacaattgataataagaggggcaatggtgcaagggtatgaacgtctttttatggtctgagttactgttatgtgcttataacaaaataggggcaagtagaggtttcgtttcaagaaaagaggggcaacgatgcaaagttcgaaaaacaagggtaaaaaatggagttagagtgtcatgtttaataattggcaaaggggaaccatcgtcaatatgaacaatgagagaatgagatggagcctgcatggaagaaagatggtgaaataaggtgtcacatgtaaagaagcactagaatcaagtatcgaaatatgtacctggagtgataggtggtccctcagtagaagattgagaggcagcagcagaatctgtcgaagctttagactgagttaccgagtcagcgactcccagtggtgtagacgtagcaagtcgacgaagtagcatgaacatctcctgggtagctgcaacaatagaactcttagaacctctagcagtggaactactagtagtatgtgaagaacgatgagcagactgatgattcttcttcctgtaacagaaagactccacatgtccatcccatccacaatgaagaccactaccctttccatgtgcaaaatgataaggtgatgaggacgacaacatcatcgagggggggcaataggctgggaaggcgaacacgaagaccgagcaaccaaaaccgaaatcgaagaaggcaacataccagctgtacgaatacggtcaagatgtcatatgtgcgacgaaactcaaggtcgatcttctaaccaaggcaaaattcacatgtgtaggagacatctgcggaccaagagtatcaagatgacgccagacaacaaacatttgacgatagaactcatcaacaaacattttacggtagaaatcatcctgtggtaagggctgctccttacaaatggcagcaagataagtagagtgaccattatgtttgtagcgatcacggagaagggtccacatgtgatgataattgtcatactcaatagactctacaacaaagatcctccatactagcagcgagaatagaaccggctcgagcatcctcatctagccatgttcgatatgcactatattgagcatcatatgttgccagttgaccataatctgcaagcagcgtctccttagactcaagaggacgtgagcatctgatagctggatggcctatgggtgttagttgcaagtggtgggtggtagattgttagcaggtcgattactggcaattagtcgatgcgcgccaggcgggcttgtcagtgggaggacagactcgagcaaaccgacgtcgtccgcggacgcgcgaacggatgtgaggcgcacacaactggaggtggcgacgcacgcacgagaagaggagacagcgtacacgcgtgcatgctcgagtggaacggagcaacacacgcacatgcaacttcttcgcaaggcgaatgacaaccacgagcgacaaaagattagagtgagtaagcaagtgcaaggtgcgtaggaaagattagagtgaaaaaggctaaccctaatttctcgcttcgataccatgttatgaatagcacttgtattcattatgaggccctaaggccagtgtatgtgcacctgtacatgagggtaaatatgcactaagccccttacacaatggggaaatacagaaaacataaatatacaagtaacaagtcattgtagtcactccaagtcatgcactagccctaaagaacaccacattcccaatcattaacaccacattttcggcggtgcatggccatgctcgttcttttttcttgccaacatggaggtgaacccgtgggacaagatttagttgcatgtgcatgggcaactttgtgattttgtcgaataacgtggagcacgaacctaatgtcccctaccctcttcggccttcatcttaagccttcgttttagtggctcgacttgtttttattttgtagtgtgtcgagctagcgttctagcttggttctctaatgagctagctcgggccagtttgcgagccagataaaccaagctaagccacaacacaacttcgtattgtcgtcggtgtgtccttgtctcatttttaccctctcatagttacgatctgtgatatggacatatgtagatgtgccatgtgatgaaattttgcattattgctgtattgcattattgcatggccacaaacctgcattgctattgaatatttgattattggttgcagttttgtgaacttgtggttgctagcagcatacaacattagtgttgtgcaataaaatgttacacatttgtgaaatggatgatggattgctctacaatgatgcttgttgctatcttgttataataagggtttgtaaatttgtactctaatgcatacttggttgtttgatttaatgttggaagttagagtctaggatgatagtacgacaataatgttatagtgattttgtatttgcagtgttaaacactttaactatgattgtattttgtgttatatatatttctttatatggatctgtgtttagttggtgtggcttgcaagcctatagagctgctcgagctctttaacaagccgagcagagccagatgtttaacttgtttgtataacgagtcgagccgagctggctcattacagtaacgagccataaagagtcgagctgggttgatatccatcactaccccgcaagcacaactctattctgtacaaatgttgagactggaccgaaaccctttggtgaagatgtcggcgaactgcaaagtggccaggaagcgaagaacgcgaacattgctgtcaacgagactcacagacgaagtggaggttaatctccacatgcttcatacgctgatgctgcacaggattggtggagaggtagaccacgctctcgttgtcgcagtagacgagggtggcacacacgaggggctgcggagctcatgaagaagctgacggagccagtaagcttcgaccatgccattggccacaacgcgatactcggcctcaggagacagtgggagacaacgggctaccacttcgaggactaggagatgaggttggtgcccagggacacaacatagccagaggtttatcagcgtcggtgcagaccactcgttcagaagtcggagagggtcgaaggaggctgaagtcgattgagccacgaaagtagcgaagaatctacttgacaatggtgaggtggggctctcgcggggtgtgcatgtgaaggcacttctgctagaccgcataggcgatgtcgagcctggtgaagctgtgttactggagagccacagtgaggctcctataggtcgtcacgtcgttgacctaggaccttcgtcgtcggacaacttcacttgagtgtcaacagtcgtggagtaaggcttacagtcgaacatgtcagtccgctccaaaatgttgatggtgtattggcgatagtgaatgaagaggcccaggggtgtcgctccttggcgaccccgaggaagtggtgtagaggacccaggtccttcaccatgaactcacattgaagtgcgatgatcgtgcgctcgaggagggcgacactagacaccgtgagcacaatgtcgtcgacgtagaggagaggtagatggtgtcatcgccgcgctaatggatggactaggacgtgtttgacttggcctcgatgaagctgagggagaccaagtaggaggcaaaacgactgtaccaattctgcggcgcctgcttcaggccatacaaagaacggtttaacttacacaccatactcgtgcgagcggagtcgatgaagtcggtgggctggctacagtacatcgtctcggttagagtgccgtgaaggtggtggaccgctcagtcccggtagaggacgagggagaggattgttcgaacggtggcgagcttgacaactgggctaaaggtcttgtcgtagtctactctggggcgctgagtgaaaccccaaaggacccaacgatccttgtacgcatctagggagtcgtcggacttgagcttgtagcagaagatccacttgctggtgaccaactcggtgctaggaggacatgacaccaagtcctaggtgtggttggccagtgggccacattttcctccaaagcgtgatgccaatgggggtcagcgagcgcgacacttacagaggaggggacatatgagggagccagagtagcatcgtccgtgagcaccagtcggtcgataggtcggagaatatcggtcgatcgacatgtcaccattgggtggacgtggcgagggttgtggtggatagcgactggatggtgcaccgacagctcgtcacgggaacaggcggaggcactggccagctcagcagaggggacagagggattggattctacacgccgttggtagacgcgtgtgagatcgacaaagcgagccgaatgtggtcagggaggtgaggtcaaacgaggtgcgagcgggggtgacaggcctgcgtgtggtgcagttgaaggtgactgtgccgcatgtggcggaggcgatgaggcgtcacttggtgcagtcaaaggggaaggtgccgcacatggcgtgggagaggatggcgggaccgaggatgggagaagtgatggaaagatgatgagattgaaatcgaggagactcgaggtcgaggggtggggaggatccagcaagggggaagacatcaccaaaaacgacatgttgagagatgatgacgcggtgggtgagaaagtcaaggcatcggtacttcttgtggtcagagcactcgaggaaaagacagcgcgtggatcagggggaaagtttgtgaggagcactggtataggtgttgggatgacatgcacaaccaaagacgtggaggtgcgtataggaaggggcggtgccgaagaggatgaagaaaggagtgggatgattgacccaccttgaagggggaggcagttgagatgggtggtagtattcagcacctccacccaatagctagcagagagacacttggaagagaatgcaacatatcatgttggtggtggtgtgagtcttgcgtttggctcgaccgttcttaggaaaagagctggagatggtgttgtcgaactcgcgaccattgtcgcactggagagcacgaaccgaacgatcaaactgggtggagacccaaacaaaaaagtgcgaaagattgcgaaaagtatcagactgggtggagacccaaacaaaaaagtgccaaagaaaatgggaaaagtatgttagtgtggtgtcattgtgtcctatcgttataatgggccttggcccacctatctaattatatatcaatacatcccttacccaaatagggttagggtttttagtctatccacatggtatcagggctagggtctcttctctcatccccagccgccacctccctactccacctcactcatccaccgtcattagtaccgggcactcgggttagcccaaaaatgcaggtcgagttttttgggcttttcaaaattcttgtatctagaaatgatgcctcaaaataggtttcatgtattgcatacttgatatttcgggtacccgaaagtttcgggttcgggtagcccgttctacctaattttaaagagctggctcatggaaaactttggtgcaaaggttaccagaatcaccaccactgtagcttttggtcattggaaataacacatgccgacaaattaagaagaaagaactgagagcaaaaggatcgtattgttgctggtttcgacaatctaatagatacaagtagccttgtgaatttaacaggaaactctgaagactgaaccacggtaacaacaatacaacatgaccaattttgtttagggcgcagaacaacatcaccagttcaccaccatctctatctccatgcccaccctgaaacgatcatgtggaggcgcaccatagctacatgctacaatgggcaggcgagcatatataattatatatcaatcaacatgagtagcaaactgaggacatggtgaactggcgtggtgcctagtgcgcttagtgcgctgaacgactagagcccaaaggagaggagaacgacacggatggaccatgctccggagcctaaggccgaatagctagagtccgaggccgaacgacgactagatttcgtggcagtgggggcgcccgcaccggcacatcgttggtggcaggctgacgactcaggctccatccggtcttggcgtctagtcttggaatcgtggatgcctgtgtctggctgatcattggtctgtggacaccagaggtccatcgcttctcgctagggcactggagggccgtcggcgtggcctggctgaggcattaaagcctttacgttggtgggctgtgtcggaattaggaagtcttatagatctacatcaaaaataatttcgggcttaatgggtatttcgggtaccgtcgtgtgttacccgattaggcttgaattaaaatcgggtatttagttttgttactcgctggaaccatttgggtactgggtttcaggctaaacgggtatgggctcaggtattttgggttttgggcttcgggctcgggttttatgcctagtactagccgtcatcctctcaccttcggtggccgttctgtcggtccttgcccgctcatggaggtcctccccgctaacatctgctgcggacgcaacatcgctctcctctgctctgcgccaccctacccgcccgtggttgtctgctgttcgtcgcttagatcttccccatggctggaaccactggctcacagcccccgcctgtggtggacgtcgttggcaggccatcttcgtctgcttcgccaaccccacggtgggctccatccgtcctccgctcgtcgtccccatcccgccagcggacatcctcgccttcctcgcatggaccttcctcaggtagtatgacctcgcggttggtgtcgcttccttacctttcgccccggctagaccgctagagccagtccgcactctcgccgcaccctacagccgaccccgacgccacgctcaacttagcctccaccatgcacgcccctgctaaacatgtgctcccctctgctcgggccacgccactccttgctccgcctgtgccgcataccgtagtcctagctgtcggcctccactggtctctgatgcctaccccgtcgaggtgttcctctatcgcctcgtcgatgcggagcttgctgcggcatcggcactccctgcaccttcttgcctcggcttcctcgacgcccgtccttcgccatgtcgtggttcacgtgcctctctactgtgtgcatgtctcccttcacgatgaccagcttctctggagcacgttcgtggccttatatcaagtcatgaaacctgttctccgtgactgcatcgagctctaccacccctctcgcctccctccaccctcaggagggtcgccacactcttggaccgttcgtgttctgcagtgtcgagattgtctccataacgcttgaggccttgtcgtctccaccacccatgtccgtcatcagcatgctcactactgtcgaccctagcacccctctcgatggctctgtgggggtgccttcccttgctctcttctcgtatcccatgtcttcgcagcccagtcctcctaccgactttgttgttgactccgacgtctcgtaccacaccactcctaaccctagtattgtttctttaccccattctcttagccccaccttcccttctttcatcattgttggtaatgggtagactatgtctgtcacctcagtagatgacacggttcttcctggtcctttgtatctcaacaatatcctcgttgctctcaatatcattcagaatctttttggttcatcgcttcaccattgttaaccactgctctatggagttcaatccttgggggctcaccatacgccatcttaccactcgtgccgtgatcgcccgttgcgatagttccgaccccatatattctatccgccttcctgccccttctacatcttctcgtgttgccccagcctacgccatcgccgttgttgcctctggctccacttggtactgtcgtgttggccatcccggtcacaacatcctttccagactcccgagcacctctgacatcctctgcatctgtggcaatgctgccatgtctatcagcttgggcgccacgttcgcttacccttccccacttccacgtcccgcactgctcacccctttgacctcatccattgtgacctttgcacatcgctgatactgagccttgcctttctggttaccgatactatctggtcatcctagatgactaacttatctcactgacaccttcaaactctcctaagttcagttgtttttatttattgaatattaacgtcagcctgtaacctatgaaaacttggatggttagtattattgattatactgttaaaggtcatatggacattttctatctttgaactgtttttgttgtcttcaatttgctaagtaaaggtgcaatattagtttttttggtggcacctagaatggtgaatattctggattatgatgctaaaggttaacaaaacctttggtaaagccagctatttgttgtcttattttttacaagttaagaaatcaccaaacatttatttgaattagccattatttatacattccattgtaactattacatttgtcaattcatttgtttgacattaacatgtacagaaactttgcggctcacggggtagaagtttaacgcc

SEQ ID NO: 280 - DNA, 5168 bp, Zea mays
  Intron number 4 from transcript GRMZM2G137984_T01 (locus G RMZM2G137984) derived from phytozome v7.0 (chr-ID 2; pos 1 05776244 to 105781411 reverse strand)
aggtgtgtgcatttcgaatcttgcagttgtatataactcaagttggtctatggtttactggattgcagatgcgctgattgtaagaaaacatgacactatgtttaagctgttcgttttgacctattaggccgaggggctgagtatatatagggcagaatactgccatcatgacagggagtccaactatcttgactggctcctattctaactctgctatctttgggacagatcaaacttgatcctatcctatcttaactggctcctattctaactctgctatctttgggacagatcaaacttgatcctatcctatcttcaatcagagtcgcttaaggtcttcctctattaccaacagtgtggacccctaatctggtatggccgtagcttgatatacaagcacattctattctaacatcccctctcaatcataacttgcacaaattaagattgtctttaaatgaagccaacttttgcatagtcagtgccttggttaagccctttgcaacttgatcttttgtaactatgattctgaccttcaaaagtctaaaatgaaaatcgatctcaacatgcttcatataactatgaaacattggatttgctgtaagttaggttgcttcaacattatcacaccaaatccttttttttatcgagcgcaggagaactgcgctccataatatattaagaagagaggacaagggcctgaagaaagcccagaaacaaaaattctccttacggagaccacacacaggcatacacaaaaggatccataaacacactcaatactacaacagcctatatgctggcatgaaaaaaggatagacctttggttcccgcaaactcccaactttttctttcctcttctgtctgctcaaggagaagagaaaggtttggagcttcaccatcaaataccgctctatttcggtgtttccagatcatccaggctcccaggatgattagagagtccagtcctttgcaaattattccattaactccagcagaaaccctatcccaccaatccaaaaaggaagcagcaccaggttgtggagctaagctgtgtaaccgaaacctccttagcagcttataccagaactctctcgcaaaaacacaggacacaagcaggtgattcagatcctcaggctcttgatcgcataggagacaggccggaggatgattcaaacccctttttgccaatctatctgcagtccaacatgtgttctgggccaccagctatatgaagaagcgacacttgggtggtgcccaggatttccaaatcctttgatactgtgcaaaggcgcaagacctgaggaagaggctcttgtatgctgactttgcagaatgtacgccatcaggtgctggactgaaaatgtgcatatattcagaatctggttgtagctcaaaatcaaccagagagttccaaaggtgcaaataatctattaagactgacagtaagagcccctgtattgtctgccacccatctcttgttcagaagagcttcttgcacagttcttcttctagttattctctttgggattaaactaaacaaacttggagcaatatctgagacacttttcttgttaatccacctatctgtccagaacattgtgtttgccccatttcccacctcagtaatcagaactttagaaaagaaagatctagctttacttggaacctgaatgggaagacctgcccatgggtgccctgggtcagttttctgcaaccataaccatctcattcggagagcccaacaaaggtgtgggagactagagattcccaagcctcccaaattcaagggccggcacacctttccccaagcaaccaagcagtgacctccttttgcttcttttctacctctccataagaaccatttttttattttatcaattgcatctaaagcccatttgggggaatcaattgccattactgtataaacagccataccagtaaggacatgctgcactagaattcttctaccaaccttattcatcaaatcagctttccagtttgggagctggtcagctattttttctataatgggctggaaatgctgcttggatagtttatgcagggaaagagggagacccaaatatttgcaggcaaaggaagcaacctcacatggcagcctgctctgaacctctaaaataatctcttctgcacatctgattgggtacacgctagacttctgagcgtccttgcaataggaggacaagaaaccttcagcttttgtaaaagggactgcacccacatcaattctgcactggcgttagctatagttttatatttaagtttagtacttgaccttgtgggctgcttgcgagcacaccaagacaccaaattcttactaagatatactgcaaaacctcctatagagcgcctatcatcaatatcaccagctcaatctgcatcataaaagacactgactcacaagcataaaaggagactttacaatttttagactatgttcaagagtaaacttgacatatttgagaattctcttcacaatgctccaatgatgagtggcaggtgcatgcaaaaactgacacaccttattgactgacaactttaaatcaagtcgtgtcagagtcaagtactataagacacccacaatgctcctgtaccttgttgtatcttttggctctagcaactcttcaccaatcctcaattttggtttgcaattcagcattccaactctgccgagcaaatgtgaagcatacttcgtctgagacaaatgaatactatcatcaattgtctgaacctcaatgccacgaaagtagtgcagctgccctagatctttcaatgcaaaatgaacactcaagtctctgagcatagcatcaatagcatcttgtgaagagctagcaacaataatgtcatcaacataaaccaagagaaatatagtaacatcttccttgctgtaaaagaacagggaagtgtctgcctttgaagcctgaggaacatgcaagtcattactgagatgcaaggttttcaagggtattaataacatcatgaccaatgttggttgtgatgatctagtccgtgcccttgtatttgttctagaccgtcagcttgtccagattagacgtgatgtgataagtcgcaaccatgttgatgtatcagttcgtgtcgacaccatagccatgcgtggccgcagcaatagtcttggtgtcgaaggagtagctttcatcgaagttgtaccagcaatctagggcaacatgccctactttgccatagacttggaagatcttgttagtgcgtcgggcttgtgggcgtccattagacgaggagaaaggcacaccttgatggccacgaccaccaggaggaccaccacgccctctacctcggccacggttatggtcacagttgttgcctctgtgcccttgaccaacaacataagcagaagcttgatgatctccacgaagtagatccatattagtgtgaaagctgagaagttggcaggtggcttcagctgcgatgatttgctcaacataggccaccagagcagagaccaccgggttgcactcttcatcaagtatcgccaggatgttcgagacgagttcttcatctatgttcttctttgtagatgccatctcatatgtaagagacttcatcttgcttacatattctagtataatcatgttactttttctggttgttagggcgatcctcatgttcacagtccttgccctagactgcgatacatatgtctttggagcttaaaccacacctcttgggggttctcagtaggttgaaacttgactcatgacttctcgagccatgaaggtcatgaggaagccgaggacttgctgctcaagtgccatgtaacgggtatactttgaattgggttcccttgacaaatcgttgcctttcttgctgttgatcttctctcttggtggaacagccgagccatcgaggtaccctagagctgcccacccctgagtataggtagaacttgcgccttcgggccttccgcaacgcaaagttgttcttggtaacagattgccctaggaggggcgttggcacaacagagtttgaggtagacaccatggggacttgttgttgctgtcggctagggttctagagggctctgattaccatgtaagaaaacacgacaccaggtttaagttgttcatcttgacctattaagccaaggggggtcgagtatttataggccagaatactgccattggattacaacatgacagggagtccaacttgggtacaactaccttaattgactcctattctaactctactatctctgggacagatcaaacctgattgtgtcctatctttaatcagagtcagttaaggggtcttcctctattatagaacaatcatgtggacccctgatctgatatgactgtagtctgatatacaagcacattctattctagcactgatgtcttgtatttgccacaatattttatagtgatattattgtgtaaatagcctgtttgacactttgcatgtatcctctttaggttatattttaatatatttgccaattgaagttgagaatactgatgttgtatttagtgattctgtcagcatactatttttgttaaaatttattttgagaacaatagattcatgacatagcatgctttttaaaccatctcttgagaggttctttaaaatgggaaattgaactaaccaaaagttatttcttccttttcctacttatcttgtagttccttgagctgaaaggctaaagttttgtcttcaacatgtgcccagtagaagcaaataaaatcatgtggtattagatgatttccaatttttcatactacatcatttatcatacactataactaccatggacatttacaagtacttttgatcaatattatcaaatcgtctaatcaatcctagtcaccgtggcaccgatcagcctgacaaagcacaatttatcatgactaatcgtagtgcatagttgatcgccatggcaccgatcagcctgactaatcgcggttagtcgggcaacttgataacattgcttttgatgttttccaatgtgcaatgaactccaaacaatcacgtctactaaaaataaaaatctgttattgcttaacaatgccagtaacttctaatgtatcacactatggaactaatagatttgtgcccgccttttgttttattctctttcaatgtctttaccattgtactgcagggta

SEQ ID NO: 281 - DNA, 10225 bp, Zea mays
  Intron number 2 from transcript GRMZM2G492768_T01 (locus G RMZM2G492768) derived from phytozome v7.0 (chr-ID 2; pos 8 9370790 to 89381014 reverse strand)
tagtggttaaggcaagattccatacgcacattactaccgcattttagttggtacgcacatcatggaaggtagtcatcacgttgtttgattgattagatgcccccattaaattatggcccaatgtattttcagtttaacaatttgagccatgttattggttcgacaatgtgtagatgtttagaactacagtgtccatgccatatatgaattctgagatccgtagttcagaaacctcattcttgttcagagttatttaataaggctccaatcttatctagaaactccaggaaattaagttactgacaattgtggtttgcacttaaatcagaagatattgattttgattataatacccgctttagatgatagtgtgtttgatactattgttttctcaaaaaataatggttttctcaagcatgcaggagtgttatgtgcctttaagttaaaaggagataactggtctaaaaacacacacaaaagaaatactatcaaatcttttttcttgctctttgaacacagagttgtatcctttaaaattgtttgggcctttttcatttctcacttcttagcttaacctacaattgttctctcactttaatctgtgtttcctattttacaaaatggttttataggacaagtgtgaacaacaaagtgatttgtggctaagttcggttccaacaaaagactggatctcggagttatattgcacatatggatgtcgtggtaatatacatatataatgtgtgttcaattgttcatcacatatcctcatgtccgaagcttacatttagatattgtttgcatgtattttaaaagcaagccaaataaagatgcaccaccaactgcgattaatatctttaaagagtgccattgtagcgggaagacaggttttgccgagcctgtaaaggaagcaattctaagtgaatgctcccttttcaattgtagtgttatttattgatttcagacaatgttattgtagtgttatttattgatttcaaataaccatataaaatcatgcttgctcccgtatctgtataacactctgtatggaagcatcactcttagaccccaacagttgagggtagtaacttctaggtacatcttattaaggaattattatgttctattctaaatcaatatatgttctgttctgttcatcaatccatgtgtactgttctgttttgaattgagggtagtgttgggggcatgcttcgtagccgaatatcctaaagaaagagaacaccttcggaagatcctttcaggagcaagcgccgaagctattacctatagagcttcggcataatgatagatctcaagacgaagggtcgaaccgacttaaagatggattgacttaaagacccatgatgttttgtgtcattattgtagtcgattgtaaaggacataaatgtaattttacacaggttgcaccctgtgcctataaataggtgaacaataccctgacactgttcacggaatcttgtaatcgctgtcacattacgctggaattattgctttctaccaagacgaaggtataaatgtatctaaatactatgttttaatatttaggttcatataataaaatatgtgaataatgcaatctatattcggtatgtctttctataatgtctcatgttttatattttatttcatattgtctcttaagactgatcacgaaggtatgaccttcgtgatatttttgctcatggccttcgtccgaagctcattaaatcctttgggagataatacttcaacggacgaaggacattaatatttaacattttatgttgccttgttcttaattcatagcatttgagagcaagtccccaacgttggcgcccacctccggtgaactcacttccacttttttgagctgatgacttcgttcaacaaccaagctggagctgcttcggctctgaagctggtactcccgataacaggcggttcatgctcagagccagctaacaagaagcagaagaaggaggcacagagaagggtacagcatgtcggggtgcaaggacccttcatcaagtcaagatggtcccacatcccaattaccttctctcaagaggaccttaagctcaaggattaccctcacaatgatgctatggttatttcttgtgttatcaaaggatttctggtccacaatgttctggttgacacaggcagtgcagcagatattatatttgctaagaccttcagacagatgcaagagctcgaagataagatccatgatgctacacatcccctttgtggctttggaggaaggcagattgtagcgctcggcaagatcacaatgctagtgaccatcggatttatcaataatacaaggactgaacaagttgtgtttgatatcgttgacatggaatacccttacaacacaatcattggtcgtgggacactcaatgcttttgaagcaattcttcaaccagcatatctttgcatgaagataccttcggatcaagggtctattgctattcatggaagtcaagaagctgccagaaaggccgaaggaaactggacagattcaaaagcaatccataatatagatggagctgaagcttgtgagcaatacaaatacagaagggagaaggctgcttcggctgatcaaccgaagtccatgcttttatgtgaagatataacagagcagaaggtgttgctggggtctcaattgtttgaggagcaggagaaaaccttgacaaggtttctgttcaacaataaagatgtcttcgcatgatcggctaatgatctctatggtgtgaacagggatgtcattgaacactcgctcaatgttgatccatccttcagacccaggaagcagagactttggaagatgtctgatgacaaagccgaaggtgctcggaacgaagtgaaaagacttcttaatgttggcgtcattagagaagtaaagtacccagaatggttagccaacattgtcatggtgaagaaggccaatggtaaatggagaatgtgcattgactttactgatctcaataaggcttgtccgaaggatgaatttccattaccaaaaatagattctctagtagacgcagcaactttgtcagagctcatgagtctactagattgttattcaggctaccatcaaatctggatgaagaaagaagatgagccaaaaaccagcttcataaccccccagtggtacatattgttatcttcggatgcctgaggggctcaagaacgctggaggaagctttagcagaatgacagcgaaggtccttcattctcagataggcagaaacgtgttaacatatgttgatgatatcatagtaaaaagcacgaagcaacaaaaagcatgaagcacgaagcaattttctttcagatgacgaagcttatcataagagaatagcggcaagagcccgtccatatgtaataatagaaggggagttatacaagcatggagtctgttctccattactcaaatgtttatccagagctgaaggtatagagctgatgaaagaaatacatgcagggctatgtggatctcacattggatctaggcccttgctgggtaacgtttttcgtcaaggattttattggccgaaggcagctttggatgcagcagaattagtccaaaaatacgaaggttgtcaaaaatatgcaaaagatcagagacaaccttcgtctctaactcaattaatacagcccacttggccattgcaaaggtggggccttgatttgctaggcccacttccaccagcacaagagaatttaaggtatgttgtggtggcaatagaatatttttctaagtgggttgaggcgaaacccttagccacaataacttcggtcactgttcaaaagtttttctggcaaaatattgtgtgtcgcttcggagtgccaaaggctatcactgtggacaacaaaacacagtttgatgccgaaactttcaagagttttgtgaacaaattggcacgaagatccattttgcatcggttcgacatccggagtcaaatggacttgtctaaagagctaatgacattataatgacaggaataatgaagttaatcttcaaccagcccagagggaagtggccagacgaattactcaaagtggtgtggagccacaacacaacaatgtcaaggtcaacaggttttacaccattcaaattgttgtttgatgacgaagcaataaccccagaagaagctaaagcgggatcaataagaacattggcttcgacagaggacgaagctgattattctgtggcaaaagatgttatagaagggatccggcttcaggctgtggagaatatcaataaatatcaagccgaaacaataaaatggtgtgacagaaaagttcggttaaaaaatattaagccaggacacttggtacttcggagagttgccaacccagatatagtaggcaagctacagttgaagtgggaatgaccttttctggtattcctacaggttgaaggatatggacggcaacgacattcctagatcttggaatgcgaatgagcttcgacggtattatgtgtagattgatgtaatcttttttattctttcctatggcacccttttcctttccaaagggggagaaaggtttttaatggggccatagcatgtaatttctctttttcttatatcagctctacaagagcaatatcccccaaagatgtaaatgtaaaaaccgagcgtgcaccatcgagtgcaaagagaaaaggaaaaacaaggagaagctcgaaagacgtccctaaggggatgcagagcacgacgaagctacaaaaagccgttcctaagggagcacagcgtaagttttctgctcaaaagtcgttcctaagggaatgcagagcttacagcgaaaagtcaacgctgattccaccgaagtataaggcgaagcgcgaaaagtcaacgcgataccgccgaaagtaaaaggcgaagaagttcaaaagacgttcctaagggaatgcagaacttacagcgaaaagtcagcgctgatacaccgaaaaataagcggtgaagccgaaaaataaacgacaaagatttgttattcttaagggaataagagttttgattgtggtttcgtatgtgtctttgaacattcatttgcacgatacattacatcatacatttgcattcataaacattcacttagacatacataggatcatcatcatcataacatacacacttgcttcggctttaaaagagaaggcttcggaaaaaagggaaaagaggcaattttatgcttcgctgtgtacgaaaagaagggaaggtgtttttcgccttcggctcgaaaatattaatttcgtccacaccaaagcactttatacattgacggaaaggtaagactatattacaaggtatggataaagtccacgaagtgaaatttaattacatcatactttatacaagttattacagaagttttttgagctatttctacagactactcgagcttcgtcagcattcatggaacttcgtctttttactccgtagcttcagcttcggcttcgtcatcctgtatgtaagtattataagctaaattcaaaattcaaaggaaaaggtaagcataaggtatgattttgttaccggcttaaggtggcttcgagcttcgtcaccagctttgcttcgtccaccctttgtccatactaattttataaatctattcgcaatacttcgggcaaggttgggaatgttatctaagtctgctggtgacaagctgaagttgggtctattgataacctttccgtgttcacaaccagacttcagaaaggcaacagctgtgccccgagaagctaccagggcacagaagtcaccatgcccagctataacttcgtcaagatcattaatttcaccttcaatatgctcgaaggcaccaggcaggtcttcagccgaaggagtaaacttctcactgctaactccaacaaaatagaacacctgcttcagtcgttgaacgcatcgattgctgaactccagacatttattctgaaggcttgtcaaagattttttcagctctgaacttttttggacttcggcctcaagttttgcatcaagcttcagcttttcttgttcgaagttttctgattgagagagaagcttcgaatttaattctgttattttagcttcagcatccgctaataagccttcggttgtttgaagctcgaagtctttcttttcgatagcaactgattgctcttttatcttgttctctaagttctcaattataacttcgtgctttttatcctctaagtcctgctgcatttttaaagccttgctcaacagcatactctgcggacaaataaccttcattagaaatcatctatgttattacaaataataaaagttagacaaaagttgtttatcataaaattggaataaaataaactaccgacaatgtgttgtcgtcggtagcggctgatatctgtctcgagcttcgggaaaccgatactctttgatagagtaccgataaccttcgcgccggtctgatatcgtacgcagcccaacctttcatcatcaatgccaccaaagataagcgctcccggccggtacccgcaagatatagcatattcttttagttctttttttcagcttttgtcagctcttggccaactaagttttgaaagttaaatgcttcatcttccgaagtatcttcggtcatttcttccttctcgaggtttgcggtcgtagtctcttcggtggctgcggcaacctcttctgcggtagcttcttccgcggccatgtttagtagtattttgtctatatcagcaactatgctttctaaattaatatcttcggatttggcatcttcgactctggcctcttctgcggcagcctctgaaggtacagcttcagtagttgtcatgctttcaatagctggtatcttcggagctgaagctcctggtggtgttgcttcaatgacttctgtcacagtaatgattctttgcctttttggcctaggtgccttcatttttgcgggctccttttccttctgaaaaagcttcgtcagatgtagtctcagtggacttagtttgacaggcaaagtttcagtcattacctttaagatttcctctacttcggtagcagaggatgtcgcagaagtcctttctttttcatcaattgatttttgcttcggagtcgaagcctttcttttcttcggagcaactgttttcgccttagactcttgttttttcttcttcagttgatcttcatcgtccttattcagagcactagctactctcttccttttttggccttcggcacccttgtctagccgctcgtagtcaggatattcaaaacctataccatccatcactaggtttagccttcgcttcagacgggtgccgaaggccgcagtcatcaattgatcttcttttttagaataatttccaagtatttcattgcacattacttcgattgtatccagccattcttggcaaggcactttgaaatgtctcttgaatttgtaatggtaggacaaccggataagttctccttccttcttttttccttcaagcttcggcatggcccactctttcatagttggaaacactttgaaagccaaaaattcccgcactaagtccctagtgccgatgtgctctgcgataagtcgataaccctaaattcagccagcgcaatttgggttggaccctctggtgtcatattgcacggggtctggtctctccgaagatcaactctaacggactctgaaccagcttctccttatcatcgtcaactttgacgtagaaccattcagatttccagccagctggccacttgcttcggtaactgatcaatggaaattttgtagtcttgcggtaggcaaaattgtagcagccgaagttttcatgtaacccatctcctctagccttggtctgataatgcagctcgtgcactcggcagaaaccttcggcaaatggttccaccccttggcttcggagagcccaaatgtaaacgctaagcctaacgatagcgttaggagttagctgatgaaggtggatcccaaacttcttcagcacatcagcaatcatcttattcaaagggaatctcaaaccagctttaaagaaacttttaaaaactactacctcatcttttcctggcttcggagtagtttcttccccaccaaagcgaaccagctctttcttttcttcattaaaatagcccaatttcaacatcttaggtaggtcaccttcggagatggtggattttccgaaatccagatggctaggtttgctcggtaccgcgctgctataatcatctttagaatcgatctcctcaacatcagcctgcttctgcttcagcggcatggacgtcctccgatgttaccagcccagaccgcttcattgcttcggaaatcggaacagtctcagtagcttcggtctcatctccctcacgatcaaccctaccagtggagcgaactctggccatttgattatgactttcttgaaatttttgttgttgacttttttgattctcctgaagctcttcctcttgtgatgaagcagaatcaaaagcgaagtttcgtctgagcatgatgattaagcttcggctatgactaaaattttggcagcaaaacagtgcaatagcaatgaatgctgtgataacttcacacctacccgtctgtttatatagtgtcgcaggtgggaaggtgaatcgtcaaggtctcccgcaccgaacaaacagtcacccgcactcgctgaacggtgggccatagggtccgagaaggtgaatcgctgggcgtgcgtaactgctgcaagatggggccaccacgcgtgcgccgattattttaatcgtttctcgccaacgagcttagagaaggtgttttttggatctttggcgtcccgaagcctagaagatttttttggttcgtcacgaaaaacaatctagcaccgcgaaggggctactgttgggggtatgctttgtagccgaagatcctaaagaaagagaacaccttcggaagatcctctcaggagcaagcgccgaagctattacctatagagcttcggcacaatgatagatctcaagacgaagggtcgaaccgacttaaagatggattgacttaaagacccatgatgttttgtgtcattattgtagtcgattgtaaaggaattaaatgtaattttacacaggttgcaccctgtgcctataaataggtgaaaagtaccccgacactgttcacggaatcttgtaatcgctgtcacattacgctggaattattgctttctaccaagacgaaggtataaatgtatctaaatactatgttttaatatttaggttcatataataaaatatgtgaataatgcaatctatattcggtatttctttctatagtgtctcatgttttatattttatttcatattgtctcttaagactgatcacgaaggtatgaccttcgtgatatttttgctcatggccttcgtccgaagctcattacatccttggggagataatacttcaacggacgaagggcattaatatttaacattttatgttgccttgttcttaattcatagcatttgagaacaagtctccaacaggtagtaacttctaggtacatcttattaaggactattttgttctgttctaaatcaatatctgctctgttcggttcatcaatccatgtgtgttgttctgttctaaatctgtttagtgtccatttctttgaaaaaactcaaggaactgtactggctcagaaatgacaatgcaaacatctcccaagcaaagctacttgtgataatttacatgttcaaatgagtgattaaaacatgttgaatattctatgatgttgtggctatttttgctccttcttgttgttgttcctaaacattttgaaattgctaactcagttcagattaacttgttgctatgaagtgtggaattgtttgtatagtagagatgactttatacattttgatatgatattggttgttttggtttcattttatccattatctcttttcttatttttataccttcttgttgacaggacacaatggaagcacttgtggctgcgcctgaagtagaagggaaataatctaagacccctacagaagcagttggtcaagtattggcttcatcaaaatttcttcaaaatgtcgcaaagagaaacaacaatggtggtgatcctacacgcataagagaacttgaggcagagaaggaaagcacattagaagttagagctcagttagatgtcctcgagaaaaagctagaagaattagaagaagcaagggctaaggggttagaaaaattaatgatctgcaaaaaggagtag

SEQ ID NO: 282 - DNA, 4054 bp, Zea mays
  Intron number 1 from transcript GRMZM2G443939_T01 (locus G RMZM2G443939) derived from phytozome v7.0 (chr-ID 10; pos 3698797 to 3702850 reverse strand)
atttactttacttgtgtaagatcaccaatctcgactgctatttcccctttgcgttgctgccttgctggaaaataattggtttgtccatttagattcactaattttatgcgtctttccaattctaggttttctcgagtctgtagcggtttttatcagctgcttgccttctgcagaagaaaaaaaaaacagccttgttactacttcccatcgttcatccattcatttttttttcttggttcacaaagtaagaggaagcacaaactactccaacttcatggcggacttggcgctagttggcttaaggtgggcagcatcgccgattgtcaaggagcttcttactaaagcttcagcttacctcagtgtggacatggtgcgtgagatcgaacgactacaagacactgtcctgccacagttcgagttggtgattcaagcggcccagaagagcccccataggggcaagctggaatcctggcttcggcgtctcaaaaaagccttctatgatgccgaggacctgctggacgagcatgagtacaacgtccttaaggccaaggccaagagcggaaaaggtcccctgctccgagaggatgaaagctcctccactgcaaccactgtcatgaagccttttaattctgctataaacatggcacgcaacttgctccctgggaacaaaaggctaattaccaagatgaacgagctcaaaaatattctggaagatgccaagcagcttcgagaacttcttggcttgccacatggcaatatcgcagagtggccaactgcagcacctaccggtgttgccacaaccacatcacttcccaattccaaggttttcggtcgcgacggggatcgtgatcgtatagtagattttcttctcggcaagacaacaactgctgaggcaagctcagctaagtactcgggtttggccattgttggattgggaggaatggggaagtccaccttagcacagtatgtctataatgacaaaaggatagaagaatgctttgatatcaggatgtgggtgtgcatctcacgcaaacttgatgtgcatcgtcacacaagggagattatggagtctgcaaaaaagggagagtgcccacgtgttgataatctcgatactctccagtgcaaattacgtgatatactacaagagtcacagaaattcctgcttgtcttggatgatgtttggtttgaaaaatctcataatgagacagagtgggagttattccttgctccattagtctctaaacagtcagggagcaaagttttggtgacttctcgaagtgaaacacttccggccgctatttgttgtgaacaagaacatgtcattcaattgcaaaacatggatgatactgagtttttggctctttttaaacaccatgctttctctggagcagaaatcaaagaccaactgttacgcacgaagctggaagacactgcagaggagattgctaaaaggcttggacaatgtcctttggcagcaaaagttctgggttctcgattgtgcaggaaaaaggatattgctgaatggaaagctgctctaaagcttggagatttaagtgatcccttcacatctctgttgtggagttacgagaagttagatccacgtctgcagaggtgcttcttgtattgcagcttgtttccaaaaggtcatagatatgaatctaatgagttggttcacctctgggtggcagaaggatttgttgattcatgcaatttgagtaggagaacattggaagaggttgggatggattacttcaatgatatggtctctggatctttcttccaattggtttctcaaatgtatcgtggttcgtactatgtcatgcatgatatccttcatgattttgcagagtcactctctagagaagactgctttagattagaagatgataatgtgacagaaataccatgcactgttcgacatctatctgttcatgttcaaagtatgcaaaagcataagcaaattatctgcaagctatatcatttacgcactattatctgcctcgatccgctaatggatggcctaagtgatatttttgatggcatgctacggaaccaaagaaaactgcgtgtattgtctctgtcattttacaacagcagcaagttgccagaatctattggtgagctgaagcacctccggtatttgaacctcatcaggacattagtttctgaattgcctacatcattatgtactctctaccacttacaattactttggttaaaccacatggtggagaatttgcctgacaaactatgcaatttaagaaatctacgacatctaggagcgtactcatcggacgcttatgatttcgtgaatgaaaggcctatttgccaaattctgaatataggtaagttaacatcgctacaacacatttatgtcttttctgtacagaagaagcaaggttatgagttgcgacagttgaaggacttgaatgagcttggtggcagtttaagagtgaaaaatcttgagaatgtcattggaaaggatgaagccgtagagtcgaagctatatctgaaaagtcgccttaaagagttggcacttgagtggagttccgagaatggaatggatgcaatggatattctagaaggtctgagaccgccaccccaactgagtaagctcacaatcgaaggttacagatctgatacatatcctgggtggttactagagcgatcctattttgagaatttggaaagttttgagcttagtaattgcagtttgctagaaggcctaccaccagatacagagctccttcggaattgctctaggttgcgtataaactctgttccaaatttgaaggaactatctaatcttccagtaggccttacagatttatcaattgattgttgcccactgcttatgtttatcaccaacaatgagctaggacagcatgatttgagggaaaatataataatgaaggcagacgacctggcatctaaacttgcattgatgtgggaggtggattcaggagttattaggagagtactgtcgaaagactattcatctctgaagcagttggtgacattgatgatggatgatgatatatcaaagcatcttcaaattattgaaagtggtctggaggaaagtgaagataaagtatggatgaaagaaaacatcatcaaggcatggctcttttgccatgagcagaggataagattcatttatggaaggaccatggagattccattggttctaccgtcaggactctgtgaactttctctttcttcatgcagtattacagatgaagctttagctatttgccttggtggcctcacttcactgagaactttacaattggaatataatatggcattaactacacttccatcagaaaaggtgtttgagcatttgacaaagcttgacaggttggttgtaataggttgtttgtgtctcaaatcactggggggcttacgtgctgctccatctctttcctgttttaactgttggggttgtccttctttagagctagcacggggagcagaactaatgccgttgaaccttgatatggagctcagcatccttggctgcattcttgcagctgattcgttcattaatggcttgccacatctgaatcatctttccatttatgtctgcagaagctccccatccttatcgattggccacctgacctcccttgaatcattatgtctaaatggcctccctgatctttgctttgttgaaggcttgtcttccctgcaccttaagcacctaagtttagtagatgttgcaaacctcactgccaagtgcatctcacagtttcgtgtccaggaatcgctcacggttagtagctctgtatttctcaaccacatgctaatggctgaagggtttacagccccaccatatcttactctttcagattgcaaggagccgtcagtttcatttgaagaacctgcaaatctctcatccgtcaagcacctgaacttttcatggtgcaaaacagagtccctgcctagaaatctaaaatctgtctcaagtctggagagtctttctatagaacattgccccaacataacatctttaccagatctgccgtcctccctccagcgcataactatattg

SEQ ID NO: 283 - DNA, 4445 bp, Zea mays
  Intron number 3 from transcript GRMZM2G107985_T04 (locus G RMZM2G107985) derived from phytozome v7.0 (chr-ID 8; pos 1 55017744 to 155022188 reverse strand)
acgagtgcgccagacggcgtctgcgcaggcgaacggtaaacggagagaggaaactaatacctgttaacgcagctccaagcgttgtcttctttccgttttggagtttggctgtcgcctgcgtctccagaacagagaagccaacgccaacgcctccatttcgtcgaatcccctcctctcttcgtccataatggcaattatctcacaactaacactaaaatgtcagagcgaggacatctaatctattaggctctactacttgcaatagacaaatgagcagaggcatatgcccttactaggttacatgtaggtccgcccctgggttccttaatcgatgacaaaccatgttttcaccctcgcccgtcgctccttccaccaccgctccctctgctcgtctgcccgctacggtgttgcctcgtcaccttttgttttgaaacaaatcgggggcgatgccgacctatcattgatagactgaagacgtcagcattcgagtagaatgataaacgcagtatacagtgacggacccagaaatctttgagagcctgggcaaatatagtactcatactataaaatatagttttgtctagttttttatctacatttaactatattttactgcttggtgcatgtttacaagttgagtaaaatacattttcggtccttaaacttgtcgccctgtgtcatccttgtccacaaacttttaaagtgtatcggcccgatccttaatcgatgttcgggtctcagttaggttcaaatgggtcgcgattgacatatagaccgcacatgtcagccgacaatgattttaagtcgcctagtcgtctggtcgaaccctgagaccgaccaggcgactagtcgcgattaggtgacgactagggcgactagtcgacccctaatcggtcctagccggtccctggtcgttctagactagtagttatacttatataggtatatatataaatataattgtatacattatataaattagaacaaacaactaggataaacaaagtaacatattgcttcattgtttagggtttagggggagaagtgggggagcaggagggaccttcagatgacgtgctcatctcgtcactggttcgcagccaccgccggttggagactgcagcagtgcagcaggcgagcagaactgcaggagaaggggcaggggacacagggtgttgtagccgccggcaatcaggagttcaggactgcaggggcggtgccaagagaggagaggagaggagacgagacgtgtagattggagactgttggcggctaggttagaacagagaggagagggtactctaaattagactgtagatgggctaaaaaagtcccaataactaaaccctagccgggatgactaggacacataactcggatgactagtcgtcctagtcgacgattagtcggacgaccaagacgactaggtcttctagtcgagtcgtccagcaaatcgtgtcataattgccgaccagcccgactaatcgtgatcggacgacttgaaatcattgtcagccggtgtatctgttttctctcttttcttggttctctctcaccggacacgtggaaaagggagagaaaacatatacacaggctgacatgtggggtccatatatcaaacacgacccgtttggacctaactgagacccgaatagcgattaaggaccgagatgacacactttagaagtttgtggaccgggatgacatagggcgacaagtttaaggaccgaaaatgtattttactcatacaagttcattagcactaatgcaggagtctgggcaagagcccgggcttgcttgcacttgggtccagtcgtggcggtacatgagttcagaagttacatgtgtgccccattgaacaatagactccctgtcacgagcggggaatcaatggcaccaaatgttgaggtcactagtaatctttgcgagaagcacacgcacaggagggtcctcgttcctgaagacataaattatttctatcctcacatattctccacagaatgacgcctcggaccaccggctgaattccctgcgaacaacgtcggcatgattggggggggggggagaccgttccaagctggcaacctgaaggctaagcaagcgccacaaactcttgatcctagcacattctacaaagttgtgaaggttgtcttccagcgcctcgccacaatgggcacacctagcgtcggggagaatgttcttcttgaacaagtttcctcgagtatttaacctgttcttaaaaagaggccataggaaaatcttcagtttgcctcaccacctttcttgtgtccgaggcccgaggggacgggatgcagctgccgcagcctgtaggcgcctgctttttcttggatcttcattttgttgattgccggtgctagacatcttgaggcattgggtcttagtgctgcagttattaggttcagggatcttttgggtgattagtgaagagcagttgtgtgcagttgggtgtgtgtggcctgctggcacttttgctgtttgtctccttttgcgtactgctgttttcatgcgcagaaagaggctgcagttctgtgcgcagcaggagtctggtggtcttatgttctgccttttttggcattgtactttggtccattttggactgtttttctctcttaatttaatggtgcgcaactctcctgcgcgttcacgattttttttttgttgatgattgggtgagaggtttcttaggttatttatttagtaccagcactagcatcttccctagatggctacattgctataggttttgtgatggatggttcatctgttgaagtttgtaccagcactagcatcttccctagatggctacattgtgttaggttttgtgatggatggttcatcagtggaagtttggtggcatatgaaagtttgctctatctatcaataaaatattactggaatggacgaaatgctgtatctatgttgaattttgcttttattttgttgaagctgctactcattctggtctgtggatgctgtgcttgccaattgtgctaactgcagtatgaaattcttctgtttgatacttcgattcgctactataatcttcagaggaatgcaccctactcgcttccaacttggtcgcatgtttagtctgttatgattttccagtacttacgaggatgtgctgaaatgtgattgattaaactgtcaattttaccgattataatcttagctattgcctgtgaatgattttatggtagctatgttcgtgcctgaaccttgacttgtggcttcggttgggtttcaactctagcctactccaacttgcttgggactaaaaggctttgtcgttgttgtacgtttgttctgaaaattttcagaaaccctgcccttgtgtccaaagagagagattatttctgcttcagtgcaattccctcgagatttgagcaatgcaagtccttcaaatttacgtattcatcaatattatatatcaacttatcaaggcattgtatattcacctctctggagttgtataaatgcttcttagacttagtgcactaaggctccatttctgctcttttaaatccgagggcggtgtttattttggttgatgtaagatctacatgtgatgtttataggttagtagtttaaagttgaatttcaattgattggcatgactcccgagccaacttgtcacagcttacaatgtcttttctgttctgtatttagaaaatcaactccttcaatttgtgtgaggaattgagtttactgctaccgcttcctgcaaagttttatgcagttgtcagttatatgtttagtatatagtacagggtatactccgttgctgttacaattagcataaactcaagagaattcattgtttttgaccatgatttccagtctgataaatatttctgcactctgttttattgcttatgctaggaagaaggccagggctgaggtgacagttgggcatctatgtggccattcattttttttctttgtctagagacttggtattaaaccgaaaagtcatgtgcagtcatatggttgtcttgtcatttgcaaaccagaattgtcttcctgacttacaatccattgttgtcttgtcagaacacaagatcaatcaattttggtatcactatttttgtgaactataggaaccagagttgtcttgtgacaagtctaagcatcatagaagttttgaatctttctaattggttgttgatctgtccccaggtaatcatacacatgatttgtttgccactactttttagatgcacaagatcctatgctgtacatgccaatggttaccttctcctttatgtttttctcttgttcttagacaatatatgtgctttctgaagtgtcttttggaactagacactatttcccaatagcaaatctcgaatactgatgcctgacaatgatgcaacttaaaacctgtagactactcctgctgtttcttattgccaataagcaca

SEQ ID NO: 284 - DNA, 7435 bp, Zea mays
  Intron number 1 from transcript GRMZM2G035826_T01 (locus G RMZM2G035826) derived from phytozome v7.0 (chr-ID 5; pos 7 1023597 to 71031031)
gctgtgcgaaagaagccgcagatttgatagagatgttggggaccttcggcgtccgaaggtcctcaaaaacaggatttaacagtatttctgtagtacaatgtgtgaacaggtaccctcggactaaagtcggcattgcagtagaccggaataatacgaagcttgctacagagccgaaggtgttgagcaggaaagcttcggcgtaacagcaaagagtggaaccgacttaaagatgaaaaggctattcagacctcgatagactactatagagttattatcaaatgtaaagggcatgaatgtaattttataagggctgtgtcccgtgtctataaataggtgaacagtatccccgtactgttcacgctgacttggcatttgctttttgcgtcacgcttgtactgtcatttccttccgattgaaggtacacttatagctcaatgatatttttgtttatgttcagtaataataaatgattgttcatgttttctcttacattctttatattttatccttcgtcattgtttggtgaatttatgaaggtatgtccttcataaccttcgtccacaagttattatatcctaggggaaataatgcttcggaggacgaaggacgttaacgattaacattttctatgttgccttgttcttaactcttagcacttgagaacaagtccccaacattggcgcccacctccggtgaactcacttccatttcttgagcttttcaacatcttcggcaagcatcaccttcgtcatgccgccgaagaaggcttcagcaccaggggctggcacgctgcagccgccggaccccaatcaagacgtcctttctcttagagaggcacgaagccagaagaggaaggctaccagtccaacacctccggaggatgatctagatcaggagattcaaaatctggaaatccttcagcagcaggttcaacgcaagaaagaaaagatggccagggtagctgaactgcagaggcagatagacgaagcctctgaataagttcgtcatcttactcaggacgagcaacaccgaaggtctcagcatcaagatcttcatcaggagggttttcccaacgaagatgattggtatgacaatttccatcatgggaattttgtttttgatgatgcttctcctctgtccgctgagctgcaggctacaccttggcccccgtcctacaagccgcctcagctccctgtattcgatggccactcagacccgaagcagtttttgatgagctacgaagcaacagtgtcttcgtatggtggcaatgcttcagtcatggccaaatctttcgttatggctgtcagaagtgttgctcaaacctggtattcctcccttcgaccaggcacgatcacttcatggcagaagctgaaggatttgttgttaaccagctttcaaggatttcagacgaagccggtcactgctcaggctctgttccagtgcactcaggaccacgaagaataccttcaggcatatgtccgaaggttcttgcgtctgagggcacaggcaccaacggtgcccaatgaaattgtcatcgaggccatgatcaaggggcttcggccaggtccgtcagctcagtacttcgccaggaagcctcctcaaactttggagaagcttctccagaaaatggatgaatacattcgggccgacaatgattttcgccaaagaagggaggaggctttcaggttttctgaaatgaccaggggcttcggagggaggttttacccgaggcatgtgagatcaattcacaattctacacaaaatgatgacagaggaagccaacagcaaagaccacaatactcctcacaggcttctggacaacagcaaagctccttccggccaccagctccaagaggcagaggcgccaggggcttcggaggaagatttggcgatcaaccgagaagaatcttttgcttattctgcggtgagaacaaaggccatactaccaggatgtgccatgttactatacagaagcaaaaggaaatagctgaagcagcagcacaacaagcccagccgaagcaggtcatgcatacagcttcgtatcattcgccctacatcccagaatatgtgggcaaccatcctgcagtctctgctgcttcggcgagtcagcctcaagcttcctggcaacagcctccgcctccacctccgttgcaacaaggccagcagccagaagggagccaatatgctccgcaccaaagggacttcagagaacagtccgaagctcgcacggtcaacagcacagtgccagaatcaaagcacatctattaacaaatatcctaccataatagcaatctttttcattcagttttattttctgtaataaaggacattgtttaggtttcatgtaattagtttcgttgattcctacaagaaaaatatgttttcttcacaggcttgtgataataaaaaggaccttcggactgtcgaaaattcttcgaagcaacaaaaagtcgttctacggaacgcagagtaagtttgacgaagtcacaaaaagtcgttccgaagggagcgcagtgtaagttttctgctccaaagtcgttccaaaaggaatgcagagcatacagcgaaaagtcaacgctgacaccgcctaagtaaaaggcgaagaagctccaaagacgttcctaagggaatgcagagcttataccgcctaagtaaaaggcgaagaagctccaaagacgttcctaagggaatgcagagcttacagcgaaaagtcaacgctgattccgctgaagtaaaaggcgaagaagctcctaagggaggcttatagcgaaaagacaatgctgattcacaaaaagattgtgttttatcgcgcaaatatgcgtgtatcttcggaatatcaccttacatagcataacatcatcacatcatccttgcataacataagcatcatacatcataatgcatgtggcataagaaagagatatgacattaatcttcgggaaaacgctttgaaaaaggggcaaatcatgccaagtcacaaggagaaacaatattgatttctgaagtatagccttgaagattgtttctacgaagcttcagcacttttccaggatacttcggatattgttgtgataaatggtaattcttcttcacgaagcatgaaaagaagggaaggtgttttttcgccaaagactcaaaaacggtatgtatgtaaagtttcatgcatcgtaaagaattgaataacaaaaatagatatattacattcaaggttacaaaatgttacactatattacatttcagaagttttttacaaaaatgcttaatcctctctcaaaacgacttctgcagcctcattcaggagccgattcacgactttatccataatatcttcggccatctttttaatttcgtcgtcccccttcggctgggggtccgaaggcgctttagtcggatctgaagcaggacacggctacattgctattacaaatcgcaagcagatcttaaagcctaaagattacaacacgataaaaaccattatttagtacctagttgatcttcggcttctgtgctcttgtcagcagcctcagctactgctctagcatcgtgaatgcccttctcacttcttcgaataatttctccggccatttctcggccaccattatcccagatatcggtaaaaaactttccaccaattatgctagcttcggccgtaggatctcttgtatcttcaaaggacaaggcagcttcggactgtgctagaatttttacatgttcgcagcccttcttctctaaaatggtggcaatccctctggcgccagagaaggcacatatatctcctcgactatttaaaatttcttcgaaggcttcagcttcgtggtcaatccattcaatgacaccttcgggattgcctctcgaaaagttttcctcacttgagaatgcgctgaccttggcgaagctagcctttaattttttaacacaatctatagatttgttgtagcatctctttttggatgaacgaagctcttcaacagtcacttctaggtgatctgcccattgatcgctgagttcacgctttgtttcttgaagtatacgttcttctttggctctggccagttgtttccgaaggtcttcaatttcgcgtttctgagcttcagcttgacttttaaaagcagcttcatcctcctttattttatctatcaatgagtataatattttgtctttttcgagaccttcgttcctcagttcaattacttcggaacgaaggttgctcagggctatagtacatccttcgtcctcagcatctttctgtgccctgagggcattgctgagtatcaggccctgcaaacaggaatatgtctgtgtcaatagttttaaacaaacgaaaaatttttgaactcaacaaaaaacacgagaattccatttgtcgcacctttaaactgttgtaagctaggctgtcagccagatcgttctttgacagcaccgaaagtccgtcttctaaagttgggaatccgaagcttctgctcatctcccaacagacagaaatttccttgctatcggggagacaatacaagaaatcttcttctccactgccattaaatatcaacgccccctttggatatttcaacttttgggcatagtgctgggcctcttgttcttctttttctgataattttttccccgaagcatgacgaaaaatataatcacgaattttgggggatgcttcgggggtaacaacaccagtttcttcaaaagttggctttgttattttttctgcctcactttccaaagtttttgcgggctctgagggcccagcttcggcttcaatttcttgctctggagctgtagaaccagaaatttcagctgttgtttcaggagtaacagcagccttcttcggaggtgtgctcgaagatttgatcgtttccagtacatctagcacattagccattctctttctcttcggagttgcggctggcactttttcattttttgctgtcccaatgattgctgtaggactcaaaacttctgatgttttggagccctcagttgcttcttttacctcttcaattttttctgtggacggcgcttcggttttctcttttgtttctgacaacaaaatgtttgattgttctgattctatctttggtggcacttcggccgtttctgcgatctctggcaacaaggctggctcggttggtttttcagcttcggtggccgaagaagtttttccggtaaactcgggcaccgaagctggttcaatataacgcggccgatgcgtaagaacctttaactttttccttttcggttctggctcgctaggagcagctgcagcttcttcttttgcagaggttgtgttttttctcttctgcctccgaatgggatagcaatagtcagggtagacaaacccgatggcatcaaatacccgattcagtctcttcttttttcggcctccgaaggctgctgacattgcattatcttcagccttcgagtaggtcccgagtagctcatcacttaaattgtcaatgcttttcaaccactcatcatctggctcaataaatttatctccaaatttaaaagtgtacttaaatctgataagtccaccttcgtcggcctctttaatggtttcttgtggcatttcccatttctccgcaagcggccacaccctgaaggcgatatgctcttgtactaagtcccttgttcctataaaagagcagacaacgtcgaaggctctttggcactcttcggcggcttcattcatttcaaccttcggcctccgaaggccgaagctttgccaaataggtcgcatgattatacctttgatgtcttcccgtgctttcagatcattttttacataaaaccattctgtcatccagccgctaggccacctcttccgaaaaagttggcacgggacagcttgacccagaccgagaaacaaaactgtagcagccaaagttattgtgatactgttccttaccccaaggtattgtctcgtatgataattcgtgcatattgcagaaactttttgcatcaggcttcagaccttggcttcgcacggcccacacgaagatgttcagccttatgatggcctcgggggtaagttggtgaagatagacttcaaaaatcttcagcacttccacgacgaagctgctcaagggcaatcgcagcccagccttcaaaaagcttcggaatactacgacttcattctctttagggtgtggacaagtcttctccccttcgtcggccctcacaacggacaaatctcggaaataccttcctctcatattaacaagatgattctctttgatagttgatttaccataaactgaatggcttggtcgccaggggcgatcttcggagtcttcgccaccgctgtctacatcataactttcactgtcaccagtatcttcagacagtccttccagaatctcattggtgattttttctgtgttggtcttcgacatcgctataagaaatcctaagttcttctcttcatcaagactcagcttcatctcagcagcagccttcttagcagcttcagacatcttcggaagctctaaaaaactgttttcaaatccgaagcttcaaagctaaaagcttagcaaaacacagtgcacaagagctaaaaattgagtgagcgggagtggttggccagaaagcgtgcaaaatgagtttgcggtatggccgtatatatacgctcggtgcgttgaaaattgaaagaccccacttgtcattgaatgttgctattctagcaaagggaaggtgttttttcggaccttcggcgtaaagccttcgtccatatcgcaatctaaatttattatttcaaacaaattaatattgcgaggggctactgttggggaccttcggcgtccgaaggtcctcaaaaacaggatttaacagtatttctgtagtacaatgtgtgaacaggtaccctcggactaaagtcggcattgcagtagaccggaataatacgaagcttgctacagagccgaaggtgttgagcaggaaagcttcggcgtaacagcaaagagtggaaccgacttaaagatgaaaaggctattcagacctcgatagactactatagagttattatcaaatgtaaagggcatgaatgtaattttataagggctgtgtcccgtgtctataaataggtgaacagtatccccgtactgttcacgctgacttggcatttgctttttgcgtcacgcttgtactgtcatttccttccgattgaaggtacacttatagctcaatgatatttttgtttatgttcagtaataataaatgattgttcatgttttctcttacattctttatattttatccttcgtcattgtttgatgaatttatgaaggtatgtccttcataaccttcgtccacaagttattatatcctaggggaaataatgcttcggaggacgaaggacgttaacgattaacattttctatgttgccttgttcttaactcttagcacttgagaacaagtccccaacaagagata

SEQ ID NO: 285 - DNA, 10259 bp, Zea mays
  Intron number 2 from transcript GRMZM2G094038_T01 (locus G RMZM2G094038) derived from phytozome v7.0 (chr-ID 3; pos 9 8358508 to 98368766 reverse strand)
ccaagaaggcttatgttggtacaatctgaacccctacttattccctgttgttacctcattgtgctcgatctggttactgtcctatgtgcgggtttgttatattggtagtggggctctcactgttgtggcttgttacattaggtaataaggatgagagcatcatatactctatcagattctcaggttcctctgcaattttgaacattagagcgtctttagtgtatgtggtgaattttgttctcacccctatcagaagtctgctagattttgtaggtggtggtaatgatagtgaggataaaatctgatggtaacaccaacattgacatattatttacatgtagaagtgtttgaaaaggaatgtagaacaaacaaaaaagggtatagtcaggaataaggaaaaacactatggatggattcattattttcaaagggttcacctcattccagtgatatatgaaatgatacatcagatagatgggaagtggaagtagaatgcaatggataataataaaaagtgatcactctggtgtatcctggatctaccatttttgtttactagggtagcatgcacattcggttttgtcttacctggtaatctttacagtgcgaaaggatctctagaagagttgattaggttgtctaagtagcactccttaggttttgagattgactctctgtgtgagcagtttaggctgtgttaaaaaagtctaatgggttgtcccatggcaaaccactgctctatgcctcgactccactgatgtcttggttgttctcaaatgggctacgatgttgctgctacgccaaagcataggtctaaggctcgcccccagtgcagtcttttagcatcccctttttaattatagtggtcgattgttattgcccaattgaagtccagctcaattgtcgcatttccccttgactaatggttcttttgtccctcatgttttgtttattatttacactgtttgctgcagctgccatccttctagatgttcaaaagcagctctagcttcatgtcaccatattgttgtgtaatgttgctgccatggaggtagaatgtttggattgtaatcatatcaattatcacattattttgtactctagaattgtatccatttactaaaagaatgtatggttgttggggacttgttctcaagtgctatgagttaagaacaaggcaacacaaaaatattaaatgttaacgcccttcgtccttcttaacattatttcccttaggatataatgattttcagatgaaggtcatgaagtaccttcatcatggcagtaaatattaataaaaggagaagcatatgaaatgtaagagataacacgaggcaattaaatagcattgtcaactcattcccatcttattatcatggaaaaatagaaataatattgaattacaaatgtaccttcggcttgatagaaggtaaaagtacaagtgtgacgcacgagcaggtacaagccagcgtgaatagtaagggggtactgttcatctatttataggcacaggacacagcctgtgagaaattacatccatgccctttacatttattattgacttatatacaaatctatggggactaaacagccttttcccctttaagtcggttcttttttccgccatttagtcgaagctcccctgcgcttagcttcggagcaattttaaccttcgtcacggtcatgttcttctcatcgtgtatgcttttatcctgagtgcgaaggtacctgtccataagccatgcttggaagacattgttaaattacatttttgaggaccttcggaggacgaaggcccccaacagtagcccctcgcagtattaatttgtttcagataacgaattcagactgagatatggacgaaggccttaagccgaaggtccgaaaaaacaccttccctttgctagaatagcaacaatcaatgacaaacgggaccctccaatttggggcatgccaagcgtataaataaggactcacaccaaccacatttggtccgctgcttgtgccatttgctttgtttgctcaattttattgctcttgctcactaacacttgctagtttctcaagcttcctaagcttcggtttgaaggtcatattttcatcatttccgaagaaaaaatgtctcaagacaagaaggttgttactgagacgaagctgactgaagaggagaagctctttgaagagaagaaggctgcaaatccttacatagctgggtttatcaagtcaatggtgaaatcaaatacagagaatattactaaggagatcctggaaggcctgtctgaagataccggtgacagtgatgattatgatgatgaaagcgggggagaagattctgaggatcggccgtggaggccaagtcatacaatttttgggaaatcgacaattaaacagagtcatcttgacaatatgagaggaaggtactttcgagatatgtctattgtacgagttggtggagataacaacgtctctgcccctgaggaagacgaagttgtgatttactacagtttcttcaaagctgagctttggtttccattgagcaggtttgtagtcgaagtgttgaaaatttatcaaatttaccttcattagataacccccgaagctattattagattggggatctttgtttgggctgtgaggagccagggctggagccaagcgcgaaatgcttctatagcatgcatgaacttgtatatgagacgaaggccatgggcaagaaacaatatcataacaactttggttgctatggatttatcgcccgccccaacgcaagttacccggtgccaacataccggaaaaggtggcccggggcctggatggaggaatggtttcacgtgaagaatgacttgaaggcaagggaagatatcaaggaagttattatgcgccccatttggtcccgcttcagcctccgaaggccgaaggttgaaattgacgaagccgtcgaagcatgtcagaaggcatttggtactgtctgcttctttattggtacaagagatttggttcaagagcacataacatatagagtatggccgcttatagagagctgggaaatgtcgaaggagaccatcaccgaatctagtgaaggtgaactggtccggctgaagtacgcattcagatacgaagataaattcgatgaaccaaacgatgactggctaaaatgcatcgaagttactagtgatgaactgcttggatcatattccaaggtggaagacaatgcactatccaaagccttcggtggtcggggaaaaaagagattgaatagagtttttgatgccattggttttgtctaccccgactaccggtatccactacgaggtcagggaaagaagagaaaaattgttgcttcggccactccagtcgagcctgcgccaaagggcaaaaagttgaaggtccttacccaccgaccatgctatattgaaccggccgtggtgcctgagtttggcgaggagacttcttcagctgctgaaccaagagagcccattcctcctacgcagaaggctgcagagccggctacaatgccgaaggaagcttcggatgatctagctgagtcgaagactgagaaagataaggctgaaaagccaaatattgaagaaaaagcgctagaaattttaagcccttcatcagaagtatcagtgccgaaggcacaaaaatgttctgccacaactcccaaaagaagaaggatggcaaatgtactagatgtgttagaaacagtaacgactttgagctctactccttcagggaaaattgtcgaggcttcaaaagcgcaaaccaaagctgaaacaaagccggccaaaatcgaagctgcagtaatccaagctggtaccgaagctgggccttcggagttcactgagaaaaaaccttcggaaatcgaagaaagggcaacagaacaaaaaaaccacagagcaaatttcgcgtgaaaaggttgccactcctgctctcgaagctttgaaagagagcattgattacatcatccaccatgctttgggaaaaggactttctaaggaagaagaacaagaagctcaacattatgcccaaaaactgaaatacccgaagggggcattagtgttcaatggcagaggggaggaagattttttgtactgtctcccggatagtaaagagatatctgtctgccggggatgggtagaagcttcggatttccgaagctagaagatggactctcagtattatcaaaggatgaattggctaacagtttagcatataatagcataaaggtataaaagttaattttgtattttgaaaacgagttgttttatttgcttatacttaatcccgtcctcctcttgcagggattaatccttagcaatgcccttagagcacagaaaaacattgaagatgacgggtatacaatggctctgaacaaccttcgttcggaggtgattgaactaaggaacgaaggtcttgaaaaagacaagatattaatttcattggtaaacgaaataaaagaagacgaagctagttccaaagctcaagctcaggcgcaaaagaaggaaatcgaagaccttcggaaacaattatcaaaggccaaagaaaaatgcgttgttgctgaagctaaccgagatgccagcgagtattggaaaaactatttagaaaagacagttgaagagcttctcgcatccaaggaaagatgttttgaaaaatctctgggttgcgtgaagaagataaagactagcttcgcaaacgtgggcgcctattcaaacgaagataacttcatacgaggcgaccccgaaggtgttattgaatggatcgatggagaagccaaagattttgaggaaattttaagtgatcatggggatgtctgtgcgttctctggtgcgagaggagtttcagctatcttggagaaggcgggttgcaaccatgttaaaaccttagcccaggccgaagctgccttctccgtggatgacacaaaggatccctcggtcgaagcaagtttaatgggcggcaaatttttcactaatatttgggaaaatggtggccgagaaatggctcatgaaataatgaagaagagcgaaaaagatattcatgacgctcgagaagcagcgaaagaagctgagaaagctgcagaactcgagagacggatatgtatcgtttaatggcttttagcttcgtcgtttgttttcgtggcttcgaactgattgacttttttccatcgcagctgaattacctcctccactggagccgtttgaccccctggccgactcaaagacaaagaaagcaacagaaatcatcaatatggccgaagctattattgacgaattcgtcaacaaactgcttaacgaagttgcagagaaagttctgaaggaagaacaatagttactgtaaaaacattcttaggtgattagcaatgcccttagagcacagaaaaacattgaagatgaagggtatacaatggctctgaacaaccttcgttcggaggtgattgaactaaggaacaaaggtcttgaaaaagacaagatattaatttcattggtaaacgaaataaaagaagacgaagctagttccaaagctcaagctgaggcgcaaaagaatgaaatcgaagaccttcggaaacaattagcaggggccaaagaaaaatgcgctgttgctgaagctaaccgagatgccagcgagtattggaaaaactatttagaaaagacagttgaagagcttctcgcatccaaggaaagatgttttgaaaaatctctgggttgcgtgaagaagataaagactagcttcgcaaacgtgggcgcctattcaaacgaagataacttcatacgaggcgaccccgaaggtgttattgaatggatcagcggagaagccgaagcttttgaggaaattttaagtgatcgtggggatgtctgtgcattctctggtgcgagaggagtttcagctatcttggagaaggcgggttgcaatcatgttaaaaccttagcccaggccgaagctgccttctccatggatgacacaaaggatccctcggccgaagcaagtttaatgggcgacaaatttttcactaatatttgggaaaatggtggccaagaaatggctcatgaaataatgaagaagagcgaaaaagatattcatgacgctcgagaagcagcgaaagaagctgagaaagctgcagaactcgagagacggatatgtatcatttaatggcttttagcttcgtcgtttgttttcgtggcttcgaactgattgacttttttccatcgcagctgaattacctcctccaccggagccgtttgaccccctggccgacccaaagacaaagaaagcaatagaaatcatcaatatggccgaagctattgttgacgaagtcgtcaacaaactgcttaacgaagttgcagagaaagttctgaaggaagaacaatagttactgtaaaaacgttcttaggtgattagcgtaacatttgtcgaactaagtctgtaatatttgatgagtatagttttgaatctaatatgtaaactattttgcaattcacttatttgcgatgcatgaaacttttatatacataccgtttttgagccttcggcgaaaaaacaccttcccttcttttcatgcttcgtaaagaagaatattcatgattcggtagaatatccacacttggcaaagaacatccaagattcgtaaaaacatcaatgcttcgtaaacaatagatctcttctcccacatcagagctgatgaagctgtaaatctcagcttattttgtgccttagcaccttttcatttttgtaaagcattctccgaagattgactttgtttccaattcgtgtcattggtgtgatatgatgtatgatgtgatgctatgtgatatgatgcgatgttatgatgcaaaaaatgatgctaatgccgaagacacacacccatgctgaaacaatctttacgtccccttgggaacaatcaaaatctctttgccgtttatttttcggcttcaccgcttatttttcgatgtaagttctgcatccccttaggaacgtcttttgaacttcttcgccttctatttcggccgtatttttcgcattgacttttcgcgcttcgccttatatttcgacggtatttggctctgcattccctttggaacgacttttgagcagaaaacttacactacgctcccttaggaacgactttttgcagcttcggcaaacttacgctgtgctccttaggaacgacttttttgtagcttcggtgaaacttgcactgcaatttttagctctgcattcccttaggaacgtcttttgagcttcaaaattttttgagcttcgtaagtttgggaagaaaatatatttcattctggcaggagcgaagctattacaagaaattaaaagtaggttttacattgattgttccttattgaaaacaaaatggcaatgaacgtaaaaatgtttcagaggtaggatatctctcaatagatgtgctttgattctggcacagtactgttaactgtgcgagcttcggattcctccctgaattctcgttgctattgagagtgctggcgcccttctggctgctggctctgggaataggtcagttgtagtggtggcagaggtgggagttgtaaggagagtgacacgaagcagtaggtcctggccagccgaagcgacagaagctgcaggatgattgttcacatactctggtatgtaaggattgtgacacgaagcagtgtgtaagacctgcttcggctggttctgtcgggcttcggcttctactatttccttttgtttctgaatggttacatggcacattcttgtagtatggcccttgtcctcaccacagaataagtagtaaatctttctaggctgatccccaaaccttcctccgaagcccctggcgcctctgtcccttggagctggtggcctgaaggagctttgatgttgccccgaagattgtgaggtgtattgtgacctctgagactgacttcctttgtcatcattttgagtggagttatgggttgacctgacatgcctcggatggattcttcctccgaagcccctggtcatttcggagaatctataagcttcatcccttctttggcggaagtcattgtcagctcggatgtactcatccatcttctgaagcagcttctccagagtttgcgggggcttccttgcgaagtattgagtcgtaggtcctggccgaaggcccttaatcatggcctcaatgacaatctcattgggcactgtaggcgcttatgcccttagtcgcaagaaccttcgcacatatgcctgaaggtattcttcttggtcttgcgtacattggaacagagcctgagctgtgaccagcttcgtttgaaagccttggaagctggtaaccaacatgtccttaagcttctgccatgacgtgatggtccctggccgaagagaagaataccatgtttgggctacattccggacggccatgacgaaggatttcgccatgactgcagtattgccccatacgaagatatggtcgcttcgtagctcatcaaaaactactttggatctaagtgtccatcatacatggggagctgaggtggcttgtatgatgggggccatggggtagcttgcagttctgctgccaagggagaagcatcatcaaaagtaaaggcatcatgattaaaatcatcataccatgcatcctcgttgaataggccttcttgacgaagctccctgtgttggggccttcgatttgttcatcttgaacaagatgacacacttcttcagtggcttcgtcgatcttcctttgaagatcagccaatcgcgccatcttctccttcttcctttgtacttgcggatggatgatctccatatccctgatctcttggtccaactcttcctcctggagtgttggactagtggctttcctcttctggcttcgagcctctcgaagagaaagagtttcttgctttgggtccaatgactgcagcgcagcggtccctggtgctgaagctttcttcggtggcatgacgaaggtcattgcttgccgaaggtggtcgaaaagggttcaccggaggtgggcgccaatgttggggacttgttctcaagtgctatgagttaagaacaaggcaacacaaaaatattaaatgttaacgcccttcgtccttcttaacattattttccttaggatataatgattttcagacgaaggtcatgaaggacataccttcatcatcgcagtaaatgttaataaaaggagaagcatatgaaatgtaagagataacatgaggcaattaaatagcgttgtcaactcattcccatcttattatcatggaaaaatagaaataatattgaattacaaatgtaccttcggcttgacagaaggtaaaagtacaagcgtgacgcatgagcaggtacaactcagcgtgaacagtacgggggtactgttcatctatttataggcacaggacacagcctgtgagaaattacatccatgccctttacatttattattgacttatatacaaatctatggggactaaacagccttttcccctttaagtaggttcctttttccgccatttagtcgaagctcccctgcgtgtagcttcggagcaattttaaccttcgtcacggtcatgttcttctcatcgtgtatgcttttatcctgagtgcgaaggtacctgtccataagccatgcttggaagacattgttaaattacgtttttgaggaccttcggaggacgaagtcccccaacaatggtaatatcagaattattttgtagcttctaatgatctatcctagcatcaacacttagaccttttaactcattattgggagagagggacaaggttctaaagttgtatctgttcaactttttttggcaccatgtcaccatgtcaccatgattttttgcaatcctatttatgtttatcttacattttggaactagttgatgaagtttagataatattgagaatacaacctattgcatctactatataagcttatttctctcagttgctactagtttctttcatcatccaactacaacacattcaatttgtgttattccaaatacatcgtatggtgtatgtatatctgatcaatattatttttcgagtcctaaatttactatcacacttctcatacgagtgttctttcaccagttggtactcttacaccttattcctttcttatttttgtattctaaagtcattgttaggtagggaatatgtcacatttttttgatatcttttgcactccattctattttaagtttttaaccattgacttttatgttaacctcattgcagcctttgcaggcacttcctatatttcttgataggat

SEQ ID NO: 286 - DNA, 30259 bp, Zea mays
  Intron number 6 from transcript GRMZM5G851815_T01 (locus G RMZM5G851815) derived from phytozome v7.0 (chr-ID 4; pos 7 9073482 to 79103740)
atctcgctgtaagcaaaattatattttgtcccccctggccatagtaaaactgtttcaatggactggagatttctaaattctgttagtcttttgccataaaaatttataaataaatagattgtcttgcattgtcttcatatctgattttcgaaatataattatgctacttgactgatataataagcttatactcccttcgtcccataaagagtttcattgtaacattcaaattttgtccccacaaagaatgccactgtaggcaaacgtgtgtatcctatctaggtacttttgaggccaacccacaaacaaaggctccataggcaaacttctgtagaggtaactctctttgtgggacagagggagtatgttgttaacgaaaccattctagttattaggtatatttttccatttctttcaaatctatgtatttagaggtaaatcagtaaatattgtttgtgtcattttggcattagatattgcatatttccaaacaaggatatcatttcatgctattttttttttcttgaacgcgcaggagagctgcgcatcattatattaagagaagaaaagggtccaaagtggaccaaagtacaaagcccaaaaggcagaacaaacagacccaccaacctcctgctgtgcacagtgccccaacctccaacaaaaggaggcaaacagcaaacgtgccaacaggccccccacacacacctgcactactcacccagaaactccctggacctaataatggcagcacctaggcctaagccctcaagatgcttggcaccggctagaccccaacattctaactcttccaagaaaactttttgaattctgcttatggaaggactgacaccctcgaaaactgccttattacgatgaatccataaacaccaagcccccatgatgatgacgctgttaatgcctcttcttttgggtttgtgcacttgcttacacaccttcctccaccactcagcaaaagatatctcaatagaagcaggagaaagattagcaagccccaacggtgcaagaatgcaatgtcaaaactgtctagcaaagatgcaactgcaaaggagatgttggatattctccggctcctgatcacatagaggacaaacctcaagatgatccagccctctcttctgaagtctatcagctgtccaacatttattccttattgccaaccataggaagaatttgcatttgggtggagcccaagatttccataacctcttccaaggttcaaaggtaaccgaacccatgaaaaaagccttatagcatgatctagaagagaactgcccagaggaagaatgaatccacacatgtctatcagcctcttgtgtgagcaccactcctcttaaagcgtcccaaagctgtaggtactgctgcagcccaatcaaattaagaggggtctctaagtcgctgacccactgccagttctcaagaacatgggccaccgttctggaagaactagcccttttcccaacactagcaactacatcaggggcaagatcctggatacaagacccatccaaccacctatctgtccagaataaagtagtagacccgtctccaaccaaggtaataattgaagaagcaaagaatctcctgacatgctgctgaatagggaatttcagcccaacccaaggcctatttggatctgttttttccaaccataaccatttagtctgcagcgcccagctttggtaaagtaagttagaaatcccaaggccaccaagatataaaggccttgtaattatatcccaagagacaagacaacaacctccagttacctcctttcttcctttccaaagaaatcctcttcgaatcttatctatagaattaatcacccacttgggaatattcatggcaatgagaaggtataccgggatggccgaaagcacgaagcgcactatagctgtcctgccagccagattaagcagccaggccttccaattaggaagccgatcagcaattttgtcgacccaaaccatgagatcattccttctgagcttcttgtctgatatcggcaagcccaaataagtgcaagggaaagatgaagaagagcactgaagaatattgcagcccacctgcaccgcttgctgattacacctaattggaataacatagcttttttgcaagttagacaccaacccagaggctgaaccaaagcaatccaaaattgttctgacgcagtgaagatcttcctcaaaaggctgaacaaaaaggactacatcatcagcataaatggacagcctgtttcgaatattagcgccctccaatctatgcagcagccccctgttttcagccagcttgaataaactgttgagcacatccataaccaagacgaacaacataggagaaagaggatccccctggcgaagccctctccggtgcttaataggaataccaggagacccattcaaaagcacctgagtggaggacgaggtcagcaaatttgaaatcatacttcgccacacaggaccaaaaccaagatgtgaaagcacttcagtcaaaaaagcccaagaaactgaatcaaaggctttggagatatccaacttcaagaacaaactagagactttcttcttgtggagagatttaattgaatgctgcaccaacatgaagttgtcatgaatcgatcttcctctcacaaaagcactttggttagcagccaccaactcctgtaggtgaggacccaacctattagcaagcattttggtgaccaacttagcaaaactatgaattaagctaattggtctaaagtcccttgctgtcaaggcatcaattttcttaggaagaagagctataaaagcagaattcagcatccccaacttgtaagcatttccttgatgaagcgaatttatagctgccaacaaatctgacttactaatatgccaacaacgcttataaaacctccctgtaaacccatcaggaccaggagccttatcagaggggagagctccaatcgtgtcttgaacctccttttccgagaaaggagcctccaggagactcaaatcaatagcatctctatggcaactagccagatcaagagtaaaaggcctctggacaatagaacccaaaagattggaaaagaaatcatccagaacttcctgcatctgatcatggctggtgactaaccttccctcatcctccaaatgagagataaaattcctcttcttgcggtggcgagcctgcaagtggaaaaattttgtgttggcatctccttccctcaaataatggaatttcatgctatttttgcaggtactgaaacttagtgatggtgattctttgtcttgccgacttgttgttgatgctatgggaaatttttctccaatagtacggcaggtattcaaagtcacatcataacttagccatattctcccttgtttttttctcgaacttgttgaaattagaaatctgttggttgtggcaactggtaaccacacttctcaaagctcctttaattttattgtatggtcccttgtcaccgtatctgtctacatgagactcacctcataaaatctttcacttagtatattaaaacggtagctttcaattgttatagtccagttatacatttcagcatgtgctgatgcctataaggttttgttgtcatgtcaccctaattcattcttgtgccacttttgatttcaatgatgcaccctgaatagttgctgagcttgaacagtatgataagttcagtagtataccaggagcggctaagcatatttgggctgccatgtgccactttgcaaaccaagttccatgcttacattacagaagtagctttagcgcaaagtttttattgattacagctctatgcatcaaagataaaaaatggaaacgaaactttgttttcgttatttaactaaaagagaagctttgagtctttgatatacaggcgcaagtaaaaaatagcatttcctatgtgtttcaaacatccatagggaaatctgaaatagccatgagattcatttcatctaaattcgagatcattgaacagtgtgcctgaatctgatttgcttctattagtagtatatccatcttaccgttgcaaccatttcctgattccatctacaagttagttacgactcttctgtccttgtgcaagatccggtctggtagaaaaccagatggaatgtgccttgttgttggtgcttgcgctcatggattcgaaaaaaatacaacaagtgatattattttcagtagctcatcagtgaaaagagctgggaattcaggagtacagctcttttgggaggtaattgtttcactccgaacttataacacaaagatatctgaacttctcgtgttcttcatattattgtgcttttcctctataacatacaacataatcatgatttcttaaaaaaacaaaagtgcttctatcatttgttttctatcacagctgtgaaagagcttctagctgagttggttaggtggtctcaatagcactcctcaggttctaagttcgagtccccatgggagcaaatttcaggttgaggtttaaaaaaatcctctcgtttgtcccacgccaaagcataggactaaagcctgaccctgatcgtggtcgttgtcacatgggctacggtgccactgtgtatgagtgagatagagatttgggggtttcttaatctgtgtgagaaggtcttcttctcgatataatgcccgagatctgtcttacccccgcaggttgaggtttcttttttctaccacaattgatatctattcagtgttattctcagtcaccacttctttttccaacattggctatctcctgtgaactagttaaaaaaaagcttgtcccttgaactccttgttggaatgcgaacccatgaccctaaacagggttgggagtggtattaatagacttagtaaatgggtcaggcccattacagtgagggtgagacggtaattacaaggggaacaccccaaaccctagacgggtagtctaacaccccccacagtcacaactctatcctgtacagatgttgagactggatcgaaagtctaagaatacactcgacggtagccccttggtgaagatgccggcgaactgcagcgtggtggggacgctgagaacccgaacgtcaccggcagcgacacgctcgcggacgaagtgcaggtcgatctctacgtgcttcgtgcgctgatgctgcacggggttggtggagaggtagaccgcactgacgttgtcgcagtagacgagagtggcgcgctgaaggggactgtggagctcgtggaggagctggcgcagccaggaggcctctgccacaccgttggccacgacacggtactcgacctcagcgctggagtgagagacgacgggctgccgcttggcggcccaagagacgaggttggcgcccaggaacacggcgtagccggaggtggccggcgcgtgtcgggacagccagcccagtcagcgtcggtgtagaccacgagctccgacgtcggggatgggcggagtaggaggccgtagtcgagggagccgcggaggtagcgcagaatccgcttgagcgcagtgagatggggctcccgcggagtgtgcatatgcaggcacacctgctggacggcgtaagcgatgtcgggcctggagaacgtgaggtactggagcgcgccggtgagactccggtatgacgtcgcgtcggcaaccggaggcccgtcgtcctcagagagcttcgcctgagtgtcgacaggcgtggagcagggcttgtagtcagacatgccagcccactccaggatgtcgatggcgtactggcgctggtggaggaagagaccctgaggccgtcattcggcggtgatgccgaggaagtggtgtaggggccccaggtccttcatcgcgaactcccactgaagggcgacgatcgtgtggtgtagaaggtcggcggtggatgccgtgagcacaatgtcatcgacgtagagcaggaggtagacggtgtcgtcaccgcgccggtagatgaacagggacgtgtccgacttggcctcgacgaagccgatggaggccaggtagtaggcgaagcgactgtaccaagcccgtggcgcctgcttgaggccgtacagggaccgattcagccggcaaaccagatccggacggtcagcgtcgatgaagccggtgggctggctgcagtagacagtctccgtcagagtgccatggaggaaggcattcttgacatcgagctgatggatcgcccagtcgcaggagagggcgagggagaggacggcgcgaacagtggcgaacttgacgacggggctgaaggtctcgtcgtagtccactccggggcgctgggtgaagccccgaaggacccaacgggccttgtagcggtcgagggagccgtccgaggtcagcttgtggcgaaatagccacttgccggtgaccacgttggtgcctggtggacgcggcaccaggtcccaggtgtggttggccaagagggccgcgtactcctccatagcacgacgccaattgggtcggcgagggcagtgcggacggaggagggcaccggggaagcgtcgggtggagtgctagacgtagcagctgccaggatcagccggtcgacggggcggagaacgccagcagcgcgccgagtcaccatcgggtggacgtgcccggggtcgcggtggatggcgaccgggtggtaaacggacgactcggagtgaaccgccggaacgtcgagagcggcgggtgtggccggctcgcggcggtgatagacgacggcagggtcggcgaagcgggccgcgctcgtcgacgggcccgagtcgggggggcgccgaggtagtggcgtggccgcggcgatggtagacgagtgcggggttggcgaagcgagctggggtcgacggggccgcgcgtggcgcaggcggggtcgacggggccgcgctgggcgcaggtatgattgacgtggccgcgcgtggcgcggaagaggtcgtcgtggccgcacgaggagcaggtaacggcgcaagacggggagccggaggtgggggaggaatcggatcggactcgaggagggagtcaagatcggtgggtggggtggagccagcatggggaaacacatcttcatcgaagatgacatgacgagagatgatgatgcggtgggaggtgaggtccagacaccggtaccccttgtggtcaggagagtagccaaggaatagacagcgggtggaatgaggagaaagcttatgaggagcggtagcggaagtgttagggtagcaggcacagccgaacacgcgaaggtggtcataggaagggcctgtgtcgtatagggcaaagtgaggggtagggtggtgcaccgccttcgagggaagacggttgaggaggtgggtggcagtgtgcagggcctctgcccagtagctggcagggagagacgcctggaagagaaggcagcagagcatattggtggtggtgcggatcatgcgttcggctcggccgttctgtgcagaggtgtaggggcacgagagacgcaactggacgccatgagtgaggaagaaagaacaagaggcgttgttgtcgaactcgcggccattgtcacactgcagagcacggaccgagcgacgaaactgagtggatacccaggtgaagaagtgtgtgagggtggggaatgtgtccgacttcaaccgaagcgggaaggtctagagaaaatgggaaaaatcatccaaaatcaccaaatagtatttataaccagaaagactgagtacaggggaggtccaaagatcacagtgaaccaggtcaaaagcctgctcagcccgagaagaggaagtagtaaatgggagacgagtgtgtcggcctaactgacaagcatgacagaggccctcaaaatgtcccctactacatgaaggatctagactactggtaatcttggtcaagacgtcgggtccaggatggccgagacgacgatgccaagtggtggaggaggtggtggagaccaggacgggaggtggagacacgccggcggtggagggctggagcgtgtagagcggtcccgagatgtcacagcgggcgagaggggtcctggtggccagatccttcacagaaaaaccagaggggtcaaactcaatggaacaggagttgtcagtggtgaaacgacggacggaaaggagattgtgagtgatgtggggagctacgagaacatcgttgaggtaaaacggcccagggagaaccgaggcacctactgaggtgactggcagagtggaaccgtttccaacgacgatcgaggatgggtgagaggaaaggggggaatgagagcgggagagcatgcctgcagtgggagtggtatggtaggaggcaccggagtcgatcacccagtcggaggagggaggggtcatcgccatggtgctgaaagcagcagtgagggaggcgttgtcccaacctccagctggcagggaccaagtcgtcgaggtgggggtccccgagggcaggagcgcgggcggagcctggggcacgacaggcacaccgtacggaggcggcgggggcatgccgtagtgaggtgcagtcaggagggtcggcgccgagggacggggggcactcggtgcctggcccggccacatggcgatggtcccggtccaggggttgtagaaggacggccacgcgtggccgccaccccggccggagggaccaccacgagagggtccgccacccccacggccgcccttgctggagcgacgacctccgtcggtcgtggaagtcggacgaggggttgtcgggacggcgggtggaggggggggcaggagccccggtcgacggaggacgggtggcctggcccccccgaaggcggctgaccgctggtaggagcgctgtagagagccgaggcaggagtgggcgcctcatgcgccatggtgagctcctcgaggagaagctcattcctcgcggcgtggaaggtggggaagggcacgctcctcttgatgagagccttcaggtggccgtagcgagggctgaggccacgcaggaggttcagcaccaaggtacgatcggcaactggctcgccgagatcgcggagggagttagccaggccctttcatctggcggcagtattctcccacggagaggtccccctgagagaacaggtggaactgggcgtcgaggtggagtgcccgagcatcccgattcccgaggaactggtcctcgagagcgagccacgcctggcgcgcagtgtccgcctggtcgcggatgatgtccggtagctcaacggtgatggtgccatggagccacgagaggacaacgctgtccatgaggcaccaggagcgaggcgacggagtgtcgtggtcgacgaggacgtgatcgtcaaggacgaaccgccgcagcgtgagaaggacctgtcctcgccaacgggggtagtgggaagacgcctgaaagtcgcctagagggggggtgaatagggcgaaactgaaattctcaaaaataatcacaactacaagccaggttagcgttagaaatataatcgagtccgcgagagagagtgcaaaacaaatcgcaagcgaataaggagtgagacacgtggatttgttttaccgaggttcggttctcgcaaacctactccccgttgaggtggtcacgaagacagggtctctttcaaccatttccctctctcaaacggtctctcggaccgagtgagcttttcttctcaatcacttagaacacaaagttcccacaaggaccaccacaagattggtgtctcttgcctcaattacaagtgagtttgatcgcaatgaagaatcaaagaaaaaagaaagcaatccaagcgcaagagctcgaaagaacacaagcaaatctctctcactaatcactagggtgttgtgtggagtttggagaggatttgatcacttgggtgtgtctagaattgaatgctagagctcttgtaagtagttgaagtaggaaaacttggatgacttgaatgtggggtggttggggtatttatagccccaaccaccaaactagccgtttggtggtggctgactgtcgtatggtgcaccggacagtccggtgcacaccggacatgtccggtgcgccagccacgtcaccaggccgttgggattcgaccgttggagcttctgacttctgggcccgcctggctgtccggtgtacaccggacaagtactgtagattgtccggtaccgtctcgcgcgtgcctgacttctacgcgcttctggcgcgcattaaatgcgtctgcaggtgaccgttggcgcgaagtagccgttgctctgctggttcaccggacagtccggtgtacaccggacagtccggtgaattatagcggagcaatttcccgaggctggcgagttccagagccgctcttccttgggcactggacactgtccggtgtacagcggacagtccggtgaattatagcggagcgcctctggattttcccgaaggtgaggagttcagcgtgaagtcccctggtgcaccggacactgtccggtggcacaccggacagtccggtgcgccagaccagggcacacttcggttatcccttgctctctttgttgaacccaacttttggtctttttattggctaagtgtgaacctttgacacctgtataacttatacactagagcaaactagttagtccatttatttgtgttgggcaattcaaccaccaaaatcaattaggaactaggtgtaagcctaattccctttcaatctccccctttttggtgattgatgccaacacaaaccaaagcaaatatagaagtgcataattgaactagtttgcataatgtaagtgcaaaggtcgcttggaattgagccaatataaatacttataagatatgcatggattgtttatttaatttttgacattttggaccatgcttgcaccacatgttttgtttttgcaaattcttttctaaatccttttcaaagttcttttgcaaatagtcaaaggtaaatgaataagattttgcgaagcattttcaagatttgaaattttctccccctgttttaaatgcttttcctttgactaaacaaaactccccctaaataaaattcttctcttagtgttcaagagggttttgatatatcaattttgaaatactacttttctcccccttttgaacacaataagataacaattttaaatttatcaattgagaatcataccaaggggatgggtccgcgcgtctcctcggtgcccggcccgcgcgtctcctcgcctcccgcgcgcgatccctcatcccatgcgcgcgacccctccactttccatggcgccgcgccccccaccaacggtccggcgacccacctgcctacgccggccaccgcccacaccatatacggcggcgccgcggcttccccccgtccatcgtcctctgcccgttcctccccttccctggtttcgtccacctccgccacccaaggacggtccaagttccagcggtggagcgggagtgctcgagatcccctgttgacggtcttcctcctcggtcctgggccggccggcccctgttccgcgacgtgttgcttctccagcgcgcgccacctgctccagcaccgtgtgcctcgtctccgagggagccctccccacttgagaccgtgacgtcgtctcctcaccacaaggaacgacaccgtcggtttcgtggcctggagagagcgctggagacaacgctcggcggtgggtggaccagagtagaatcaagaaattcgaagaagcgccgcctacgcgcactgcgggcacgccgtccagtgccaggagacctcgccggtcgttgtttcaactgcctcgcggaggaccaccttgctgcatcctgccgccttgggccaagatgtttccgctgcaaggctcttggtcatcgctcctacgtctgccctgggccagtgaatggtgacaagatttttcctgtccttcgacgacggttgaagggggcggtctggagtatgctttcgacagtcgcgccagcaaacgtcgaccgtggggcgacggtgcctgtgtcgcagcaccagctagctcgggcctcggtctgggagcgacttgtgccaccaacacctcgtccttgtgagaagacgcgtgtcagtgtctggcgtcgaatctcccctccaggcgttgagaagggccaggcccattttgagaggatgaatggggcagtggatgcgcgcgcaattgttactccttccagcgacgttggagctgctgctgcttctgcctcgcaggtctccctcccgccccgcccgcgacgcagacgccatcgaaagcgcaagtcatcccctaggggtggttctgatccgggttgtggacaatctgatcaacctggaaatgaagagacccctcaggatgttcccagccctgtgcatcttcagcacccttgtgtgataggctggaatagtttgatggacaaagcagaagaagatttgaacgcagtctctatctttgtggtcagtgatgtgcttgtgccggtcgccgatatcgcagatgcagttgctcaaaagcttgaagtcaattctgattcgctaatcctgaggcaattggctcatggacattttctgctcatgctcccaccctccactccgttgaccagctgacatcgagatggagcactattcgtgcaggcgctttctccctgcactgtaaaagatggtccaggttttttggatcctcaggtgcaagtttacctatccctgtggaattcgagcttagtggcatcccaattcatgcctgggaactttccactgtccagcacattttgaaccctttcgcctgggttcagaaggtacatgaggagactcttgagctcaagaatttggaggcctttcgctgttatggttggtgttatgatttggcctcaatccctcattctagagatctctggattactgaaccgctgggaataggaccatgcgctgaaaggctatctcttgcctatcgtgttcagattaaggtgttggatggaccacgtgttgtccctgaccccatccaaatcccaacagatatgaatggttccacacgtcagaggcggcgtttccgttcgcgttcgccaccaggggaccgtgatggccgaaggggttctacggaagacagcgtacttttgggcagacgttctgctcttgaacgtctaggcccacggtccgaagttcagcctaggaaggaaggcgatgccagtcagtgtgtccagacagctggaaactatgagatattggaggagtcctcggcagtggagatcactgctggtatacctgcagatcttgttgctgtcccgaatttagctgctgtctggggtaccatggcttcggcctctgagcatatccagggtcccttggcccctgttgatgtactcgagaccgtggagcagctggtgcccaatgctgatgatgatgtgcatgctgattctattattccagccatcaaccgaccgctacttactttagaagaaagtggtcttcgcgctgctgtggttccagacactgtgcctgcccagggcacccctcaccctgttgacacgcctttgtccgttgagccgcaggacgttaccaattttagcggaggtggcacccctatccaccttcaagaccactctgacagcagattcaaagtaaagcctccctgtttcaaagtctactcgcgaagaaaagaagtccaggcagcggtggcccagatgacagatgttgagagggctgaaaaattacaagaattcatgcagattgttaccaagccagctacaaggctgttggctgccccccccccccccccccccccgattaccaagcgaaagaaagaggaagaccctgcccaatgacttcaatccaagaagaagcagaagggtggctaaactgccaccggaactgggcaatgaatctgcagctacaatctgcaggcagctgggattttgtgatgatcaggaacatatttccttcgaagacgcccaaaagtatgttcacctttttgatgcagcactttccagagagcatgttgctgccatggcagcattatttggctgggaattgcctggggaagaccgggctcaaaactgattggagggggtgtaggtcgtgcttcttttgtgtaccctgttataatgcagcctgtttttcttatctggaatgtaaggggcctaaatgacaggtctaggagagacattgttaagtccttggtcctgagcatcaaaccagcggttgtctgtttgcaggaaactaagctaggctctatctcagcctttgacatcctgtctattcttggtgctggttttagtgattttgtttactccccagcgcaaggaaccagaggtggtgttttggtggcttgtagagatggagtctattctgttattgagagtttggtgcatgatttcacagtttcagtcaagttgcaagaggaaggtggtgcccagtggtggttcactggtgtttatgggccacaccacgaccctctcaagctttcgttcctccaggagcttagggaggtcagggagacttgcgttggcccttgggtaatagctggagattttaatcagatccacagctcagaagacaagaacaataccaatataaacagggcaatgctgggcagattcaggagacttatccatgacctggagctaaaagaaatcccgttggtaggcaggaaattcacttggtcaaatgagagaaatgtccctacacttgttaaactcgatcatgttttctgtacagccagctgggaggagatccatccggattgtattctccatagcaactcttcagaactctctgaccattgtcccttagctctgcatcttaatgagaatgtcaaagggaagcgaagattccattttgagagtttttggaccaggtttccagattttttggagacggtggctacctcttgggagcagccagttatgatttcttgccccttggaaagattggctctaaagttgaaaaggcttgcaaaggctttgcagtcgtggagtcataaaaggatcggaaatgttaaatttcagcttagcttggccagggaaattttgcacagacttgagattgctcaagacaatagactgttgtgtggggacgagatatggctgaaaggaaggcttaagcatcactgcctggggcttgcatctctggaaaggacaattgctagacttagatcgcggatcaaatatttgaaagagggagatgccaacacttccttttttcatctacaggcttgctatcggaaaaagcgaaaatttatctctgaattagtgcatggggaccagatcgccacctcgcaagagcaaaagcaggaggtcttgtttgattttttctccaatctgttgggggtagcgaagcagcttgagttcactctggatttggaggtttgccacagtgctgatgttgatcttggggccttggaccttcccattacagaggaggaggtccgggccactattgctagccttccctcggacaaagccacggggccagacggatatacgggaagattttataaaacttgttggcacataattaaggctgatctgatggcggcagttatcaccctgcaccaaggtaacacacgcaaattgtggatgatgaattctgcgtacctaacacttatccctaagaaagttgatgccaaggcagccggggactacaggccaattagtcttattcacagcttcgccaagttggtatccaaagtcttggctaatcgcttagcaccgcaccttcaaaatttggtggctacaaatcaaagtgcctttgtcaagggtcgttccattcatgataactacatgttggttcagcattctatcaaggcctttcacaggaagaagatcgctggtctgtttctaaagctggatattacaaaagctttcgattcagtgtcctgggcctttctcctagaagttttatcccatcttggcttcgggcctaggtggtgtggtctcgtgtccaacttgttatccacttcttccacacaagtgcttttgaacggagctcctggggattatattcgtcattggagggggctgcgccaaggcgaccccttatctcctatgcttttcataatcgtgatggatgtgcttagtagcttattcaagcatgctgaggaaagaggattgctgcaggacctggccatcagaaacgtgaaatctaggctctcgatttacgcagatgacgtggttctttttgtcaagcctgcagttgatgatcttatttgtgtcaaaatgatcctggattgctttggagaggcctcgggcttagtggtgaatttgcgaaaaagttgtgctatccctctcagttgtgatgatcagactgttcaggacagttgtaacattttgcagtgcaacccggcttcctttccatgcaactatttggggctgcctgtttcggataagaagttagggaggagggaccttttgcagtgggttgacaagattgctaaccggctgccccgttggaaggctccactacttaaccttgcgggcagggcagccttggtcagattcgtgctctctgcaatcccagtatatcttctcatcgccatgaatgttcccaagtgggttatcagtgctattgacaaaattcggcgaggtttcttgtggaagggtagaaaagatgtgaaaggtgggcattgcctagtggcgtgggataaagtcaccagaccgttggaccttagtggacttggtatcccaaatctgatatataagagttgggcgttgcaagctaaatggctttggctctccaagactgacccgaataggccttggagtggattggatctccctgttcagtcacaagtaaggaaactagtggccagttcgatgtacactaatgtgggaaatggcaataacacccttttttggagggacagatggataaatgggtgctctatcgttgagctggcacctgaagtgatctcaaaggtggataaaaagtttgcctctaccaggacagtgcatcaagccttagagggcatgtcgtgggtcagggacatcaagccaaccctctcccttatagggatacaacaatatcttacgctttgggacaccctgggtgagatcgtgctcacttctcaggaggatcaccatgtgtggagattcgagtcttcgggccttttctcttctaggtcctgctacaaggttctgtttttgggctccatcaccttcgaaccttggaaaagactttggaaatcttgggctcctcctaagtgtaagacctttttatggttagccatgcagaataagtgttggacagctgacaggctgcaaaaaagaggtcttccccatccggaagcatgccctttatgtgatcaagagcaagaaacagttcagcatctgatgactggttgtgtcttcgccaggcagttttggcatagcatcctctccccctttggtatgggccacttaactccaggaccagaagatactaattttgctgattggtggggactagtgaccattcaggtgcacagaagcaagagaaagggagtcaacagtgccattattttgggagcatggtgcctttggttgcatagaaacaaagttattttcgatggagagttaccaaccattggcaaggtgcatagaagtttcatcgacgagctatccttatgggtgctggctggtgccaaacacctcggaagccttgggcttgctgctgctctaggcgcagcaggcccgacctaattttttccttggtcgtctttttgtatcctagtcctatggatagttttatttatgcttgttgctggccaccatagggtggttttttgtactggtcctcttggaccttaatttccccttcttaatataatgatgcgcagctctcctgcgtttttcgagaaaaaaaaagaatcataccaattgaaaaactctttttaaaattaggtggtggtgcggtccttttgctttgggctaatactttctccccctttggcatgaatcgctaaaaacggagtcattagagcccttataataactttctcccctttggtcataattaaataagtgaagactataccaaagacggagtccttatctccccaaagatggagagttgctcggagtgatggcgaaggatgagttacggagtggaagcctttgtcttcgccgaagactccaattccctttcaatacacctatgacttggtttgaaatagacttgaaaacacattagccatagcatatgaaagagacatgataaaaggtatataaaggagctatgtgtgcaaatcaacaaaagaagttcctagaatcaagaatatttagctcatgcctaagtttgttaaaagtttgttcatcaagtggcttggtaaaagatatcggctaattaatctttagtattaatgtaagaaatctcgatatctcccttttgttggtgatcccttaaaaagtgataccgaatggctatgtgtttagtgcggctatgctcaatgggattatccgccatgcggatggcactctcattatcacatagaagagggactttggttagtttgtaaccgtagtccctaagggtttgcctcatccaaagtagttgcgcgcaacaatgtcctgcggcaatgtactcggtctcggcagtagaaagagctacagaattttgcttttttgaagcccaagacaccaaggatcttcccaagaactggcaagtccccgatgtgctctttctattaatcttacaccccgcccaattagggatggcaacgggtcggattcggatcggatattgaaaatattcacccgcagtcatatccacggtcacatataatatccgcccgcgattatatccacggatagaaattcatatccatatccatgcccatcgggtttcggatatccatcggatatccatcggatatgataaaccattttcaacaattgaataacataattaatcaaaatgcttcctaattcaacatcatacacaacttaaaattgaataaaaatttaaatatacatgtccttcaacaagcaacattctcaacatgacaaaaatacatgtctacatgtaacatgtctcaacatgacaacaaatacatgtctgtttttggccttaagccttttgattctgatccgatccgagtgtagtgttgtgttgagcacttgagctagtcaatgatagtagaatcatgttcatcctggcaaacaacaaaatagataaatggttaaatcaatgatcagattcgataatcaaaatataagaacatactaaagagttgaatcatgttaccatttcttcctcttcatcctccaaacaagtcattagtgcatttataaaacaggattggtcgcctaacatgtcagctcgggcccaagcttgcatacacatcaacccttctactgtttttggagcaagtctactacgatgtgggctaattactctccccccagtactaaagacagactcagatgccactgttgtaacaggaattgccattacatctcgagcaatttttctcaaagttggatacttgatccctgcatattgccaccaattgataatgtcaagctcttgagttcttggcagtgttggctcctccaagtacaaatccaactcagtccgtacaaaggttgaatgctcttctggttcctcagacaagaatttgtcaaatatgccaaacataaggtcatcaccttcattgaggacaacatttctatttgatgtccctacaccatcagttgttgccatgccctccattgatacttgatattccaataccaactcatacaacaaagagcgaactctacacacttcattgttggttctttgattgtcttccccataaatggtgctatagaaagctttcacaaacttcaatttgtatctaggatctaaaacagtagctacctccataagcccatgaacatctgtccaatactttttaaatttttctttcatcaatgctgacatctcttctaccttagggattgcactagtcctccatttctcaatagccaaataaataccacatattttagggaaaaaaaggttggctgtgacataatttgttcctgacaatagctcagttgcatcaaaaaacatctttagtctactacaaagctccctagcaaattcccaatcctctgttgttggcttaaatgaagtacaaagtctttctttacttgcaaggcggtcaaatactatttgatactctagtgcagtgctaagcataatataagttgaattccatcttgtcttacaatctagagctatacttttatcatatttaacattcatttgagcagctgtgcgttcaaaacgctcatgtctttttggcgtggcacaccaaaatgcaacactatcacgtaccctttcaatgcctttatccataacagtcattccatctttcacaataagattaatgatgtgtgctgcacaacgcatgtgtaacaatttaccatctagcatgagggagacgaggggcaacttatcttgcatagaactcatcaaactatcattggtcgtgcaattatcaagagtcacagtcgacaccttcttttctattttccaatcttgtagtacctcataaaggacatcacttataacttcaccagtgtgtggggcgggcacatatatgaacctacaataacccaacatatcgatttaagcaacaccatcacaacaagattataagactacagtagagaacatgaaacgaaacaaaatattacctcaaaagaaaagatttcagcttccaattatcattgataaaatgtactgtaaccgacatgtatcctttcttttggtggtttgctgtccacatatcagtagttacagcaattcgagattggcactgttggaaggaattcactaaagaaagtctttgcacctcatacatatccaatatgtcttttttaatagtgtttctggacactactttgaaaaggggttgtagtgctgcacaaaatcttctgaacccaacatgatcaaccatagaaagtgggtactcatgcacacagatcattagcgcaagttcttttctagcaactacttgatcaaaaacatacttctcaaccacagctcctcccttctcatttttgcccaacttcaatattgattgctttaggcctttttgacactgcttagattgacaagtttttagatgactacgcaagtgagttgtgccagatttactatctccaacaaaatgctttttacaccaattgcattcagcttttaatttgcctcctactgtcacttgttcaaactctagccatacatcagatttgagctttcttttgcttccaacagttacattagcatcttccccagctacaaccacattatctgtacctccatctataggtgttggagtaccagcagcagcagcacttgaggacggtgtcggagtatcagtcgcaacaccagcacttgttggagtagtagcactagctctgtttgagatctgcctacttaaaccatcttgtgaggagggtggttgcgagccagagccaattctagacgtcatcctgctaatacatcacatgtcaaaactgaaccaaattggaaacatcaaacgcagggtgaaccaaactgaacctgaaggaactgacggcttgcctgggtgacggcgtgtaggcgtgtaggcgtagggatccggcggcggacacaggaaagaacgccctgctcggctgctcctgcttggccgcctgggtgacgggctgacggcagacaaagcgtaggggatccggcggcggggtcacggcgcgcgtaggggactaggggatctggcctgcccctgcctgggtgacggcgtccgtaggggatccggcctgccactgcctgggagacggcgcgcgtagggatccggcctccggcgtccgcgaccgcgcgtaggggatccggcctctggcgtcctgcgtccgcgcgtagggatggggatccggcctcaggccgtcaggcgtccgtgcgtgctgcgtaggggttggggtcttggggatctggctgcaggatgaaagcaggatgcctggccgcctgggtcctgggattcaagcagaaatagatcggtgccaacccaggcttcgtaaactgataagtgacaacgctattactactgctgaacggcccatgttctgacagtttcgatggatttgatagcccattgcccaattggctaccggtgctttggtgggctaaatattattttggtgggctggcgcctaggctcaataatggactaatgattaatttcggatatccaacggattatccgcgggtgaaatttaatatccaaatccatgtctattttatctcggatcggatacggatctaacccgcgggtcaaaaaacatatccatatcctaatccgtcgggtcggatatccgccggatatccaaatccacggattaaattgccatccctacgcccaatcggcatcggaataaccaattaaatcaaatgtgtatcccctaggataccaaagcccaaacttaggagtataaaccaaatatctcaagattcgttttacggccgtaaggtgagcttccttagggtcggcttggaatcttgcacacatgcatacggaaagcataatatccggtcgagatgcacataagtagagtaaagatcctatcatcgaccggtataccttttgatcgacggatttacctccctcgtcgaggtcgagatgcccattggttcacatgggtgtcttgatgggtttggcatccttcattccaaacttggttagaatatcttgagtatacttcgtttggcttagaaaggtgccctcttggagttgctttacttgaaatcctaagaaatatttcaactcccccatcatagacatctcgaacttttgtgtcatgatcctactaaattcttcacatgtaaactcattagtagacccaaatataatatcatcaacataaatttggcatacaaacaagtcattttcaagagttttagtgaagagtgtaggatcgacctttccgactttgaatccattagtgataaggaaatttctaaggcattcataccatgctcttggggcttgcttgagcccataaagcgccttagagagtttataaacatggttagggtactcactatcttcaaagccgggaggttgctcaacatagacctcttccttgattggtccattgaggaaggcactcttcacgttcatttggtaaagcttgaagccatggtaagtagcataggccaataatatacgaattgactcaagcctagctacaggtgcataggtttcaccgaaatccaaaccttcgacttgggaatatcccttggccacaagtcgagctttgttccttgtcaccacactatgctcatcttgcttgttgcggaaaacccacttggttcctacaacattttggttaggacgtggaactaaatgccatacctcattcctagtgaagttgttgagctcctcttgcatcgccaccacccaatccgaatcttgtagtgcttcctctatcctgtgtggctcaatagaggaaacaaaagagtaatgctcacaaaaatgtgcaacacgagatctagtggttaccccctaatgaatgtcgccgaggatggtgtcgacggggtgatctcgttggattgcttggtggactcttgggtgtggcggcctttgttcttcatcctccttgtcttgatcatttgcatctcccccttgatcattgccgtcatcttgagatggctcatttgattgatcttctccttcatcaacttgagcctcatcctcattttgagttggtggggatgcttgcgtggaggaggatggttgatcttgtgcatttggaggctcttcggattccttaggacacacatccccaatggacatgttccttagcgcgatgcatggtgcctcttcaatacctatctcatcaagatcaacttgctctacttgagagccgttagtctcatcaaacacaacgtcacaagaaacttcaacttgtccggaggacttgttaaagactctatatgcccttgtgtttgaatcatatcctagtaaaaagccttctacagtcttaggagcaaatttagattttcttcctcttttaacaagaataaagcatttgctaccaaagactctaaaatatgaaatattaggctttttaccggttaggagttcatatgatgtcttcttgaggattcggtgaagatataaccggttgatggcgtagcaggcagtgttgaccgcctcggcccaaaaccgatccgaagtcttgtactcatcaagcatggtccttgacatgtccaatagagttcgattcttcctctccactacaccattttgttgtggggtgtagggagaagagaactcatgcttgatgccctccttctcaaggaatccttcgatttgtgagttcttgaactccgtcccattgtcgcttctaattttcttgatcctcaagccaaactcattttgagctcgtctcaagaatccctttaaggtttcttgggtatgagatttttcctgcaaaaataacacccaagtgaagcgagaataatcatccacaataactagacagtacttactcccgctgatgcttatgtaagcgatcgggccgaatagatccatgtgtaggagctccagtggcctgtcggtcgccatgatgttcttgtgtggatgatgagcaccaacttgctttcctgcttggcatgcgctaatcctgtctttctcaaaatgaacatttgttaatcctagaatgtgttctccctttagaagcttatgaagattcttcatcccaacatgtgctagtcggcggtgccagagccagcccatgttagttttagcaattaagcaagtgtcgagttcagctctatcaaaattcgctaagtatagttgaccctctaacactcccttaaatgctattgaatcatcacttcttctaaagacagtgacacctacatcagtgaatagacagttgtagcccattttgcataattgagatacagaaagcaaattgtaatctaaagaatctacaagaaaaacattggaaatagagtggtcaggagatatagcaattttacccaatcctttgaccaaaccttggtttccatccccgaatgtgatagcgcgttggggatcttggtttttctcgtaggaggagaacttctttttctcccctgtcatgtggtttgtgcatccgctgtcgattactcagcttgagcccccggatgcataaacctacaaaacatgtttagttcttgactttaggtacccaaatggttttgagtcctttagcattagaaacaagaactttgggtacccaaacacaagtctttgaccccttgtgcttgcccccaacatatttggcaactaccttgccggatttgttagccaaaacataagatgcatcaaatgttttaaatgaaaaactatgttcatttgatgcactaaaagttttcttcttaggcaacttagcacgggttggttgcctagagctagatgtctcacccttatacatgaaagcatggttagggtcagagtgagactttctagaatgaattctcctaattttgtactcgggataaccggcagggtataaaatgtaaccctcgttatcctgaggcatgtgagccttgcccttaacaaagttggacaatttcttaggaggggcactaagtttgacattgcctccctgttggaagccaatgccatccttgatgccagggcgtctcccactatagagcatattctagcaaatttaaatttttcgttttctaagttatgctcggcaattttagcatctaattttgctatatgatcattttgttgtttaactaaagtcatgtgatcatgaatagcattaacatcaacatccctacatctattacaaatagacgtgtgctcaacggtagatgtagagagtttgcaagattttaattctacaaccttagcatgcaaaatatcatttttagttctaaggtcgaaaatagtagcattgcaaacatcaaaatccttagtcttagcaagcaatttttcattctcaatcctaaggctagcaagagaaatgttcaattcttctattttagcaagcaattcaacattatcatttggaattgaaatagaatcaaccttagctaacaaattggaattttcatttctaaggttgtctatagtctcatggcaagtgcttagctcactaaataatttttcacatttttcaacttttaggccataagcatttttaaccttaacatgttttttgttttccttaattaggaagtcctcttgggtgtccaagaggtcatccttcttatggatggcactaattaattcatttaacttttctttttgttgcatgtttaggttggcaaaaagaatgcgtaagttatcttcctcatcactagcattttcatcactagaagactcatatctagtggagaatttagatttaaccttcttctttttgccgtcctttgccatgaggcacttgtggccgatgttggggaagagaaggcccttggtgacggcgatgttggcggcgtcctcgtcgtcggaggagtcgctagagctttcgtcggagtcccactcacgacaaacatgggcatcgccgcccttcttcttgtagtacctcttcttctcctttcttctccccttcttgtcatcgcccctgtcactgtcactagaaataggacattttgcaataaagtgaccgggcttaccacacttgtagcaaaccttcttggagcgaggtttgtagtccttccccctcctttgtttgaggatttggcggaagctcttgatgacgagcgccatttcctcattgtcgagcttggaggcgtcgattggttgtctacttggtgtagactccttcttcttcttctccgtcgccttaaatgcaaccggttgtgcttcggacgtggaggggccgtcaagctcgttgatctttcgtgagcccttgatcataaattcaaagctcacaaaattcctgattacttcctcaggagtcattagtgtatatctaggattaccacgaattaattgtacttgagtagggttaagaaatataagtgatcttaaaataaccttaaccaccttgtggtcatcccactttttgctcccgaggttgcgcacttgattcaccaaggtcttgagccggttgtacatatcttgtggctcctccccttggcgaagacggaagcgaccgagctccccctcgatcgtttcccgcttggtgatcttggtgagttcatcaccctcgtgcgccgtcttgagcacgtcccaaacttccttggcgctttttagtccttgcaccttgttgtactcctccctacttagagaggcgaggagtatggttgtggcttgggagttgaagtgctcgatttgggccacctcgtcctcatcataatcctcatcccctacggatggtacctgtgctccaaactcaacaacattccatatacttttgtgaagtgaggttagatgaaatttcattaaatcactccacctagcataatcttcactgtcaaaggttggcggtttgcctaatggaacagaaagtaatggagtatgtctagaagtacgaggatagtgtaatgggatcttactaaacttcttgcgctcatagcgcttagaagttatggaggggcgcgtcgaagccggaggtagatggcgatgaggtgtcggtctcgtagtagaccaccttcctcatcttctttatcttgtcgccactccgatgcgacttgtgggaggaagtcttcttctccttcttcttttccttcctcttctccttgttgcgggactctcctgatagagctttctcgttgcttgtagtgggcttttcgccggtctccatctccttcttggcgtgatctcccgacatcacttcgagcggttaggctctaatgaagcaccggactttgatatcaattgaaagtcgcctagaggaggggtgaatagggcgaaactgaaattctcaaaaataatcacaactacaagccgggttagcgttagaaatataatcgagtccgcgagagagggtgcaaaacaaatcgcaagcgaataaggagtgagacacgtggatttgttttaccgaggttcggttctcgcaaacctactccccgttgaggtggtcacaaagaccgggtctctttcaaccctttccctctctcaaacggtccctcggaccgagtgagcttttcttctcaatcacttggaacacaaagttcccacaaggaccaccacaagattggtgtctcttgcctcaattacaagtgagtttgatcgcaatgaagaatcaaagaaagaagaaagcaatccaagcgcaagagctcgaaagaacacaagcaaatctctctcactaatcactagggtgttgtgtggagtttggagaggatttgatcacttggatgtgtctagaattgaatgctagagctcttgtaagtagttgaagtaggaaaacttggatgacttgaatgtggggtggttgggtgtatttatagctccaaccaccaaactaaccgtttggtggtggctgattgtcgtatggtgcaccggacagtccggtgcacaccggacatgtccggtgcgccagccacgtcaccaggccgttgggattcgaccgttggagcttctgacttctgggcccgcctggctgtccggtgtacaccggacaagtactgtagattgtccggtgtaccgtctcgcgcgtgcctgacttctgcgcgcttctgacgcgcattaaatgcgcctgcaggtgaccgttggcgcgaagtagccgttgctctgctggttcaccggacagtccagtgtacaccggacagtccggtgtacaccggacagtccgatgaattatagcggagcaatttcccaaggctggcgagttccagagccgctcttcattggggcaccggacagtccggtgaattatagcggagcgcctctggattttcccgaaggtgaggagttcagcgtgaagtcccctggtgcaccggacactgtccggtggtgcaccggacactgtccggtggtgcaccggacactgtccggtggcacaccggacagtccggtgcgccagaccagggcacacttcggttatcccttgctctctttgttgaacccaacttttggtctttttattggctaagtgtgaacctttgacacctgtataacttatacactagagcaaactagttagtccatttatttgtgttgggcaattcaaccaccaaaatcaattaggaactaggtgtaagcctaattccctttcaacgccggatccaacaccacggacacgagggcccggatgttgtgcaggtcggcggcttgagcgtggagagcaacaatgaggtcggcgtcgaggtcagaggcgtgggggtcctctgggggctccgcatcggcgagtgtcgggcgaccgaggaggcgctgcgtggtggccatctggtggtcagagcggcgcccagggcacgctcacgctccagggcgagggaggcagcgcgctcgcgctcccgcgaggccgtcacagcggcctggatcgtagcgagggtgccgacgagcggggagccggtggtggggagtgcggagggcgcgactgtgtgactccaggtgggtgaagcgaaggcggggaagcccggcggggagccgcgacgcaggggcagcggggaagcggcgtggatcggcccaaggccggcgatgtagggggcccctccatgggcgagctcgctgctgagtgcagcaggggcgtgcgtgccatggtcggtggtgaccccgacgttggatccggccgcagtggtggcggcagtggaggcgtccatcgggcgaagacgcagcaggggcgtctggacggaggcgcggtctggctagcggcgcggtggcctgggcgggtggcgcccgagcggcgggcggcgcggcaggggcctggcgcggttgcggctggcggcgcgacagcgtcctggcgcggacgtggctggagtgtcgaggggcgctgggccaactggcgacgcggcgaacagggagggagggagggccggcgatgggaggccggcggctgagggagagggaccggcgcaatcacggctggggcggcgtcggggcgccgggactgctggcggcgcggcgagcagggagggagggagggccggagttgggaggccggcggctggggggccggcggcggctgtaggggaggaggaagcccccggcggctgtagctgctgttggaaaacctaaacctaagctgatcccatgttggaatgcgaacacatgaccctaaacagggttgggagtggtattaatagacttagtaaatgggtcaggcccattacagtgagggtgagacggtaattacaaggggaacaccccaaaccctagacgggtagtctaacactcctaaaacttaatcgacatggttctggtcaatattttatttcttctttgatctgagcattttttttgcaggcttttcctgctggttctggtccca

SEQ ID NO: 287 - DNA, 4785 bp, Zea mays
  Intron number 1 from transcript GRMZM5G829831_T05 (locus G RMZM5G829831) derived from phytozome v7.0 (chr-ID 1; pos 2 00683106 to 200687890)
ctactggtgcgtcctgcccgcatttccgccaccaggtagcaccgcctgcgcggccctctctctcctgttctttacacctcacctccggatcgctcagatatcgagccgtagtccgactggtcgccgcgtgcctccccccatccccccgcagcagcagagcaccacagcgaccaatggaggcggtggccgttggcgtggcactgggtggcctctgtatctctgtccgtcatttctcccgagtttgcatatgatgtgtttgtgtgctcgtcgggcgaattcgagtggagactggagaggtgggatctgtgtggccaacaaggcatggctgcctggatccccgatcggatgcgaccgcccgttgattaagggaagaaggagcttggtgggagtgggctggggctgcttggggaatccgatccggcattgcctctgattggaattgacaccacatcaaggttgttgtgcgcgacttcggtgcatagttaccatttccactgccatgtagtcaacaacctcttgggcgaaatataggtatatcggaaactagggttgccttcagatgaaattgcagatttgtagtgccgagttggaatgtcagggtaagtttagcatcttgctgtagttggtgacctccggttgaactttccatgtgaatgagaattatgtaggttttgattgagacttggaagtttattcctttaaggataaacaaagaagagttcggttacttgactgttgctgcacacgtctgtccgtggtgtcctggtgacaggagctgagtatcctaaccagctagctaagctacaaactctccaggcgcagtgaagagaagctcacttgggtcgtccgggttgggagcagacgcgccttggggacccatctccactgcaggcagatgttctcgatgttcgggtggaacaccttagtcattcattcgtcagttattcagacattcactcagtcgttcattcaatcagctatttagggtgtgtttggtttaaggaatcactacatctaaattgaggtggtgcatcatgggttcattcctcaaatttgatgggatgacctcattcctcattttagtactaactaactaactatgaggaatggggtggtgatggatcaactcattctattccacaaaccaaacaaaaatagtggggagtgagaagatgatggactagctcattcctcaaaccaaacaccctattaggcactaattcagtcattcgttcgttggtttatttactcagtcattgattcgatcattcagtttttcattcattcacttagccaatcgtttgttcattcattcacttttagattaatgtttgaatgcactagaactaataattagctattaaaattagctaaagattcaaaccgcacggaacagccacatcctttgcatttgcaagcgctgcgagcctgcgacgcgcacacatgacacacccgacctgacgctccggcgcttggtgaggtgacaccgtgataggagttggcccaattaaggataagaggtggtgctgaggctatcttcggcgcagctgtatatagagttcactgtttatagaaaatatgaagtgagataagagttaggatgcgaaggttgttgaagatagcttgacaataaaaagattgctccaaatctgttttaaaataaagcaaacaaaatagaaaaaaatgactgaataataagaaagatcgcaccaaatctgtttgagaataaaattaacaagataataaaaacgattacataataaaaagtattgccttcaataggtgacataatttaatacagaaaaaataattaaacacagtgcatataccatggcaaatgtttgccgaagtgatttatcgtgtcctcaatcgatacaagtagcgattccttgtatgtatctattgtttttcatctaaaattgaaacacccttctattggcagtagtggcaacaggctcaactgagttctctctttttcctatacacactaatgttagagagatgattacattatattatattccttcttaataaggattgttaagaaaggaatggctagcacactttgtaattttgatggcttcatttattgagcgatcatattaatctgcattgtaaacatactcaatccttgtagacaaaatactttttatgtgcatcagtgcatgtgcgtcctgtgctgactacgggctcattggtcttcatctctgtctacttcattaggattatgaattcagatttgttcttaacgtcaatgttccttcccttcaatccatagatgtgtctctgtaaaaagagcaaaaggtagtcaatacacttacttttcaaccatcatttttatagtagcaatatgatgatccaagcctccaacaacttcacatcgtcagaatcaaagaacacatagtgcactgtaaaccattttaatacagatgaaactggactttacactctccaaattgcacaagcttctcagccccttaacccacccacctgcataaacatgtacacagaaaaacgccaaggctgttggagaagttcttgctgctcacagcatttctaaaattaagggacctcaccatcagtgatattccaaacatataaaggtggctgacaactctatcaactagcaatgaagaggcccatgtgatgttcttcatggcagcacactccgtgtgttaatggaaaaattctagattttaataatgcgacaattgatcatggatcattattagaaaggtaagggttttcatggcactcttgcagtcttgcttttatcctctgttttcctgataggtttatttacctcagaacatttggctggcagattgagcacttatggcttagttgaataccaaatagaagaggggaattgcaatgttagcttttttagcatgtacaaaatttctttttcatctgtatgaaggggcttaaataggctttttccaatatctaaagatagcacacatgctttccttaagatcattcatttgaaactccgctgctatcgatgcatatgtatttcgatacatgcacacattgcttttcattatccccattctacctcaaaataaatatcacaaatctcattattaccttttcaatttcgtatgttgattgattattttgaaagaatgctaaactcttattataggttgcagcccccaaaagaaaagtattatttccaaactcatactccttgcttccttatattctttagcaatgcactcaattttgtatttctagctttatgtcccttagatgaaaatatgaaacaatgttgggtccatagctacttttttacgaactaagtagtagtccatttatctaattctttgggcatgtcctcgctgcttttttttgctatcgctttagagaattatctcaaaagttatctccttttgaaggtagatattgcaaattcaagcaaactatagtaaaaatagaaaatatgaatgggtcttgcttgggtacaggttgcctcttgcaaactgatactctccgagtgaaaaggggcaaagccttgcctttctgaaaatttttgttcccaggtgcagtttcagcaaatttatgagcgcaaactaggtgctgagttccacaatgttagcttattgttacatatttgatttttttctcctgcatttcttatcaagatttgcaatcctgaagtttccttttgaatgaagtagacacaaaaaaaatcaaaagaagttcacatgagtactgttttcggcgagaactgttcctttttccatttgacactagcagaagtctcttactctctagagccccagatgaagacatcatcgactacgtgtgtatctcctaccagccagcctttaaactttaatcattctctcctcaagaaccacacaatacagatgagccaatcagtcctcaactcttcgtcaggaatcaaaacaagcttatcattggtttatgtgtgcacccaccattttaactctcaccaaacctctatcttttcagtttaggccagctaccatcttaaaggtctatacgatgatttcaaaatcagtgtaagctcaaacagcgccggtgagaagccaatgctctagatgtggcatctaaatagcacgtgttcgaagggtacgatcccaatcataagaaataagaaggatgacttgcttcgagcagctccattaagcggtatggcaggaagtgacatactgctccgaacctagtgtttgtttgttttaatatgttttgtgaggatggtcaccaagtatgtccacatggtttgttttgctgaaattgaagagctcggtagctacattgatatgttgtgattactgaactattgccattacttgatgcagcatgccatagcgtacgccgagggcgataaataatatggtgcaaaatccagcattaatgtttgggagcccaagattcagcaggctaacaaatttggcttgtcctagctctggatctttgggggttcatttaaggaggatgtcaacagtatagaggctggttgataggtattgtaaagctgagtttatgagttcagcctgctcatagatacttatgtcaaacaaatgatgaccatttttacagtcgtctagaacttgactgtctaacatttatgtcatatttggtgcatcagtttagccctggccacaacaccactaggttgttcacatacttgactgtaaatctcacaagttatgcatttcagtacttgattagtccacattctaccattgaagtgtcaactcaatgactgttgcatcgctttgttgttatctattttgcagaaatagaata

SEQ ID NO: 288 - DNA, 5584 bp, Zea mays
  Intron number 2 from transcript GRMZM5G874167_T02 (locus G RMZM5G874167) derived from phytozome v7.0 (chr-ID 2; pos 1 63445345 to 163450928 reverse strand)
ctacaaaagtatttgagcttgattctgccaatcaggtcaacttgttttctctagtaattctgaattattttcttgtcttgacctatcattgatgtgatccatagaattcaatatttatcattgttggtactctatagttccatgctgcaactatgatactattcaataactagttcctaatattggtaactgtatgctttcactaatgcagtttgtgttgtactgtatttcaaaatttgtcgtatcagtttcgtgagcctagttgtaagacttgtggtctatgctctttagggattggtgattagagagagagagagggagggagggagggactatcaacctggcccaactaggttttttctcgcgtgaccgcctgtctacacaatggcaatgcataggactagaagtctaggcgataatatttggattggattagtttggagttggataatatttggacctaaagtccgtaaaatgtttttgattatgggtatccagaacatggtgtccaaacatcaattggatattcatctgtgccaatctgccctaacatgttgcatcatcttcgttctagtctcccactgcagctgtaggtaaaaggctgcctctgtctgttcaacatcgcctagatggagtggagtgctgctcctaggccacctccaagcagaattccgtatcggacgctcttgtccatgactaaagtagacatccatctagctctattccttctttggatctccctacaatctcacaaactgcctagcacccccctggattacgtcgcctacagctaggccaaccttgctatcaccaagggcgatgcccccaaggagatcaataatgccaacaagtatggcatccatggcatcctcttcatcgacaatgtccgcaaggattgcaacaacgccatgaccaagggtctattgttggttagatgttaattggattatggatggaccttgaatgttcaacaggtgaattgcattggattttctatgttttaaactggactggaggtggattcttcttgtttggatttttcttggattcctcttgttaacgcctggggaaggccacaccctcaacacccaccaagatgcattcaaggatctcgttataggaagctattgtggggcccactatgttgggaccatcgctctctggagctccaagcttggagacttcccttggcctcggctagaggagcttgatgcccagaggcttgacattagggcaccccaaacggataactatgcactaagatttgtaaagtcactcgaagaaccaagcccacctgcgcccaagggcaatctaaggccctatttgtttgagctgcaacttttggagcttttatgaaaagttgctgtagagtttttgattctgagaagtcaatgatagcttttcagtgatgttattagcttcctaaacttaggaaggtacaaaaagcccataaaatcaggcttttcaattgccaatataaactcagctttttgagcttctggctttctagaagtttgtttgaacttctggctttttacgctgagaagttacccagaagctcaaacaagcagggcctaagggcctaggacatgcagtgtctcgagaaagcccaataagggaataatataagccctcaggagccttgtgcccagaaggggtagttcagtttaatttctaccgtacagtacgttgatgggctcatgcatgcagagatcgatgaccaacgcgtacatgatggatgtgcgtatacacctgcaggccactaccactactccactagagtagagctgaagttacacgtaccgtacgtacgtacgtatacatgtagtccgtacatagtttattctgatgatagatcagtttagtttagactgctgataatggagggatcgataggtttccgatctgttagaaaaatgtgacatgtgtgtgatcaatcccaaggggtgcgacagttatcccaccaaaggacacaccccttgggatgcaccccatcacttgtatataaatgtagattctctctgcaaataacagtgaaacagtcattcttcccaatcttgtttttattcattcataacacgttatcagcacgtgctcgcgagaagagagggagaagagaagagaacactcgctgtttggagatcacgatggaaaggaggaacaaacctagctctcatctttttttaacgtatcccgtgtctgcgacacaacacgtgtattcacaagttcattccaccaaatgatagcaaaatccttgaactcactagtagcttatctaaccctatgatgccgaggaataagatgagaactattttttcgttcaatagtcatttcccaatccatgtaaagcctctgcaccataagcaccatagaaaggtgaaatagaaaatttgatcttagtaaaatgatcattattattaccatggtcatcattataatggtgatgaatgggggtgtcgatgaggacctctcataccttggtaattacgatcaaggtgtcaacgtagatgttcctcaagagtggctcgtggctttgcttcgtcaaactcatcatctctcacctcatcaactgctacaataacaaatttgtcgtcgttgcctaacctatccatccgatcaacaaggctagaaactcgtctattcattctgttgaaagatgcctctgatgtaccttggtactttcggaaagtagtagtcatcgttcgcatcatgtgatcatgtcacaaagctttagatgggacacacactccttgtctgctagctgttccatgttctcttccatggttatattagttacaaaagatacaacaataggtataactcctatgtcctatgactactcagtggaatagaaggtgaaaacgaaataggatgaagcgtcttacccaactcttacaaagttctcaccagcattgcagtggcaaatgatgatggacataagattataagaacatggagcatggtcaaaggagcacatgttttgctcaggagaatatggagtttgggatgatatatatatgcgtgcatgcatggggtgtggcgtgggggtgtgggtagggatgaaaacagccgggatcggtcgggataacccctctaccgttttcattttcgtattttattttggaaatgggatcagtaacggtactatcggaagcggcatcgaaaacgggactagcgggatgatggaaatgaatcaaaacgaatggaataaatcgatagtggatcggaatcggatgtaaaaacggaaacaacgccgcatgtgtcctagttattggcatcaatacaatattagggcgattgtatgcaagatcaaggaagctaacaagtatgaagggatagcaataacaacgaacaattaataggacatatcacaaagcacaattgaatggtgctcgtgcctatatgcaacaattgtttttctgtttttttgacacatttttcatttgtttttctgttttttatattttctcttaatcaacaacacataagatggaaccacaccaagttttagaaaaaatgttttagatttttctgttcataattgtgtcctgtgaaaaatctacaaaaactttaaaaagagtgcaggaacttcgaagctcgattactcaacttctaggcctaatttagcaaaatttaaaaggacgaaaataatgttgtcgatgagaaacaaatgcagattttttttctgaatgatttaaaagaagtttctaggccgaatttagcaaaattgaaaacgacgaacccggtgttatcaaggagaaacagatggattttttttcttagtgatttttaaaaagtttctgattttgaattcatatgtgaaagttatggctgttttaagaaatgtcaccgaatcagggttttgggaagcacaaaacgttggaaattggtgggtgaaatttctggacagcaactgattggtgggtggaatttgtggatgacaacgcatgggttcacaaaaaatgaacaaacaacgatctaaaccagcaaccggacttgacctaggatacaaacttagaactacggactccaaaactgaattgtgcaaaggctaatcaatggttgtaggaaggtaaaacataaacgtattgtgtgttttttgtggactatgttacgagcacaaaaatcaatctaaagggcacataaaaatacggaataacctgatatctgacaccagttgatagaaggattaggctcgatcttttgaaaggtaagtcgattgaggtggagatctcgacgttgatgatccaaggctccgaacgaattacaagagctcgatgttgatgatccaaggcttcgaatgaattacaagagcatgaacacgtcaattaaacatctaggtacattctttggagggaaattagcaagtgactgcaaatgtaacttatattgtttattgacttgtaagggcaccacagtgaagcgaccagaaaaccttgttaccattgatgggccttattttgcacttgattttttttatgagaaaggaatgtatcagctctcttgtgtacaacaacaacaaagcctttttgtcccaagtaagttggggtaggttagggatgaaacccagcagaaaccacaagtctcctgcgcatttgagaaaaaaaaccttgttttgtcgaattcaatttctgatattctaaaagacagagaggctcattcctaggctctttgtctctagctgtgtgttgctttggtgtggcaactttagacgaagttgcactgtgggtcaccctagaaataacagacacaccttatactgcattgaactgttcaatcatcctatgcgtgcactattttctatttaagtttcttttttgcgaatttgatttagcttaataaaatatatagttgctactctcttgcttctttggtgattctttcttagcagcatttgaaaaacattatgaattttggggataggcaacatacaatatgatttacctgtcatatgatattaaaaccatccattggtgaaagagaatccatttgattgagatgcattcttgttaacccacaacaggcagggtgtcttgtggatggttcagaagtgtccctttgttacatcacataaacaataatttttctgccaaatttcttcaaaacccgatcttgatcatcgtaaaaaccaatgaactctaacatgtatttgcaaatgtaggttctttacctataaaggcaacgaatgcagtacacaagctatgctgttatgctttctgaaatgatgggacatgcaaatcacttaggttagccatgcgcccatgcgtgtcagttttgtttaattctggttgttcagcttctcgtggcaactgcgcaaatacagttgggtcatgctcgcctcgttccttgttcagcttgaatgattttgtccatggttaatcatcttcagtggaaaccaaccgtaatagatcaccagcgctggtgggtacttggcgcaacacctgacagagctgcctgtgtctgttccaccggcgtatttttttttgcccttcctaacagatccatggtgttgagcagctacatttttgttttgtgtataaaataatcaggtggtggtgaaaaacgcggaggcatacacctacga

SEQ ID NO: 289 - DNA, 64877 bp, Zea mays
  Intron number 1 from transcript GRMZM2G019006_T01 (locus G RMZM2G019006) derived from phytozome v7.0 (chr-ID 5; pos 2 9707649 to 29772525 reverse strand)
tggcggtaagtttcagttttttttattttttttattgttacaacttaatagactaaagattattgtttatgttttctgttgtactgctctctgttttctttcggttataacttcatgactatagccatgtatacgtctaggcttgcctgatcggtatatacttgtgtcttcttccaaccggaattcaggtctgacttttagcactcatgttaaggactagagactaaagtcaatcagtccctattttagtcctttcgtttggcaaaaaagactaaacaagactaaaagctaaggactaaagattagtctcggcgctttaatttggctgtcaaacccagcaggtgactgatgtttgcctctgggacagtgaaatggagctactgctagataggatgtgtacactactactagctagtatacggctgggagaggcggccttgtcgtcttcattgtaaaggcgagttggtaataagtgtaaaacgttgacattttcattattgcaaaaaaaaaaaatccatagctgtcgataagctacggggccgagaggattaaaaagaaaggaaccatgattgtttgtgtcgctgtcaaaatcattattagaaccagccggacggtgaaatctgcatgcaaagctagcttgatgattagaaacagctgggaccgctttaattaatttgtagcaacaaccttgtatacaccgatctatctatagcatctgctatagtgatgaagttatagtcaattatgaacaagacattggactgttttctcttctgttttctgtacccaatgattttcttttgtactgctctctgttttctgttttctgtacccaatgattttctttctgttgtaatgctgttctaattatgttttctgctctctgtttgtctaattatgttttctaagttatgcttctgaagtaatgttttcagaagtaatgctctctgtttaatgaagtaatgttttctgttttctgttttgtctaattatggagtactgtttttaactcttttgaattatgctttctgaattatgcttctgaagtaattttctgagaacagcatgtttgtctaattatgttttctgaattatgcttctgaagtaatgtttttaactcttttgtcaaattgttttctgcagaaaaataaagaagctaatgggtacagacacaagacatttttatattgggactcgatcaacttggtgtttgggaaagatcatgcaaccggtgaagcggcaaagaccccagctgatggtgcgagagatatgagtaaggaagagggaaccggtaaagagcttacttcatcaacaacctcaggaagcttgaagaggcaacgttccagtgattccttcacctcaatgatggcggagaaattagacaagttcactgaagctattagggatgaagcaccaaaaggcccgacatcaaaagaaatttttagcacattggaggagatagatgggttagatgaagacacatttttagacttgtttgatatcttaacaggtgatgcgcgcaagtacgagtccttattggcacttccattgattctgaggaagagatggctgttgaagcaacttaaaaagtgaaccgatttgtggttgggtgaattgaactggtgttgggtgtgttgatgttgttgtcttagtttatgttgggtgaattgaacatcacattgagtagcaagtaatgtgttccaatgatatgtggacatttgagacaaatatgcatcattattactattctcgtgatgcattctgcttgataaattgtagggtgaaaacttgtgtattttgttgtgtgcaagttgatgtggttacttccctccaaatatgtaaattccatatataactatccaaacaagatattgaatttgattcatggaaaagaattccattggcatccaaacaaaaaaattgaattgaatcaaattctaaggaattactttctttaggaatctaatatctagaatgttattcatggaatgagtttcatttccaaggaaacaaacgggccctaagggaatggggtatgccgaagcttgaaggagagaagaagaagaatgagctccttcggctgccctatcatttcaagttcaaaaaacacttcaaagaaccttgccaagaatggctggatacaattgaagttatgtgcaactagattttgggcaattatacgagaaaagaagatcagttgatgaatgcagccttcggcgcccgaccgaagcgaagattgaatcgagtaatggatgctctaaattttgaatatcctaactatgagcgattgaacaagggcaccgaagggcataaaagaaaaagagttgtcagtgttgtgggcagacagaccgctagaatggtaaaagaagatgaagaaaacctgaagaagagaaaactgagccctgagccgaaggcagttgctccgaagaaaaggaaagttgcggctccgaagcagaaggcgactgatatagaagaagaaactccttcaacaccttctgttgccgacgtggaagaaattctaaagataatgactgaatccttgcctatcaagctaagtccacttgggccacatctgacgaagcttttacagaagaaggagccctcggcaacgaagaagtctgctgaaccaaaaaaacgaagaattattactgtgactgaagccattgaagaaacaccaccgccagcttcggcgtcaaagacaccagctgtcgagagggctatagctgccgaagctgcgcctactgaagctatatctgccgaaggtgcaactgccgaagatgcaaatttagaaagcacactctctaatattgataaaatacttctggacatggccgcagaagaagctgctacagccgccgaagaagctgctacagccgccgaagagaccatggccacagtgcctgggaaagagaaggagatagccgaagatacttcagaagaagagaacttcaactttcaaaacttaattgggcaagaattgtcaaaggctgagaaagaagagttaagagactatgccatatcctgcgggtatcagccaggggcgatgctctttagcggtattgacgatgaaagcttgcttcccgccgaaggtgaaaaacaccttcccttcttttcttacacaacaaagcatgaatcttctttaaagctgtattcttagagccgaagcaactgtttgtatttgtatgatatgataatgatgatgatcctatgtatgtctaaatgaatgtttatgaatgcaatgtatgatgtaatgtatcgtgcaaatgaatgctcaaacacacacattcggagcttcatccacaaccttcattcccttaggaataactgaaatctctttgccgttatttttttggctgcaccgcttatttttcggtgtaagttctgcatccccttaggaacgtcttttgaacttcttcgccttctatttcggcggtattcgcgttgacttttcgcgcttcgccttatatttcggcggtatttggctctgcattcccttaggaacgacttttgagcagaaaacttatgttgcgctcccttaagaacgactttttgtagcttcgtcatgctctacatccccttagggacgactttcgagcttctccctgttttttttctctgcactcgatgggggatattgctctcatggagttgaataagaaaagaaaaaattacaaactatggccccattaaaaacctttctccccctttagaaaggaaaagggtgccatagaaaaatgaaaaagattacatcaatctatacataataccgtcgaagctcatccgcgttccaagatctaggaatttcattgccatccatatcctttaatctgtaagaaccgggctgttgggggccttcggctttcgaaggtcctcaaaaacatgatttaacaatgtttctggagtataatacatgaacaggtatcttcggatttggatcagaactacaacatgaagaggcacaaagaacacgaaggttggcgcagagccaaagctatgtgcaggagagcttcggcatgacagcagaaaagggaaccgacttaaaaaggaaaaggctattcagacctcgatggattactatagggtcattagcaaatgtaaagggcatgggtgtaattttacatgggctgcgtcccatgcctataaataggtgaacagtatcctcgtactgttcacgctgacttggcatttgctttcgcttcacgcttgtacccttgctttccttcaagccgaaggtacatttgtaatttgttattgttaatatagtaacacaaataaaaataaattaataacaatgtttaaagtttttatattatttttcatatcttgtgtatgaatccttctccatcatttattgtgcttatgaaggcttgtcattcataaccttcgtccgggattcattatatccgaagggagataatgcttcgaaggacgaaggactttatcatttaacatttgttatgttgccttgttcttaactcttagcttttgagaacaagtccccaacattggcgcccacctccggtgaactcacttccacttttttgagtttcgaacaccttcggcaagcataccttcgtcatgccgccaaagaaagcttcagcaacaggggctgcagctctgcaaccgctggaccccaaccaggagaccctctctcttcaggaggcccgaagccagaagaggaaggccaccagtccaacgcctcaggaggacgaattggatcaagagatcagagatatggagatgctccattagcaggtgcaaaggaaaaaggaaaagatggctaggctagctgacctgcaaaggcagatagacgaagcctctgaagaagttcgccatcttactcaagatgagcagaaccgaaggcctcagcacagagagcttcatcaggagggcttcttcaacgaagatgactggtatgagaatttccatcgtggaaattttgcttttgatgatgcttctcctctgtcagcagaactgcaggctacaccttggcctccgtcctacaagccacctcaactccccatatacgatggccactcagatccgaagcagtttctgatgagctacgaagcaacaatatcttcctatggtggcaatactgcagtcatggtgaagtctttcgtcatggctgtcaagaatgttgcacaaacctgatactcctcccttcggccaggaacaatcacatcatggcagaagctgaaggatatgctgatcaccagtttccaagggtttcaaacgaagccggtcaccgctcacgctttattccagtgcacccaagatcacgaagccggaaaccatctgctgcttctgtttctttggtttccaaggatttcatcttagtgggctctgaaggcccagcttcagtctcagattggtgctttgaagcttcggcaccaaaggcttcgatttgtacttcgggaatttcggcaattttcttcggagtagtgcttgaagactttattgtctccaatacatccaatacattaaccatcctttttcttttgggggtcattgctggacccttttggctttttcatacttcaatttttgccgaaggacttaaaatttcagatgtccttgtttctttagcctttggctcttctattttctccatctccggcattgtgaccggctcttcaatattcggcaggggagtcggctccttggctttggtggccgaagaggtttcaccgacaaattcaggcactgtggccggttcaatatagcgtggccggtgcgtaagaaccttcatctttttcctcttcggcgctggctcactaggagcgactgaagcaacttccttcgcaaaagccgtatctttccttttttgaccccgtgttgggtaacggtagtcaggataaacgaacccaatggcatcaaatactcgattgagccttttcttcttccggcctccgaaggctacagacagtgcagtggcctcaatatatttcagccagtcatcatctggctcgaaaaactgatctccatatctaaaggtatattttagcctaactagtccaccttcgtcaggtttgctgatggtttcctttggtatttcccacttttccacaagtggccatactctgaaggcaatatgctcctggatcaaatccctcgtcccgatgaaagaacaaactacactgaaggctctccggtattctttggctgctttgtcaatttccaccttcggtttccgaaggccgaagcgctgctagatagggtgcataatgatatctttaatatcttctcgcgtcttcaagtcgttcttcgcatagaaccattccttcatccagtccccaggccatctcttccgaaaagttggcacgagacaacttgacctagagcgggcgccgaagctatagcagccaaaattgttatggtattgctctttaccccagggttttgtctcatataataactcatgcatgctacagaaacttttggcatttggctccagaccttggcttttcacagcccatacgaagattcccatccttatgattgcttcgggagtaatttgatggaggcagatttcaaatatcttcaaaacttctacgacgaaactgctcaaaggaaaccgaagtccagccttaaagaagctttggaatatcacgacttcattctcctcgggagtcggacaagttttctctccttcgtcagccctcacaatagataaatcccgaaaatatctacccctcatattgacaagatggctttgtttaatgcttgattttccaaaaactgcatggcttggtcgccaaggtcgatcttcggaatcttcaccaccactttccacatcatagctgtcactatcaccagtgtcttcagataggccctctaaaatctccttagtaatcttctctgtgtttgtctttgctattgattcaaggaagccgagattcatctcttcgaaaaggcttagcttcgactcagcgacaactttcttgttttcagacatcttcgaaaatgctaagaaagtgctctcaaagacgaagcttaaaaatttaaaaaagcaggcaagcgttggtgtgcaaagagctaaaaattaggaaggcaagagcagacggcaagaaagcatgctaaatgtgctcgcggtgcgttcttatttatacgcccaatacgttgcaagtgccagggccccacttgtcattgactattgctattctagcaaagggaagatgtttttttcggaccttcggcttaaggccttcgtctatatcgcaatctgaatttgtcattctaacaaattaatattgcgaggggctactgttgggggccttcggcttccgaaggtcctcaaaaacatgatttaacaatgtttctggagtataatacatgaacaggtatcttcggatttggatcagaactacaacatgaagaggcacaaagaacacgaaggttggcgcagagccgaagctatgtgcaggagagcttcggcatgacagcagaaaagggaaccgacttaaaaaggaaaaggctattcagacctcgatggattactatagggtcattagcaaatgtaaagggcatgggtgtaattttacatgggctgcgtcccgtgcctataaataggtgaacagtatccccgtactgttcacgctgacttggcatttgctttcgcttcacgcttgtacccttgctttccttcaagccgaaggtacatttgtaatttgttattgttaatatagtaacacaaataaaaataaattaataacaatgtttaaagtttttatattatttttcatatcttgtgtatgaatccttctccatcatttattgtgcttatgaaggcttgtccttcataaccttcgtccgggattcattatatctgaagggagataatgcttcgaaggacgaaggactttatcatttaacatttgttatgttgccttgttcttaactcttagcttttgagaacaagtccccaacacgggccttgacgaagatactaccaaaaaaggtccttcccaattcagctgtagtttgcctactgtgtccggattagccactctccgaagctccaaatgtcctggcttgatatttttcagtcggacttttctgtcgcgccattttattgtttcggcttggtatttattaatattctccacagcctgaagtctggtcccttctatggcatcttttgccacagaataatcggcttcgtcctctgctaaagctactattctaattgaccctgccttagcttcttctggggttatagcttcatcaccaaacaataacttgaatggtgtaaaacctgtagaccttgatattgttgtgttgtggctctacaccactttaatcaacttatctggccactttcctctgggctgattgaagattaacttcattattcccgtcattataatgccatttgctctttcgacaagtccatttgactctggatgtctaactaatgcaaaatgaatcttcgtgccaatctgatcatataattccttgaaagcttcgacatcaaattgtgttccattgtctacagtgatagcgtttggcacgccgaagcgacaaacaatattttgccagaagaatttctggactgtgaccgaagttattgtggctaaaggctttgcctcaatccacttggaaaaatattctaccgccaccacaacatattttaaattgccttgtgctggtggaagtggacctagcaaatcgaggccacatctttgcaacggcaagtgggttgtattaattgagtgagagatgaaggttgcttctggtctcttgcacatttttgacagccttcatatttttggactagctctgctgcatccgaagctgccttcggccagtaaaatccttgttgaaaaacttttcccagcaagggcctagacccaatgtgagatccacatagacctgcgtgtatctctttcattaattcaataccttcagctcttgataaacacttgaggagtggggaacagtctccatatttatacaattccccttctattatcacatatggtcttgtccttgcctccattctcttgttataagcttcgtcacttgaaagacaattgccttggaggaaagatatgatttcagtcctccaatcttcactgtgtactagagaaatagtaagtactgctctctccatgagttcaaccgaaggtgcttctattgtttcaaaaaatacttccgaaggtaaagggatcccctgagccgccgatttggctagcaaatctgcatgctcattttcacctcttggaatattcttgacagaaaaaccttcgaaagaagcctccaaccttcgaactatatccagatatttctcaagcttcgggtctcttgccccgcaactcttattgagagcacctagagggggggtgaataggtgatcctgtaaaaacttgaaacttagtccaacaaaacttgattaggagttagcataataaggccaagtggctagagaggagttctcttgtgagacacaataaacacagtaaggacaagcacaagagacacaagaatttatcccgtggttcggccaagtacaaaacttgcctactccatgttgtggcgtcccaatggacgagagttgcactcaactcctctcaagtgatccaatgattaacttgaataccacggtgatcttctttactttactctttcccgtttgcgaggaatctccacaacttggagtctctcgcccttacaataagaatcaaaatgaagcactagagtaagggagggaagcaacacactcaaaaccacagcaaatacgcatacacaagaccaagacttgagctcaacacaatatctcaaggttctcactagaatggagctcaaatcactaagaatgtcgaacaagtgcgcaagaatgaagtgtgagtgatcaacaatgctcaaaggatgcttgctgtgctcctccatgcgcctaggggtccgttttatagccccaaggcagctaggagccgttgagagcattccaggaaggcaattcttgccttctgtcgcttggcgcaccagacagtccggtgcggatttctttccttctttggtgaagccgaccgttggagtttcagagccgttggcgcaccggacagtccggtgcccccttctgaccgttggctctgccacgcgtcgcgcgcggattacgcggccgaccgttggccgggccgactgttggctcaccggacagtccggtgatttatagccgtacaccgccgtcgaagtcccgagagcagccagttgacagacgcctgcctggcgcaccggacactgtccggtgcaccaccggacactgtccggggcaccaccggacagtccggggcacctagactgagcagactcttggctgcttcgatccaagcttttccaattgtattttctctgattctagcacttaggcaaacatgttagtacacaaaaaccaatgtactaagtctagaatcatacctttgtattgacttgcaccttatccaccatttggcatagtttatcatttaagcatttgtgttggacactaaatcaccaaaatacttagaaatggcccaagggcacttttccctttcaatctccccctttttggtgatttatgccaacacaacataaagcaactaaaagaagtgcaacatcaattcaaatgagaacacaaatttgttttgaatcagatttggcatatttggatcattctttgccaccacttggtttgtttttgcaaattaaacccaatttcctatctctaagtcaaatacacttgttgatgcatagagaaagatattccaagagaaattgatcaaagatttcaaaaactccccctttttcccataatcaaccattctccccacaagatgccaacttttgacaaaagagacaataagagatttttgacaaaccaaaagctctattcaactattttcaaaattctcaagtggtagctgatccatttattgctttggccttattttctccccctttggcatcaaacaccaaaacaggatcaatcttggcccttaaaccccattgcctcaccaaaatcttcaaataagagtacaaaggcaataaggatattgagataaacttggagtaatttaccctctcatcggagtgcagtggaagtcttgcatggtccaaatccaccttttccctttcaatccacctttgagactcaatcaagcaaactcaagcacacggttagtctcaaagggtcaagttgtagcacatctccccctaaatatgtgcatcactcacacatggacttttgaggcccggggagtgcttgtacaacttgagcaccatacataaacaactaaatgcataagaaacaagatcaaggcataaaacgcatgtatgctatgaatcaatctagattccacgaatctaagacatttagctcactacgcagcctgcaaaaggtcgactcatctagaggcttggtaaagatatcggctagctggttctcggtgctaacataaaacacttcgatatctcccttttgctggtggtctctcaaaaagtgatgccggatgtcaatgtgctttgtgcggctgtgttcaacaggattatccgccatgcggatagcactctcattatcacataggagtgggactttgctcagattgtagctaaagtcactgagggtttgcctcatccaaagtagttgcgcgcaacactgtcctgcggcaacatactcggcctcagcggtggatagggcaacagaggtttgtttcttagaactccacgacaccagggaccttactaagaattggcacgtccctgatgtacttttcctatcgaccttacatccagcatagtcggagtctgaatatccaattaagtcaaaggtagacccctttggataccagatcccgaagcaagatgtagctactaaatatctaagaattcgcttcacggccactaagtgacactcccttggatcagattgaaatctagcacacatgcgaacactaagcataatatccggtctactagcacataaataaagcaaagaacctattatggaccggtatgctttttgatcaacggacttacctcctttgttgaggtcggtgtgtccgtcggttcccattggagtttttgcgggcttggcgtccttcatcccaaaccgctttagcaagtcttgcgtgtacttcgtttgggagatgaaggtgccgtctttgagttgcttcacttggaacccaaggaagtagttcaactcgcccatcatcgacatctcgaatttctgagtcatcaccctgacacgtggtcggggtaccgttcatcctcaaagccagggggttgctctacgtatacctcctccttgattggcctgttaaggaaagcgctcttcacatccatttggaacaacctgaaagaatggtgagtggcatatgctagcaaaatgcgaatggactctagcctagccacaagagcaaaagtctcctcaaagtccaaacctgcgacttgggcataaccttttgccacaagtcgtgccttgttccttgtcaccaccccgtgctcgtcttgtttgttgcagaacacccacttggttcccacaacattttgcttgggacgaggcaccagtgtccaaacttcatttcttttgaagttattgagctcttcctgcatggccaacacccagtccggatctagcaaggcctcttctaccctgaaaggctcaatagaagagacaaaagagtaattctcacaaaaattaactaatctagagcaagtagttactcccttgctaatatcacccaatatttggtcgacaggatgattcctttgaatcgtcgctcgcacttgggttggaggtgctggttgtgcttcttcctccatcacatgatcatcttgtgctccccattgatcacatgcctcctcttgatgaacctgttcatcgtcttgagttgggggatgcaccattgttgaggaagaaggttgatcttgctccttttgttcctgtggccgcacgtctccaatcgccatggtgcgtattgcggccgtcggaacatcttcttcatctacatcatcaagatcaacaacttgctctcttggagagccattagtctcatcaaatacaacgtcgttagagacttcaaccaaacccgatgatttgttgaagaccctatacgcctttgtatttgaatcataacctaaaaaaacccttctacagctttgggagcaaacttagaatttctacctttctttactagaatatagcacttgctcccaaatacacgaaagtaagacacattgggtttgttaccggttagtagttcgtatgaagtcttcttgaggaggcgatgaaggtagacccggtttatggcgtggcaagccgtgttcatggcttccgaccaaaaccgctcgggtgtcttgaactctccaagcattgtcctcgccatgtctataagcgtcctgttcttcctctctatcacaccattttgctgtggtgtgtagggagcggagaactcatgcttgattccttcctcctcaaggtactcctccacttgaaggttcttgaactcggacccgttgtcgctccttatcttcttcaccttgagctcaaactcattctgagccctccttaggaagcgcttgagggtcccttgggtttcagatttatcctgcaaaaagaatacccaagtgaagcgggaaaaatcatcaactataacaagaccatacttacttcctcctatgcttagataggcgacgggtccgaagaggtccatatgaagtaactccaggggtcttgatgttgtcatcacatttttggcatgatgagagcttcccacctgtttacctgcttgacaagctgcacaaggtctatctttttcgaaagttacattagttagacctatcacgtgttctccctttagaagcttgtgaaggttcttcatccccgcatgtgctaaacggcgatgccacagccagcccatgctagtcttagcaattaagcatgcatcaagatcggcctcctcttttgcaaaatcaactaaataaagtttgccgtctagtacacccttaaaagctaatgaaccatcacttcttctacagacggacacatctacatttgtgaataaacagttatatcccatattacaaagttgactcacagataacaggttatatccaagcgactcaactaagaacacattagaaatagagtgctcggatgaaatagcaatttttcctaaccctttcaccttgccttggttcccatcaccgaatatgattgaatcttggggatccttgttcttgacgtaggaagagaacatcctcttttcccccgtcatgtggtttgtgcatccgctgtcgataatccagcttgagcccccggatgcataaacctgcaaggcaaatttaggcttgggtcttaggtacccaactcatgttgggtcctacaaggttagttacaatggtcttagggacccaaatgcaagtcttgtctcccttacatttggcccctaatttcctagcaattaccttcttatcctttctacaaatagcaaaggaagcattgcaagcataataaattgtagaaggttcattcattactttcctaggaacatgaacaatatttcttctaggcatatgatgaacaacatttttcctagtcaaagttttatcatgcataatagaagaactagaagcaatcatggcatgagaattaaaagcatcataacttctataaacattcctagaatgtctcctatcatgatacatgaaagcatggttcttttgagcactactagccataggggccttccctttctccttggcggagatggaagccttatgacttgttacgttcttgacttccctcttgaagtcaagaccatccttaattaaggggtgtctaccaatcgtgtaggcatcccttgcaaattttagtttgtcaaattcactcttgctagtcttaaggtgggcattaagactagccacttcatcattcaatttagaaattgaaactaggtgttcactacaagcatcaacattaaagtctttacacctattgcaaactacaacatgttctacacaagatgttgatttattagctatttctaacttagcattcaaatcatcatttatgctctttaagctagaaatagagtcatggcatgtagacaattcacaagaaagcatttcatttcttttaatttctacagcaagggatttttgtgcctctacaaacttatcatgttcttcatacaagagatcctcttgcttttctaataacctattcttatcattcaaggcatcaattaattcattaattttatcaaccttagttctatctaggcccttgaataaacatgagtagtctatttcatcatcgctagattcttcatcacttgaggaagcgtaagtactagtattatgagtgcttaccttcttttcccttgccatgagacaggtgtgatgctcgttggggaagagggccgacttgttgaaggcggtggcggcgagtccttcgttgtcggagtcggacgacgaacaatccgagtcccactccttgccaaggtgtgtctcgcccttagccttcttgtaaggcttcttcttttccctcttgtttccttgttcctggtcactatcattatcgggacaattagcgataaaatgaccaatcttaccacatttgaagcatgagcgctttcccttcgtcttggtcttgttgggatgctccttgcgaccccttagcgccgtcttgaaacgcttgatgatgagggccatttcttcatcattaagcccgaccgcctcaacttgcgccaccttgctaggtagcgcctccttgctcctcgttgccttgagagcaatagtttgaggctcttggattgggccattcaatgcatcatcaacgtatctagcctccttgatcatcatccgcctgcttacgaactttccaagtatctcctcgggcgtcatcttggtgtacctaggattctcacgaatattgttcacaagatgtggatcaaggacagtaaaggaccttagcattaggcggacgacgtcgtggtccgtccatcgtgtgcttccatagctccttattttgttgacgagggtcttgagccggttgtatgtttgggttggctccttgcccctgatcattgcgaatctcccaagttcgccctccaccaattccattttggtgagcatggtgacgtcgttccctcatgtgagatcttgagggtgtcccaaatctgcttggcgttatccaagccgctcaccttatggtattcatccctgcacaatgaagctagaagaacagtagtagtttgtgcatttttgtgaatttgttcattaatgaacatgggactatccgtactatcaaagtgcattccattttctactatttcccatatacttggatgaagagagagcaagtgactacgcattttgtgactccaaaatccgtagtcctccccatcaaagtgtggaggtttgccaagaggaatggaaagcaaatgtgcatttgaactatgagaaatacgagaataatcaaaagagaagtttgaattaaccgtcttctttttctcatagtcgttgttgtcgtccttttgggaagaagaggactcgtcgctgtcgtcgtagtagatgatcttcttgatgcgccttgttttcttcttcctcccgtcttttctcttgtggcccgaacctgagtcagtaggcttgtcatcctttggatcattgacgaaggactccttcttatcattgaccaccatccccttgcccttaagacccatctcttcgggcgattagtccctcacgtgaagagaacggctccgataccaattgagagcacctagaggggggtgaataggtgatcctgtaaaaacttgaaacttaatccaacaaaacttgattaggagttagcacaataaggccaagtggctagagaggagttctcttgtgagacacaataaacacagtaaggacaagcacaagagacacggggatttatcccgtggttcggccaagtacaaaacttgcctactccatgttgtggcgtcccaacggacgagagttgcactcaactcctctcaagtgatccaatgatcaacttgaataccacggtgatcttctttactttactctttcccgtttgcgaggaatctccacaacttggagtctctcgctcttacaataagaatcaaaatgaagcactagagtaagggagggaagcaacacactcaaaaccacagcaaatacgcacacacaagaacaagacttgagctcaacacaatatctcaaggttctcactagaacggagctcaaatcactaagaatgtcgaacaagtgcgcaagaatgaagtgtgagtgatcaacaatgctcaaaggatgcttggtgtgctcctccatgcgcctaggggtccgttttatagccccaaggcagctaggagccgttgagagcattccaggaaggcaattcttgccttctgtcgcctggcgcaccggacagtccggtgcaccaccggacactgtccggtgcggatttctttccttctttgacgaagccgaccgttggagtttcagagccgttggcgcaccggacactgtccggtgcccccttctgaccgttggctctgccacgcgtcgcgcgcggattacgcggccgactgttggccgggccgactgttggctcaccggacaatccggtgcaccatcggacagtccggtgatttatagccgtacaccgccgtcgaagtcctgagagcagccagttgatagacgccagcctggcgcaccggacactgtccggtgcaccaccggacagtccggtgcaccaagactgagcagactcttggctgcttcgatccaagcttttccaattgtattttctctgattctagcacttagacaaacatgttagtacacaaaaaccaatgtactaagtctagaatcatacctttgtattgacttgcaccttatccaccatttggcgtagtctaaaatcaccaaaatacatagaaatggcccaagggcacatttccctttcacttatcaacatgcccagaaataacttgggaatcggttttaaggaccgcgcttcttatccccattgcctttaacttccgaagcgccaaaagcaaagttttgtattcagcaatattatttgtacaactgaaatcaagctttattgcatagcacattctgactttggaaggtgcaactaagacagcagccgcacctgccccgaaggttccctaggaaccgtcgcagaacactgtccaagcttcagcatctttatttgcttcttcttcctgagcccctggcatccagttagcgatgaagtctgctaacgcctgggactgaattgaggatctatgcacataatcaatgctgaatttgttgagttccacagcccactttccaatccttccagtagcttttctgttcctcatgatatccttcagaggctgtgatgaaggaacaattatatggaatgcttgaaaataatgtcgaagcttcctggaggccattaagacagcatacaacaccttctccaattatgtataatttttctttgataagcttagaaattttgagacaaagtatacaggggcttgctttttgatttgtccttccaatttctcctgcacaagcgccgcactcacagtagagtgcgaagctgccacatacaatagcaacggagcacctggcgtgggtggagttaatgttgttatatcaatcaagtattgcttcagctcttcgaaggctttctgctgagctggggcccattgaaagacttcagctgattttagtatttcaaagaatggcaagtttctttctactgatctagatataaatttgttcaatgaagccagtcttcctgccaaccgttgagcccccttctttgtgctcggtggttccattcgaaggatggcttcgatcttgcttgggttagcttcaatccccttcgttgaaaccagacagccaaggaacttacccttcttcactccaaagacacacttttcaggatttaattttaggccaacttgtctgaaattagcaaatgtttcttgcagatcagtgatatgattttcttgcttcatgctttttactatgatatcatcaacatatgttagcacatttctgcctatctgggaatgaaggaccttggccatcatcctgctgaaactgcctccagcatttttgaaccccttaggcattcgaagataacaataggttccactgggagttatgaagctagtcttcggctcatcctccttcttcatccatatttgatgatatcctgagtagcaatccagaagactcataagttctgaagaagctgctgcatccacaagagagtctatctttggtaatggaaattcgtcctttggacaggccttgttgagatccgtgaaatcaatacacattctccatttgccattggccttcttcaccataacagtattggctagccattctggatattttacttctctgatgacaccagcactgagaagtctttttacttcattccgagcaccttcggctttatcatcagacattttctaaagcctttgctttctgggcctgaaggatggattgacattaagtgaatgttcaatgacatccctgttgacaccacagagatcattggccgaccatgcgaaaacatctttgttgttcaataaaaaccttatcaaagttttttcctgctcttcagataattgagaccccagcagtaccttctgctctgctatgtcttcacatagaagcatgggcttcggctgatcagccgaagcagccttctctcttctgtacttgtactgctcacaagctttagctccatctatattgtggatggcttttgaatctgtccaatttccctcagccttcctggcagctttctgacttctatgaattgcaataggcccttgttccgaaggtatcttgatgcataggtatgctggatgaagaattgcttcgaaagcattaagtgtcccacggccaatgattgcatcgtaggggtattccatgtcaacaatatcaaaaacaacctgttcagtccttgtgttgtggacaaatccgaaggtcactgacattatgatcttgccaagtgctataatctgtcttcctccgaagccacaaagagggtgtgtagcaacatgaatcttgtcctctggctcttgcatctgtctgaaggctttagcaaatatgatatccgctgcactgcctgtatcaaccagaatattgtggaccagaaatcccttgatgacacaagatatgaccatagcatcattgtgagggtaatccttaagctgaaggttctcttgagagaaggtgattgggatgtgggaccattttgacttgatgaagggtccctgcaccccaacatgctgcacccttctctgggcctccttcttctgtttcttgttggccggttctgaacatgacccgcatgttatcgggagcaccagcttcgtagccgaagcagcttcagcttgggttttggacgaagccatcagctcaaaagtggaagtgagttcaccggagttgggcgccaatgttgagaacttgttctcaaatgctatgagtcaagaacaagacaacacaaagtattaaatgttaatgtccttcgtccttcgaagcattatttcccttaggatataacgatcttcggaggaaggtcatgaaggacataccttcatcattatgatataagaaaatgaaaggcgaaacatatgaaacatgaaagataacatgaacaaacatataatatcattcacatgtcttcattatataaacttggatatttaaatacgatatttaattacatttataccttcggcttgacagaaggcaaaaatccgagtgttgtgcccgagcgaatacaagatagcgtgaacagtacaggggtactgatcatctatttataggcacaggacacagcctatgagaaattacattcatatcctttacaaaggtttacaatcataatacaagttatcacgggccgattggtcatttcatctttaagtcggtgcatttagaaatgtactccgaagctctttaattgatagcttcagttttgtgctagtcttccgaaggtgtttcttcttatgggaccttcggcgacaaagaagacccctaacaataatgatcttttcataaacagtaataataaactgataataaaagtgtgaacatgagtaatgtctatcttcatacctaaaaccacataaagcaataacatgtactacccaaaaattcagtggtaaaacaaggtataaagatagccaaactagggtaacctattgggtcccatcaaaattaacctatgcagatcattatgattgataagaacatgactgggtaaaaaggaagtgatcaagggcacaacttgccttcaatgagctcctgctcagcaactcctatctgctgaacactgggatcctcagccaatggctcttctactcgccacaatacaaacaagcatagtataaagaggaaattaatatcacaccaaacatgtaaacaaaatacacattaataatctacatattaaaataagatcataggaacatgaatcattaattttggagttatagattttaagttatgactttccaaagattttatgtgttggatacaagattaactaggatataaattttaatgtggctttcatgtcaaaacagtggcactaattgataaacaataatattgtaaaattatagaaattagaatggattaatttggactaagtatgaattttctatgaattaaacaagttctaggaattgttttcatattaaaaattcattttctaatttatttatccaatttaaatgatctctggactgcgcgctaaaaactgtgaagcgcaggggtctcggtgcaagatccccgagacatagtgaatagttcctgtggaccgcgggttgtttcttatctttcgcggggtttcttacgcaaataagccaaacaaaagggtatcggtgaatccaggccgtccgatctctgcccatcggcctgaattaggtctctattaactcgaatcagtacgcactctcggccaccggatccaaatccgacgcccatgatttcatgagacccagtatgagtaaccaccatctgatctcgatcggacggttatgattcaattgatcgaagcggtacacacaatctgatcaaggccgtcgccacgtatatcaacggccgatcgcccgtcttccccaacgcgatgctcgcagtggaggcggtgctctcgtacacggcggagacttcaccatcaaattctaaggcccagtttccacccgaaaatccctaaccaacgggtgcataccctagtggagaagattgcggggctaggaagggtggtctcaccggttattgtagcgcgggtggttctggtcgcgaagaagagcggcgcccgtgacagccaagagctccgacgagcaattactgagttctagagcgtccaaccaaaccgattcacaacgcgcacgaacatgggttcccggccgcacaccaaagcgcagaatcggggcagatcgatgcctagaggcgcagtgggatgacggtggtgatgtacttttgcacgggttgcagctgcgcattggatgatgtgggggaacgacggcgagaaatggaatgtaggagtgggcgaggtcgaggggttcgctatttatgggtgaggtggtgcggtgttgtggcccgcttgtcccggcaaggatcacggcgaggccggtacgccacccgtgactgagctggttggaagcccaccgtggcactgggcccacccgccagagactgtgatagcgcgtgaatggctgacatgcgggaccgccaactagtgacgctaactcgaacacgcgcgagatcgtgggcgttgcctagtgggccccacacgtcgacaaaaaggaaagaaaggagcgtgcacgtgactgacgtaggggacccgcctattagggagacatcaaggatggcgcgcgcggatttcgtttgtgggccgagcgggagtgaggtagtgatagtgagctggttctttagggtttcagcccatgcaccactttttctttttattttccttttcctttttctgatttatattttccccttctcatttgaattcaattttcaaactcaaatcatgtggtaaaatttatcctcaaattgaaagtataatttgaacatactagtcttacttttatttataatatttattttgtatatattttctttataatacttcttttcttccctctccacatttctttagagtgttgttttccaaattagagtttaaattctatggtcccattaatatattgtttgtcggtgggagaaatccaccggccgggtggcggaacgcacccgccctaatcctaagatgaggagggggcctaagcggttgcctgttcggtgaatgcggatgaacacacggggacacgagggattatagtggttcaggccgccgaagcgtaataccctacctccactatttaagtagtattgagagtgtgattgagtccgtgagcttgagagtctgtcccttgtaacgctgtgtgccttcccttttatagtttaagggaggcacatacaaggatgctgagccccgacatgcgggcctaggagcataatggtaggaatacattatgtgaatagtaaatgctgatagtacacaaagatcctccgccttagtaacgcacgagtaatcagcgggagtcatgatgaccgcaatccatgccgcattgatagtcagtaacgtgcgagtaatggcacaacccgcgtatcgtggactgggcacgccgcctgtcagtggaatggacaggcacacgtcttatctgtaatgaatgcgaaggcgcacgtagcccagaggcgtcatgctaggttccgcccattggcttatgccgcgtgcagtacgccacgtggtagcatcgggtctccgccagagcggggaggaggagcgtacgtgataaccagatcaggtatagacacgtgtcagcaccggacccccgcttgggtccagaacaaggcacgagtatgttctgtcctagaaccttgggatcccattgtgggtggcccggaccccatacgggggggggggggtccggatcccattcaggggtccggctggcacacatggaggtcctggaccaatcttggaggtccagactgtatatccaggggtccgacactctcccatggggggtccgaactcactgttgaggccttggggtctatcactttctctggacacgtggcggttctggacccgctaatgtggtggggtcaggcgctgttgtggacctagagtagtcgcctaaggccggggcgagtcatggcttggtcacacacacaacacccttaccacgcgactaagagatagccgcgtgggtactgcgtctttatacagtagcaaggggtaccctagtttcagggtaccgacagtggcccccaggcccacctcaggggaggatgcgagcctgcaggtggggccaaaacttgtactttgcttcgacatggcttgattggtgattggcgcaccgtttcagcgcgtctgctgacgtaccctttgtgaatctccttcggtcacgcctactaccatatctgtccccacggttgattgacccacggcccccacgcctggtggttttgtcgggccacgcgcggggcgcctcgttaccgctgcaatggtttaaaaaattaccttctgtcttctgcagcggccccgaggaggcgcactattgacacgtgcagcggtccgcttttctcgcacccgaaatccgactcgcaaagtgtatgacctgtggacccgagcccccgagtcatagactgggctgcttggatctaggtgtccgtcgcgcgcgatctcctgcggcgattgaggggcgtgcggaagggtttccctgaatgaggactcaggtttccttgaaaaaggattcacccgcgtgcagcagttaccctttcgcattctcttccaatcgactgcgcctctttgccttcgtgctcctctgcgcccctttgccttcgtgctcttctgctctacacccgtgccgccgcacaagccatgacttcgctcggccatcccgaccgctttcagtctgaggaggcactcaatctggtgcgtggcctgcttgggtggagtgcaccagggctcgccggaagaatccacaccagcatcgtcccctcgtcgatctcgccgccagggagttcgtgctatttacctcctacatctcctgcgggttggcgctgtcgatctcgcccttcttcttgttgctgctggaggagttcgggcttcagcttcagcacctcatgccccactccgtcctccaggcggccatcttcgtccacctctgtgagatgtttgcaggtgtggctccctgcacttctctcttccgccacttcttcgtgctggtcatgtccgggaagactagggaccacattagtgcctactacttccagacgaggccggatccagccgtcgtctacatccccaccctcggcggcgcgagatgggaaaactagggcagcgactaggtgattgccagcgccgaggccaacgaccgcctcgccctgccgagcgatggacctgcgctcgaccgcaagctgtggaggaccaagtcgtccctggcgccggagttcctgcccgtactgtacaagatcaagggcttggctacgggcggcctaacgtcgatgcacatggtcggcgacttcctgaagcgccggatcgcgccgctgcagaggagggcgcgcctgtgttgctggttcaccggcgcgaacgacatcggcaggatccagcgcgggccgagcaccgacctgttctgggatgagatggcggtcctggtgggagggattaccgaggaaaccttcgtccctgagtccctgatcctcccctagaacatccctgcgctctgcgacgacccagggctgaggacggcgatcttggccacgctgccgaccctcgacgagagcagcgtggtggtccaccagactggaggccgggacccccaccgcgggatccggatctccgatgcaccggctggaggtccccaggcctccggtgcggctcccagcgccccccgccgtgacccccagccccttggacaagggtaaaggggttgcaagcagcgcctccgccctaggtggcaccgaggggttggaggaagagaggcgacgccgcctgcgtcacgctgatgggtcgctcatttcagagcctccccagaagcgccagaggaccgtaggcggggccgaggaggcaagctcccaggcccacggcgcgcagaggcgcgtgagtcctccggtcccgccaccaccaccaccatcggaccccccgccaccaccaccaccaccatcggtcccactgccaccaccaccatctaggggtgatctccgccaggggcactagcagcaacaacaacagcagcagcagcagcagcaagagcggcgatctcgcttccagggtcactagaaggtccagggccccaagtaagtgtagctcctttttctttgagcttaatcgtcatgtcgacaagtcttaacccatcgtctatttttcagggcttcttccccctctgctcccaaggtcacacctcctccgccggtttccaggcccaccgacgagtctggctctcagcagcaggcatctgctgggagtggtgccagcgatccgcctccgactgctgccaagacaacgccagcagcttcccatgccccagtgggggggggggtctgtgccccctccggacgctgggggcgacgtaggaggcacgtctagctccaaccctccacctgctctggaggagatggaggtggtgttcaggcgacggctccggtctggtgccgggcaagaagctgcgccagtccccctccgccgtatgttgtcccgcgcccaccaggtccttagcgacactagggcagcaatcttatgggagttggggggcgcttgaggctgagcaccagcgcctcagcgactggcgcacccaattggaggagcgcaccaagttggcgtcccgacaattcctctccgagcggtcccaactcgagcaagaccacaaggagtacaagagggacctccaaaaggtgtgcgccagggagctagaggcgtcccggagggagaagaatgtgaccaggagggaggaggtcgtgtctcagcgggaggccctcacaacagagttccgggccaagctgagtgccctggaccagatcctggaagcccagcgggtccagcagaccaaggctgtggagaggctgcaaaagtggcagtaggagctcgagggcaaggccagcgacgccgccctcgccgaggagaagcttaaagcgaaggagcagtccttggacaggcgggagacggacctcgctaggcgggagacggatctcaccttccaggaagaaatgctcacccgacgaggcgagatgttggccgagcacgagctcgaggcggaggagaaagagaagaggttggaggagcggatccggcagttccaggcggtgcaggcggcgccaggtccctgggttatggaggcgaccaggaaagcacttgaagatctccaggtggagcaccgcgccgaggtccagcgtattgccgcgtgggccagtgaggcaagcacgacattggtgctgctagggatgagccctattccagtgtcggagctgccagcgtcgatctccgacgcgctcccgatgctggactccgccgccgatcgcctttggtgcctggaccagattcttggagcccgcttggaggcaaggggtggcaagctctgccgggcggtgatcgaatatatcttgacgtgcttccggagtcacgacccggccatatccttggagccggtgatcgctggttcggtggctgccactgaagacgccgcctaggagggcgtacaagacgccgcccgggagggcatacaagacgtcatggagctggtggtcgagcgcttccagcgggatcctgctgatgatgagtagccaaatctgtagaaacaaggcaagggtcccactggggagcggcttgtaataacttttggtagtgtaacatacttttgagaaccattaatcaagcagtattagtacttatctgtatgttatttgtcgtcgttgtgtgtagcgttaccaactttccctggtacttggctcccctgggatgtagactcgacgtgtcgaggctggataccagtacaccaaagaaaaagttggtggtccggtccctagggggtagtctctacagtttgagactgcctacctctggatggggacttggacctgcacatagcttcggccttgaagtgttagtagcacacccataaaacccatcgtctggtatctgccatccttcgattcatgcaacaggacctgaaggatttagcctgggaagccaagccttatgcccggacctacaggatcacaacccaaaatactagggtacccattgcagagtggtggagcatgcagtcttagggtatggaaccaggctaagcggctacacagctccggaccactctaggaaacgagcacccattctctagaactggtctgtaggttgccgaaccccctgtagcagtagaggggtcctgaactgcaagcctggctactcaattcggatgtgatcataccagcaagggtgagaactgtatgggtgggttagataaaaaataatacttgaaaaccgtagcagaataaaaccatcacagaagcacatctgggggggggtaaatcctttccttataacttgatatatatgggtgcagaccaacaggccgggcttacgagggcggacctcaccagattgacgtacacatatgcacaacccagttacaaaagaagaaaactcaaccccccagttttgcttctatggatagaacttacggagatgctctatattccagggattggggagaggcactcctttagtggtggcaaggcggacacacccgggtcggcatatttccgtcaccttgaagggtccttcccaactggggggagtttgtggagcccttctcggttcagtactcgccttaggactaggtccccgaccctgagctccctattatgcacgaaccgttggtggtagcgcctgagcgcttggttataccgtgcatttcggatcaccgctcgtcatctgcgttcgtcgatgaagtccacgtcctcacgctgtagctgttcctgcatagactcatcgaaagattggacccgtggggatcccataataatttctaggggaagacaggcttcggccccgtagaccaggaagaacggggtctccccggtagctcggctgggtgtggtccggttccaccatagtatggacggaagttcgttgacctaatttgcaccatgctttttcaagaattcataggtgcgtgtcttgagccctctgaggatttctgtgtttgccctctcagcttggccgttgctcctggggtgagccacagacgcaaagcagagatgggtgccgatgccctcgcaatactcttggaagagccaacttgtaaactgggtcccgttgtccgtaatgatacggcttgggaccccaaatctacagacaatcgacctgaggaaagcaacaacagcaccctgggtgatattgaccacaggggtggcctctggccactttgtgaacttgtcgatggcgacgaagaggaaacggtacccgccgacggccctggggaatggtcccaggatatccaccccccatacggcgaatggctaggagggtggaatcatctgcagagccagagctggtgtgtgtatctgctttgtatggaactgacacgctttgcaagactttaccatctcagatgcatcctggagagcggttggccagtagaaaccgtgccggaaggccttaccgaccagtgtgcaggatgacgaatgacttccgcactcacctccatggatctccgcgagcaattcacggccctcctcctgggtgatgcgccgcatgacaatgtcgttggcaccatggcggtagagatccccttctaccaccgcgtatcgtttagccaaccgcactatgcgctctgtggacacatgatcttcaggaaggatattttccttcaggtagtcccggatctcggagatccatgcatcgggaccactctaagatactggttgtggcgctaagaggttggcaggaccctgtgtagcgcacacaattttgggtgggttctgtagatggtatgccaccaggaccgctagcttcgaggtgttagtctcgtccccttcgcccagttccagggtcgtgaagtcctcttccagcttccttacgtggaggaggtaagctgcgagcctgggctcgttgcagctacattccccgcggacctgtttgataatcagctgggagtccccattcacgaagagctggtggatccctagggatagggccgcatacaagccaaagatcagcgcctcgtattctgccatgttgttggtggccttgaactcaaggtgcaccatgtacttcacttgatctccgcttgggtcgacgaggaccactccagcaccgccaccctgctggcgggcggatccgtcgaagaagagcgtccagtgtggctcggtgaagaccgggaccctgggctccgcaggtgtggggtccaaatcaggatccggagccccaggagtactcgggggaggggtccactccacgatgaagtcagccaggacttggctcttgacagcgtggcaaggctggaagtccagctggaactcaacaagttccgctgcccacttggcgatgttgcctgtggcgttagagttgtggaggatggcccttaacggaaggaggtcaccaccacgaccctgtgtgcctggaaatagtggcgcagcttcctagacacaacaagcacaacgtagataagcttgtgcgtctcagggtacctggccttcgcctcatggaggacctcgctgacgtagtagaccggcttctgtatggtccggacccctacggttggccccgggccctcaaggtctgtggtggtcggaccaccaccttctcctaggggaacctcctgactcccctggtaatgttgctccgtcctttcgacgaccagcaccatgctcaccgcctctgtagccgctgcaatgtacaagtacaacgactcccctggcttcggagctaccagtatcggtagggacacaaggtgctgcttcaactcttggaaggctcgctctgtatcctaggtccaagagaatgggccggacttctgtaagagtttgaagaagggtagcgccctctcagccagacgtgagatgaagcggctaagagtggccagggaccccgtaagcttctggacatccttgatctgggccggaggcctcgttgcctcaatttccctaatcttctccaggtttgcttcaatgccccggtgcgaaaccaggaatcccagcaacttccctgcggagacaccaaagacgcacttctccgagttcagcttcatgcgcgttgcccacaacttgtcaaagaccagggtcaagtcttccactagagtcgaccctctcttagtcttgaccacgatgtcatcgacatatatctctatcctgtccctaatcaggtccccaaaggtctttctcatcgcccgtacaaatgtcggcaaggcatttttcagactgtaaggcattacaacataacagtaaagcccatccactgttacaaaagcggtatgcttcctgtcacacccgggtttcggggcaccaagacccgggcgcgaacataatcaccaggtgtgctgggaccaagtctcacacatatgatgaatcatggcacaggatcgaatgtcacatctttactatttaacaggagttctatacaaaataattaaataattacattataaggagacaacggtccagtaacccaaagttgactgggagacgacggcctagaccactcacgaacacatcacagcatcctccatgcgcctcatcctgtggtacctgttcttgacctgtggggggtgtgagacagcaagagtgagctcacatacgttcatagctcaacaagttgtggggaataatgtgcatgaactcgccaaaggtgggagctcaagtgaagtgtaaggcttaccaaagaggatggttagagctgagcattgcttttaaagttggtcaaaattttattagcagttactaagtataagtaaataccaacccaattaaatagtagaacaaaagtaacaacatcacctgcgatgcaatgcatatgacaaattgaatttagttccataatttaatcatgtgagggtccgagctgctcatgaccgtgagcacggctagtataccagttttacactctgcagaggttgcgcatctttacccacaagtcatgttacccatctgccaagggatcgcgacttaccatacacctctaccgaggaggcgaggcagggtaacactacgaggcctttacaaagttccactagcttcagaaaacccgctacagtttataggaagctccaatgcaggaatcccttgcatgaccgccatcgcagcaaaatcatcccgagggcctccctacactgaccactcccctactgcccttgcccctttcgggtaaggtagtcctccactagctttcctaattaatcagccaagggcgtcccattatacccttgtggtaacactattttcccgggtggtcgctccatgttccaattaacataatgatcttatcatgaacgataaataacaatggataacaaaagtataatcatgagtaatgtatcttcatacccaaaaccacataaagcactagcaagtactacccaaaaagttcagtggtaacaaggtataaagataatcaaactagggtaacctattgggtcccatcaaaattaacctatgcagatcattatgattaatcagaacatggctgggtaaaaagaagtgatcaagggcacaacttgcctgggacttgagattccaggtaccaggatgatcttcagatgacacgtgtcctcacgctagtcgtagcattacaaacaaacagtgtataggcaaaattaacattacaccaaacataagaatacattgcataataataatctacgcgccataacgagatcgtagaaacaagaaccactaaattcggagctacagttattaagttatgaatttccaaaattatttagtgcttagaatagtttaatccaaatgaacaattttaattcaagttttgtggctaaacaaaggtactaggtaataaataatacttaaacaaaattaatgccactagaatgaatcaatttggagctaaattcaccaagttatgaatttcttaagtttgggacattattttgcattaaaaagaatttctgtattaaatttaataaatttctgaggtacttggactgcggccactatttaatagaaacccagggggttctgcgcaaaagacaccaagactcagaactcccgcagtgtggactgcgggttattttgaagaaaaccgaggggttcttttgaaagaagtgcacgacgaaggggtatcggatcactagagccgtctgatctggtttcaacggcagagattagaagttatctaaacggatccggtatgcaatctgagccacccaacgagcgatcgatgacctagatttaaagcaaccccgagtcgatcacgttcgcccgatcacgaatccatggcccagatcgggccgcgcgaagagatatgttcagacctaatctcacacgtccgcatcaggatcaacggccgatacaaatccacttacctcaatccagcatcgcggatccaacggttctccatcttctttgccacgaggaaaactgcgcagtggtcggctggtcgctccctagcctgcgacggtgtccgccgactaggagcccgagcagcaccggtgatctcccccatccgttcgctgactccacgacaaagtgttcccccgtctagcaacgaaccgaggccaaccctccatttggccagctgaatccaccgccattgccatcactgctggcttccaccaagccaccgagctcgaacccccccccccccccgagaggatccttccgaagaaggcgtactggccagcgccaaattctctgcagcggaggaggacgcgacgccaccgccctcctggttcgtccaccttcgaggctgaccgagccacgatgcatcacgaccatggccaacgtcccaccggaatgatgagcagagcactgacagaccaactcgagaaataggggagggagctcttcgggattggccctgggaggcaaggaatcatggcctaatggttatatagggcaggggggttggttgatgaacaagctcatgatccggatgcgaggagggcgaatcccaccagaccccgatgactgcgcgcgctgttgcaacgaattcgcggagaaggtgccgcagtcaaggcggatccatgcgccagccgcgcgaaccacgacgttctctctctcaatctctctgcaatccgacgagcacatggcggaccctctccagcttttctctctctgcactttgacagctcttcggttcaggtcgcgagtcagctagggttatatagccggttgatagaatccgttgccgagaagctcgggctaaggccgaatcaaccggtgcaaaggagatttggcgtggcgtttgtttcggctgatccggtcggcctcaaatggctggcttcaacacggagttggggaagaagatgaccgacgcgtgggtcccaaccgacagtgtcccaaggcgcgtgcagtactgggccgtggagtgagttgggccgcggggaaattccttcgtgggccgaatggagggaagccaacccagctgtggtctctgtctttttttatttttcttttcttttttcatttcagttttctattccaatttcagatcatactcaagtttaaatttcaaaccttcatttcttttaaattcataaaaaaaatccagtatgataggcactgattacattaatctatttatttaattactttatttattattatcattttatttgggtaatgaaatacacacaccacattcattacataaaatattattttgagtgtgcaaccaatttaaaaagatataaccaaaaagtcattttcctttggtttggtaggaaacatttttcaaatgtctaatctttattaagatatgatttagctaatgttatcctattataataatttactttagagagggtgaactctaaacttcaattattttatcatgagcacttattttgatgattgttttttaccttatacaaattttagggctttacaaatcctaccccctaatagaaatctcgtcctcgagatttgtaagaaaagggatacagaaggattggtttgtaatttatcttttagtctataattggttcaaaaatctaaagtctcatttttttataatcaatagtgggtgattaagagagcatatgtatccagccatttattaggcagggtataagctgggcaggttgaggtaaaacagattatggcaaggaaaagacttcattcgaaaggtttaagtcttaattcatctcgagattcgctttgactgttgtatccttccttgatcttttcttctccggtcttggtcttatttattcaaggttagtgtatatactgggagttaggaaatatggttgatatgggtgagatagactacctgaggtaggtcaaactcttgtttggtgttgggtggggataggcagattatgcaatccatcatgactctaacggttgggttagctcttctgttcatggttgttattctagagtaggataaatgtgctaattagggcaagatgactccataaggatagggtagaatcttttgaggtcagttagatctattaagatgggataagtaaagtggttaggataggatgaatccttcaagataagatgaatctattaagataagagatggtttttttaagatacgatggatctattaggctagatatattttaatttggataagtcaggatcttttttttgagataagatggatctatgagtgtaggatagaatcttttaagatgagatagatattgttaggctagatattttaatgagggataatctagtttgtctagttagttttataagcattatatatatgtagatgtaattgtggacattaccccacaacccatcacactcaatcaaagatccaaatcagacaagtatcataagaacaaacactcaagtacgtagataactataaaaatagttttgattttgttccttaagagtaggtatcctatccctaaaagtcactttaggcacatgatttcaaagtgtgaaatccccatttgtctttagaaagaaaaggtaagaataatcagagtaagcggaaatagatgagaaaagagaagtttagaaaagaatcagagtagcaaaggtaagtatgtaagggttatccagtcctatctaggttttgtcctacagtcaacattcctctgataccacttctgtcacacccgggtttcggggcaccaagacccgggcgcgaacataatcaccaggtgtgctgggaccaagtctcacacatatgatgaatcatggcacaggatcgaatgtcacatctttactatttaacaggagttctatacaaaataattaaataattacattataaggagacaacggtccagcaacccaaagttgactgggagacgacggcctagaccactcacgaacacatcacagcatcctccatgcgcctcatcctgtggtacctgttcttgacctgtggggggtgtgagacagcaagagtgagctcacatacgttcatagctcaacaagttgtggggaataatgtgcatgaactcgccaaaggtgggagctcaagtgaagtgtaaggcttaccaaagaggatggttagagctgagcattgcttttaaagttggtcaaaattttattagcagttactaagtataagtaaataccaacccaattaaatagtagaacaaaagtaacaacatcacctgcgatgcaatgcatatgacaaattgaatttatttccataatttaatcatgtgagggtccgagctgctcatgaccgtgagcacggctagtataccagttttacactctgcagaggttgcacatctttacccacaagtcatgttacccatctgccaagggatcgcgacttcccatacacctctaccgaggaggcgaggcagggtaacactacgaggcctttacaaagttccactagcttcagaaaacccgctacagtttataggaagctccaatgcaggaatcccttgcatgaccgccatcgcagcaaaatcatcccgagggcctccctacactgaccactcccctactgcccttgcccctttcgggtaaggtagtcctccactagctttcctaattaatcagccaagggcgtcccattatacccttgtggtagcactgttttaccgggtggtcgctccatgttccaattaacataatgatcttatcatgaacgataaataacaatggataacaaaagtataatcatgagtaatgtatcttcatacccaaaaccacataaagcactagcaagtactacccaaaaagttcagtggtaacaaggtataaagataatcaaactagggtaacctattgggtcccatcaaaattaacctatgcagatcattatgattaatcagaacatggctgggtaaaaagaagtgatcaagggcacaacttgcctgggacttgagattccaggtaccaggatgatcttcatatgacacgtgtcctcacgctagtcgtagcattacaaacaaacagtgtataggcaaaattaacattacaccaaacataagaatacattgcataataataatctacgcgccataacgagatcgtagaaacaagaaccactaaattcggagctacagttattaagttatgaatttccaaaattatttagtgcttagaatagtttaatccaaatgaacaattttaattcaagttttgtggctaaacaaaggtactaggtaataaataatacttaaacaaaattaatgccactggaatgaatcaatttggagctaaattcaccaagttatgaatttcttaagtttgggactgttggagactcgttctcaagtgctctgaattaagaacaaggcaacataaagtgttaaatgtcaacgtccttcgtccataaaacattattcccttgaggataatggatcttggacgaaggttgatgagagtaaaattacgaagcctaaatcttcgtaataaaattccaatagatattgcaagatgacataaaagatacaaaagaggtaaacaagtcatagataaattatattatattttcttaatatatccagtcattaaatacaataatacctctgccttgacaaaaggttgaattccagaatatgcgattgcagttaccagaatacgtgaacagtaaaggaatactgttcactatttataggcacagggcgcagcctgtgagggattacaagcatgccccttataaaagtttacaacattgactcagacctttatggactaaaaggtcattttatctttaagtcggtttgtaataccgaagcttcatgaagagggaccttcggccatcttatacaaacagcttcagccgaaaaccgcttcttcctagaagaccttcggcgacgaagcataggcccaacagtagcccctttcgcggtgctagatcgtttttcgtaacgagcttgatccgtgaaaaaggtctcttaagcttcggagcgccgaaggtctaaaaaacaccttccctgagctcgttgtcgagaaacgatattcaatttctcagcgtgtagcggccccacctttcagagttactgtttggtctctgcggtccaccacgcagcgagtgcgagcgggtgtccgcctggtgtaaaaatcctggcgcttcgccttcttacctgcagcactatataaacagacgagtaggtgtgaagttaccacagcattcattgctattttgcactgttttgctgccaaaatttttaaccgtcgccgaagcttgtctgtcggaatcgaacgaagctctagtttgtaacctgcttcggaggaagaaagtatcaaagttccacaagttcataattaaatggccagagtgcgttctaccgccagggttgaacgtgagggggacgaaactgaagcttcggagactgtccctatctccgaagccatgcaacgatccgggctagtgacttcggaaaagattcctagtgatgatgcagaacaagcaatcgctgaagcagaggaagaagatattgaggagactgatcccgaagatgattatcgcattgccatgccaagcaaacccagccacttggacttcgggaaatctactgtttcgaaagctgatctgtccaagatggtaaaatcgggcttttttactgaaaatcagaagaagctactgcgcttcgggggagaagagactaccccaaagccggagaaagatgaaattgttattttcaaaagctttctaaaggctggattaaggttccccctacatgggattattgcagaggtactgaataagttcggtatctattttcaccagctgacccctaacgctatcgttagacttattgtttatatctgggcactccgaagccaagcagtggaaccatttgcggacagcttttgccgggttcacgagttgcattatcaaatgaaggctagaaaggatggattgcacgacaattttggttgttataacttcgcctatcggaaaactacaaagtttcctgtaattagctaccgaagcaaatggacaacaggctggaaatctgagtggttctatgtcaaggttgatgacgacaaggaaaagcttgtgcaaagcccgctggaactaatcttcggagaaacccgacctcgctgcaacatgacacccgaaggtccaacacaacaagcaatgagtgaattcagaattattgcagagcatatcagcacaaagggacctggttcaagagtttttagctttcaaagtttttcccagtttgaaagaatgggatatgccgaagctacagggggaaaagaaagaaggtgaacttgtacgtttaccttactatttcaagtttaaaaagtactttaaaacaccttgccaagagtggctagatacaattgaagtaatgtgcaatgaaatacttggcaattattccaaaaaagaagatcaattgatgaccgctgccttcggcacccgtccgaagcgaaggctaaatcgagtgttggacgacctgggctttgattaccctgattatgaaaatctgaacaaaggtgctgggggccaaaaaagaaaaaggataactgaggccatgaatgaagaaaaagaaccattaaagaagaaaattccgaagaagaggaaagcttcttctccgaagcaacaaatatccgaagcagaagaaacccccgcatcaccttctgctgctgtcgttgaggaaattctgaaggtaatgactgaatccttacctgcgaagctaagtccactgggccctcaactgacaaagttttttcagaaggacaaggagcccgaaaaatcgaagaaaacaatcaaggcaaagaaacaaagaattatcactgtgacagaggtaattgacaagacgccgccaagagcttcagcccagaaaacaccagcggctgtagaggagacagatattgaaattgcaccttcggaggccgcagctgccgaagctgcctcagctgaaggtttgaacctggagagcacaattgaacacattgaccaaatactgctagacatggctgcagaagaagctaccactgccgccgaagaggccgtgaccgcagcgtcggggaaaggaaaataaattgctgatgaagcttcagaaaacgaaaccttcatgttccataatttagttggagaacaactatcaaaagctgaaatagaagagcttagagagtatgccaaatcctgtggatacaaacctggggcactcctcttcggaggcgttgatgatgagaaattagattgtattcgagatcaaacaggtgccaaagttatcagtactctgtccaagagtatcggcttcccgaagctagaaacaaacatcagccgctaccgacgacaacatgtcgttggtagtttattttattccaactttaaggtgatacttgtcccttaactttattgtttctaataataaaaatatgtctgacgaaggttgttttcgtgcagagtatgctgttgagcaaagccttgcaaatgcagcaagattttgaagataagaagcacgaagttataattgaaaatttggaaagcagaataaaggagcaatcggatgttattgagaaaaagaactttgagctccaggcagccgaaggttcattggcggaagctgaagcaaaaataacagaactgaacacgaagcttctccgccagtctgaacagttcgagcgagaaaagctagagcttaatgcaaaacttgaagccgaagctcaacaaaattcagatttgagaaaactattgacaagccttcaagaaaaatgtctagaatttagcaacaaatgcattcaacgattaagaaaaattttccactcagttggagccagcagtgaaaaattcaccccctcagctgaagatctaccaaagaccttcgaacatattgaaggtgagattgacgagctcgacgaagtcatagctgggcatggtgacttctgtgcctgggtagcttctcgaggcactgctgcagctttcctgaaagctggctgcgatcatggaaagattgttaataggccaaatttcactttatcaccatcaatcctggatgacatccctgatgtcgcccgaagtatctctaacagatttgtaaaaatgatatggacaaaaggtgggcgagaaaaggctggagacgaagctcgtagccaccttaaaccagtaagaaaccataccttgtgcttaccttttcttgcaaggtcgatttcgactaacgacgttattcatgtaggatgacgaagctgaagccgatgattaaaaatgacgccgaagctgaagctccttggagattaaacagtagtctagacagtacttgaggaacttttgagataatttttgtgaatgtaacttaaaacttgtctctgatgaattctgttcataccttgtgatatatccttacccttccattgatgtatgagaaatgctttgatgtgaacgaaattctccttttttgagccgaaggcgaaaaaacaccttcccttcttttcgtgcgcaacgaagcatagaaaacaacatttcccttttctccgaagcttttcctttttgtaaacgaagctcttcctttttttttctttttgccaaggcaagcatttatgccatgatgatgattattctacatatgcctagatgaatgtttatgaatgcaaatgctatgatgtgatgtgcaaatgaatgtccaaacgcgtatccgaagctatacccatagccacaatcacacctcagctctgcattcccttaggaacgactttggagcttcttcgcctttacttttggcggaatcagcgttgacttttcgctgtaagctctgcattcccttaggaacgactttggagcttcttcgcctttacttttggcggaatcagcgttgacttttcgctgtaagctctgcattcccttaggaacgactttggagcttcttcgcctttacttttggcggaatcggcgttgacttttcgctgtaagctctgcattcccttaggaacgactttggagcttcttcgcctttacttttcagcactcgatggtgcgttctcagcttttacatttacattccttgggggattttactcttatagaactaaaaaaggaaattacatgtgctggccccattaaaaacctttctcccccttcggaaaggaaaagggtgccatgaaagaaaaatatgaaaaattacatcgagttatacataatatcgccgaagctcatccgcattccaagacctaggaatgtcgttgccgtccatatccttcagtctgtatgaaccgggtcttgacgaagatgctactaagaaaggcccatcccatttcaactgcaacttgcccactgtttctgagttggccactctccgaagcaccaagtgtcctggctcaatattctttaaccgaacctttctatctcgccatttaattgtttcggcttgatatttattgatgttctccatggcttgcagcctgatcccttctaaagcatctttttcaacagaataagcagcttcggaacctgattctgccgaagctattaaccttattgatccggttttagcttcctccggagttattgcttcgtcaccgaataataacttgaatggagtaaagcctgtagaccttgatgttgttgtattgtggctccacaccactttggttaactgatctggccattttcccctgggttgattgaagattaacttcattattcctgtcattatgatgccattggctctttcaacgagtccatttgactccggatgtctgactgatgcaaaatggatcttcgtaccaatttgatcacagaaatccctaaaagcttcggagtcaaactgtgttccattatccacagtaatagcctttggtaccccgaaccgacaaacaatattttgccagaaaaacttttggacggtggccgaagttattgtggctaaaggctttgcctcaatccatttagaaaaatactccaccgccactacaacatatcttaggttcccttgggccggtggtaacggacctaacaagtcaaggccccacctttgcaatggccaaacgggttgtatgagctgtgttaaggacgaaggttgtttttgatctcgtgcacatttctgacaaccttcgcacttttgaactaattccgctgcatccgaagctgccttcgaccaataaaatccttggcggaaaatttttccaagtaacagcctagatccaatgtgagatccacacaggcctgcatgtatttctttcatcaactctataccttcggttctggataaacacttgagtagcggagcacaaactccatgcttgtacaactccccttctatcatgacatatggacgagctcttgcctctatcctcctgttataagcttcatcatctgaaaggaattttccctgaagataagagatgatctcagttctccaatcttcgctataaacaggagatatactgaggactgccctttcaagaagttccaccgaaggtgcttttattgtttcgaagaacacatccgaaggtaaaggcagcccctgtgctgctgacttagctaacaaatcagcatgctcattttgtcctcgagggatatttttgacagaaaatccttcgaaggaagcttcaactcttcgaaccatatccagatatttttcaagcttcggatccttagccttgcaactcttgtcaatatgacccgaaacaacctgggaatcagttttgagtatagcccttctgattcccattgcttttagcttccgaagacctagaagcaaggcttcgtactcggcaatgttatttgtgcaactaaaatcaagctttgccgcataacaagttttgaccttggaaggtgaaaccaacacagcagccgctcctgctccgaaggttccccaagatccatcacaaaacactatccatgcttcgatgtctttatttgcttcttcctcctgagcccctggcgtccagtcagcaatgaagtctgctaacgcctgggactgaatcgaagatctatgaacatattcaatacaaaattcattgagctctgcagcccattttccaatccttccagtagcttctcggttcctcataatatccttcagaggttgtgaagaaggaacgattatgttgtaagcttgaaaatagtgtcgaagcttcctggatgccatcaaaacagcatataacaccttttctaattctgtgtagtttttctttgatatactgagaacttcagatacaaaatatactgggacctgtttcctggcttggccatcaagcttctcctggacaagtgctgcacttaccgctgagtgcgaagctgccacatataataataaaggagcccctggcacaggtggagttaatgctgttagatctattaaatactgcttcaggtcttcgaaggccttctgctggattggtccccattgaaagacttcggctgactttagcacttcgaagaatggtaaatttctctctgctgatctggatatgaatctattgagagatgccaaccttcctgtcaatctttgagcccccttttttgtagttggtggctccatccgaagtatagcttcaatcttacttggattggcttcaattccctttgttgaaaccaagcatcctagaaatttccccttctttactccgaagacgcatttttctggattcaactttaagccagcttgtctgaaactggcgaaggtctcctgcaagtcagcaatatgattctcctgcttcgtgcttttgacaatgatgtcatcaacataagttagcacatttctgcctatctgagactggagaaccttcgcagtcattctgctgaaacttcctccagcgtttttgagcccctcaggcatccgaagataacaatatgtgccacttggagttatgaagctagtctttggctcatcttccttcttcatccaaatttgatgatagcctgaataacagtctaacagactcatgagctctgaagaagctgctgcatcaactaaagagtctatccttggcaatgggaattcatccttcggacaagccttgttaagatctgtaaaatcgatacacattcgccacttgccattagccttttttaccataacagtattagctagccattctgggtactttacttctctgatgactcttgcactgaggagtcttttgacttcgttacgagcaccttcggccttatcatctgacattttctgaagcctctgttttctggctctgaaggatggatcaacattaagcgaatgttcaataacatccctatttactccgcagagatcattagctgaccatgcaaaaacatctttgttgttgaacaaaaaccttatcaaggttttctcctgctcttcggataattgagagcctaacagcaccttctgctctgctatgtcctcacataagagcataggcttcggctgatctgctgaagctgctttctcccttctgaatttgtactgttcacaagcttcagctccatctatgttatggattgcttttgaatcagtccaattgccttcggcccttctggcagcttcctgacttccatgtatagcgatgggtccttgatccgaaggtatcttcatgcaaagataggcaggatgaagaattgcttcgaaagcattgagggtgccacgaccaataattgcattgtaagggtattccatgtcaacaatgtcaaacacaacttgctcagttctagtgttgttgatgaacccgaaggttactgacatggtgatcttgcccaatgctacaatctgtctccctccgaagccacagagaggatgtgtagcatcatgaatcttatcttctggctcttgcatttgtctgaaggccttagcaaatatgatatcagctgcactgcctgtgtcgaccaagacattatggaccagaaatcctttgataacacaagagataaccatggcatcgttgtgtgggtaatccttgaggtgaaggtcctcttgggagaaggtaatgggaatgtgagaccatcttgacttgatgaagggtccttgcaccccaacatgctgtacccttctctgtgcttccttcttttgtttcttgttagctggttctgaggacgaaccacctgtgatcgggagcaccagcttcgggtccgaagcagctccagcttggtcattgaatgaagccatcagctcgaaaagtggaagtgagttcaccggaggtgggcgccaatgttggagactcgttctcaagtgctctgaattaagaacaaggcaacataaagtgttaaatgtcaacgtccttcgtccataaaacattattcccttgaggataatggatcttggacgaaggttgatgagagtaaaattacgaagcctaaatcttcgtaataaaattccaatagatattgcaagatgatataaaagatacaaaagaggtaaacaagtcatagataaattatattatattttcttaatatatccagtcattaaatacaataatacctctgccttgacaaaaggttgaattccagaatatgcgattgcagttaccagaatccgtgaacagtaaaggaatactgttcactatttataggcacagggcgcagcctgtgagggattacaagcatgccccttataaaagtttacaacattgactcagacctttatggactaaaaggtcattttatctttaagtcggtttgtaataccgaagcttcatgaagagggaccttcggccatcttatacaaacagcttcagccgaaaaccgcttcttcctagaagaccttcggcgacgaagcataggcccaacagggacattattttgcattaaaaagaatttctgtattaaatttaataaatttctgaggtacttggactgcggccactatttaatagaaacccagggggttctgcgcaaaagacaccaagactcagaactcccgcagtgtggactgcgggttattttgaagaaaaccgaggggttctttgaaagaagtgcacgacgaaggggtatcggatcactagagccgtctgatctagtttcaacggcagagattagaagttatctaaacggatccggtatgcaatctgagccacccaacgagcgatcgatgacctagatttaaagcaaccccgagtcgatcacgttcgcccgatcacgaatccatggcccagatcgggccgcgcgaagagatatgttcagacctaatctcacacgtccgcatcaggatcaacggccgatacaaatccacttacctcaatccagcatcgcggatccaacggttctccatcttctttgccacgaggaaaactacgcagtggtcggctggtcgctccctagcctgcgacggtgtccgccgactaggagcccgagcagcaccggtgatctcccccatccgttcgctgactccacggcaaagtgttcccccgtctagcaatgaaccgaggccaaccctccatttggccagctgaatccaccgccattgccatcactgctggcttccactaagccaccgagctcgaacctcccccccccgagaggatccttccgaagaaggcgtactggccagcgccaaattctctgcggcggaggaggacgcgacgccaccgccctcctggttcgtccaccttcgaggctgaccgagccacgatgcatcacgaccatggccaacgtcccaccggaatgatgagcagagcactgacagaccaactcgagaaataggggagggagctcttcgggattggccctgggaggcaaggaatcatggcctaatggttatatagggcaggggggttggttgatgaacaagctcatgatccggatgcgaggagggcgaatcccaccagaccccgatgactgcgcgcgctgttgcaacgaattcgcggagaaggtgccgcagtcaaggcggatccatgcgccagccgcgcgaaccacgacgttctctctctcaatctctctgcaatccgacgagcacatggcggaccctctccagcttttctctctctgcactttgacagctcttcggttcaggtcgcgagtcagctagggttatatagccggttgatagaatctgttgccgagaagctcgggctaaggccgaatcaaccggtgcaaaggagatttggcgtggcgtttgtttcggctgatccggtcggcctcaaatggctggcttcaacacggagttggggaagaagatgaccgacgcgtgggtcccaaccgacagtgtcccaaggcgcgtgcagtactgggccgtggagtgagttgggtcgcggggaaattccttcgtgggccgaatggagggaagccaacccagctgtggtctctgtctttttttatttttcttttcttttttcatttcagttttctattccaatttcagatcatactcaagtttaaatttcaaaccttcatttcttttaaattcataaaaaaaatccagtatgataggcactgattacattaatctatttatttaattactttatttattattatcattttatttgggtaatgaaatacacacaccacattcattacataaaatattattttgagtgtgcaaccaatttaaaaagatataaccaaaaagtcattttcctttggtttggtaggaaacatttttcaaatgtctaatctttattaagatatgatttagctaatgttatcctattataataatttactttagagagggtgaactctaaacttcaattattttatcatgagcacttattttgatgattgttttttttaccttatacaaattttagggctttacacttcctatcttccctagacatctggatctgatggaaaccagagtaagcatctaagaaggacaagaggtcgcacccggaggtagaatccgcgatttgatctatgcgtggaagtggatacgggtacttgggacaagccttattaaggctggtgtagtcgatgcacatctgaagcttcccgtttgcctttggaacgatgactaggttggccagccacactgggtgatgaacctcttcaatgaagccagcctgtagtagcttccggacctcctcacggatgaagtcctgccgctcaacggactgtctccgaggcttctgactcaccggtttggcgtcagggtggatcttcagatggtgctcaatcacctccctggggatcccaggcatctaccacggttcccatgcgaacacgtcagcatttgcctgaaggaaggcgacgagcgcgagttcctatttctcctccagattgcccgcgacgtgggtggtctgggaggagtccacgccgacctggatggccttgtcaggaccgccgtctgctccagatggctgcacctttggcaccttggcaggcgccttggtaccggaagttgaggggtccctccctccgtcagggcatgaagcttctcgacagccgcaagcgctgcggcgtggtcgccctacatggtgaggaccccagcaggggacaacatcttgaggaccaaatacccataatggacaatggccatgaaccggtacagggccggcctgccaatgatggcattgaaggggaggttaacctccatgacgtcgaactggacgttctctgtgcggaagttttccttggtcccaaatgtaaccgggagtgcgaagctcccaaggggatacatcggttgcgggcccactccggagaatggacgagagggtcccagtcgagaccctaggatctacagctgcttgaatgcagcgtggctgatgacgttgagcccagccccaccatcaatcaggacatgatgcagtcgcatgttggcgatgacaggggcggtgatgagcggtagtataccggcccctgccatgttttcgaggcagttggatgccccaaaggagatagtggtgctcctccaccgctgatgtggagcagccttcgggacccctgggaccaccgaaaggacctcttggcgcaggaacttgatgttcctatgggaggtgagctcccagctcccaccgtacatcacgtacagcttcttgcggcggtcgttgtcgtcaccagagtcggagtctccagtgaaactgtccttgaggacccccttaggtgactgatacccgaggtcccgttctcccgcggtgacgtcaccttcgtcgaccttctccttgctaggtcggcgacgaggcggcgagccatccttggaagcctgcttgcatcgctcgctgacgcgcttcatgagcttgatgatctcgcggcattccgaggtgctgtggcgcctattggggtgcatagggcatgacccactgttgcctccctgtggctgtgggcgcttgccgcgcttgttccggtacccagtcacagctgcaacgaccggagcagcagactgcggcctctcgtggccgcagctcttcttcttcttgttgttgccgccctgggtgacggcacccgagccacccgtctaggtaactccagtctgtggtgccgagtgccatgcacggccctcggcagctctggcacctttgtcggccagagcgaagagcgtggtgacggtctccacgtcatgcgtcgccagcttctccaacatcttctcatcatgcaccccctgtcggaaagcagtgataatggaggcatcggagacacgaggtatagtccctcgtaccttggtgaagcgggcgatgaaagcccggagagtctccccgggttcttgccttacggcatggagatgagcctccacgccatgttgctgataagcactggcaaagttcgcagtgaactgtgcacagagctcttcccaggagtagacggaccccggggtgaggttcatgagccaggtctgagccggcccggtcaaggctacatggaagtagctcgccatcacaacagtgtttccaccagctgccgtaatggtggtgacataaacctgcaaaaattccgacgggttggacgtaccgtcgtacttctctggcaggtgtggccggaacttgggtggccaagtcgccgcgcggagatgatccgctagtgcggcacagcccacgccgaccaatgggacacctgtgtggattcgggcaccctttagagtttgtggcgcaagcggagcgaagtcctggtcgaggttgcgaccctcaaagtttagccggcgctcacgcgctctctccagagagactcgtgcgtcctcgcccgcacgcctacgattgagttctgcccgcaggtcattaggtctctccagagatattggagcatcctcacccacacgcctgcggttgagctccacccgcaggtcctcagtcggtgtggccttctctgagggtgagcgcagtgacgccgacgcctcatgttgacgccggaatgaccgaggactgggtctggccgagccagaatgcgccatgccgaggagacggtcgacattgtcacgccactgcttcatggccctcggtgaggccgtggaacttggagggtggcgtaacaactccctggctgtagacaatgacccaggagcagcccttgatggagcccgagatgtctgcgcagaagtgtgctgctgcgcagcgcgcacaacagcaacaccaggcacatggcggttggagccccgtggcatggaagacacatcctcttcctccatcaggaaatcctcgggggacaagtcgtggtgctcgacgatctgaaccatcatgccaagcaaggaaacacggaaaaacctaaagccaaagccccctacctggagcaccaaatgtcggtgggagaaatccaccggccgggtggcggaacacacccaccctaatcctaagatgaggaggggtctaagcggttgcctgttcggtgaatgcggatgaacacacggggacacgagggattatagtggttcaggccgccggagcgtaataccctacctccactgtgtgtaagtagtattgagagtgtgattgagtccgtgagcttgagaatctgtcccttgtaacgttgtgtgccttcccttttatagtttaagggaggcacatacaaggatgctgagccccgacatgcgggcccaggagcataatggtaggaatacattatgtgaatagtaaatgctgacagtaaacaaagatcctatgccttagtaacacacgagtaatcagtgggagtcatgatgaccacagtccatgccgcattgatagtcagtaacgtgcgagtaatggcacgacccgcgtatcgtggactgggcacgccgcctgtgagtggaatggacaggcgcacgtcttatccataatgaatgcgaaggcgcgcgcagcccagaggcgtcatgctaggttccgcccgttggcttatgccgcgcgcagtacgccacgtggtagcatcgggtctccgcctgagcggggaggaggagcgtacatgataaccagatcaggtctagacacgtgtcggcaccggaccctgcctgggtcctgaacaaggcacgagtatgttctgtcctagaaccttgggaccccattgtgggtggctcggaccccatacaggggggggtccagatcccattccaggggtccggcttgcacacgtggaggtcctggaccaatcttggaggtccggactgtatatctaggggtccggcacgctcccatgggggtccggactcactgttgaggccttggggtctatcactttctctggacacgtggcggttccggacccgcccatgtggtggggtcaggcgctgtagtggacccagagtagtcgcccgaggccagggcgagtcatggcttggtcccacacacatcacccttaccacgcgactaagagatagccgcatgggtactgcgtctttatacagtagcaaggggtaccctagttttagggtaccgacattgttaatggcacttccatatttattatccacaattgcataatcaaataaaactcagcatgatgcatgatttatttaggtgtctttggttatttactccttttttgatggtgttcattcacatgtgaaagtaggtatggaaaatacacatgaggacattatctcttcttatgatttacatttttgggtattacagatgtctcccctgaatctccaaagcaccacctagcgacttgtcactctggaggaacacacacgcaaatgggaagtctcacgacggcaccaccatggccactgggtttctttgccctaacctcaccagaaatgaggatgagagagaaggagaagaacgcgatgcaactgggtgaaacagagggaagttagggttttgatcaggcgaccttgaggtttttgggcttaaatatctcccaacagtactctgagcaatcacaatcgttgatcgagatccaacgccaccagataaggaagggggcatgggcgctcgaatgatgggtcggtttggaggcccgagcataggttgtgccctgagcgcgtgtgtcgctccttgctcggccagcaggccgaacaacaacatgaaaaaataccgttagaggctaaaatggttttacaatttacaacgaattaagaattgagttatcttaatttatttctttagaatagaataagtaaagaaaagttaaagaaaacaaataagaaaattagaaactatatttttctgagatttagaattttgtagagatatttatggaccattttgttttcactgtgtagtttaatatttatggaattttgtgtagagatattctctttaattgcatagaaatttagaaatttttgtggtaattgaatattttaatcaacgttgaatattgttactgcatttcatacagagttatatttttctatatcatccaatgaaagtttagaattttaagtatcagaaatttattcctagtagcatggttaattatttgaccaagattgaatatttaattcatgcaagttattgggtttcaagtattttatttcagatgtcctaaataattcatgatttattttgcaaaggggcacacactaccctactaatttgtcagttagggcagattgaactacaacatggtactaattaccactcttggtgggaaaagattgagatgatgaccacaatgagtgaaatagattattcactgtagtttgagaaacccactaagcccatagtgggctcaccacagtaagaccataagatgctatagtatagcatcgataaggtcaagtgggaaatatcgaataagatgtgcttgatcataaccaagagtctcatcaagaaccctgttaagggggctattctagagtatgaaacaaccaaagagtaccttgagaacatattttctcatttcactgagttctgcaaggcttatgcctgtgccttggtgagtgattttgtcaacactaaatatgatggaagtggtgtgaaggaaacaatgacgcctaagagggggggtgaattaagacttctaaaactttctctaaaccaggccacaaataaatccctagagcaaaacctatgcaaataatcaaactagaatgtgcaaactaggttttgtctaagtgttgctatctctaccgcaaaggctaagtttcaatcctaaactatctaattataaagacaatattgaaaattaaatgcttaatataaatgtggaagctaaagaacaaggtagagatgtgaactctcatggatgatgccggtattttgaccgaggtatccgaaaccacgcaaggttctcactaatcctcgttggtgcccccacgctaagggaagctcacgcgagggccaagcaccacggtcgagtaactccgtagagagtcgcgggccttctcgacacgcaagtggtgctccgcttccggctcctcacggatgctctccgccgtctccaatatcgagcttccggccgaaaacgccgcgagcctcgttccctccggtacacaatggcggccgtgacacaaacgcggttgtcacagtctcacaagactctcgccccactcggtacaattacaacggctcgcgcatgagccaaggggttgtgtggtttttctaaactcactcaactaactagggttcacctagagcaagcgctaaagcggtctaactaacctaagcacttcgcaaagcacctactctaatcaccgagtgattctattaagcacttgggtgtatgagcacttggaaatatctataatatgctttggtatgttgcttgggcttccacaccttgaaatgctcggttgggtgatgtatttataggccccaactcaattctagcagttggagaaaagctgctactctctgcagcacaccggacagtccggtgcgcctagccattggatctgacatcgcagatgaccgttggcgctgcaggctttcacactggaaagtccgggtgtcacaccggacagtccggtggcttctctcccccagtgccaccaggaactagccgttgggctatagttccctggtgcaccggatattccggcgtgtggcatcggacagtctggtgccctcgaccggatagtccaccagtggcaacacttttcttcatttcttagactttgcttgatacttgttgatcttcacttgtgatcttcataatgtctttttttgaggtgttgctttcctcaattccttagtacatgtccgtttagcatcctatgaactacaatcataaacactagaaaacacattagttccgaggttatgttgatcatcaaacaccaaaaccttttgagccaaatggctcgaggtccattttccttacaatctcccccattttggtgattgatgacaacacaaccaaagcaagcaaatataacaaacgtttgaatgaaaatatataatctacttgctaggatgcatgattgtctccacactgtgagattatggacttaagcctccccctaactccataatttacttaattcctattttagaccaaagaaccaaaaccacttgaagatcaaagattaataaattttaatttggtggtgtttggtgtttgatacaattttcattgctttggtccataaaacttctcccccttcccctttggcatcaaccattgaaaaggaagacattaaaagcatataggaagcaaataggacttgcgagcttaaaagaattatcaattgaagcacttaaaaattactcccactaaatgagtgttctcgttttgaaagaaatttccccccctttagagacgaagaaatactccccctgacagagatcttctactttaggaaaaagcatgtgagaaatagaggaacaagacatgatttgattagactgacttcccttatacataggtaacagatatgatttgacaacttatgcatgtatatcaacatgggaagtataagatgtgaaatgtagtctaatcaaacactggagaatacattatgtaatacccactttgtaatttgttagaaataatatcaatagagaaacaatttctacttatgtgagtttaacctttgcgcatcatcacatgtgtacaccctaggtaaaacaaataattaataacataaaagccactaaaatcatgcatcatgctggtgtttatttgtttgtgcattcactcatggaaataatgagggaagaaatacattaaagtcccaaagtggaatttagaatataaaataaagtctaggacttagaagcggagaaagaaaagaaataccacataaaacatagtaaataaatatatacataaaaatatttccttcatcctcaaaatttaatttgacacatttgatatatgtgcaaatccaaaactgaaattcaaagttgaatttgaaattcaaaagggaaaggaaaatctaaatttgaaagaaagaaaagaataaagaaagcaggaatagtgcattgggcccaatcccacgtattcggcccactcattgtttctcccgcaggcacgcgcgcctagcaactaggcgccgacaccctgaccccacggggcagttgccttcgctcacccctcgctgctctgcaagacccgcacgccagcccacgaatagactgctccgcgttcctcgcgtcgctcggacaccggcgcctcggtcccacctgtcatctcggacctcgcatgcaccatgaaaccacctccccgcaaccttcgcgctgaccgcaacagacctcacctcggcgcggacttatgggtaataaagcgggggcgcagacctccctcgaccgcctaaccaccacacaaagccacaccctgagctctagactaccgtcgctgcgcgcccttaaccgtaggcgaggaccgccgctcgcgccgccgcagatccacatttctgctatcaatccgtgccttggtgcatgtcatcgtcctgcgctgttcgacggtgaagccatccggggcactgccgggcaggattggtgaccattccgcctccaatttctcgccggacttcttcccccaccgcggagtcgctgtgcttcgtgtattggctctctgcgctacgaattgttctggtacgactgcccgatcctactcgttgtcatccctgcatcgcgtagaagcgaacgaattggtagctagggcattcgttcaccagttttgggccactccggcgagcctccgtcgcgacactgtgcagcgtcgccgcgcctcgggtgggattggagaggacagttgtgcaccgtccgatccacatcaacggttgcgattagaagactagataccccttcgcaccgcggtcatgccccgttggatcgtgatcgtgcgaatgtcgttcgatccgcgctagttaaacggtgaccgtcagatctggatctgaggagccacgctgtgtaccggtttgctcgatttatgatctaatctgggccgtaggtataggatcgggcggctcagaaggaagggtacccccttgagccgagtaaattattaaaaaaaccctaggttctctggatttaaacccgccgtccatgtattactattcactgtgcctaggctatcttgcaaagagacccctggactttccagaattgaggcccaatccagaatagtgttaaaccagagaatttaaattttaaatggagttttaatatataaattagtgctagaacttgtaaaaatcatagaaaatccatacttggtccaaattgagccattccactttctaaatttttgtaatattattctttatcacttagagtctctgttttgtcatgaaaacaaaataaaaatttatttctcacttaatcctattttaagcacataaaacctttgaaaattcatatcttaaaatctataagtccaaaaattatgattcctgttcctaggattttattttaatgtgtagattattatcatgtattttgtttacatgtttggtgtgatgttaatttcctctatatactgtgcttgtttgtattgtggcaagtagaagagcccgtgactgaggatcctggtgagtagcagatagaagtagctgagcaggagctcattgaaggcaagttgtgcccttgaccacttttatactcaataatgttctttaatgtcatttattcatgcataggtttaattttgatgggacccgataggtcaccctagattgtttatctcattaccttgtttacccctgaatcacttgggtagtttgctattgctttacatgtttgtgggataatcatttattatatctatgttccaattctgttgttattctatttatgttcatgtcaagatcattaatgttaattggaacatggagcttaacttgagaaacatgtgccaccacaagggtttaatgggacgcccttggctgactaattaggaaagctagtggaagactaccttacccgaaatgggcaaaggcagtagggggttgcatgcaaggaggttctcgggttgattttgttgtgatggctatcagacgggggattcttgcaagtgcgcttcccataaactgtagcgggttgtcggaagctagtggaactttgtaaatgcctcgtagtgttgccttgcctcgcttccttggtagaggtgtatgggagtcgcgaccccttggcagatgggtaacatgacttgtgggtacagggtacaacctctgcagagtgtaaaactggtatactagccgagctcacggtcatgagcagctcaggactctccgatgattaatttatggaacttaaattcaatttgtcatttgcattgcatgggtttattattaattttgttctaatactttatttaaggtttggtatttacttgcacttagtaactgctaataaaattttgaccaactacttaaaagcaatgctcagctttaacccctgtcattgactagccttacacatcacatgaactcccacctttgtgagttcatgcccactggttccccacaacttgttgagctatgatcatgtgtgagctcacccttgctgtctcacaccccccacaggagaagaataggtggttcaggaggagccacaaagcgaggggtttgatctgatctaggtggcgtttccccagttgacttctgcgccaatgacgatccttagttcgttttatatttatcttttattttgtaataagacttccgctatgtaataaatactctgattattgtgacatttatctctatacactctgttattatatatgttgtcttattagcgcatgtatgagatgcacctggctttgttccttaaagccgggtgtgacacattaagatgataccaattgtagtctctcgagatcaattgaagtcttagaatacttgtggatttgcagtggaagcttactgtctttctccggggactccattttccttcaatgagactactacatataatagacttgaaaataggtattagtctcaaagacttagattatagagtaacctcctcctgaaagagtgcatacaagtttcgaatacttataagagacatacactttgatttgatatcaagaggggcaaattatctataatccgagctttggcacatataagtcaaatgatattaattgaagtattataccacttaaagaatattgattatagtatatgttatatggaaataccaatttatgtatcatttccttaggaatgttaaataagctatatgccatgcttaattaaacattttaagccttgtaggtatgctcaagagtatgaattaaaagtgagcaatcctaccatatgattgacctagtatgcatgcattttttttaatcaaaagtaggtatgaaaggtaaaaactagatatagaaaaatagatatgcgtatctaaaacaagaaatacaataaatctagttaccttagtcatgggtggggaatttgggtccaaagtatttactaatctacttagcaattgacttgatccaatatgatgcatcccatgatagacgttattgagcactcactcaatgtggacccgtccttcagaccgagaaagcagaggcttcggaaaatatccgatgataaagccgaaggtgcccgaaatgaagtgaagagacttctaagtgccgacgtcatcagagaagtaacatacccagagtggctggccaacactgtcatggtaaagaaagctaatggattgacttcacagatctcaacaaggcatgtccgaaggatgaatttccactaccaagaatagattcccttgtggatgcagcagcttctttagaactcatgagtttactggacttctactcgggttatcatcaaatctggatgaagaaggaggatgagccaaagacaagcttcataactcctagtggtacctattgttaccttcggatgcctgaggggctcaagaatgctggaggaagcttcaacaaaatgaccgacaaggttcttcactcccaaattggcaggaatgtgctgacatatgtcaatgatatcatagtaaaaagcacaaagcaagaaaaccatgttgctgatttgcaagaaacatttgctaatttcagacaagcaggtctcaagctaaatctataaaattgtgtcttcggagtgaaaaagagcaagtttcttggttgcctggtatcaacaaaaggcatcgaagctaacccaagcaagatcgaagctatccttcggatggagccaccaaattcaaaaaagggggctcaacggttagcaggaaggatggcatcgttaaacagattcatttcaagatcagcagagagaaatatacctttatttgaaatactaaaatcagccgaagtcttccaatggggtccagctcagcagagaggcttcaaagagctaaagcagtatttgatagatctaacaactctaacctcaccttcatcaggagctctgttacttctatatgtggctgattcccatgctgcggttagtgcaacacttttataagagaaacaagagggccaggtaaaaaaccaagcaccggtatacttcgtttccgaagtactcagcccttcaaagaaaaattacacaaagttggagaaggtacttgttgagagtcttctttcccgccgaaggtcctcaaagcaaaaacaccttcggcaaaatactacaaaggtatacgcgacatgaagatataacccgaagatgatgcgaacagaagccgaagctatgactgaaggagcttcgacttagtattatgatgaaggcgaaggacgataccgacttaaggaggaatagactatctagtccttaatagttcgcattatgattacaattagtaatcagggacatgaatgtaattttgtccgggttatatccatgcctataaatagatgaatagtactcccgtactgttcacgctggattgtaatcgctcatacgtcactctctcatcctcaccctctggcaagtcgaaggtataaatgtaatacaaatattattgatgtttatcaatgtttataaaatgagaatataaatagcttactgatttataatcattatttatactgttttgtatttcatgtacttttatttatatttattcactgagatgatgaaggtacgaccttcatgaccttcgtttgaaaaccattatatccaaaacgagataatgtttcagaggacgaatgtctctaattattgacaattgtgttgtcttgttcttcatgtataacatttgagaacaaggaccaacagacacactcttctgttgattagctaaacaaagtacaaagtagattgatgacacaactttcaaaatcttttccatgttagtccaccatttatttgttgtcaaacaatcatatgtgaagtcatgatcttcttcacccagcccacttacagttctcccaatcagctgatcaggtgatgccatccacaacttaaatttatcttttctgtccaaaaactctgcaggaaaataaaaacagtaccgaacctagttgtgttccaccaaactagctctccaccaattttctctcgcatcatagcatgtaacctacaataaaaataacaataaattatgaaaagcagcaatggatatgaattatgacaaaacaacaatgaaatatgacaaaacagaattgaactatcacctattatgattatagaagaatctacaaattctcgttgcactattcactacttctgcaacattaggaaatcgtcctatatccttgaacattaaatttatggtatgtgatatatggatattttgttgtgaagtcttgacagatcatttcatagtttgagccattatcagtgatgatctgaacaacatgcttatcccaatatcagcaaccacattagaaataattccatagatataatcaaaattttaaattagaccagttgcatttactgactcgtggaagaacatgcgcccattgtaaaagatcataaaattaataatggatatcatggtaggacctgtacaatcatgacatagaaaacaaaagtaaggtcattatgaaagcaattatcatgtcaatcaagcaccacatcagcaccactagaagatgtgttggcatcagccatggtctttcctttctctacatgagtaacaacacaacgctcaataggatggtcaaccacgtgcacttcatcttcgctgtccagggacagtgcctactccttcacctagctcgtcgttgtccgacgcttgctgctagcctcccttgcgcagcagacagtagaatagatcaccaagtgaaatgcagcaagctatacaagaaatacagtagtgttgtatgcctgtacctgtcttgtggagggcgcacgtgaagaactagtgcaggcgtgcagcaggccaacagcacatccgtacaaggaggagctgcacggaagtacaaatgcagcagcacagccgcacagggagaagctctgaagctggacggcgccgcggcggctggctggtgaaggagcaggtgacggctgtagatgatttagggttccatttttatatatgagtagtgttttgggccttttattcacaacctaaatacatacgaacatgattagaccggctgaattcaaagagatgaaaattttgagcgggaaggaaaaaaaccggactctaccggtaaccgcgattttcgattttcttttgataatcgcgattttcggttttctcggaaatttctcgccgataaattttttccctcagatccttcaactgagtctgagcttgaaccatttgtcgggctcgttgcctctaacattcaggaacttttccagactcttctcactcgacctgtcaaactgtagccggcctgactggacaagcacacgaccttcttaccaccaccacgctgtttcgttccccgaaattgagatcctcgccctttcctccaacgacatcaccggcaccatgccgacattactctgtagtggcgtagtgctagcttcctcaagatcctagacctgtcaaacaacgccctactatacacggagatctcccagactctagactgctcatggatctgtccagcaactctttcaacagcgtaggcgtagctccgtcgtccagctcatctagccccacgctctggtctctacacctagccaacaaccatttcgaaggcaaccttcccttgatcaccagaaactgttatgagctcataacgctagatcttggcggcaacggtttcaccggcgaaatacctggttggattgcctacagcatgccgcagctcacattccttcgcctgtcgtcgaacatgctcagtggaagtataccccattaccccagcagattttccagttcacccagcttcagctactagatctatcacacaacaggctcaccggtcccatacctgtcgacttcgcgaattttaccggcatggcacagcagcaggaacatggggaggagatcgtttatttcttcgcgtgctccgagcagctccaggctccagctagtctggattctggaagaacgagaactatgcgtacagcaagatgatagcatccatcatggctattgacttgtcgtgcaatttgctctcgcaaacgattcctgaagggctcacgagtcacgaacctccgtggactcaggta

SEQ ID NO: 290 - DNA, 1012 bp, Zea mays
  Intron number 2 from transcript GRMZM5G846185_T01 (locus G RMZM5G846185) derived from phytozome v7.0 (chr-ID 1; pos 6 5098414 to 65099425)
atataaggtggtgaaagtctctgctactttacaaggtagaaatccatccatattgtttagttcaccaaactgtgcttccaactagagttgactccgacaaaagattattatagatcctaaacagactgattgctcatgaggagttttagcactggactgcaaagaatacagagcaggtcgcacagatggtgtggtgattaatgaatgtatattatatggttgagcttatattttagcatattgtgcactaaacatgtacaagttctttatataatcattgtgatttacacatttttaaaataaatttatgacacttcttgttgtgtcttactttcagtaaaaagctcaggtgcctctaatttgcattcacgaccatcaatgttattcatgcacatatgctttaagttggtgatgatttgatagtaccataattgaaaataggtggaaagctcatttaatttgagataagatcatgccactgggtttttatatgttagcatgtttaatttggttgtttttatacttgacccatacatcttatatgttgataactcgacggaactagaacagacagacttgtttggttcaattttgaagttgtagattccttgaaaaaagaacaatagatgatactattctcttgaatataggcttttatattgtggtcatgttttcattttctagatccaagattgctctttcttgctttgtttctatactaacatcttggcactatccttttcaaattttagaaaaaacaatttaactttttaatgattgacccattgagttttttatacttgcaatattattatactttagcagtcctacaaaacacctttatacctaccattgcacgacttatgactatcattggagtacatttatgcacaccattgcactatttatgactagttccaatttttccccactgctattgcaccgtatgtacatgagtaaggagttatgtactgtaactaatttgtttttgcattcggaattcaggttcagt

SEQ ID NO: 291 - DNA, 1680 bp, Zea mays
  Intron number 1 from transcript GRMZM2G024119_T02 (locus G RMZM2G024119) derived from phytozome v7.0 (chr-ID 2; pos 4 4033328 to 44035007 reverse strand)
ctgaccgcttcctcgcccaattcctcctcttcgtacggtttttgggggtcgcccctcttcctccgtatgaccgtatatacgaattcaatcggatccttaccagtgcgccgaagcaggcaaaatggatttttcccctttgtttttatatgacacggactgtgtctagcatagcatagtgctccctccgccgcccgtccctgccttcgtccttcgtggtggtttttggttaggccatggatttaaggcgcgtatatgctgttcgtttagcattttcatgggtttattcgacgaatacggtttcgattgtgcatttacgcacgcgtagctcgctgaagtgttccgattgatttgatgagttgttggattttgtattgacctgctgttgattggtgacgtgtgctcgctgctctcctctcgtagttttaatccagttagctaaatgcctggccgaaggagcttacaccactagagtaggcatggtcaactggagactggaccagattgatttgtcacattggtcatgaccagacttcaataatgcaaccttgccttaatgatcagattcatcacactagtttgctttgctgttctcgttgctcctctgaattgggtatctcctgctgaaacatcaagtattcccatgctttttgaaatgggacagaaagaagcaccgagaactacttccaaaattatgatcacaaaatcttttgtgtaggtgcaaccgtttgattctcttaccctggagaataagttccttttgatctctgagctattaagaaaggtaatctaagtgacaccgtctaacttttagttcatatttgtctatgtgttttctatgaagaaattatagttgagacttcttttattaggctactcctaatactttggaagaagtgcagcatctcacccatctggaaggtagtggtaatagttgtgaagtaatgatgatcttacattaaccttatgagtttatccggaaattttcttgttgattgggtctggaactctgataagacataggaccctttcaaacgcagctaataaagatatatgttctggaggttcactccagccaattaagaagtttaagatgcatgccgagaaatcaaccgttcaagctatgccgatggttggttttgatgcgatggcaagagctaagtctacgcttgaagattttgtatgtattctttgtagttggtactcgtaaaaatccttaatggaaacactgccatgaattaatcctggagtgacccaggtcttctgggctgccttttagtttttcttcttttatttttctcaagagaaacctgtttaccttttcttttctcacatcaataaaatcttagcacattaggggattcctttactgtttttgctaaaaaaacactgtcatactgccttttgttgagattttgcaatgcaagtgctacaaaacaattgaaccgcttatagaggcattaagcccgtataaaaaatagcaaggtatctttgaatgtattttgttgttccattattagtcttatagagaaactgggtcacatgctgttctaaattttgatttttcctgttcaaacatgtcttttttggggggttatgagtctatcttgagcacttcctgataattatgtttccctaaagtcccttttttccttcttgagaaaacagtgtaggtcgtacttt

SEQ ID NO: 292 - DNA, 7469 bp, Zea mays
  Intron number 11 from transcript GRMZM2G326631_T01 (locus GRMZM2G326631) derived from phytozome v7.0 (chr-ID 2; pos 39034474 to 39041942 reverse strand)
atgtaagttcactataatcccctcattgtggtttattgttttcgactcttggacccctaagaagtttatcatgttcctatatatgatagtagcacacatggtgctcaattattttttgcatcatcaacatgagtccaccacaattgtttttctgaaatgttgtcttattgttcatcaatttcagttcaatgttgcgtatgagctatatttcatttcaagctactgaaacttcttcatgaaaatatttaattatcatagtgacacataattaaatcaaggacctaatagagttgaagttgggaatggtttgggtcaaaccggatggcgtggatcggtttttgtatctaggttgatgtagtttgggtggggatggttagagaagaggcacaactctggtttggcttggagcaacatgttaaataggcttgtccaatgtgtaatggtacttcaacatcagtgcagatcggtgcagatcagtgttgtaatttggttggttgtctggatgcaccaagacatgcaattcagtgtagatcggttttggggagagagtgtggtttggagttgagtacggtattgttctagtctatacacattcagtagcacatctagttcttaggttgtttcgtcaggggcaattgatctcgcagggatttccaacaacaatgctattgttgttaacttgattcttctatagaattggctacctccatttaaatttatgcatgagtacaatatagaacatcatgaaacattaatgttgttgatcactaacttctactattttcttttcattttcaaagctgcaagatttctacagaatccgaagactacttatttcaaaccggatcgcgtggatcactacctccatttaaatagttttgcttatttcactatgatgaatttcagatttgtttaggatatgagtcatatgttgtttatatctttgtcccaaaaatacttgaacacgcatcaagcggtgattattttaagttgtgctactctgaatcgtgactattattttatttaaatgcaaaattctttgaccattattgtcatgtttatgcctatgattatgcaaaattatttctcgtttactattagcaaatgttgttgtataatcatttttattaataaacaattaattctttgcaacacatgtatgtgctgccacaaatccattacaaatgttaccattgctatatgcttcaaccaccttgcaacacatatatgtgttaccataaatccaatcaaaatgttgccttaacctactcgtcattgccagtacaaacgcatgtaaccgttggagtagggaataaatatctgttgcagcgtagcaacgcttatagttatggcttaccaacgtatatgtaaacgttgcagtagtacctagcaacggcgacataggcaaaacataattatgcattggtataagtcttagcaacacttatttggacttctagcaacgcataaatacgttgctatagggttttttgtagtggaattgactcaagcctagctacgggtgcataagtttcatcgaaatccaaaccttcgacttgtgaataccctttggccacaagtcgggctttattccttgtcaccacaccatgctcatcttgcttgttgcggaatacccatttggtacctacaacattttgattaggacgtggaactaaatgacatacctcattcctcgtgaagttgttgagctcctattgcattgccaacacccaattcaggtctcttagtgcatcctcaaccctgtatggctcaatagaggacacaaaagagtaatgttcacaaaaatgtgcgactcgagatcgagtagttacccccttatgaatatcaccgagaatggagttgacgggatgatctctttgaatcgcttggtggactcttgggtgtggcggtctttgaccctgtatttcttgatcatcttccttgtcttcattgtcttcatccccccttgatcattgacctcttcttgaggtggctcatcttcttgatcttcttcttcatcttgagcttgttcctcatcttggggtggtggagatgcttgcatggaagatgacggttgatcttgtgcttgtggaggctcttcggattccttaggacacacatccccaatggacatgttccttagcgccacgcatggagcctcttcatcatccaattcatcaagatcaacttgctccacttgggagccattagtctcatcaaacacaatgtcacaagaaacctcaactaatccagtggatttgttgaagattctatatgcccttgtgtttgagtcataaccaagtaaaaagccatctatagccttaggagcaaatatatattttctacctcttttaacaagaataaaacatttgcttccaaagactctaaaatatgaaacattgggctttttaccagtgaggagttcatacgatgttttcttgaggattcgatgaaggtagagtcggttgatggagtagcaagcagtgttgattgctttggcccaaaaccggtccggtgtcttgtactcatcaaacatggtccttgccatgtccagtagagttctattcttcctctcctctacaccattttattgaggtgtgtagggagaagagaactcatgcttgatgccctcatcctcaaggaagccttcgatttttgagttcttgaactctgtgccattgtcgtttcttatcttttttatccttaagccaaactcattttgagctcgtctcaagaatccttttaaggtctcttgggtctgtgatttttcctgcaaaaagaatacccaagtgaagcgagaataatcatccacaattactagacaatacttactccagccgatgcttatgtaagcgatcaggccaaataaatccatgtggagtagctccagtggcctttccattgtcattatgtttttgtgtggatgatgagcgccaacttgctttcctgcttgacatgcgctacaaaccctgtctttctcaaaatgaacatttgttagtcctaaaatgtgctctccctttagaagtttgtgaagattcttcatcccaacatgggctagtcggcgatgccagagccaacccatattagtcttagcaattaagcaagtgtcaagttcagctctattaaaatcaactaagtatagctgaccctctaacactcccttaaatgctattgaatcatcactccttctaaagacagtaacacctatatcgctaaaaagacagatgcagcccattttacataattgagatacagaaagcaaattataatctaatgaatctacaagaaaaacgttggaaatagaatggtcgggtgatatagcaattttaccaagtcctttgaccaaaccttgatttccatccccgaatgtgatagctctttgaggatcttcgttttttctcgtaggaggagaacatccttttctcccctatcatatggtttgtgcatccgctatcaatgatccaacttgagaccccagatgcataaacctgcaaaacaatttaggccttgttcttaggtacccaaacggtcttgggtcctttcacattagaaacaagcaccttgggtacccaaacacaagtctttgaacccttgtgtttgcccccaacatatttggcaactattttgcctgatttattagttaaaacataagatgcatcaaaagttttaaatgaaaggttaggctcatttgatgtagtaggagttttctttttaggcattttatcatgagcagaatgcctagagctagaagcctcattcttatacataaatgcatggtgaaaaacattatgagattttctagcatgaatcctcctaattttgtgctcaggataattatcaggatacaaaatgtatccctcattatcctgaaccatgggtgccttgcccttaacaaaattagacaatttcttataggcattaagcttgacattgcttccctgttggaaaccaatgccatccttaatgccagggcgtctcccattatagagcatgctacgagcaaatttaatttttttcattttcaatctcatgctcggcaattttagcatctaatttagctatatgatcattttgttatttaatcatagcaacatgatcatttatagcttctacattaacatctctacatctagtgcaaatagacacattataaacggtagatgtagagggtttgcaaacatttaattcatctatcttagattttagcatggcattttcatctctaagacaggaaatggaatcattgcaaacatttaaatccttaaccttagaaactaatctagcattttcatctctaaggctagaaattgtatcattcaatttatcaatcttagcatttatactagcattttcatttctaagactgacaattgaattattacaaacatttaacttttcagccttagcgattaaactagcattctcagttctaaggttggaaatagtgtcatggcaaatgctaagctctttagtcaagttttcacatttttctatctcctgagcataagcattttttactttaacatgcttcttgttttctttaataaggaattcctcttggctatctaaaggttcatacttctcatgaatagctcctatcaattcatttaatttccctttttgttgcatgttaaggttggcaaaaagagtgagcaaatcatcttcatcttcactagaactaccctcatcactagatgtagtatacttgcattgggggtggttctagattgttccttcttctttttgccgtcctttgccatgaagcacttgtggccgacattggggaagaggaggcccttgttgacggcgatgttggcggcaccctcgtcggaggaggagtcggtggagctctcgtcggagtcccattctcgacacacgtggacatcgccgcccttctacttgtaatatcttttcttctccttgttcttccctttcttgtcgtcgcccctatcactatcactagaatttggacatttagcaataaaatgatcgggcttaccacacttgtagcacaccctcttggagcggggtttgtagtccttccccctcctttgcttgaggatttggcgaaagcttttgatgatgagcaccatctcctcgttgtcgagcttggaggcgtcaattggaagcctacttggtgtagactcctctttcttctcttccgtcgctttgaatgcgacgggttgcacctcgggtgtggaggtggtgccttgctctaagttgacgatgtgtttggagcctttgaacattagttcaaagctcacaaactttcctatcacttcctcgggagacattaattcgtatctaggatcctcacgaattaattgcacttgagtaggattgcaaaaaacaagggatcttagaataaccttgagcatttaatggtcatcccacttggtgctctcgaggttgcacacttgattaaccaaggtcttgagccggttgtacatggcttgtggctcctctccttggttgaggacaaatcgaccgagctccccctcgatcgtctctcttttggtgatcttggtcacctcgtccccttcgtgtgtcgtcttgaggacgtcccaaattctttggccatctttaacccttgcaccttattatactcctctcgaaacaaggaggcgaggagtatagttgtggcttggtagttaaagtgccgaatttggtcggcctcgtccgaatcatagtccttgtcccctaccttcggtacctgcgctccatactcaataatatcccaaatacttttgtggagtgaggttagatgatgcctcattttatcactccacatagaataatcctcaccatcaaaatatggtggtttgcctaagggaacagaaagtaatggagtgcgcttagaaatgcgaggatagcggaggggcatcttactatacttcttgcgctcatggcgcttagaagtagtggatgacgagtcggagccagaggtggagggcgacgaagagtcggtctcgtagtagaccaccttcttcatcttcttcttcttgtcgcctctccgatgggttttgttggaggaagaggattcctccttatgcttgtggccagactcccttgagagggttctccccgagcttgcgggtttgttgctggtcacgatctccctcttggcgtgatctcccgacatcactttgagtggttagactctaatgaagtaccgggctctgataccaattgaaagttgcctagagggggggggtgaataggcgaaacctgaaatttataaatttaagcacacactacaagccggggttagcgttagaattaaatttaagtccaagagagaggggataaacaaatcaaccaagaaataaagcggatgaacacagtgatttgttttaccgaggttcggttctaaagaacctagtccccattgaggtggtcacaaagaccgggtctctttcaaccctttccctctctcaaacggtcacttagaccgagtgagccttcttccttaatctcacgagtcacttagaccccgcaaggaccaccacacaattggtgtctcttgtcttgcttacaaagcacttgagagtaagaagtgagaaagaaaagaaagccaagccaagcaaacaagagcaacaaaggaacacaaatgatcctctcacaagtcctaatgcgctagagttgaattggggactttgagcggatcgatcacttgaattgtgtctttggagtggagtctattgctcttgtattgaatgcaatgtgtcgaatgcttggatagtttgagtggtggtggttgggggtatttatagccctcaaccaccaaacaaccattggggtaggctgctgtcgatgggcgcaccggacagtccggtgcgtcagccaaccgttagggttctggagcatttgaccattggaggctttgtcctttagtggcaccggacagtccggtgtcgtaccggacaggtactattcactgtccggtgcgactctgacaagcggttctgactctgcacgcactgttcttcattgttcatctgatcaccgtgcttttgtagtcgacagttgtgctggatagccgttgctccgctggtgcacctgacagtcaggtgccacaccggacagtccggtgatttttagcggagggtgcctgaagaaacccgagagtggccagttcgtttctatacgaccctggtgcaccggacacagactggtggcgcaccggacattgtccggtggcacaccggacagtccggtgcgctagaccagggaacactcggtttctttgctcctttgtatttgaaccctatgttgtatatttattggtttgtatgaacccgtatgcacctgtagaacatatattgtagagcaaactagttagtccattatttgtgttgggcattcaaccaccaacattaattgtgggaaaaggttaaccttatttccctttcatggtacatgttattccatctatttgcttgattgaaaatcatttcatgtaggtgttt

SEQ ID NO: 293 - DNA, 2877 bp, Zea mays
  Intron number 1 from transcript GRMZM2G103128_T01 (locus G RMZM2G103128) derived from phytozome v7.0 (chr-ID 5; pos 2 09863905 to 209866781)
cgacttcgagccacccgaggaagacgacgaccaaggtacgcgtctactcccggcgaccgtatatacagtactatccatagtttcataccatacgcctttgtttctctactctacgccagacggcgattagtctgtgccagttctcgttgtcgccggttaatgggttgtaagtggtaaccctgtcctgatcgctgaaccaactgcttcactccctcatggatgtaaagcaatgggcacgcagacgcaggattcgcgctcgtgcgacagctgttacttttccttgttccgattccgattccaaagagacagcgccacagcggtagcgagcaatagtggaggcaggcacgatgcctcctcctcgtcgtcgtctccacctgccgcctgccccgccacctgtagggaatagacaggaaattaaagcgggagcgggtcgcgctttgaagggagtagacaaagaaatcaaagctggagtggatcgagcttccaagctttccttggagagtccctcccccgtcgttggaggaggggcgttgcgaggagagattggatcgaaccagcaaagcagattcctttgccgtccgcctccagcttattttattcggagtggctcgggcggtgacgtggtgttcggccggacccgggcccatcagtggcagcagaatgcctcgtgaatagagatggcaatgggacccgatctccgattactcgcggggaattcctctattaggggacagggatggggaagaaactttccccacggggatataaacggggaaaatttatcccccgacgggtaaacggggatggggacgaggaagcattctccatccccgttccccgcggggacccgttaaacttgcacgtgactatgtttttgtgtactagttaacgacaaaaataaataattactttatcaagagaccactaattgtacaaatgtgttcattttgatgtatgcataatgatttcttatatctgacaatgtgtataagtgacaatatttaacattaatagcaaagtacgtatgtcttaattgtaatttaaacggggatggggatccccgttggggatttatccccacggaaaacggggatggggaagaaatgttccccgcaagcgttcgtggggatctccgcggggaagttttttcgttgcggggacggggatggggagctattccccggcggggaattccccgttgccatccctactcgtgaacccatcgaggcatcgggcaatgaagttcaaaggtgatgcgatggatggccgcagaaaatccgagtggggacggccggacagccaatgcgcactaggttccattgtactttgccggctgcccagtgcgtcgccgtaaggtgggtcccgtagcaagaagctcgtggtggatgccagatcaaaacaaaattgacgctttcctcttacctatcgtgggcaaaaggacgatagcagtgtggaacattcacggaagctatccatgcccccacaccctcgggtgtcaacgctccagagcgagggtaatgaaaggttctccatttcaaatttaaatcaatttacatggggctctatggattgtagcccgtttcaaatgaaacaccaacgtaggtgaggtccatccaatcctttggatggtagaatatcgtttttttctaaaacattagagtagtaaatttccttcagaccgttagcctagctggtttggtttggcagcaacttattggctgaggccacccgtcaagtctccttcattatggggcgtgttcggctggctacaagccgacactgttgcagctgtttggactgctgcagctgcaatccatagagagaaaaatactgtagaagccgcagccgcagccggattgcagccgcagcaagccgcagcgaacaagctgatggaggtccacccatcgaaagggttttggtttcaaaagtgagctaagcctcccgtgttttgcgtgcagggcaatttggggcggctagccaaattgcccagccggatggttctgcaactgagggcggctagccagcgttgagtagtagtaatagaaaaatccggcagggcaattggcccccgcataccggtgctacgccgcagtgctcagcccactagccggtagggtagacacagctgttttttttgtctcgcttgccaacttgttcccacactctcatggattgatagcagggtttacaattttggattgaaatttccgaaatttctttgattttggtggggtatgaaaaatatatgtttcttaaattagcatttttaatataaattatatcattttttgttttttaaaaatctaaatctatttgattttgacctagaattttcgaaatttcctgtttttgctgggtgccgaatttttttctttttcgaaactgtaaacccgaaatttcctgtttttgctgggtgccgaatttttttctttttcgaaactgtaaaccctgattgagaggaaggatggcgatggcccgactcgacgtttcatttgattactctgccttgctcccttggtgctgtctacaagaagcaggaggatctgcagattttggaggatctaatctagtcctttctcacgaggaatgctgctgtcgtgttattctgtataaattacccagcatgtttaaacgatttttcctgttttgagcgggataggaagggaatttattcatcaagacattgaacaaactcagcgtgtttttctagatcgtgttgactgcttgtagccgtagtgctccacttcgcctctggcattggcagcacccatgtgccaacactatgttcttccatgttagttctttcatgatggtgaactacaaggtgcagttgactgacccaaaactctttgtattctttcagatatacaagacgac

SEQ ID NO: 294 - DNA, 1403 bp, Zea mays
  Intron number 1 from transcript GRMZM2G078090_T01 (locus G RMZM2G078090) derived from phytozome v7.0 (chr-ID 3; pos 8 8710693 to 88712095 reverse strand)
tccacccctgggacgtcaccttctccgttgtcagcgtgagcatctcttccttctcccgccttcgtctcgcctgagctggatcaaatctattgtgcgtttgttcgtgtgtgcgacaaaacgaaacttttttttttgcatgtgatccctcgatggattaaatgtttggattggctgttaacactggattaattctgccatctgtattatagtaattcctttttggattttttaagcatttgatatccatcatattgatggcgaaagctttgactttttgcttggaaagggtcatgcctcattgattatttgttggtaccatagtagaaagtgatgaattattgaaattccaatatgtcttatctttactggggaaaatacttagaaggcatcaaaatgatgctttaatagaggaaggcatctgggttgaattattctttgtacatagatatattctgtgctataaagcctatcactttagatccttagcaaaatcgttcatgttatccacatccacatgtatatgttgacagttgccttggtgttaactctgttttctgcttcattggttgtttcttaggatgaatagcctggcctcgttttatttctttccgtgttgaggtcaattcatgttattttttttatgatttcctgataggattagtttaatttgggtagcttaataagaaaaaggtgaaagactttttctaggtaaattatgttggtttcacaacctttcttattggataagaaacagtctagctgtcaaacgcttaaattgacaagtaattcacctgccttgactaggtcatgttccgtgttatcattttgtaaatagagatggtagatcaggaagtgcgcatagtttaacctcttgttgcgctggaaactcaggaggaattggctgttatgaattgtttcgggttgttgtccttgtcttgcattgttgccgtgggccccagacaagcacaaaaacgctaacttgtttatggttacaaggatactgttttatgttttgacttgtttgcacttggtagaactgccattttgatgtaccatttccttgggcaagttgaatcagccatttgctttgagtgcatcgtatgaatcaatcacacaaaagagtcagagaagctaaaactgaggtcatcaatgccctctagtggtctcttatacgcggtgacatatatatatatatatatatatatatatatatatatatatatatatatatatattaggaagtcgactggtttcactgtccttaaacatgcagaattagtaaaggatgcaatcttttctttgttgttaagccgggaataacttctgcagtttatttcagcctccttgacattttttctgttgctccaggaatcaaataaaatatcaaagagcaaacttgtttt

SEQ ID NO: 295 - DNA, 836 bp, Zea mays
  Intron number 4 from transcript GRMZM2G329306_T01 (locus G RMZM2G329306) derived from phytozome v7.0 (chr-ID 6; pos 1 11256086 to 111256921 reverse strand)
ggaagaccaagtcaataatactcactaatagctccgtatgttcgcttgcctagtctaattgccccttacctgggtgaatatctggcattcttagattagatttaagaaaatgtggtgttagtagtagtagtagtactatctcgttagctttgccatggtagttcatagtatctaagcacttggaatgttgctgcatggcctgagtaacttgatggttacaggtttggttttcagattacttgttccctatcctgcttgtctttacaatcctgtacgctttcaactctaaagtagatgagcatttgaatttcagttcaggatttggactatttctagggtttaatcatcatattctttgcagttaaaccctaccaacaatctcatgtaaatttagttgcttgtttatgattcggtgttccattagtccagaaataattaccgtcaacctgttgtttgaatttttgttaccgtcttccttttctgccagtgtatctgaaccattctaaaattatacagttataattgatttaatataattatttctgtgtaccatctgaggctctgagcaccgttcaatagattgatctttgacatgaagatatgtaacagtgctttggattggataatactgtataacaatactatgccatcggcatatacttgcattattacttgttttcttaaaatcacatatgactttcaatggcccactagtgatcgggggccagggggttcagtgattttctcggttgggaccatgtttcggtctcttaatataatactaggagggcggtctttccctccccagctgagttttttacatgactttttcaggc

SEQ ID NO: 296 - DNA, 2087 bp, Zea mays
  Intron number 2 from transcript AC193787.3_FGT001 (locus A C193787.3_FG001) derived from phytozome v7.0 (chr-ID 2; po s 30468785 to 30470871)
aagtagaaatcaaatgtaagtgatataaatgtaatcataatttatctggttgcataaacaaatctcacacgagatcaaagggactgaggttagataatcattgcatgatccaagaatagacaactacaaagaatctcaatgtgcatgagaacaaatatgtccatgtagagaataaaacccttgttttgttttatcattaacactatcatgaagccattaattgaacttgttcacaattagcatgcaagactctaatgcaatagaagcaaaagcaaacataagacaacaccaaaaaatcaaagggagtagacaaaaaacaaagtgtgaagcttgaatgatgccctctccgtaagccacacaaaaggttctacctcttcatgtaatgcaaataaaagcactcatatctttgtgcctaaaagaacaaaaggatttgagaaaaaaaatcaaagcagcaaaccttgaaagcaggctcatcccaacaagggaagcagcgccttgcatcaggttggccccggaactttctgtccaggttcacaccagtgctttatgctggaatctagattcagattcgatgtttcgctgctggggctgtcccaaataggtcaagatatatgtatgttcagaaactgtaagcatctgaacatctataggtagatcctgataaagtccaataactgcctgtagctttcagtattgtactccatgctttctatttatcttaatgcaaatctggtatactctattgttaacagccagctgaccatgatgccctcagcctagggtacttgtagctgtttcaactctgttcttctaatctaaaaaaactagaccaacctaggaggaacaataggtacttgcatttgtactgcagtatgcaaatcatacatgttattatgtctccctaaaaaatatagacgacactgaatgcaataatccattgaatagagaaaaggtgaccatgaggtctcttgagtcttaacacaaggaagtctgaattgtgttcatttgtttaccaacttgaagactgaattaatctcttgttgttttttaatgtgctcttgtttttaatgtcgttctccttttagctacactatattttcttatggcgaaccaataggaaaaagttacgcaacagattgcatcaaaatcacctagccaagcttggagttgtttgacggttgcgtcaaaagcacctagccatttctactattgttcaagagcacttttgtgttgtgtggtattgctgaagtttggattaaggagaatagttcgaccaaaaatctgtctgatatgtatcaatctgaatagtcatagtggtattatttgaatagtcacgtcatgttaattttcttgtttttacaaagttgtcttctaggagatgcgtaaatgtttctctctgcttcattccatgcataccagcctcaaaaaaggcactagcctctacttatgtgcagagatatgtcattgctggttcgctaattcttatggttttttcccagtgatttgggtgcttgcgtgcttgctgcttgggggaatttcatcacagcttggagaagacccctcgccattttgcgtttctaatcgtcggttagtttgtgtgcctaagcgcctgccctgttttttatgtgttgtttgttacaaaccaatttttcaccaatgttacgtgatgttcttccatgctatgcgatatatcgtgctatgcctgattctccatgcatgcgtgttgcgagatgccacgaaccgaagcgcctgaggcacggtgcaattgtgcagggttagtgctcatagtatcgcttctttgtttatgcgtgcaacggctggtacccatcctaatttttgatgcttctcttgcgggccaaaaaatatgcaacctctttagattgcccgatctttgagacagctgatggccatcgcattatggatggtgaagacgaaatagccccgtctaatcttctgggaccttctaaccagccgatacctatgctacaaggaacacgtgcgtacaaccgtgtttgtgcagcgattactgcagcaaaaaaaaatatggtgttagtgatacttatgtcatcataggtagtagatctata

SEQ ID NO: 297 - DNA, 8978 bp, Zea mays
  Intron number 6 from transcript GRMZM2G446625_T01 (locus G RMZM2G446625) derived from phytozome v7.0 (chr-ID 7; pos 1 20546262 to 120555239)
gtcggggctgtgacggctgccctaggtgcttctgctttggtagcacatcaagtaagtaaactaatatcccaactttattttcttgtctatgatttcctttggacctgttagtctgttactctatattctatattatattactacatttgttcccaaattcctctcgccatgtttaaggttagctggatgagcttaataaaacatatttcatgattttcttttcagtatttgatttatttagcacacaaaacatggatgatgatctctgttagactgtgtgggccggcaccactgttggactgccggcccattagggttagggttgagtctatatattgtaaccccttctctatgcaatagatcacccacttcactattctacatggtatcaaattagggtttcttcctcccacatccgagccgccatctcccgcctccaacccctacagccgcctgccctaggtccagccgctgccctgagaggctcatccttccctcccggggtggatcccttcccagctgtgctagccacgccagcccacatcccagccgccgctgctcgtgctccccatcgtcggccgctcgggctcacgtcccttgctcctgctcctgcatccggggcgcggcgccttcccctctcgtggtcgagaaggagcggcgggcgttcgcagtggaccgcctcgtgctcgcctcctacccgctccggcgtctcctggagacggcggcgcgcagagccgggggcggcgccatcttcgtggacgtcgacgccatcctcttcgagcacatcctctggctcgcctgcgacgcccgctccgtctcccagatcctgcacctcgacctcaaggaggtcatcaacttctacgcccaggacgcgtgattggtccaccctccggggcgcgacgccttcccctctctcttcctctcccactgctcggcagcctctccatgcggccatcttccccagtgcaggcgctcaagccgccagggtcccgctcgggctcgccctaagcccagccgccatctccggccgcctctccccctacaccccggcgtctgcccagatctggccacgacattgctcgcgggcctagatccgtcgccgggctcgctcctcggccttgctgctgctgcagtgggggcgggcgacctcgtcgccgccacagcaggcgcccctggcagcggcaccctctccttccgccgccgaccggccagcaggccgctcctccgctttgcagccccttttcattgcgctagccacctcctaattgctcgcgctgacgccccagcagcgcctcccacttcgagcttctcccgtcactggtgccgtcaacaccccttgccaggtccggcgcaggcccctgcccggctggacccaccccgccgcccacccctccttcatcgctttcgttggatccgtcgctgccgcggccttcccgaccggatccccgttgctgcgatcctcctggctcgatccgctgtccctttggctggattcgtcgctgtcgtcgacttcccggccggatctaccgtttccccttctattctgccgcgggcgcggacaccatgaccggcgcagacgcgtgcgctgctgtcggcctccctggtggggctccttgacatccgcccgttcgaagaagcaggagggtcggcctgctgctgcccttttgttgtgtcgccctgctgaccgttgatgctcgaacgtcgacccctcccgaagaacaggcttctgctgcgcgcctcccgaccgcgaccacctcaacttcggctacctcggcatctaggggctatcatcttcatggagcacacaccggtctctactccagccgcaacattcacaccatcacggtgctgcaactgcggggggatttcaacccgtcggctcctaccttcggcctctactccagtctcatcgtgtgtggtgcccctgttgtgactgcggggggggggatgttagactgtgtgtgtgagtgtgtgtgggccggcaccactgttgggcacttgggctgccggcccattagggttagggttgagtctatatattgtaaccccttctctatgcaatagatcatccacttcactattctacaatcactgcctagttttttcttgttgaactgaaagtttagtgaagtatcaagtagtggttttcattcttatagacctgcatagctctttttccttgatatactacattagaggagtggtacatttttcattaggcaaattttactgtcgaacaaacatggtattgactacatcacatccagccatttgtcgtaggacaccagaatgattaattcattcttttctaagatttcgggagagacggttcaaaaatgtcctttttgccctcacggtccacatttcaattcttcgtcctctcctgatgttctcagtgccgagtcaacccctattcgtgaagggcaaggtgggtgcggcaagttcgctacctgcacgccatggaccttgccctcgccaccatcatttacactcatgaacccttggtattccagtgcctgcaccgcccattgcacgccctcatccgttgcatcttgtatcatctgtccaacttcatgtcggccacttctgtctactcctggatcctcgtgctccttagcggtgaggctagaatggctccttgttggagagcacaaacactaaccttaatcagggttgggagtgtattgatataggagtattaggtggaccaaggcccattacaaaagaggtacacacggtaacactaaagttacgctgacatcccccgccagtcacaacaccatcctgtacagatgttgagattggaccggaactcggtgaaaatggagggaagcctcttggtgaagatgtcggtgaactgtgaagtggtcgggacgcggagaacgcaagcatcgtcgatagcgacacgctcgcggatgaagtgtaggtcgatctcgacgtgctccgtgcgctgatgctgcaggggattggtggagaggtagaccgtgttgacgttgtcgcaatagacgagagtggagcgcttgagggggctgtgaagctcatgaagaagcttacgaagccaggaagtctaggtcacgccattggccacaccgtgatactcggcctcagcgctggagtgggagacgatggattgccgctttgaggactaggagataaggatggcgcacaggaacacaacatagacggatgtggaccggcgtgtgtcagcgcagccaacccaaatggcatcggtgcagaccaccagctcagaagttgtagagggccgaagaaggaggccgaagtcgagggagccacgatggtagcgaaggatccacttgagagcagtgaggtggggcttccgtggggtgtgcatgtgaaggcacacctgctggcaggggcagagttctcagcatggcaaggtatggcgcttgacataccttaaatttctagcgatgtttacccctaaagcactctatataacaagcatattgaatgaaatgaagttctgcgcaagaaactcagtattgacgattagaggaagaaccagaactcctcttacgaaccattatcagacctctagagctgctacactatatgtatgtgccttttggccctttacttggtacgtggtctacaacctacttgctatctagctggagtgttggactaaaagccttccacgtgagtagggtcggtcatctatgagacaatactagcagtggcgggcctaggattttgacgatgggtattcggaattttagtacgcacatttttttacagcataaatttgttatccatgggaaacagataattatccaccgaacacaatataatataatttattatccacgggtatgaatatgaatataataaagtatctatggtaaatttttcgtgggtatggatatacagtatccatacctgttacctgatgtgtatctgacattagtacagatctatacctacaaacgtatatgggtacaagtatggatttaattttatctcgtagttatgaatttgtaaaccatatactcgtgtccttttttttctcgaacgcgcaggagaactgcacatcattatattaagagaggaaaaaggtccaagaggaccaaagtacaatgccagagggcaagccaaaacactagatcagattggaacctagcctagaccctactaatagcagcaggaagaccaatacccgtgtcctaaccgcacaattgttatccctagtcgcacggtagggaaatgaaaaaggcgaactgaaagtcgcctagagggggggtggataggcggaatctgaaatttataaacttaagcacacactacaagccggattaacgttagaaatgaatccgagtccgaaagagaggggaaacaaatcaaccaagaaaataaagcggatgaacatggtgatttgttttaccgaggttcggttctaaagaacctattccccgttgaggtggtcacaaagaccgggtctttttcaaccctttccctctctcaaacggtcacctagaccaagtgagctttctccttaatcaaacaggtcacttagaccccgcaaagaccaccacacacttggtgtctcttgccttgattacaagtcacttgagaacaagaatgaggaaggaagaaagcgatccaagaaacaagagcgtaaagaacacgaacaaaacactctctcaagttactaagtggttggagtggatttggcacttgcagaggctttgattcttttgatttgtgtctaggagtgaatgcactagctcttgtattgaatgtgaagtgctggaaacttggatgcttggagtggtggtggttgggggggtatttatagccctcaaccaccaaaggaccgttggggcaggttgctgtcgatgggcgcaccggacagtccggtgcgccagccacgacacccaaccgttagggttcgggagcttctgaccgttggaggctttgtcctctagtggcaccagacagtccggtgccgcaccggacaggcactgttcagtgtccggtgcgcctctgacgggtggctctgctctgccgcgcattgttcctctaaatcttcagcttttgcaggcgaccgttgcgcgaagcagccgttgctccgctggtgcaccggacagtccggtggcacaccggacggtctggtgaattatagcggagcgcgctctgagaaacccgagagtggctagttcactctggtacgaacctggtgcaccggacagtccggtgcgccagaccagggcacactcggtttttttgctcctttgtttttgaaccctttcttcaatcttttattggtttgtgttgaacctttatgcacctgttgaacatatattctagagcaaactagttagtcccattatttgtgttgggctatcaaccaccaaaattatttatgggaaaaggttaaaccctatttccctctcaccaacgaaaagcgaagtttggacaaatatctgtaagcccgtaaaaccgtgttattttatatttttacaatatttgagtgtataaacataatatgtatacatatacataaattttgttgccagaaaataatgggtattcgattgaataccctaacttctatatgggcccgcccctgaatactaggacgttttgacttttgaattttgacttcaccgaatcgctgttttgtgttccattccattgggttcagtgtctcgctcagttgtcttcccatctctcacggaactgtgaccacaaatgcctagcatgcgtgactaccgagcacgagtcgtagcgtcatcgtcaagtccatgtcaatggcagccgggcagcagtgtctcctatatccctgaacggttcttgacctgagtgtcaattgctataacccgagtgtctacaaaagaagccaaagttaattactttttcctagtcatttgatacttggatactaattaatttcttagtttgtttgattaatttaagatgaatcatagtgaccatagattgtttaaggatcaaggatgtatccaaacggataagacaatgtcagtaccaaaacaagaggtgcacattgtaattttgtagatgcaaattttgttataaatcaattagcatgtgtgctttggtagtttaatatactctggtaaataaatggtggtggttgattgcagatttacgaactttttggtctgataggatggtcacacctctaatctttttgctggcaatggtggagctgcaaacttttactcccctaggcacaattgaagtgtgttatcaaccgcttagctgattggctttactagtatctttatatttattttaaatgcttttatttatacaataggtgatgattataatatgctatacatgtagaagctaatttggttagaaatctttggtagtctttgccataccttaaatcgtttctgtcctccgccactgatggccgaggtggccaagaggctggagatgacatcgtggtcggggtggccaagacaacggtgccaagtggaggcagaggcagcggaggcgagggcgtagggtgtgtcaacatgggcggaggaaggtggggcaaggaagcgaatgggatataggcggtcggagctgtcgcatcgagcgaccacaacacgagtggtaagatcctgtatggtgagttccggtgagttcctaaggatcgaactccatagaacaatggttgtcagtggtgaagcgacggaccgagagaagaatctggatgatattgggggcaacaagaatgttgttgaggttcaaaggaccaggaaagaccgtgtcacctactgagatgacaagcagagtcgatccattaccaacaatgatggaagaagggaaggtggagctatgggaatggggtaaagaaacaacactcgggtcaggagtgatgtgatacgagacgccggagttagcaagtcagtcgattttagtaggagtaggtggcgatgacatggggaacaaggagagagccaccagagggatgctggggcctccagtggcaagcatgctgacatcgcgcatgggtggtggagacgatgggacctcgagcgtcatggagacaatctcagaaccgcggaacagaaatggtccagtagcgtggcggccctcttgagggtggatggagttcggagagtggtagagcgcgacgcagtgacagagaacagggttcatgacctgattaaaggccacgaatgtgcctcagagaagctgaccgtcgtgaagggagacacgcacatgatagggaggcacatggagcatgacatggcaaaggacgagcgtcaaggaagcaggcgcgagggtgtcgggcgcactggtggctagggcccccgagcaaccgagcgcgctggtagggcaaagagcccgggcactggacacagagaagaggcggcgtgtggctgtgcgggcgagccaatgatgcttagctggtctttttggatgatcagccacactgggactgagacacgacctggactcccacggggggggcagcagttgtttggtcatgggtccaatacaactgatagccaagtcttcaatggcactggcactttatgagctagatagatcccatgacttgaccttgcccgaagtcaacatccacgccggacgcgaagagttggcagcggcgaatgtttgcgcgcgtagtggattccgaggcccagtacacacgggggccgtgctgtttgtagaggaagtagatgtccgttggagggctaggggccgcgcacagtgcagttgccagggcggacgcagtggctgcgcccgtgctgggcgaggctggggtgtcaaggtcgagtgcgtttgcgatgccagcgttgtgcaaggtagtgcccatgttagggagtggagtggcggagaggagggtggcggctaggcctggtaatgggtcataatcgggccctaaccccactccgatcctaaagattaaggagtcgattcagccctacttgaatccaacctgaattgatgcagctcaatccgatccattctttaaagcctcgacatcctaatctgctccgatcctttcaaaatccgtgggccaatccaagggccctcacaagcaagcaaacgaccaccactagctaattgaatctgtacaaatccatgggcttgctctcaaacaaatataacatgtactgctatacactgcatgacgactaaaaacagctcgctggatgtagctcgtaatgtaacctgtacaaacaaacaggtgttggatgcaactcgtaataaaattcaagaaatccttttttattcagctgttgcagttcataaaaaatatagaaaacatagaaaccagcttaatgtgcttacaatgaaccactaagttcaagaaaaatatagaaaacatttagggttgttgcagtccataaaaagcccagcttcttctttagcctaatctgaagaaaagagaacatgttaacagaaattcagcacaacatttatgagtgggcggtggacggcgcgacggcggcggcagcggcgcttgtggctagggccatggcagtggagccgtcggggtgctgggctaggtcggcggctagctcgagggagagggggagggtcgcgccaggccgggagcccgcgccgacgccgagagcctgcgccgacggccagcgcgagggagagggggagggaggtagcgccggagggagtggggagagagaaatatatatatactgagtaattgggccaagcccattacactgagcgtatgcaagtaattacatagggactagccccgaaaccctaacagtggctagatcaaaaacctagatcttcgataccatgttacgaatagagactcaactggatgatctattgaggcccaataaggagtatatatagagtacacaaggggcacaggaggaaaacctcagacaaggagataatactaatacccttgactattataccaacacacagatggattgtgcgagcagtggcgcccctactctttggggtttggtacatgtggcagcagcgcgacattgagcaggagaggtgag

SEQ ID NO: 298 - DNA, 24245 bp, Zea mays
  Intron number 1 from transcript GRMZM2G171650_T04 (locus G RMZM2G171650) derived from phytozome v7.0 (chr-ID 3; pos 1 58982614 to 159006858 reverse strand)
agtactcctcctccaggttccgtacccctaccccatcgtcgtagaatcgcttgcccctgttgatcgaagtgagattgaagcaggggaatagccccacccaacaatctagcggtggagcagctgaggtgatcctcgattcgctccggcaccatttggacccccctcactcccgttgctccatggcctctcgcacgcgcggtggaccaccagccgccttgatcgtgcacgccttgtgctcgagacaatcccccgtatcaggacttcaggaggcttcgtctgtgccaccttgcatgagtactatgaccctgtttagtttgggatctctatccgccctgccgcttatagatggccaaacgggcggcacggcccgacccggcacgagcccgacttgggcacggcacgacaggcccgagcacgacaggcccgtttacataatcgggccgtgccgtgccgcccgacgtgcccagcctcaggcccaagcacggcacgggagattgttaaccgtgccgtgccggcccgacagcccgaagcacgttagggctcgtgccggcccaagagcccgtaaaactcagtacagaaacgcaggaacatctaatacatatatttctcatcagatcagagttaataacatattaatacaacaaaatctaacacaatcacaacacataacacattatttagtttgagctggtgcaatggctgcctcgttaaaaacctatctaggtaaaactcacacctcgtgagaaaccctagataggaaaagagtacagcccagctcaatattttcattatttcatcacatagttcatctcagaattaagttacatgtccagaacccacattacatgtccagaataccagaacagactaatcaatgaataaatctctgaaggactcttcaaggatcttatcttctgttgtgtgctgcattcttgcatctgctgcctcccaatcctttagcaaggaaagcatctccaccattccagagccaagtcgacgacgccgctcctcaatgagcctacctgcaagactaaatgctgattctgaactcacagtagagacaggaactgaaatgatatctttagctaggattgaaagtactgggtaagtaagtttgtgatcatgccaccaatctaggagattgaattcatcatcaaacttctgaacagtgtcactatctagataagcagctagttcagaaccagaaataccaggagtgcttgctgcatgaagcaaagcactagcagatgtccttcttgacagttcaggaaccatcccagaactgctactggcaccaaaggcacccagaccagcacccagtgccattgaagaactgctaccaatgccatctgcaccaaacaccaaatcccaagcatatttgctcttaccttcaccaggggtagcatttgaagtcctctgcaacctaacagaaccaaatttgtcatcatatttattaaataaatcagataaatcagccctcacagaagttagatatccagagtaatcagaatgagtcaactgagacatgagtgcaagcacattgttgaaacctctcattttagctctagggtccagtataaatgcaaatgcatatagcaaaggaattgtaccccaatattttaagaatttgtctttcattgggacaactatatgtctaagcaaattatcattctcatacatgttcatgtgcttattaatatgaagaatgtggtgcaacattaaaggtgatgtaggatagtacacaccagacatcacaacagtagaatcataaaacctttcaaggaactctaatattttttcagcaacataccaatgtgcttcacttaaaagtgtagtaccctcttctctagggtgatagtgggtctgtataaacacagagaatgtgctcttgtaaggtataagatgtttgagcataaggtaggtagagttccatctcacttccatatctaaaccaaacttacgaggtcttactcccatagcaacacaaaaacttttgtatgcagcaatcctttggtttgatgagttcaaaaaagagatggcagttctaaaatcttcaagataaggtttcagttccacaaatgtggcatgcacagcaaggttaatgatatggcatgcacatcgttgatgcaataataaaggaccaacataagcagatagcaaaggtgtaagatggtccattgccctagtgttagcagatgcattatccaaggtaatggaaaaaaccttttcagccaattcatattcattaacaacagcatgaatcctctctgcaatgttcttgccagagtgggaacaatcaatgagacgcatagcaagaatccttttttctaactgccaatcagagttaacataatgtgcaacaacagacaaataatcttctttagcattgccactccaaatatcagaagttaaagcaacagaagaaacatacttcaatttttcagcaactatagcatgtcgttctttaaagtacttttccatatctctagttgtagtttgtctagaaacattgcaatgcctaggattatgggcagttttaatgtattcatcaaatgcatcacaatcagcaaagcataatggaaggtccaacctagcaatcaaacgacataactgaacacgtgcaacttcagcactatattcccaacgaaagacagtaccatcagcattatatcttagcatagattggttcccagttcggccatggagtcgtttacatttgtccctatgccgagacaaatgaccagtgccaatggtagaacgggcagcaagttatttcttgcaaaaatgacaccttgctcctactctaacctcaacaccattttcagtggcgaaaatcttatccatgtcctcccagacatcggacgtgcatttcctctttctaccagtgcttgccgtagtggaggcagtagcatctgggagagcctcgccctcggcagcgacattgtcgtcgccaaggtttatggtagggttaggggtagggttaggggtaggggcagtggaaccaaagagatcctccaaaccatcgtgcacgtcatccacatcgtctggggtttgacccatcaacaccaaatcatgattaatggaggtaggatcatacctatgctccatcgccggcacctggtccctcacggccacgacctcgacctgcaaagaagcaaagacatagggggattaggggggttagggttaaagaagcaaaaacagagggggattagggtttagcgagttcataccttagccgattaggccggagcaccagttccgtcggcgatagagaagatccagcgacagcagatccagagacacagagatagagccagatagaagaacagagagactatgagcacaagcgcacgatatagatggccaaacagggagaggaggtgtgtgtgaagctttaccttaccagatccgcagaccatcggtgatggataagacagaggagaggcagatccacagatctagtacaccggagtccatagcagaggggggaagcgctagggaatggggatacaagattctgttaccgaagacgtgccgaggacggggcatccaggattccaggaagcacggcgcgcgacggccgacgcctcgacgtcgacggaactggccactgggtgcgaggcggcggtcgacggggaaccgagggaaccgggtgcgagcaccgcgagggaaccgatggccggcgagccgagcaccacgagggaaccgacgaccggcgagtcgagcacccacgagggaaccgacgggcggcgaggcgagcacccacgagggaaccgacggggcgaaaaggcgactgggcgagggcggagcggacagcggagacggagagaacgagacgagtgcacgactggggttagggttagggttacggacttcgggtcgtagaaagtaggaataggtagtcgggcctggcgtgctttccgttttaaacgggccgtgccgggccggcacggcgtgccttggtcgcggcccaagcccggcacgggcgtagtgccgggccggcactagcccgaatccgatcgtgccgtgccgggctcaggcacgccaaatcgtgccgggcctcgggccggcccgactaacccggcccatctggccatctctactgccgctgccgcccgcagcgccacctgttctttattattattattattgacgatccgtcacctgctccatgagcttgttctggaccttggctgctccaatgcgtggagatagtgtgcgtgtgttctttctctctttttcacacgtggctcacagataggaactcgggagcgtgcttcaatgccactgtgcgcgagtatctctcgtgcgggcaatgacaaatagggtgcacaccctccaatttgcacccggttacgttgactcgacttttcccgcacttctctcgtctaatctggagtcaagtgagacctgttcctgtgttctgatttttttccgtctattgataaccttggatcggcatccatcttggactttttagaggagcctccagctctactctagaccaataatgttaaatgaatgtggccaagtccttctatttagaaattttccaaaaaaattatagattcttctcaagacgaaagccatttttatctcgtttgctaggactttttggtaacctagaagtcctaccaaggacccttactctgtaacatccacgtggttgatatgcgtgataggttaattatagcaccgattaaaggaagtgaacatatacagtggagatctttagacacactagtgtgtaatatagtgtgtaataggatcttaaagcgggatagcaacgaaacgaaagatagaaaacggctaaagttgacatagaaagatgcattaaaaagtgatttgaaaagacagaagagagttatcgagcatcgtctgagagacataacaagagaaataacttagatatctatgaaccaatttggtttcatacttgaaaggtcaactatgaaagccatttccttaataagttatggagtagtatagcgagcaagcgaaagacccacacatagatttcatcgactcgaagaaggcttataacaaaatgttaaaaaatattatatggtggtatggagaaacataacaaaatacgttagattcattaaggacatgtacaacaatgttatgaatagtgttgaacaagttataaggatgtatataactttttgattaaaataggactatatcaagggtcaactttgagcctttacctttctgccctagtgatagatgatgtcacaagggaatacatgagatgaacatgaatatatgagatatgtggctatacaagaatggatcgagttcaaaatgatgatataggcaatagattataagtagcactagcaccaattaaagaaaaacatattcaacatcgattgagatagtttggacatgtccaacggagatcccaaacacactagtgtgtagtggaatcctaaggcgtgaagcgtgatagtaatgataaaagatgcgagagaatgccgaagctgacataaaaagatgcagtaaaagagacttgtgatgtagcggtataagggagaagaacctacacatggtttttgacttagagaagacttatgacaaaacataaaaaatgttataggggggtttagacaaataaaagtttcaatgaagtttgttaaggacatgtacaacaagtgtttcaacaagtgatggagacatggctttctaattagaataggactgcatcaaggttcaactttgaggccttaccttcttgcctttataatggatgaggatggatgaggtcacaaaggacatttaaagaggtatttcttagtgtatgttttttgcgaacaatgtagtgctagttgataaaagccggataagagcaaatagaaaactaaagttgtggtaggagactatagagcccaaaggtttgacttggtagaactaaaaccgaatacatgagatgtgagtatgtgactttgacactactacacgtgagggagatattagtttggaaggtcaagtagtgaccaggaagaatagattttgatatttaggatcaattctatagagaaatgggatatagatatttaggatcaatactatagagaaatggaatattgttagccatataatcaaaagaagggcaaagaaagtggcgctaaacatctaccttatgcgtgataagagggtactacataagctaaaagacaaattagacatgttttattatatgatgcataatattggtctacaaaaagataagttcaacagataagcattgcaaaaatatatatgttatatactagaattgtggccacacgagggatcaaatcgatgctatatatatgtgataggttagatatcagaatgaattcataaaaaatgataactagggcgtagcatatcataaaagagaatgaattagcctacttaaatcaagctttcataggccatgctactctttactcgactgttcaaggaaatcaaatcaagtagtgctagcagtcatgcaaataaatcgttcatccttctctctcatggttcatatgtcagggcccaagagggcccgctacagtgacactatagcgacgtggtactgtagcacgcccttaggttggttagataaagataagactagtttgggataagagattagatctagtgcttacaggtcaagtaaccctctttatataaggacagagattgtatcaattgaaggtaaccaagagattagaaggaaatctcttctctcttgccgaccgtgggaaaatagtgcgggtactgtttatccatgtgaatagtaccgtgcctccccagccaactgcccgacgacgtccaagcgtcggtgtcttggtcctagaccccaaacctaccactcgtactacttcgtaaccctagatccataacaatctagtatcagagacgacgtcgaccctcaccctggaagtcgtagcccaagcggttgtcgatctcgaccgttccgtggcgatcatcaccgccttcctctccaccaatttttcaccgctagggcacacgtcccacaccaaccttttgccgccgctgcatgcattgccaggctcgatccgtcaacctagcaccccggcggcaccatgcctgcccattcatttgttgcccatgccgccgtcgccttcccctattccatcatacgccatggctatgggggaccccagtacaccatgcccttgccgcaaacacagattgcgacatcaggtgcaatcatcccttagggaggcttgcccctttacctcatctccatgccaccatcatcatcgccaattccatcgtacaccctctcatcatcaatggcaccataattcacgatggcaacgtctccttcatcgaccccgttgttcaccgccccattcctgtgccgccacagcagcagtgcgatgacgtcttctacggggcgtggatggcatccgagcatcgatgacacaactataggcggcggcatgctgcctcctagtgcgtcggcaaggacatcgccccatcttcaagcggcggcgctcagtcgtcccatcaactagaggaaggcgattgcgtgggcgagtgcctgtaaggtgtcagcggtggtgcggctgcagtctgcctcctaatgcgctggcgactgcaggaggtgcgtcgacagatgcataacatcataacaccccgtttacctagccaacatttagatccgactctaaccaaacttttttggttcaccccaacactacccacttgtttgattgttgctaagcacttttaggataccaaacatacctcccaaatggtacttaaagtggtcaatttaccattgagtcaatgatatacatgataaattagaggtggcaccaattggaaaaaaagattgtccgacaataattgagatggtttgaacatatgtccaacggagaccaatagatgcatcagtgcatagttgaactggttagatgtataagtggattgtcaccattcagtgcatagttgaacggagtcaatgtataagtggattgtctactctcctaaaggcttaagctttttggttgaactggttagaacgtccactttaacatgataccgaagccagacgtctcgagttcgaatcctgacagaggttgcccctgcccctttatttggttagaacgtccactttaacatgataccgaagccagacgtctcgagtttgaatctgtcaataccgaagccagacgtctcgagtttgaatcctgacagaggttgcccctgcccctttattttccacgtttgtgtctttcctctcccgctacacatgagtgagaatattaaagtgtataagtggattgactaccttctcttaaaggcttaagcttttaggttaaactagttagagcgtccactctaacaacttaacctaatacaaaatagttctattaaaattaacgacattacataagatgaactaaatctatcatattgattcacatggtacaaagagagtaaggtttaatgtcataatgtcacaacatacaattttccatgagttctcgtgactacatcggtgtagggtaccttcaacctcctctgcctgtgccatataggtaaaaagaatttgattagaggtaaaaaggataccgactaatcatgtgatggatgaagaaaatattccatatctactgtacctcgttaacaggtacctatctctagttatggttagtgcataccgtttgatataactgtgtttattaacaccatactcaatgaaataatgtgttctcttttgctagacgaagattttttttcaaaggtcacaatttacggtgcagacacatgcatgatttagtgtggggcaaaaaggcatgatgtagtgatgaactcaaaaggatggtttaaattctttttacatttggaatttgagtataggaaccgttgtaccgtaaagaaaatacaatacacaagtttaagtgtgtaaccaagtgctcaactccactccacaaaaacttacgtggccctgcagcacgttctgcggtactatcacaacttagcgatcattggaaagctgagggtatttatacccactcttctcaacggccatctcgtgtttttcattctcaccatccttaagataactcttctcactccattgaagactcataagctctacattgacttccttttagattcctttgagattagagtctctaaactttgttagagagttattcaaactgagatcaaactcttaaaaccatggttattaaagaggtaaaacgttaaaacgttatgaaccaacttttcaacatttaaacgtttaaacgaacgttgaaacatctttttaaacttgacatagaatttcaaatatagaataagttcatacataagttgagttcacaaaccaaataacattagcataaaaagaaatagatcaagttcaacaacacaagttcaacaaacacaagttacaacttttatgcatgattattaaccatcatcaaacttatcaatattaagaccatgagcatcccatgataaattgaaatcaactccaagagcattgctaacatgagaagaattagctaatggatcaacccattcattgtcccaatcaaagtcttctaaaatcaaaggatcaaagttttttccttccttacgtattttttaaaatctatcaaccatctttctgttgtatgaaagatagaccaaatcattcaaccttttgtgctctaacctattcctcttttggtatgcatctacaagtacaaataaaagtaaccaaagaagaactgaggataaaaaagtagtggcgaatagaaattgaataatttgactagctcatttacaaatttaaatgtactccaattccgctcacaaccggatgatgaagcacaaagactaacaatccgtcttgcaaacttatataattcaatagtacgaccaccatatgcaagccaccaatcaactaaaatggcgcgaacaagaagattatatgttacatactgaaaatggaggaaggctatcaattttagaatacttacgtggattccttgtttgtgcttcttcctctcatctgtctttgacaaccctagcaagtaaaggctcacgtagctcatgtaaagtaggaggcttgaacccagatccatattgagcaatagcctccacaactacctcaaattaccttgagttcgcagcattgaatggtataccacactcatagaaaaacttggctatctccaaacaaatagaatttctttcttccttaggcttcatggtagcacttatggtagtttgagcaggtccctttgcatgtctctatgctacaacctcttgaggtgttcgtcgaatcatagatgcaatggacttctttggagctgcaattgggtggggcttcaattggaaaattgctttgtttcttttggcagctgctccagaacttggcacaatacatgaggaagcctgatgatgctgacacgacctgcttcccataacttggacatcatcatcttgtactgcttcatcttccattacatcgtcatctaggtacaccgtcctagcccgcttcccattattcaaagcttcattcatctctttatcaatctctctagcagtgttaggacacttgacaatgtctccatagccaccaggtagatgtttcaccctcttgatacctccttttatttgtttggggcacaaagcacattgaatcagctctcgctttcccgcctcaacatagtatgcatatttctatcctggatcatttgactttggccttagtcactgatctttgagtgggtcataggagtcattactttgaccgacagacaatgcctcgctatttgttgccattgaaattcactgtgagcaaatagagattgattcactgtgagcaaaatcaacaaattcactttgaggctggctgctggtctggcggagtggctgctcagctgctggtcttgctcagcagaggtgaggcagagcagcgcaagtgacaggtgaggcttgcgcactggtgagagcacctagagggggggggggggtgaataggtgatcctgtaaaaacttaaacttatagccacaaaacttgattaggtgttagcacagtttatgccaagtggctagagaggagtcaaaacacaataaccacaagaatccaatcacagagatgacacagtggttatcccgtggttcggccaagtacaaaacttgcctactccacgttgtggcgtcccaacggacgagagttgcactcaactcctctcaagtgatccaatgatcaacttgaataccacggtgttcttgcttttctttttctcaatcccgtttgcgaggaatctccacaacttggagcctctcgccccttacaaaagatgttcacagagaatcacagagcaaaggagggattagcaactcacacacgacacaaagatcacagcgaatacgcacacacaagacccagacttgagctcaaaagactagcacactagaacggagctcaaatcactagaatgtcgaacaagtgcgcgagattgatgtgtgagtgatcaagagtgctcaaggaatgcttggtgttctcctccatgcgccaaggggtcccttttatagccccaaggcagctaggagccgttgggaacaaatctggaaggccatctttgccttctgtctcgtggcgcaccggacagtccggtgcacaccggacactgtccggtgcccgatttgtttccatagaaagcgaagccgaccgttgccgaccgttgcagatctggcgcaccggacagtccggtgcacaccggacagtccggtgcacaccggacagtccggtgctcccttccgaccgttggctcggccacgtgtcgcgcgccgatcgcgcggccgaccgttggcccggccgaccgttggctcaccggacagtccggtgcacaccggacagtccggtgaattttagccgaagtcgccggagaaaaaacccgagaagcggctggtttgcgctgcgctgatctggcgcaccagacactgtccggtgcacaccggacagtccggtgccccagcccgaagcagcctttggctgtacacagccactctccacttcttttcttttcttctttctcctgtttctaacacttagacaagatgttagtacacaaaactaatgtactaaggcttagaaacatacctttacttgtgatttacactttgttcatccatgagcatattttcacatttaggcccttgtgtttgcactcaatcaccaaaatacttagaaatggcccaagggcacatttccctttcaatctccccctttttggtgatttatgccaacacaatataaagcaactagaacaagtgcaaaatcactttaaaaactcaaattggttttattcaattttggcatatatggatcatcctttgccaccacttggtttgtttttgcaaatcaaactcaaatctctatctctaagtcaaacacacatgttgaagtataaagagagtcattccaaaagagattgatcaaagatttcaaaaactccccctttttcccataatcaacacttctccccacaagaagccaacttttgaaaatagagacaataagagacaataaaagcttttgacaaaacaaaaactctattctactattttcaaaatctctcaagtggtagctgatccatttatcactttggcctttattttctccccctttggcatcaagcaccaaaacgggatcaatcttggcccgttaaccccattgcctcaccaaagtcttcaattaagagcaaatggcaataagatttcatgagatgaacttggaattagttaccctctcatcggagtgcagtggaagtctttcatggtccaagtccaccttttccctttcaatcctccttcgagactaaattatcaaactcaagcacatggttagtctcaaagggtcaagttgtaacacatctccccctacacatgtgcatcactttgcaacggacttgtgaggtccagggagtgtttgtacaacttgagcaccataataagcaacataatgcaaaaaggaacatgatcaaaagcataactacatgtatgctacaattcaatccaggttccgcgaatctaagacatttagctcactacgcaacctgcaaaaggtcttctcatctagaggcttagtgaagatatcggctagctggttctcggtgctaacatgaaacacttcgatatctcccttttgctggtggtctctcaaaaaagtgatgccggatgtctatgtgctttgtgcggctgtgttcaacaggattttccgccatgcggatagcactctcattatcacataggagtgggactttgctcagattgtagccaaagtccctgagggtttgcctcatccaaagtagttgcgcgcaacactgtcctgcggcaacatactcggcctcagcggtggatagggcaacggaagtttgtttcttagagttccatgacaccagggaccttcctaagaattggcacgtccccgatgtactcttcctatcgaccttacatccagcatagtcggagtctgagtatccaactaagtcaaaggtagacccctttggataccagagcccgaagcaaggcgtagcaaccaaatatctaagaattcgcttcaccgccactaagtgacactccttaggatcggattgaaatctagcacacatgcatacgctaagcataatatccggtctactagcacataagtaaagcaaagaacctatcattgaccggtatgctttttgatcaacggacttacttcctttgttgaggtcggtgtgtccgtcggtccccatcggagtctttgcgggcttggcgtccttcatcccaaaccgctttagcagatcttgcgtgtacttcgtttgggagatgaaggtgccgtccttgagttgcttcacttggaacccaaggaagtagttcaactcgcccatcatcgacatctcgaatttctgcgtcatcaccctgctaaactcttcacaagacttttggttagtagaaccaaatattatgtcatcgacataaatttggcacacaaacaaatcaccattacaagtcttagtaaaaagagttggatcggctttcccaaccttgaaagcattagcaattaagaaatctctaaggcattcataccatgctcttggggcttgcttaagtccatagagcgccttagagagcttacacacatggtcggagtaccgttcatcctcgaagccagggggttgctccacgtacacctcctccttgattggcccgttgaggaaggcgctcttcacatccatttgaaacaacctgaaagaatggtgagcggcatatgctagcaagatacgaattgattctagcctagccacaggagcaaaagtctcctcgaaatccaaacctgcgacttgggcataaccttttgccacaagtcgagccttgttcctcgtcaccaccccgtgctcgtcctgtttgttgcggaacacccacttggttcccacaacattttgcttcggacgaggcaccagtgtccaaacttcattgcgcttgaagttgtttaactcctcttgcatggccaacacccagtccggatctagcaaggcctcttctaccctgaaaggctcaatagaagagacaaaggagtaatgctcacaaaaattaactaatcgagatcgagtagttactcccttgctaatgtcacccagaatttggtcgacgggatgatccctttgaatcatcgctcgaacttgagttggaggtgccggttgcgcttcttcctgtatcacttgatcatcttgtgctcccccttgatcaagcgcctccacttgaggtacctgttcgtcatctttggttgggggttgcaccatagttgaggaagaagtttgatctcgttcatcttgttcctgtggccgtacttctccaatcgccatggtccgtatagcggccgtcggaacatcttcttcatctacatcatcacaatcaacaacttgctctcttggagagccattagtctcatcaaatacaacgtcgctagagacttcaaccaaacccgatgatttgttgaagactctatacgcctttgtatttgagtcataacctaataaaaacccttctacagctttgggagcaaacttagaatttctacccttctttactagaatgtagcatttactcccaaatacacgaaagtacgatacattgggtttgttaccggttagtagctcatacgacgtcttcttgaggaggcgatgaaggtagaccctgttgatggcgtggcacgccgtgttcacggcttccgtccaaaagcactcgggggtcttgaactctcctagcatcgtcctcgccatgtcgatgagcgtcctgttcttcctctctaccacaccattttgctgtggtgtgtagggagcggagaactcgtgcttgatcccttcctcttcaaggaactcctccacttgaaggttcttgaactcggacccgttgtcgcttcttatctttttcactttgagctcaaactcattttgagctctcctgaggaagcgtttgagggtcccttgggtttcagacttatcctgcaaaaagaacacccaagtgaagcgggaaaaatcatcaacaataactaaaccatacttacttccccctatgcttagataggcgacgggtccgaagaggtccatatgcagcagctccaggggtcttgaagtggtcatcacattcttgctgtgatgcgctcctcccacctgtttccctgcttgacaagctgcacaaggtctatctttttcgaattgaacattggttagacctatcacgtgttctccctttagaagcttgtgaaggttcttcatccccacatgtgctaagcggcgatgccacagccagcccatgcaagtcttagccattaagcatgcatctagaccggcctcttcttttgcaaaatcaactaaataaagtttgccgtctaatacacccttaaaagctagtgaaccatcacttcttctaaagacagacacatctatatttgtaaacagacagttatatcccatattgcacaattgactaacagatagtaaattatatcctagtgactctactaaaaacacattagagatagagtgctcattagaaattgcaattttacctaacccttttaccttgccttgattcccatcaccgaatatgattgaatcttgggaatccttattcttgacgtaggaggtgaacatcttcttctcccccgtcatatggtttgtgcatccgctatcaataatccagcttgaacccccggatgcataaacctgcaaggcaaatttaggcttgggtcttaggtacccaactcatgttgggtcctacaaggttagtgcaaatatccttagggacccaaatgcaagttttgtctcccttgcattttgcccctaacttcctagcaacaattttcttatcctttctacaaatagcaaaggaagcatttaaagcataataaattgtggaaggttcatttgctattttcctaggagcatgaataacattccttctaggcacatgatgaatagcatttcttttaggaacaacatttctcctagtaacatttctatcatacacataagaggaactaggagcaaacatggtatgagaatcataaacatatgaatcataagcatcatgacttacatttctagtttgtcttctatcatgatacaaaaatgcatggttccttttagcactagtagccataggggccttccctttctccttggcgggaatgggagccttatggcttgttaagttcttagcttctctcttgaagccaagtccatccttaattgaggggtgtctaccaattgtgtaggcatcccttgcaaattttagcttatcgaaatcattcttgctagtcttaagttgagcattaagactagccagttcatcattaagcttggaaattgaaactaggtgttcactacaagcattaatgtcaaagtctttacacctagtacaaatttcaacatgttctacacaagaattggatttgtttgctacttctaatttagcatttaaatcattgttgacacctttcaaagtagaaatggtttcatgacaagtagatagttcaaaagaaagcatttcatttctcttaacttctaaagcataggatttttgtgcctcaacaaatttatcatgctcttcatacaacaaatcctcttgcttttctaaaagtatattcttttcattcaaggcatcaattaattcattaattttgtctatcttagatctatctaagcccttgaacaaacatgaataatctacttcatcctcatcactagattcgtcctcacttgaagaagcataggtagagttgcgagtacataccttcttctctcttgccataaggcatgtgtgacgctcgttggggaagagggttgatttgttgaaggcggtggcggcgagtccttcattgtcggagtcggacgaggagcaatccgagtcccactccttgcctagatgcgcctcgccctttgccttcttgtaatgcttcttcttttccctcttgttccccttttcctggtcactatcattatcaggacagttagcaataaaatgaccaagcttaccgcatttgaagcatgatcgcttccccttggtcttagtcttgctcggctgtccattgcgaccctttagcaccgtcttgaatctcttgataatgagggccatttcttcttcattaagaccggccgcctcaatttgcgccaccttgctgggtagcgcctccttgttccctgtggctttgagagcaaaaggttgcggctcgttgatcggtccattcaaggcgtcgtccacataccttgcctccttgatcatcattcgcccgctgacgaattttcctagtacttcttcgggcgacattttggtgtacctgggattctcacgaatattattcaccaaatgaggatcaagaacggtaaaggacctgagcattagtcggacgacgtcgtggtccgtccatcgcgtgcttccgtagctccttattttgttgacaagggtcttgagccggttgtatgtttgagttggctcctcgccccttatcatcgcgaaccgtccaagctcgccctccaccaactccattttggtgagcaaggtagcgtcatttccctcatgagagatcttgagggtatcccagatttgcttggcgttatccaagccactcactttattatattcatccctgcacaatgaggctagaagaacagtagtagcttgtgcattcttatggatttgctcattaatgaatataggactatccgaactattaaagtgcattccactatctacaatctcccatatgctaggatggagagagaataggtgactacgcattttgtggctccaaaatccgtagtcctccccatcaaagtgtgggggcttgccgagtggaatggaaagcaaatgtgaatttgaactatgcggaatacgagagtagtcaaaagaaaagttagaattaaccggtttcctttgtttgtcgtagtcgtcgtccttttgggaagaagaggactcatcgctgtcgtagtagacgatctccttgatgcgtcttgtcttcttcttcttcccatctcttcgcttgtggcccgagcccgagtcattggacttgtcatcccttggctcgttgacgaaggactccttctccttgtcgttgatcacaattcccttccccttaggatccatctcttcgggcggttagtccctttcttgaagagaacggctccgataccaattgagagcacctagaggggggggggggtgaataggtgatcctgtaaaaacttaaacttatagccacaaaacttgattaggtgttagcacagtttatgccaagtggctagagaggagtcaaaacacaataaccacaagaatccaatcacagagatgacacagtggttatcccgtggttcggccaagtacaaaacttgcctactccacgttgtggcgtcccaacggacgagagttgcactcaactcctctcaagtgatccaatgatcaacttgaataccacggtgttcttgcttttcttttctcaatcccgtttgcgaggaatctccacaacttggagcctctcgcccttacaaaagatgttcacagagaatcacagagcaaaggagggattagcaactcacacacgacacaaagatcacagcgaatacgcacacacaagacccagacttgagctcaaaagactagcacactagaacggagctcaaatcactagaatgtcgaacaagtgcgcgagattgatgtgtgagtgatcaagagtgctcaaggaatgcttggtatgctcctccatgcgccaaggggtcccttttatagccccaaggcagctaggagccgttgggaacaaatctggaaggccatctttgccttctgtctcgtggcgcaccggacagtccggtgcacaccggacactgtccggtgcccgatttgtttccatagaaagcgaagccgaccgttgccgaccgttgcagatctggcgcaccggacagtccggtgcacaccggacagtccggtgctcccttccgaccgttggctcggccacgtgtcgcgcgccgatcgcgcggccgaccgttggcccggccgaccgttggctcaccggacagtccggtgcacaccggacagtccggtgaattttagccgaagtcgccggagaaaaacccgagagcggctggtttgcgctgcgctgatctggcgcaccggacactgtccggtgcacaccggacagtccggtgccccagcccgaagcagcctttggctgtacacagccactctccacttcttttcttttcttctttctcctgtttctaacacttagacaagatgttagtacacaaaactaatgtactaaggcttagaaacatacctttacttgtgatttacactttgttcatccatgagcatattttcacatttaggcccttgtgtttgcactcaatcaccaaaatacttagaaatggcccaagggcacatttccctttcaactggcggcttgcgcagagcagcgcaacgaggcagaacaacgcagaggtgaggtagagcactggcggcggcggcacactggactttggagcggcgccgcactgcactgtgggcggagggaggagggagtagaggggccgacggcgtgcctggactcctggaggcggctgagggcggctgaggacaatcgacggcggtagcaggctgaggacggctggcggctgaggacggctaaggatttagggtttgagggcgactgaggacggctaaaggcctaggaaggcccactaacaactagaatgttcatagaacgcttaaaacaccataaaacacgttttagacggttacacgacgcttaaacgtccaaaacggacgttcaacaccattttcttagaacatgcggacgttttagttcctactcacgttttatcgcttaaaagacgcttaaacgtcgtttaagcgacgttttaataacaatgcttaaaacacttagttctcactcaaaccggtggattgcgacctagatcaaacttctagaacacttagttgtcactcaaatcggtagattgcattcgttgctcttgaaaaagggctcctagccggctagacatcttctattcactcaagcccttgtgggtactccaaaaagtttgtaatctctatcaacatctagtaagaactctcaatcaagagacttgcactcttaactttagttctcactcaagacggtagattgtattcgttgctcttgaaaaaaaggctcatagtcggctaggcatctcctattcactcaagcccttttgggtactccaaaaaaaattgtaatctctaccaacatctaggaagagctctcaatcaagagacttgtgctcttaacttgagaagtgtacatagttcttgaaaccaagtctggatggcttcctcaacatggaggtgacaatccttagtggcatgctaaaccatagaataaatcatttgtcccttgtgttttttatgatcgtattatgttctacttatgttgtggttggtttagggtttgcgcccgatctacttgtacttaagcttttgacatcgttgtgaattagactcaaagctaccacaagaaccttagtaaatcactcgatctaagttctcttagatagtttttgaattttatacatgaggtacctcgggtgcggtagtaccacatcaatacccaaaactgtcgtggcacggtgatcctcacgcaagcacgagagtatcgcgtctgattctaactgttatattaagtttgttttatatgtctattgaaccatggttcttaaggcggtaagacgaggcaaggcgttggaccaccgcctggacgcctaggcaacacctagccgcttactaaggagagcaaggggacaccttaccaattagagaaatagaagaacaacatagatgaggaagaaaaagcaccttaccaattagagaaatagaagaacaacatagatgaggaagaaaaaggaaaaggaagggctaggagatgtataagagatggcctatcccatcagctagcccatataaccttccctgctagtgattagggttaccccagtctcacgatgctgctcgccggcatctcagcgtcacctctcctgctcccccgagctctacgccgctgctcccccagctttgtgccgttgttgcccctgagctgtacgccaccgctcgccctgagctctgcattgtcggtcgccgctctctcgagctctgtgccgccactgtcccaagctctataccgtcgcctaggcttcttccccttcccctcttacctcgcttgctgattcttagctaggcggggacgcctagaacttttgggcgcctggacttaggtgtcacctaggcgacacctttgaaaccatgtattcaaaaccctatagacttgcatgatcctttttcactaccagaacccaagatttggcaaagtcgccacatccacttgctgctgtgcatgttgcatatcactaaaaaataagtgtggtaaatgctaaaataaatctagaaagaaaaaagtagaaaaatacgagtacttattgatacaacttatgaatattcacatattcgatatcgtttctaccgcgatgtgtcgatcttctgtaactatggtaatatgagaagtttgtgaatttaaataaatgaaataaaatgatacttaacacatgtttttatctttctacaatcaaatcttggacttccacaatgctcgtgaagaaccctctatcccttggaattattcctcgtttgtgccggattggtgggtcggaacgattcctaaccggattgcttctctaatttatataaactttaattagctgaaacgattccggatgcaatccgatagaaacgaacaaggcctaaagtgattgtgatgccttgttgctagcctagcggtcaaccattattgtcgcattgtaattatcagatgacaatgggtatgaatccattttgtattgtccatctatacctacaattgatgggataaatgggtatgaatccattttgcattgtccatctatacctacaattgatgggataaatcgtacccatcaaactttacctgatctaggtacaaactcagatacatacccatgctctgatgctcataagaggttgaattgctacgacagcttgtccaaaggcagcaacaagtaccacaacctcatgatgtgtacaaccaccaccagcctctggttgtgagctaccaggatttcgatttcttgagtacacaactgttcaacaagactgaagaatccactctgatgcttggatatgcatggagatgctttcagtagtttgtttggatgaaagcaaggccagatttggtgctcaacaactgcgatgattggctcgtctatgtggaacaactatcacgtcatactctcagcagatcacattttctcataggaagaatttaagataactttctggaaggactaacggagagggtttctaggactgacccaagacaactgcaccatactctagtatggtcaagctttcgaaatctatgccagtatgtaggatatcatggagacacggatgccaaaaaagagatcgttttcgtcggcctcaataccatgctcaaacaacgcctaaacccggtgaaagtagacatgtacaataaaattatgaacttggctatcacgcaagaagactgcatcatgcctcggagaagtgaaaggccccaattgcaccatcaaatgcccagaatcagaaattcaagctcgtctccaatgcactggccagagtttctcaagcatcacaacccgaatgttaggtaatacaaccaccgcagcaacagggtaacacccgttttaccgttccaccacccaagacacaaggcccaattttcagcagcagaatcgtcctggccaacataggaataggtgctttacttgaagtaaaggacactttcacttcagaattttgtttctttctttggtccaagttcgtttcaaggaattactctaaaacgtcaagatctcatatctattaaacaccatgatctcacatcagacgtcatgactcatctgtttttccttactttataggtagtttgatgtgaagttcaaagcattgctctttaattgaatcaaagaatctcttgaaacaaagagtaaggaaatttcaaattttattctaaaaatttgaatttattgcactttgttttcatatgattttataacctagacacgaactcacttgtaaccttatctacatagaagtagacatttaaattgtgtccaatgaatcttctatcgtagaaactaaatccaaggtatgttgtgacaagctaaaccgaggtatattagcttaggatctaatcccacccattgttcccaaaaggtggaggcaaatagtgctgatgccctgctaccatgtttttccttttcagcatagaagatacatatgaccgctatcatcaatttgcgggagcaggaagaaaagtgaacggacataacaacgatgtaaagatctcaataagacttttagctgcatcacttacagtccagttttagattgggaaggaaacaattatcgattgtggaattcctcaatatatgtcgcttcacttgccattaatttgcccagtattttgttcgcttgcgttgtcctttgtagtataattacccaaacggagtggacacttcatctacacacaaaagagacatcctgttatttttctgttaattatagctgactaaagagacattctgttatttttctgataaatacagctgactaaagtattttgccccagaaccggg

SEQ ID NO: 299 - DNA, 8070 bp, Zea mays
  Intron number 3 from transcript GRMZM2G395749_T01 (locus G RMZM2G395749) derived from phytozome v7.0 (chr-ID 8; pos 2 0103103 to 20111172 reverse strand)
tgcgcttggctaagcgagtaagtcacagtatgttgtaactttgaattatatagaaatgtgtcattctaacttgtatgtacaggaagtcaaatccggccgtgttggggacttgttctcaagtgctatgagttaagaacaaggcaacatagaaaaatgttaatcgttaaggtccttcgtcctccgaagcattatttcccttaggatataatgggttacggacgaaggttatgaaggacgtaccttcataaatttattaaacaatgacgaaggatggaatataaaggatataaaagacaacattaacaattatatattattattaggtataaacagaaataccgctgaattacaagtgtaccttcaatcgaaatgagatgccaatacaagcgtgacacaaaaagcgaatgccaagtcagcgtgaacggtacgggagtactgttcacctatttataggcacgggacgcagcccgtacaaaattacattaatgccctttacatttgataataaacatatagtactctgtcgaggtcttaatagccttttcacccttaagtcggtttcaactgctgctgtctcgccgaagctttcctgcttgcaccttcggcgcttcaccaaccttcgtattattctggtctactgtgacgcctgacttgagtccgaagatacctgttcacacattatactccagaaacactattaaatcctgtttttgaggaccttcggatgccgaaggtccccaacagtagcccctcgcaatattaatttgttcaaaataataaatttagattgcgatctggacgaaggctttacgccgaaggtccgaaaaaacaccttccctttgctagaatagcaacattcactgacaagcggggtctttcaattttcaacgcacttggcgtataaatagggccataccgcaaacgcatttgacacgctctcaggccaactgcttccgcttactcaagttttagctcttgcgcactacgatttgcttaagcttttagttttgaagcttcgtctttgaaaatagtttttagtgtctccgaagatgtccgaagataagaagactgctgctgagacgaaactaagcctcgacgaagagaaaaatttggggtttcttatagcgatgtcaaagaccaacacagaaaaaatcaccaaggagattctggaaggtttgtctgaggatactggtgatagtgacagctatgatgtggacagtggtggggaagactccgaagatcgtccctggcgaccaagccattcagtttatggtaaatcaactatcaaagaaaatcatcttgctaatatgagaggaaggtatttccgggatttgtccattgtgagggcggacgaaggggaaaagacttgcccacatcctgaagagaatgaagttgtagtgtaccgaagctttttgaaggctggactgtgatttcccttgagcagcttcgttgtggaggtgctgaaaatattcgaaatctatctccatcaacttacccccgaggctattataaggctgaatatcttcgtgtggggccgtgaaaagccaaggtctgaagcctgacgcaaaaagcttctgcaatatacatgaattatcatatgaaacaaaaccttggggtaaggaacagtatcacaataattttggctgctatagtttcgtttcccggtccgggtcaagctgccccgtgccaacctttcggaagagatggcccggagattggatgacagagtggttttatgtgaagaatgatctgacagtacgagaagatatcaagggtataatcatgcgccctatttggcaaagcttcggccttcggaggccgaaggttgaaatgaatgaggctgccgaagaatgccagagggccttcggcgttatctgttcttttattggaacgagagacttagtacaagagcacattgccttcagggtatggccgctcgcagagaaatgggaaatgccacaagaaaccgtaaaagaggccgacgaaggtggacttatcaggttgaagtacacttttaaatttggggataagtttgttgagccagatgatgactggttaaaaagtattgaaaatttaagtgatgaactgcttggggcttattcgaaggccgaagacactgcgatgtcagcagccttcggaggccgaaaaaagaagaggctgaatcgagtatttgatgcaatcgggtttgtttaccctgactattgctatcccattcgaaggcagaagagaagaaacacaacctctgcaaaagaagaagctgcaactgctcctagcgagctagaaccgaaaagaaagaagttaaaggtccttacacatcggccgcgctatattgaaccagcttcggtgcctgagtttaccggagaaacttcttcggccaccgaagctaaaaaaccaatcgagccaaccttgctgccagaagtcgcagaaacggccgaagtgccaacaaagatagaattagagcaatcaaaaattttgttatcagaaacgaagcagaaggccgaagcgccgttctcagaaaaaatggaagaggtaaaattagcaactgagggatgcaaaacatcagaagttttgagtcctgcggcaaacattgagacagtaaaaaatccaaaagtgccagcagtgactccaaaaagaaagagaatggctaatgtgctagatgtactggaaacgatcaaatcttcaagcacacctccgcaaagggcagctgtcattcctgaaacaactgaaatttctagttctaaagctccagggcaagagactgaagccgaagctgggcccccagagcctgtaaagataaaatccttggaaagtgaggcagaaaaaataacaaagccaactttagttgaagaaaccagtgtcattgcccccgaagcatcccccaaagttcgtgattatattgttcgtcatgcttcggggaaaaaactatcagaaaaagaagagcaagaggcccagcagtacgcccaaaaactgaaatatccaaaaggggcgttaatattcaatggcagtggagaagaagacttcttgtattgtctccccgacagcaaggagattttctgtctgtcgggagatgagcaagagcttcggattcccaaccttagaagacgggctctcggtgctgtcgaagaacgatctggccgacagcctggcttacaatagcttaaaggtgcgacaaatgaaatccttgtatttttgttgagtccaaaatctttcgtttgtttaaacctattgacacacacatatttctctttgcagggcctgatacttagcaatgccctcagggcacagaaagatgctgaagacgaagggtgttctatagccctgagcaaccttcgttccgaagttattgaactgaggaacgaaggtctcgagaaagataaaatattacactcattgataaataaaataaaggcggacgaatctgcttttaaaggtcaagctgaagctcagaaacgcgaaattgaagatcttcggaaacaactggccagagccaaggaagaacgcatacttgaagagacaaagcgagaactcagcgatcaatgggcagaccacctagaaggaactgttgaagagcttcggtcgtccaaaaagagatgttataacaaatctatagaatgtgttaaaaagctgaaggctagcttcgccaaggtcggcgcatttttaagtgaggaaaattttacgaaaggcaatcccgaaggtcccatcgagtggatcgaccacgaagctgaagccttcgaagaaattttaaatagccgtggagatatatgcgccttctctggcgccagaggacttgccaccatcttagagaagaaaggctgtgaacatgtaaaatttttagcacaatccgaagctgctttgtcttttgaagatgcaagagatccttcggccgaagctagtataattggtggaaaattttttaccgatatttgggataatggtggccgagaaatggccggggaaattattagaagaagtgaaaagggaattcatgatgctagagaagtagctgaggctgctgaaaggagcgcagaggccgaaggtcaattaggtattaactgatagttttattgtgttgtaatcttaggctttaagatttgtgtgcaatttgtaatagcactgtatccgtatcctatcttacttcagatcctgctaaagcgtcttcgggccctcagccgaaaggagacgacgaaattaaaaagatggctgaagatattatggatgaagtcgtcaatcggctcctgaacgaggctgccgaagtcgttttgagagaagattaagtatttttgtaaaacaaaaacttcggaaatgtaatatactgtaacatttggtaaccacaaatgtaatatacctatttttgttagtcaattctttacgatgcatgaaactttacacgtaccgcttttgagtctttgacgaaaaaacaccttcccttcttttcatgcttcgtgaagaagaatttttcattgtcacaacaatatccaatgttctgatgaataatatccaggcttcgtaaaaatattttccgaagctacccttccgaagatcaataatgtatctttttgtgactgatttctttcttttttcaaaacgttcttccgtagattgataatgtgtccacctcttgcgccatgtgcaaatgatgtatgatgcttatgctatgcgaaatgatgcgatgatgttatgttatgtgagatgatgtttactccgaagatatatacgcatccctgaaataaaacacaatctttataagcctcccttaggagcttcttcgccttttacttcagcggaatcagcgtttatttttcgctgtaagcctcccttaggagcttcttcgccttttactttcagcggtattcgcgttgacttttcgcgcttcgccttttacttaggcggtatcagcgttgacttttcgctgtatgctctgcattccctttggaacgactttggagcagaaaacttacactgcgctccctttggaacgactttttgtgacttcagtaaacttactctgcgttccttagaacgactttttgttgcttcgaagaattttcgatagttcgaaggtcgtctttgtcatcacatctttgaattttaatcaatatatgcctgcgaagaaagtatattttccttgtaggaatcaacgaaactaattacatgaaacctaaacaatgtcctttattacagaaaataaaactgaatgaaaaagattgctattaaggtaggatattcgtcaatagatgtgctttgactctggcacagtgctattgactgtacgagcttcggactgctctctaaagtccctctggtgtggagcatactggctcccttctggctgctggccttgttgcaacggaggtggaggcggaggctgttgccaggaagcttgaggctgacttgccgaagcgacagaaactgcaggatgattgcccacatattctgggatgtagggcgaatgatacgaagctgtatgcatgacctgcttcggctgagcttgttgtgctgctgcttcagctatttccttttgcttctgaatagtaacatggcacatcctggtagtatggcctttgttctcaccgcagaataagcaaaagattcttcttggttgatcgccaaatcttcctccaaagcccctggcgcctctgcctcttggagctggtggtcggaaggagctttgctgttgccccgaagcctgtgaggaacattgtggcctttgctgttggcttcctctgtcatcattttgtgtagagttatgaattgacctgacatgtctcgggtagaacctccctccgaagcccctggtcatttcagaaaacctgaaagcctcctcccttctttggcgaaaatcgttatcggcccgaatgtactcatccatcttctggagcagcttctccaaagtttgaggaggcttccgagcgaagtactgagctgacggtcctggccgaagccccttgatcatggcctcaatgacaatttcattgggcaccattggtgcctgtgccctcaaacgcaagaaccttcggacatacgcctgaaggtattcttcgtgatcttgggtgcactggaacagagcctgagcagtgaccggcttcgtctgaaatccttggaagctagttaacaacaagtccttcagcttctgccacgaagtgatcgttcctggtcgaagggaggaataccaggtttgagccacactcctgacagccataacgaaagatttggccatgactgaagcattgccaccatacgaagatattgttgcttcgtaactcatcaaaaactgcttcgggtctgagtggccatcgaatacaggaagctggggcggcttgtaggacggaggccaaggtgtagcctgcagctcagcggacagaggagaagcatcatcaaaaacaaaattcccatgatggaaattgtcataccagtcatcttcgttgggaaaaccctcctgatgaagatcttggtgttgaggccttcggtgctgctcatcctgggtaagatgacgaacttcttcagaggcttcgtctatctgcctctgcagttcagccagcctggctatcttttctttcttcctctgtacttgttgatgaagcatctccatatctctgatttcttgatctatctcgtcctctggtggtgtcgggctgacagccttccttttctggcttcgggcctcccgcagggagactgtctcctgattgtggtccagtggttgcagagctgtagtcccagtcgctgaagccttcttcggcgccatgacgaaggtttatgatcgccgaagatgctcaaaaaactgagagtggaagtgagttcaccggaggtgggcgccaatgttggggacttgttctcaagtgctatgagttaagaacaaggcaacatagaaaaatgttaatcgttaaggtccttcgtcctccgaagcattatttcccttaggatataatgggttacggacgaaggttatgaaggacgtaccttcataaatttattaaacaatgacgaaggatggaatataaaggatataaaagacaacattaacaattatatattattattaggtataaacagaaataccgctgaattacaagtgtaccttcaatcgaaatgagatgccaatacaagcgtgacacaaaaagcgaatgccaagtcagcgtgaacggtacgggagtactgttcacctatttataggcacgggacgcagcccgtacaaaattacattaatgccctttacatttgataataaacatatagtactctgtcgaggtcttaatagccttttcacccttaagtcggtttcaactgctgctgtctcgccgaagctttcctgcttgcaccttcggcgcttcaccaaccttcgtattattctggtctactgtgacgcctgacttgagtccgaagatacctgttcacacattatactccagaaacattattaaatcctgtttttgaggaccttcggatgccgaaggtccccaacaggccgtacgcgcacagatgtggaagtgtatatgcaagggcataggggttctgatcctcagaatcctgatgttttatgcacttagacggccaccgaccgtctagtgtgtttttggtactctattatgtgtttgtccatcaatttggtgatgcacttatatttgatattgtttgcctccacgcttcgtatgggcagtagatggttcaacgccatggacaggagtacgattggaggagccagccaatcgaccctcaggcaacatatgctagcacaggaggacaagcccatggacggtgggattatttgatttggatttcaaaattatcctcatatgcttgcgattcaacttcgtccatgatttactatactaagtgcatggttcactcttgtaggttgggtatttttgattctacgattgattctagggagctgagacaccgtggacgacagtccacatcgtcgtcttcacagtcgtcccgttcacgatcatccgcccaagagatagagcttgcagtgttgcgtcaacaggcagagtatcatcaatcagttttgagggaacaattggagtactagaggcaaaaatctgagtaccagagacaagaagctga

SEQ ID NO: 300 - DNA, 19028 bp, Zea mays
  Intron number 1 from transcript GRMZM5G811118_T01 (locus G RMZM5G811118) derived from phytozome v7.0 (chr-ID 8; pos 9 4990412 to 95009439)
attctatctgatcaagaggtatcaagtcacaacctttaatcttcatacatacattttttgtcggtaacaacttatatatatatatactaggtgagtgcccgtgcgttgcaacgggaatatataatgacatgatgacttatgtacaaatgtgtgttatattattgtgagaaaatgtttcgtaatctatttatgatcctagccatacataaattttgttattttaatctagctatttcaccactacattgcaaccattagtatcacacggacttctatatatgtttttaataatgtcatgtcaattgcatcatttcaatgctaagactaccacaataaattacaaacttatacagatgtttagaaaatatcccaagatcttacaattcaaacgggaggcagaaccaggggaggaagcttgccccttagactgagcgcagcggttgcgctaccgcgccctctccccttgcgtagggggcctctacgcgcgcagcggttgacgctagagagccccctacgcgctgcagccgtaggggtgggagcgggagtcccccagatcaaagggtttactatttaccccctacaacattgtgttgtggggccacgagtaattgttagtagataaaaaattagtagtagatatagaaaatgatattttatagttgtagtggggtatagggggagtatttagggggaaccgctgcgggagatgaaaacatagggggtgaaatgttgatgatgtgactcaaaaaagtgatatagggggaaaaatttaggggtaacgcttgcggatagccttaggctatccgcaagcgttccccctaaatgttaccatgcagccacgtcagcaagattctcttccatatattcactcgtcccgcaaccgttccccctataaattcccctatatattcctctacacattaaatatacatttccacataactaacataactaacttcattttctatttttcttttcttttctttcaaacgcttggccggctacacattaagtttagaatttttcttcaagttgatctccactatttcgttataaaaaatatttaaaatcattttactttgttttgaactatgcacgcttgggaacattgactatgtccactcatccaaacatttgaacaaaatacatacatcgaagtgacaaattcgtgtatacatttgtatggacaaaaatggaagtgcttgatattttccatggcaaggtaaatctgcttagtgaacaggtaaatgccaaggacgaccacatgagggatagcctcagctcagtaccctccgcttcatattcgcttaccaatctcatgaatcattcaaggaacgaggaaggaacaaggattagtagaagaacatgtaccgaccaacagctattctggccgaggacagagtcgtctaccggcaaccgatgaaccaaacgaaggattcacatcccataaataaacaaggaaaaaagagagcaaaagacggactcaccatccagaggggcagcgccggcgcctgcctggtgacgatgagctagagccagctgtagccgaggaagttctgagcggagccgatgagcagcatcgcccatgacggcagcacggccgagagcgagccagcgaggaagccaacgcagtcaccgaggtccttggcgacgccgagcgcggccacctggcgttggttgtagcccagcgcggccttcatgaccggcgagatggcgccgaagaggtacccgatgccggccatggactgcagccacattgcggcgacgaacaccagccatcggttcgcttgcagttgaacgtcggcatcgcctcctctatggggcccgtcgtccttagcctcatggtcctcgacgaagtggaccgggtcggagtgaggcttcttgcatcgctgccgtgtcgtcgcccgaccaccgccagaatcgtcccgtggttgcaactgccgcgaagcggagtcggtgatttcttctggaccgcgcgaccggaggtgtctccgcgaagcagcgtcgggggagaacagtgctcctcctgatctggcgtgagagagagagaggagcgccacctagggggcaccgtagaggacatcgttgcgggttgaagagttgctctgtagcccctacacgagctacaggattaggggaggggaggccaagagtgaaccgttgcaaccagtcttagattcttcatagtagtagagatatatgcatgggcacgtatctatatccaaataatagatgaattggtaaaggactcaataacattgatgtggagatttcttatcctcttcttgtcaagcttgattgcgtaaggtggtggcctttgggctctaatacagaaatttgccaatctccccccacgatctgcccctaatgcatttaccaaatacattgcgacaagctttatttgatcagcccaaaataagtaaatcaaattctgtgttataagatctaccacacatattatgtcagtaatttttgaaaggctattccttgttttatgtgtcagttactaagtttataaactgtgacttttgcttgtagatttcacgtgaataattttttaaagcatgccatttgcatgagaaatcagaagtcaagaaacaaataacgaagtaaaatagtagtctacagcatgagtgtatttgagcctgatccaactggtcttctctgagcacttttcaaataacgagtcaagagtcccgtttcaggatcaaacctatggatggaagaacattttagaaacttcataataattgctttgcagcaaaaccaaatgataaagatgtttgtagtactaatttgttgttatttacaaagtggcgcaaggaaggtttaccggctaagtaacaacagatcattatcattctgaactattaaaacaaacaaaattttgctagtcctattagcatttctagcatattcatgcaacaccctttagcatcttctactcatctatcgttatagggtttcatttcctctaaagtacatcttcatcctcagctttacttccaagtaaaagcagctctctgtacacaatgattctgttaggatgttgaccatgtgtgattccactaacacactctaaacaaaaggaggtcacaattctggaaatttcctgacagattacatcctaattatctcagttccacgctgtattgtaggtagtccatcgcacggaaccagaacattcccgtggtgagaacgagtgcgtggtcggagggcgcacccttgtgcttattcttggagctatggtcatggcaccatctatagggcagattggaacagaatctccgccatttcctgcacatcatgacatacctaatcagcaaccatcagcgcacaggtggagaggacgcctagactgtcaatacatttacctgcttgccggatgcaacagcgggctcaccccactctagaaccttcttttctagcgtctcaaagtctcctttcctagcctgattgaagccatagagcaatgttacaacctacacaaaaggtactgacaatttggcatcaaagttgaaaccaccaggtgcaagtccaccctgttaaacaaaaacgcagcagctcatatgagtgcaactgggaagtacataggcaatgtggatttgagtaaaaagggtgagagctggttcatgccaatcacattcttaactacacttgacataaccaaagtagcctctgcaatgtctgtcatgaactgatctgtgtcccaacctgtccataacggtaaggtaagttattatgcatgcctcattttttaattttctctctctagaaaagaataaagaaatgcatgtatgtttctagtgtaacacaaataatatcgggtcatacgcttattaaaaaacaaaggagttatatacaacagtgacacataccaacttgaggatcaccagtgtttgcatcgatatttccaagcagcccattaatccgtgcagtctccaattcatgatggcagctgcaagtttaacatgcaaatctttaagctattattcaactcaatttagccaagcaaaaaaacctttcatgtgtccagatagagtagcatggttgcactcaacattaatcttgaactctcctatgtcatgtgaaaccgtaaaaaggtgtacttttagaacaaacagttaatctcacacaagcttcactcacagaaacttgttgacaatgtattcacattccaaaaatatgaaaacttatattacctgtaagaccgtacttctgtagaaaagcaaacgtagtcgcaacatcccagtcatacctgccagagaaacaaggataaatgtttctgaatcctgtaggatactttgctaatccattactgagtaagtagcatactggtgttttgttggttcctgtggtttaggctctatcaatagtgttcctgaaatacataataaaattttagttctgtcaccaaattggcatagtaaagacaatgcactatgtcaaagttatggacattggaacgggtaatcataaagaaacgggactgaattaccgttgaatccaatcttcttcttgtagtcaacaacagcttgaagaaaattagcctggacaaatccagcaaacaatcagataatttggccacaaagtaaagatgagacagaatcggcaaataaaccccattcataccagatggtcaagttctctcttcatatcagtattcagaagagtttggtaaccctctcttccaccccagaacacatagttttcaccacctaggtagtgagtgacctgcaaggagataaggtcaaataaaaaattgggcgaaatgaaggaagattgatcatggtgatcacagataacccacctccaaagctttcttaacttgtgctgccgcataagcatatactttaacctctgggctgcaacattaatgaagagtgattaatattaatctctagtcatactccgagttcataactttgtttagaacacacaaaaccaacaatccaacaagataccaacctcgtagcagcgccatgcacgtaacgtggatgcataaagagctgtgcggtaccccacaatggctttatattggtctcaccctaaatggaattaaaaaaaaagcaaacagggtaatgcaaaatggtggggtacagctaagtgccagcaatttaaaggttaaactaacctgcagctgctttgccagctggactatctcatccaagttagaatttgtttcctgcagtgtgagaataagtcttaggaaacttctaagagtaatgttactgaactaaagtcgtcagttgttgcaacacttcatcttaaaaagtatataacaggagatgaaatgtttgctgcttcatttacagatgagtttttcctatagtcagatgggtgtgaatgaaataaaatcaaaatgaatccttttatgtgagcataagatagctggaacacatcaggaatcataattgtatgctcaatacatagtccaatagataattaatagcatccaataacaaatcgacccataacaaccagaaccatatgtaatttctaaggttgctcttaaaacagtatcgtagataactccaccaagccactttactggcttcatttattaactgttagcacacatgaaacataactgaaggacacagctatcgaaccaattgtaaggttgcatactgaaaattgcttctgcgatagcaataacagaccaagccaattatacttatgagttcatgcattaacagaagtatacaacacaactgatggacatacttcaagtgtcttcccatccggggcaatatccctatcatggaagcaccatttgttgactcccaacttctccatgaactcaaagtgagctctcactgcaatgtcagttgaaacagaagttagttcttccaacaaacagaccaaaacataacccagaaggctgggactaaagcacaaaggtaggttaggcgatcatcatacttcttctcttagccacggccaacgaatttgtgccatcctcccaaggccaagtcattgtaggagcaccgaaaggatcggcgctagtaccacagaacgtgtgccagaaggcaacactgaagcgcatccaatcctaatagcaaagcaaataagcatagatgcaaagggttgatgtacttcacagtgagtgtaaagagggggtatagtgaagcggcagatgggggttcaccagagggagaactctcagctacgcataatagtgaagcaggaccctctcatgctccaaattcacctcaaagtcaggggtcaagtacagctacaggttgggtatctcctcctgagcagagtcctcagttttcagcaggggtaccaaagagatacaaaacaattgcagatttgtatgactcagcaaatgaagtacttgattttgaatatagtggggtgtgcatgttagcagctgatgagccaatgaacatagaacaagctctagaagaggcatgctggagaaaggccatggaggaataaatggagtccattcatcaaaatggaacctgggtggctgctgatctgccaaagggtcaaaaggcaataggactgaagtgggtattcaaggtaaagaaagatccatcagggagaattgtgaaacataaggctaggctggttgcaaaggggtatgctcaagtccaagggatagactatgatgaagtttttcctcctgtggcaaggttggagacagtaagaattttaatggctctagctgcacaaagggagtgggaggtgcatcacatggatgtgaaatctgcaatcttaaatggagaactttgtgaagaagtctatgttaaacaaccacctggtttcattgatccaacctgtgcagaaagggtcttgattcttgaagctgaacaaggcattatatggactcaaacaggctcccagagcctggaatgccagacttgacaaggagctagtaagtttgggttttaaaagaagcccaaaagaacatgctgtctataaaaaaggaaagaatgcgtctcggttactcataggtgtatatgtggacgatctcattatttgtgggccagataacaagtagatagaggtgttcaaacagcaaatgaaaggaaggttcagtatgagtgaccttggactgctgatttattaccttggtatagaagttacacaaaagcctggtgaaatcactatttgtcaaagcgcgtatgctgataaaatcattgaagtctgtgggatgaaagggtgtaatccagttgacattccaatggagcaacaatgcaagttaatacctggaaaacctgacaaggtgttagctgctaccaagtacaaaagtatagttgggagtctgagatatcttgtaaacaccagacctaacctagcatattttgtgggaatggtgagcaggtttatggagacaccaaattctgaacactggactgccattaaaagaattgtaagatatgtggctggtacaacacaatatggctgtaggtatgtaaaaggggatagctccgaattgttgggatattcagacagcgaccatgcaggtgatcttgagaaaaggaaaagcactactggtgtcgtgtttttttctgggaggaaatataattcagacagcgaccatccagactttcatcactaaatcaattatctgattaatcagtaaaaagattttctgttacatttagtcagaatcatgtatagactaaaccattcctgaacacaaacagcatgaaataatacatgaccgcatttgacataatggataaaaaattgaaatggaaaacaacgatctacaatttttcaataaaaaatgattcactaaaaaattagcttatccttttaccttggagggctcggttgcaagttgaggataaagtctggatgcattttgtacgcaaagaagggctgaagcaacaggctgctgcagaagctaaacgaaaaagagttttcgagagagaagcatctcgcaaagctttgcaagagtttattacatctattgtacgctccccacattctacattatctacagatggtgaaaaactaagctgttaccgcacttgaagggagccactcttgcaaatggtgaaaaactaaagccagatccagatcagcagagcgcgattaaagccagatcagaggcgacaattcagatctagcgcactaaccttgtctccagtgaggtacagagcgagcagcttaacgacctgcagcgaggtagcggctgacgagtcgatctcgctgattaccagctgcacaaacacagaaaggcatgcgcgcgtgcccacctatcatagccggaaccaactgcggcgagctagcggtgaggcgcctgacgcccaatgtgttcgcacctggtaggagccgagggcgatgtaggagcagaagacgatggcatcgcgctcagcggcggcgccgacgtcgaggcccgggatgtcgatgttgttaatggctgcctggtaggcgcccaggtagaagaggttccacagattgaagagcaggtcgggggaggccatcgctgcagtgcagcagaagacggcggcgacgaggcttgggtgggagagagatccgggaggtcgtggttgctcttgagtctagactccgctcggttgtcccttcggttcgagttgatgcgggggacgcacgggccagttcgcttccgcttgggctcccacgccgagtcccgggacgggtcagcggacgccgccgccaccggcgaggggatcggcttcagagcgtaggtactgctggacgagtcgacgacgggcgggagatcgaagtagccggtgaaagggaattaggcttacacctagttcctatataattttggtggttgaattgcccaacacaaatctttggacaaactagtttgttctagtgtataagttttacaggtgccaaggttcacacatagccaataaaaagaccaagtgttgggttcaacaaaagggcaaagaggcaactgaaggcccctctggtctggcgcaccggactgtccggtgcaccaccggacagtgtccggtgcaccaggggactcagactccaactcgtcaccttcgggaaaatccagagccggcgcgctataattcaccggactgtccggtgtacaccggacagtgtccggtgctccaaggatgcgcgggccccggaactcgccagcctcgggtgcgcacagccactgctccgctataattcaccggacatgtccggtgtgcaccggactgtccggtgaaccagcagagcaacggctagtcagcgccaacggctacctgcggcgcatttaatgcgcgctctgcgcgcggtgaagtcaggcgcgcccatactagcgcaccggacagtgaacagtgcatgtccggtgcgccaccggacatcgaggcaggcccacaagtcagaactccaacggtcagattccaacggcactggtgacgtggcaggggcaccggacatgtccggtgtgcaccggactgtccggtgcgccatcgaacagacagcctcccaacggccacttttgttggttggggctataaataccccaaccaccccaccattcattgcatccatgttttccacttccaaactacttacaagagctctagcattcaattctagacacaccaaagagatcaaatcctctccagattccacacaacgccctagtgactagagagagagatttgcttgtgttctttcgagctcttgcgcttggattgctttcttccttcttgattcttccattgtgatcaagcacacttgtaattgaggcaagagacaccaaacttgtggtggtccttgtgggaactttgtgttccaagtgattgagaagagaaagctcactcgatccgagggatcgtttgagagaggaaagggttgaaagagacccggcctttgtggcctcctcaacggggagtaggtttgcgagaaccgaacctcggtaaaacaaatccgcgtgtctcacttgattattcgcttgcgatttgtttttcgccctctctctcggactcgtttatatttctaacgctaacccggcttgtagttgtgtttatatttataaatttcagtttcgccctattcacccccctctaggcgactatcaattggtatcaaagcccggtgcttcattagagcctaaccgctcgaagtgatgtcgggagatcacgccaagaaggagatggagaccggcgaaaagcctactacaagccacgggagcacttcatcggaagagtcccgcaccaagaggaaggagaagaagaagatctcctccaacaaagggaaggagaagaaatcttcttctcaccacaaagagaagaaggaaaaatcttcttcccacaagccgcatcggagtggggacaagaagaaaaggatgaggaaggtggtctactacgagaccgattcttcatcggcatctacctccggctccgacgcggcatccgtcacttctaagcgccaagagcgcaagaagtatagtaagatccccctacgctaccctcgcatttccaaacatacacctttactttccgtcccattaggcaaaccaccaacttttgatggtgaagattatgctaggtggagcgatttaatgcgatttcatctaacctcgctccacaaaagtatatgggatgttgttgagtttggtgcacaggtaccgtccgtaggggatgaagactacgatgaggatgaggtggcccaaatcgagcacttcaactctcaagctacaacgatactccttgcctcactaagtagagaggagtataacaaagtacaagggttgaagagcgccaaggaggtttgggatgtgctcaaaaccgcacacgagggagatgagctcaccaagatcaccaagcgggaaacgatcgagggggagctcggtcggttccggcttcgcaaaggggaggagccacaacacatgtacaaccggctcaagaccttggtgaaccaagtgcgcagcctcgggagcgtaaaatgggatgaccacgaggtggttaaggttattctaagatctcttattttccttaaccctactcaagttcaattaattcgtggtaatcctagatatactaaaatgacccccgaggaagttatcgggcattttgtaagttttgagtgcatgatcgaaggctcgaggaagatcaacgagcttgatgatcccaccacatccgaagctcaacccgtcgcattcaaggcgacggaggaaaataaggaggagtctacaccaagtagacaaccaatcgacgcctccaagcttgacaatgaggagatggcgctcgtcatcaagagcttccgccaaatcctcaaacaaaggagggggaaagactacaagtcccgctccaagaaggtttgctacaagtgtggtaagcccggtcattttattgctaaatgtcctatatctagtgacagtgaccgaggtgacgacaagaaggggagaagaaaggagaaaaagtggtactacaagaagaagggcggcgatgcccatgtttgtcgggagtgggactccgacgaaagctcaagcgactcctccgacgacgaggacgccgccaacatcgccgtcaccaagggactccttttccccaacatcggccacaagtgtctcatggccaaggacggcaaaaagaaggtaaaatccaaatcatccactaaatatgagtcttctagtgatgataatgctagtgatgaggaggataacttgcgctccctttttgccaacctcaacatgcaacaaaaagagaaacttaatgaattgattagtgccatttatgaaaaggatgatctcttggacacccaagaggacttccttattaaagaaaataagaagcatgttaaggttaaaaatgcttatgctctagaagtagaaaaatgtcaaaaactatctaatgagctaagcacttgccgtgagatgattgacaaccttaggaatgaaaatgctagtttaaatgctaaggttgactcacatgtttgcaatgtttcaattcccaatcctagagataatgatgatgatttgcttgctaggattgaagaattaaacatttctcttgctagccttagattagaaaatgaaaacttgattgctaaggctaaagattttgatgtttgcaaaattacaatttccgatcttagagataagaatgatatactacgtgctaagattgttgaacttaattcttgcaaaccctctacatctaccattgagcatgtcactatttgtactagatgtagagatattgatgttgatgctattcatgatcacatgattttaattaaacaacaaaatgatcatatagcaaaactagatgctaaaattgccgagcacaacttagaaaatgagaaatttaaatttgctcgtagcatgctttataatgggagacgccctggcattaaggatggcattggcttccaaaggggggacaatgtcaaaattaatgcccctcctaaaagactgtccaactttgttaagggcaaggctcccatgcctcaggataacgagggttacattttataccctgccggttatcccgaggacaaaattaggaggattcattctaggaagtctcactttggccctaatcatgcttttatgtataagggtgagacatctagctctaggcaaccaacccgtgccaagttgcctaagaagaaaactcctagtgcatcaaatgaacataacatttcatttaagacttttgatgcatcttatgtgttgactaacaaatccggcaaagtagttgccaaatatgttgggggcaagcacaaggggtcaaagacttgtgtttgggtacccaaagttcttgtgtctaatgccaaaggacccaaaaccatttgggtacctaaagtcaagaactaaacttgttttgtaggtttatgcatccgggggctcaagttggatactcgacagcgggtgcacaaaccacatgacaggggagaagaagatgttctccttctacgagaaaaaccaagatccccaacgagctatcacattcggggatggaaatcaaggtttggtcaaaggtcttggtaaaattgctatttcccctgaccactcaatttccaatgtttttcttgttgactcattagattacaacttgctttctgtttctcaattatgtcaaatgggctacaactgtctattcaccgatgtaggtgtcactgtctttagaagaagtgatgattcaatagcatttaagggagtgttagagggtcagctatacttggtagattttgatagagctgaactcgacacttgcttaattgctaagactaacatgggttggctctggcaccgccgactagcccatgttgggatgaagaatcttcataagcttctaaagggagaacacattttaggattaacaaatgttcattttgagaaagacaggatttgtagcgcatgccaggcagggaagcaagttggagcccatcatccacacaagaacatcatgacgaccgacaggccactggagctcctacacatggatctattcggcccgattgcttacataagcatcggcgggagtaagtactgtctagttattgtggatgattattctcgcttcacttgggtattctttttacaggaaaaatctcaaacccaagagaccttaaagggattcttgagacgggctcaaaatgagttcgacttaaggatcaagaaaataagaagcgacaacgggacggagttcaagaactctcaaattgaaggctttcttgaggaggagggcatcaagcatgagttctcttctccctacaccccacagcaaaatggtgtagtggagaggaagaatcgaactctattggatatggcaagaaccatgcttgatgagtacaagacatcggatcggttttgggcagaggcggtcaacaccgcttgctacgccatcaatcggttgtatctacaccaaatcctcaagaagacatcatatgaactcctaaccggtaaaaagcccaacatttcatattttagagtttttggtagcaaatgctttattcttgttaaaagaggtagaaaatcaaaatttgctcctaaaactgtagaaggctttttatttggttatgactcaaacacaagggcatatagggtctttaacaagtccactggactagttgaagtctcatgtgacgttgtgtttgatgaaactaacggctctcaagtagagcaagttgatcttgatgagataggtgaagaggctccatgcatcgcgctaaggaacatgtccattggggatgtgtgtcctaaagaatccaaagagcctccaaaagcacaagatcaaccatcctcctctacgcaagcatctccaccaacccaaaatgaggatgaagctcaagttgatgaagtagaagatcaagcaattgagccacctcaagatgatggcaatgatcaagggggagatgcaaatgaggaaaacaaggaggaagaggaacaaagaccgcaacacccaagagtccaccaagcaatccaacgagatcaccccatcgacaccatcctcggcgatattcataagggggtaaccactagatctcgtgttgcacatttttgtgaacattactcgtttgtttcctctattgagccacacagggtagaggaagcacttcaagattcggattgggtggtggcgatgcaagaggagctcaacaacttcactagaaatgaggtatggcatttagttccacgtcctaaccaaaatgttgtaggaaccaaatgggtcttccacaacaagcaagatgagcatggtgtggtgacaaggaacaaagctcgacttgtggccaagggatactcccaagtcgaaggtttggatttcggtgaaacctatgcacccgtagctaggcttgagtcaattcgtatattattggcctatgctacttaccatggctttaagctctatcaaatggacgtgaaaagtgccttccttaatggaccaatcaaggaagaggtctatgttgagcaacctcctggctttgaagacagtgagtatcctaaccatgtctataagctctctaaggcgctttacgggctcaagcaagccccaagagcatggtatgaatgccttagagatttccttatttcaaatggcttcaaagtcggcaaagtcgatcctactctattcactaaaactcttgacaatgatttgtttgtatgccaaatctatgttgatgatatcatatttgggtctactaacgaatctacttgtgaggaatttagtaggatcatgacacagaaattcgagatgtcgatgatgggggagttgaagtatttcctaggattccaagtcaaacaactccaagagggcaccttcatcagccaaacgaagtacactcaagacattctaaccaagtttgggatgaaggatgccaagcccatcaagacacccatgggaaccaatgggcatcttgacctcgacacgggaggtaagtccgtggatcaaaaggtataccggtcgatgataggttcattactttatctttgtgcatctcgaccggacattatgctttccgtttgcatgtgtgcaagatttcaatccgaccctaaggaatcccaccttacggccgtaaaacgaatcttgagatatttggcttatactcctaagtttgggctttggtaccctcggggatccacatttgatttgattggttattcggatgccgattgggcggggtgcaagattaatagaaagagcacatcggggacttgccagttcttgggaagatccttggtgtcttgggcttcaaagaagcaaaattcagtcgctctttcaaccgccgaagccgagtacattgccgcaggacattgttgcgcgcaattgctttggatgaggcaaaccctgcgggactacggttacaaattaaccaaagtccctttgctatgtgataatgagagtgcaatcaaaatggccgacaatcccgtcgagcatagccgcactaagcacatagccattcggtatcattttcttagggatcaccaacaaaagggagatatcgagattgcttacattaatactaaagatcaattagccgatatctttaccaagcctcttgatgaacaaacttttaccaaacttaggcatgagctcatattcttgattctagaaatttcttttgctaacttgcacacatagctcatgaatatacctttgatcatgtctctttaatatgctatgactaatgtgttttcaagtctatttcaaaccaagtcataggtgtattgaaagggaattggagtcttcggcgaagacaaaggctttcactccataactcatccttcgccgtcactccgagccgctctctatccttgagggagagagcaaagcaaaaggactcctaccttggtataatcttctctcttttatttatgaccaaaggaggagatatgaattaaaagggctctaatgattccgtttttggcgattcatgccaaagggggagaaagattgagcccaaagcaaaaggaccgcaccaccacctaattttataatataattttcaattgtcaatttgatatcttattgtgttcaaaagggggagaaagtagtatttcaaaatcatatctcaaaaccctcttgaacactaagaggaggatttcatttagggggagtttcgtttagtcaaaggaaaagcatttgaaacagggggagaaaatttcaaatcttgaaaatgctttgcaaactcttattcatttacctttgactatttgcaaaagaacttagaaaagatttacaaaagattttgcaaaaacaaaacatgtggtgcaagcgtggtccaaaatgttaaaattgaagaaacaatccatgcatatcttgtaagtgtttatattggctcaagcaacctttgcacttatattatgcaaactagttcaattatgcacttctatattttcttgggtttgtgttggcatcaatcaccaaaaagggggagattgaaagggaattaggcttacacctagttcctatataattttggtggttgaattgcccaacacaaatctttggactaactagtttgttctagtgtataagttttacaggtgccaaggttcacacatagccaataaaaagaccaagtgttgggttcaacaaaagggcaaagaggcaaccgaaggcccctctggtctggcgcaccggactgtccggtgcaccaccggacagtgtccggtgcaccaggggactcagactccaactcgtcaccttcgggaaaatccagagccggcgcgctataattcaccggactgtccggtgtacaccggacagtgtccggtgctccaaggatgcgcggcccctggaactcgccagcctcgggtgcgcacagccactgctccgctataattcaccggacatgtccggtgtgcaccggactgtccggtgaaccagcagagcaacggctagtcagcgccaacggctacctgcggcgcatttaatgcgcgctctgcgcgcggtgaagtcaggcgcgcccatactagcgcaccggacagtgaacagtgcatgtccggtgcgccaccggacatcgaggcgggcccacaagtcagaactccaacggtcagattccaatggcactggtgacgtggcaggggcaccgaacatgtccggtgtgcaccggactgtccggtgcgccatcgaacagacagcctcccaacggccacttttggtggttggggctataaataccccaaccaccccaccattcattgcatccaagttttccacttccaaactacttacaagagctctagcattcaattctagacacaccaaagagatcaaatcctctccagattccacacaacgccctagtgactagagagagagatttgcttgtgttctttcgagctcttgcgcttggattgctttcttccttcttgattcttccattgtgatcaagcacacttgtaattgaggcaagagacaccaaacttgtggtggtccttgtgggaactttgtgttccaagtgattgagaagagaaagctcactcgatccgagggatcgtttgagagaggaaagggttgaaagagacccggcctttgtggcctcctcaacggggagtaggtttgcgagaaccgaacctcggtaaaacaaatccgcgtgtctcacttgattattcgcttgcgatttgtttttcgccctctctctcggactcgtttatatttctaacgctaacccggcttgtagttgtgtttatatttataaatttcagtttcgccctattcaccccccctctaggcgactatcagccggcaccggcggcggcgccacttgtgacgctggacgaggtgaacgcgagccgagacggtggcccagggcctgtccccaagggcgaggccgcgtgcccgcgagcaggagggagctttggagctgggcgaggccagaggggcggaccatggacggatctgggcgaggaggcggcgtgccaaaccaccagaggcggagggagctgcagctgctgagcaggagccatggcgtgcggcgtcgtggcggccgatttcgggagcgagtgcggtaggattgcgcgagggggagcacggacgcgatggatgattcctatggaaggttgtcgaaggaaggtgcgctagggccgatgatggcggggattcctgagattgcgcgtggggaggacgatgatggcggggattcctgagattgcgcgtgaggaggacgggcagaacacgatgcacttgtggacgcctacaataaggtcttatagagtagtaatagatacacacacacacacattcttaaagtaggaacgtcaatttctctgtagcaaactgtcttgataccattatcaaaatagcattattttctatacaaaatcaggtttattttctctacagaataaccctaaatcataaacttttgaaaagaagacaatgtctgagcaatttggagcattttgctccaattatttctactgatttcagcgacccctatgctatcaaagaaaaaatgcacaagaaagcttacaagaactaaacactgatttatatcatcggtggtcttttgagttttgggatgattattttgtatgctatgtaaaattatgtatgtatgtctgtccagacctctacagacaatttgtgttaatacaacaacttaacggaattttatgctgtgacagggca

SEQ ID NO: 301 - DNA, 6688 bp, Zea mays
  Intron number 2 from transcript GRMZM2G155962_T03 (locus G RMZM2G155962) derived from phytozome v7.0 (chr-ID 10; pos 110199570 to 110206257)
ccacgctgcgtggcgacgccgacttcttactcgaggtcagtcagagaacttcagaaatgccgcattcatgtgcacttgaggttgccctggagcccattcgtttcagagtttctgaccatcggcggccgaatgagttgtgcccgtgctcttgatagatggattggtgggcgcatttttcgtacgtctgatgtgaaatcgcacacactgcagcggtcaacctactctaccccaaacctgaaatccttccactaactacatgttacgattcaaccaggtagtagtagcagagttcgtagtagcggagtacagcagggagggaattgggaagaacggagtaggagacgtgaggaacaagaagaagaggaatattctgcttactacatctcatgccatctctcctccccccatttctagcttatatactccaggtcttcacgcccgccaatccgacccgtggaagcggggatggattttcctctggcgacggcgagttcaggataagtgttacgcttatataagccgaaatagcttatatactccttgcataagtgttttccgttaactaaacccttgagcattaagctgcacagacacagttcaggacagaccttcttagcctcagtgtcccacctaaattgtttacaaacataggcaccgacttaaacaactctaccccagcaccagagtaattaaaatccgaaaatgctctgaattacaccaggtctcttatctccacggcaagaatggccgacagagtcatggcacgttctccgtgaggctggtcccttttcacatctaacctactcctgtttcaagtcaaacgatagggaaatcagagggtcggagaccaagaagagaccaatctatactcctggacttctcttgttgctaaatccattctcctggacgttgcaaaaagagaaaaaaagaaagaatatcacgttcctcctttcacgagggaagggagtattagcgaggtccgtccatgtcagcggcatactgggccagaatacatgcagcaaccacgacccccttcgtgggctttcttcccccgcagaaaaggcccaacccagactgacgagcagtttcgcagcgatcagttggccaaaagtatatacgaaacaaacgaagagacgcctgtccaacccgccgactccgatgcaacgcgaacctgtccaacccgccgaccctcggacgcctcacgcacaagcccacacccaccaccggcaaacggcaaaacgcgcgcgcgcggcacatcacatatgcagagcagaatgcagatgcaccacgttgtagcagaccgccggcggcattacgtggaagcggtcccacgaggccttctcgtggtgctgcccgcgacagcgacagcggcagcagcgaccatggcgaatggccacggccacggccggcgcagggcgctcgtggccacccttggcggcccccggaggcgtggcagcgcatgcggttgcgagactcgcttctgcgttcctctgctactggctttgcgccattgtgggcgtgtttgtatcacatgccaatactgctctgtgaggccagaacagagcgaacggtgtaagacgacctcatcatgtgaatagtggatccgacatgtgtggtgtactgtggcattctgcaatgtatgagactcgacttgattcacgaaaaagtaatgtcatacggctgtgttgattcctcaccgccccacccccaccataaaacggtcataagtccaaatatcatctcggctcagcgctcagctccgcagtcatcggctcctgaactgatctgaagaagacatgttcacttcatgttctgacgacgcattgatgctgacattcccccatgacaagaagctgcttgtcccaagcaggagcctgcggaaacgactgtcaaagggcaatgagatcttcccaagtggctaaggacggaggcgggaggcatacctgaccactgcacgaggacctgagatacaccctctggacccccacggcactgcaagatgcgttcaggaatttgcagtccatccatatgattaggtagctgagcaacagaaactaacggcggcacaaccttcttcagctgcgaaacatggaaaactggatgtaggcagctctaatttataagccatgcatattccgcttcatggtcggaatggagtgggcgtgcaactgcttccagggcgcaggctcataccgccgctgctgctattttgttggattctggtcaattcaacaacccaaggactttgtaacacctacagtaacccaataacatatgcagcttgtattggtctatagagtagggggactaatatgtgattttgggagagaaggcataaaagaagccctacgcagaagaggcatcggggagaaatcagaaaacagactcgttcacgttgtcttcatcaccaaggcacgttccaggtgagtttctccatttcctcacgtctcggtcatcaccaccggggtgtgacagatggtatcgcagccgattacattgtgcagctcaatctgcgaggcagggccgtatctgaggggtcccaaaaacagaggcccccctagccattggacgctagcactttttcctgttaaatctatctatcctatacacaaatatgtaaaaagcgatatgctatcgactagtctcgtttagattgttaaattaatgtctcaattatttatcgaatacttcatctgttctaaaatagtatttgttttatctcttaatttttatgtttatattcaactaaataataatgaatccaataaagaagcaaaacgaattctattttgatataaagagagtaacatggtggttgcatcggtggagaaaggtttttaaaattgaaatatttttgtgaactatttaaggtcaacaataactcaagagaagttaaatgtcttggcgattctatgtgacgaaaagaaattgttggataagattgatctcaataatataatcgatgactttgtatcacaaaatgttagaagatatttttaataatatcagataacaactaagtacttttggctatattttacatttgtcatcttataaactttaaaacaacataataattttatacgtcaattattcaattatatatatatatacaaatatatatatagggacgaggtaatggaagccctgggcttccattagtaccaggaagccccagccaggtatagccacgtctcgtaccagcatgcgtcccaccggggcatgagttcttacttggacatattttagcgtaaaacgtgaacaaaaacagcgtaaatgattacgaattttagcgtaaatcgtagatctgttttgaaacggcgaatgcggcccgaaaattacggcgtaaaaatctcgcacgtcccatcgtgatcgggttctgactcggacagattttagcgtaaaacatgaaccaaaacagcgtaaatgagtacgaaatttagcgtaaatcttatatctgtttcgtaaccgtaaatgggtcccgaaattacggtgtaataatcgtgtgcgtccgttcgtgcgcgggttttgctcaaatagattttagcgtaaaacgtgagctaaaacagcgtaaatgagtacacaatttagcgtaaatcgtatacctgtttcgtataccaaatttacggcgtgaaaatcgcgcgccatcggtcgtgcgcgggttctggctcggacggatttaagtgtaaatcgtgaaccaaaacaacgtaaatgagtatgaattttagcgtaaatcattcatctatttcataataacgaatgtagaccgaatgtatctctcagcgcatgaggttgtcataaaacacatcaagaaatgtcgtaaattggtgtaagatacaacaagaagtgatctgagctaattgtagtgtaaaatgcaagctaaccatctacaggagaactgtttcagattttacaatatgatataagagataattattcctattcatgttgcccttatattttgtgtagaggtccttcaagtctgttttctcataatctgaccctctatatttagcttcaaattcttcattgtcagcctcggtgacctgggaataaagattaaattaagtaccattatatataaaaatatacaacctgtccccaaaatactgtcactctggctatacatctgaacaagccaaaagggtattcttttagagacagagcaacagagctagttttatgccacaacagagttctcgctactgtatttccctaaaaaatatcattgtaaattaatagacaacatcagcctacaattaatatagaagcaaccatattttcttgtacattgttctgaagtactcctgaagatcgtttgctgcttctcccaccaatgcctagatgaaaaaggaagatccataaaaatattgcttgagtctgaaaggtaaaaaaacattcatgtttatggttgagatactacctcatccccaagattcttatctgggtggaggcgcagagccaatttgtgatacgccttctttatttcttgttgagaagtggtcttcccaactcctagaatctttaaatgataaaaaaaataaacaaaaaattaaataattaaattgtgatctggaaagagaacctgaaagcagtaagcactggttaattacagttctaaagtgatagcatatgccaaagaaaaactcaaagatgttttggtttttaatgttatgtacttaaataatatatatacactaaaaaccaatatatatgcataaccaaaatatatatatatatataaatataaaatgtctcataattgtaaagaatgaagcaacaaatatcattagcacgagtatatatgaaaaattgacaaacaacactagctaattatgataagattattacttgtcattaaccaaaagtggataacacaaccccaggctcatgactattgatttatagagaacccagttgatttatttgtactatgtagctagcaacgaaccatatagcctaattacgtaatgggaatcacctatatacaatgttttatgcatgtttgcatagcatacaagaaatcaccttgggcattttgccgtttgcatctcatcaactcctcgagctgcaagcaatactggaagtagcactccagctctgcgcgaagaactctcacgcaagtgcttgatccatcccagctcgccgcagctgtgttcttcaataagaggcggtggccaatcaaaaccgttgtcactgcctctgcttcttccctttccgtggctagctcctacctcgagtctgtcaaacaacaagtgcttgagttgctcccctgctctctccccttcatcagcgtcggtcgtcctccagtgactacagccacctggtcggcggcgtcgacgaggcagtcgatgggcggcttggactgggcgaggagccagttcagggtcttgctggccttgtcgaacccgaggcggtcctgcagcgccaagaactctcgcgcgaccccgaccgagagccgcatccggcagtcgcggaggccctgcgcgtgcggatcttgctgtgctgaatcgtccggaacgacccttctgtagtacggccgcaacctggacgccggcatcatccaccaccggcggcgacccgttgctcggcagctccctctccccgccggcgcctgcataaaagaaaggagaagcggaggccgtgagatctggtagccacggccgtgctgcgctaggtggatccggatctgtgtggggtggttgtctggatcggggagtggggctcggaggcgatggcagcgtgagtggaggtaaaactgccgccactaaaaccctatttttcttgcaaacagccgccgtcgggaaggttggatagtgtgatccgttttatacgatggtgttatagcaaaataagcgtaaacttatgtacaacaaagcgtaaagatgatgttaggtcgaccgattgagtgggggtcagggctttctctaattagagagagcccagggctcctaatactatatatatatatatatagtctctatatcggatttcacactggcctatatagagatagggcctctatatcggatttcgcactgaccaacctctaaagtagaaacgggccctgctgtgagggtgcgcgggtgcagctgacccgtcactcatcgaggtgtcgcgcagcttcgagcaggttatgggccttgccaaggcggagctgcgtgagcccagcacgctacaggtggaggcatcggctgcgggcaggataggcccccttgtggccaatgcttctccagtttatgatgtgccatcctttgatgttatcatctcttctgcaagtctcagcttttcactttttggtattgttgctaaccttcttgaaagatacatgctcagacatgttcttgaaaaagtcatgcaaaattggcaccatagcagaatgaaggaaacagcatagggcattctgtagcatatattaaaaaaaatctcagttggtggattcatcgtttctcaacacatggtggacctacccaacctaattgccatgttaccggcgtttccttctctatcccattgtcattggaacttgctattaaaaatttagtttgagactgcatttaatattatttggtctaactaaaccaatgttatcagtccttcatttagcttgttgaaattcaaaagacttaatacatggggagctgctcattagtgtactgttttgagaattttctcttcttttcagtgt

SEQ ID NO: 302 - DNA, 1181 bp, Zea mays
  Intron number 19 from transcript GRMZM2G465764_T01 (locus GRMZM2G465764) derived from phytozome v7.0 (chr-ID 3; pos 228621864 to 228623044 reverse strand)
actattgggcaaagagttctggcaaatcctctcaagtatgcaaatctatcttttatttcatgttgatatatgtttagcttgtgtatgaactgtaaagctagagttatctgaactatttatctcatacctcttgttttccacagttccagaggaccataagaacagatatatacacacacacacacacacacacacacacacacacaaacacactatttttttctggactatttaacaatatagattgaattgattgttttcttttgaatgaagatttattcaattgtatatatgtgctaaaccatatcgatggggaaccgttatttgtatttctggttttgtatggggtacacctcaatgctcaagtgtatgaatgtgacccttcttttccttcagtgggaaatgacatttacattctgataagaccttaatactatttaaaagaggctcaagaaagtgtcctgttgttaggtataggatactatttctagtccagattggagatgggagtaaatagagatgagagtttgtccaaactttggatcagatattcctataataaacagtctaggttcaattagaaacacaattgtttgttcaaaattttagttctgactcatcccaaattgtcaccttgtcttgaacattagtatccagcaagagaagttggcctaaagtctacggcatatcaactctgggggacggagagatgtgagatactgccatactgctgacagcatagctgttgaagctattatcctgctctttcagtttgatttttactttttaatttgatatcactctttcattgtgttgatttggtgaatgagaaagggacaggataacatggaactgttttggtattctaatctactaaaactgcagcgggcgttggatttgggctctagagagaacaagagaggattatgtgtttgctgcagagaggaactcattggaagatgatactacaagtctacaaacataactaatagaatttcacgattaaaatgggaataccttgatttgatatttctgtgttttttgaataatgattgattctgtagttttatgtttgtttatgtgtgtacaaagtgcacattttcttcccatcatgtctctttcgtgacaaggctgtgttttttgttgtttttggttgcttgaaaacagggttcggttccatt

SEQ ID NO: 303 - DNA, 9843 bp, Zea mays
  Intron number 5 from transcript GRMZM2G134862_T01 (locus G RMZM2G134862) derived from phytozome v7.0 (chr-ID 5; pos 3 2001128 to 32010970 reverse strand)
aatttgtaagttcatcaacccatcaaaaaataatggtggtttatttttgttaaaataactcctttccggttatgcttgtgagcgcttgaaacaacaaaaacttcaatgagcccaagtgttggaacatatcactgttacaaagaggaattgagaaaatctgaggactagaaccaattatatcatgaaccattaattaagttccatcatttggaactctagaaattatttatgtgtacctgtggcgatcttacttagaaagataagggattaattatatgaattccacctatggtattgaggactaatcattttaaattcgaaatgcaatcgtgcagtataattacaaagccataaggtaggactaaaaactgtgcgattttgttgcgtgtttccattttatcttcatttgggcttgttgctgcatgccagttgccatacaatttatggaattgaatctggtacacaatgattttcttttatcatgcataggaaactcactattaagctccattttagttgtagagagtttagaattatgataatattctgtgtactaggtaatggcctgtgcattgctatgttgctatgggcatatggaattccaaattaaacatttattctaaacgattatcatactaaggcaattttatttgctcgtgcaataaataatctgaccattttaaaacctgataacatcaaataccttaaatttattctaagagtaaattttgttagcggtccttaaacttgtcctgaatcctcgtctgggtcctagtacttgcaattgcatgttcagctccctaaggacgtttggtttccatcagagcccagcatgactcatatataggatgcattccctagccagccaggcttcgcacatgcaggtcctctttgtttggttgcctgtttcactatttggacaatgcatgtttgtttgcctggattgcatgtaaaaattcaaacaagcacatactatctcagtttgtttggttggttgtagacaccatggtctgattaccttgcatgaagtggtgaggataccaccagaccacctccaggtctatcatatggagggccagtttacattaaaatgcagcacacatttacatcactttccaaattaaaatggcgatgacaatgacttgaactaagattatgacaagtttacatgtgaaacccacgtccttgatgttgttgttgatttctcctgccctatctctttccctgtctttttcatgatagaacatagcattgttctctcgaccatggaacatagcattgacaaaaaggcatacacaattggcaatagaggtgtgctcataatacatagcaaacaagtagggaacatgaacacattatatgcaatggaacaatgctcaagtacaacttaattagcactcatcatatgcaatggagctgtgctcagatacaatagaattagcatgcttgtttattgctcatatcttaggcagttgagttgtgattggaacaacagaagtatcagagatgaagacactatttgcaatggtcatatactcatattcatagggagaggaagtcaggaactgcaagaagactgaaaatgaataagcagcaattgcatcactccactaaagaaagataagttatattatccaaccattacctcagtaaaaaacatacagaacatgtggccattccatcaataaaacaagaagaatggaacatgaccacctcctcagtaaaaaaaggacataacgaaatcataattgcacaattacattgctcattttacaaaacagtattatcggaacatatcatcatcatggttatttaaaaggcgcttaagcgctactgagtacgtaaaacgctgcaatgtttcacgaaaaaactcgtaaaatgaccgtttgaagcgctaaagcgtccctttttagcgtttaagcgctttgggtcgtaaaaaggccgcgttttggcgcttttccagcgcaccccaacccatttctgtaatttcgtctaacctaaaacaggcatcctccatcttttgcgtgaggcccgcaacctctccatgttgaggcagccgtcgcggtgccttcgtcgcctccctgggcttcgccaccggtaagccaccttgcctgagctcgccgcctccctcccctcctccctgcgtcgttgctcgagtaccctgcggcagcggtacgctgcctccccgctcgtgctcgccgccgccgctgtcctgctctgtcagctcgtcgcctctgtgcattgcaggctcgtggccccaagtcccctgctcccccgtggcggcagccctgcctccctactctcgctcggctcgctgcctgctcgcgctcagccctgagtcccctgctcgacgccgcctattgcaccgccagctacacccccctccctgctctgtttgcggttgttgacttgctagttgctaatagttgaacacttgtgtgtttttgtggtagtgtggttgtggacatgttatattattatgtgaaattatgttatattgatattttgtccatgtttaaaaggacgttttaaagtcaaaaagtactcatcagcgtttcaacattttatcgctttaataatcttgatcatcattgcacaattccattgcatcggttttaaaaaagagtaatatgggaatatggttattgcaaagcatcattggatcagtttaaaaacaggaatataggatcatactagaatgcatacatggagggaaattgggaaacagtctgtgagttctctcgagcaacagggagattgtgcggaggaagcagatccactcatgagaaaactgaattagtaccaaattacctataggaaacaagagaaaattctcctagagataaggaattgcattttacctccaaagtagcagcatgaatcgaatcctacaaatgacaaactatcaaggtccgcaaaaaatcacattgggaaaaacaacaacaacgacaaagcagtctcaagcaagttagggtaggctagagttgaaacccaacaaaaaccataaagtcttcttttagtgcctcttcccatgtcaactttagctttcacctccctcttcccattgaaaacaaagatagggaaacaaataaatattagatctacaaataattcatggatacctgctctgtgtgccatggaccaatgatgaactgagcacatttttgttctcttttttttttacgaaaattgaattctgcctaattctgttttggaagattgtttttgctcttgttttgaaggccaattgtgattttacccttgcccttgtcaattttatgattttacccttgttttttgaatccaaaccaatgtttgcgcctcttatatgctttgttagcagaagactggctaaatgaatgaaacaaaaagaaaaaaaatgtaaaaggcgttactaacctgtgaccttatcctaaccctaaacccaaaaggttttcattgatggttgactaagcctttgcaacttgttaaacttgacttagatttgaaatatttgcaactatccaaatatttgatatggaaatagaggataaaatcagagttaaaaacccttggcaaatttacccgcaaaactagtattttttaactgaaccaacaccatcaattcctcttaattggacatatgtaaactctgccttcattttggaaaaaagcaagggaaaaaccataaagttaaataagcaagaggataatcacgattaaaccttttattttgaagagaagcttttctcagtaccatggtttaaaaggcggctaggcggaactaggcgcccagccaccgccagaccgcctaggcgacttaggcgggcgcctaggcgacgccttagtagccaaataccaagcaaccaagcagctgttacagctcataaactagaaatcatcacaaattcacaatagcacaatagtggatctgaaatagccacaaagtagtttctaaaggaacaatagcaagtcacaaaatttaaaacagcacaatacaaaatatgaaatagccacatagatagtttgtaatggcataattaatagtaactagctgcagttagtaatgcagcaaatatgcagaaacatttcctactccacacctgacagaaacctactcgctgcacagtctgaaaattttcgctccacaatagcaaatatgccagagagacatttcctactccacacttgacagaaacctactcgctgcacagtctgaaaacaggggaagcaggggaggaggggatgagaaacatcattctgaggaggggaggaagcggggagtaggacttaccactttaccagcagctagcacagcagtcgcgagcggacgcggccagggagcagcagccgcgcgcagggagccgcagccgtgcccagcagcagccgtgtgcagggagccgcgcgcagggagcaggcagcaaccgccgcgcgcagggagcaagcagcagccgccgcgcgcagggagagagcgcgcgcagggagccgcgcgcagggagcaagcagcagccgccgagcagcagccgccgcgcgcagggagggagcacagagagatttgcgcgctcagggagagggagcagggagcagccgcgcacacacaaatagatttgtcgcgcgcgcacagtggaagaagcccaaaacgcgcacctaaaccctaaagcccaaaacgcgcaggtctgcaaaccctagaggataaggcgtcgcccagacgcctactatgcctaggcggacgcctacctcgccaaggcggacgccatacacagttttctctgggcggcgccgacgcctaggacatttctccgcctggacgcctaggcgtcgcctaggcgacgccttttaaaccatgctcagtactcattggtcacgacaaattcgctagacaccaaaccctcaagatcgtgaggtacatcatcccctaggtggtgtgataaccatcgggaaacttacaaccaaatgaagcaaactcatgagctaccttattacaagaacgtggacaaacgctaactttatagatgacgccctccttcaagagtcaagacctcaacaccttgcattatgctcttccatgtgtatgagcacccacttttcactatagcccctaccagactattgtttctgaaatattttagccatcaaaatccttgaagatagagttcaacttttggatctgttagcagctaaggaaggccataccatccaatgctaccaagacacattcaaggatcctggcataggaagttactgtgtttaggaagttactgtggggcctagctaacagaatcaccgctatcggggccccattctctgtgacctactttgtccttggtctaaatagggggtctaaccctccagacaacttgatcgaggggcatttggaatgacatatgcgccaccaaatcttgttaataatcaccaacggtcctggggtccttggggcctcgaagcattcctaagatcgatttactcccacacttacgggagccattctgcaaggatggtttaaggcatggggcccttggttggctagggcacatccaactaaaatgataacccggggcccttgccctagaaccagtccacaagggtggtctagggctgtttggtttgctgcctcaattgccacaatttgccacgcctaaggttaggcaagtttgaccaagttagtcttttgtttggtttgaagccacagttgtaaaagtgtggcaagattcccttaggcgtggcaaactatggcatagaatttgagcacctaaccttaggcaccttaggcatgtgtggcataaaattgtgtggcaatttttgtcaccttaggtatagaaccaaacaactcctaagtctctcccctaccctaaggagttcatggaaggtttaggtgcttagggctcccgggccttggggcactcagtgacgagcacttagtcgcttgtggcactctactgggtccctacggtccctggtctcacgtaatatggaaggcctagcctcgaggcccctaggggcttggagcttcctgtgagattaaaggactcttgcaacgcctaattctaaacctgcccacattacagaaggctgagtttggtcgcaccaaaggcattacaaccacgaagtttgtgatgccacgtttgaggcctactgaaaatgtatgagctgtgacgctacaacttacaggtgcattgtcgccacaatttaggcaacaagactcaagaccactacttggtacatgcatcaaccttgtagccacgcgtgcgcatgttagtgtaccatgaagtattatcaagtacaaaacactacaccggctattaactacaccatacccaacgacttgggccctgatgaccgtagaagtgacataacatacctgcccctgtagtaggtatgtctgccactgatggacatctctgacacaatgccatgaccaaaggctccacaagcaggataagaccagagttgatgggttttagttgatcagccccatggcctaatggatgtaacctttctcctctcttgatctataagagggggcgtagagtagcgtttagacacaggggttcactgtaacaccccgtctactctcagaccggcggtacttactcctggcagtcctcaaggatcatagaccatccccacaacacgagtcttttgtgcgcactctgtcctcactcgtgtgcaccttctcggtcggtaacccatcccaatatttctctaggccaagcacacttaacctataggttctttcgaggtagcttccgaaaaagaagatgcaccttgttggtataagtactctattaattctattaagtcttgggccaggatatcaccatccattggggctataatatcacaatccacccccttagaagaccgatgtcctcatcggtcaaccccaaaccaggaacctccactcttggccacgtttatatgtctagtgtcatcatatgccatgccatgtgaccactcagggcccacatgcgccatgctatatgctcgatcccctagcccacacacgatcgtgaaaccgcgagggtcggctctgataccatttgtaacaccccgtccactccaggacctacagtagttactcctgtcagccctctaggatcatagaccatctccacagaccaacacgagtcttttgtgcgcactctgtcctcgctcgtgcgcactggggaagacttcttggtcagtcatccatcccaatatttctctaggccaagcacacttaacctgaaggttctttcgaggtaggctttcgaaaaagaagatgcatcttgttggtataagtactctattaattctattaagccttgggctaggatatcaccatccactggggccaggatatcacatttacccatgtaggagattttcttccactttgaacatacacacgacatccaaggacattaaaaaggtggattaggaccgataggctagaacaaccatcagatccaagtggaaagggggagctaggaggtcctctagctgagttggttaggtggtctgaatagcattcctcaggtcctgggttcggctccccgtggcagcgaattttaggctgtggttaaaaaatcccctcgtctgtcccacgtcaaagcatgagtctatggctcagctccggtcgcggtcgttctcacatgtgcttcgatgccgctgtgtatgggtggagcaggggttcgaggggtttcttgacctgtgtgagaaggtcttcttcttaatacaatactcgggggctgtcttacccccgcaggtcgagttttaagaggtcctggcgtttagttgcttcttgagcttgtaatcttcttcacctttgtgttcatcaatcaatgagtaccaagaggaagcagggtattacaccttgtggctcgaatctctctaaatttgtttgcgtgttggttctcggtcgtgtctaggttcaacacattgctcgcctacacccctctctttctagtaactttcttctttttggaactttacataccctgctgtctgtccatgacgacagtatcaacctccacccttgtttggacatcatctccattctccatgttgaaagagcgaagatctctaaatcccaggccacctttgttctttagttggattaatttctcttaagtgacccaatgcatattattctccttgtcttggttgttccaccaatattttgcaatcatcacactgatctggttacacatctcttttgtgataccgaagcaccccatggcgaacaccggtactctgcttgtgctaccgctttgatcaagatttcctctcctgctttaaagagcagcttcttcttccacccttggatcctttgctatacccgttcatccaaatacggaaacatgtttgttctggatctccctacatagaccggcagccctaagtatttctcattcctcatttctgatctgatgttcataatctccctcacttcacttctttggatgtcgctaacatcatcatggatttgtttgtattaatcatctgtccggaacacgcttcgtaagtcttgaggatctcctgcagctatgctgtatctgcttcatcggctttgcacaataccagcaagtcatctggaaatagcaaatgcaagtcgccgggatgtttccgcagacacggatgccgtgtatccttccctctactctgacaaacttctgagaaaccttttgcgcatagtaagaacacacatggagagattgggtctccctgctctggttacacattgcactaagttggtccaatggttgacacttgcacatttcagcagtagttagggaaaaagagatgcttaaaggaactaattccttcaaagaacttaaatagcttgatgtttggtcccttttacagccccttcctggtatgactggattggtctacattctctgaatttctatttcttttggaatcaatagatatatgctctctaaatttagttcagtttcagttgattcttccatttcttcatttattttacattactgcacttcctccaaaaaagggattattgcatatgctaatttcacttcaaacactaaatcaatttctactgctaatatgacatttgaaaagaaaaaaacaagtgggttgagggattatgcattagtgctccacatgtacttgatattgagatgattttaagatttttgtgtgagctcaggaccaatccattttattcttttccattgttgtctagtatgttcaactcattttctttgcacggttaaaaggacaagacatcctatttgattcatgacatcaagggaaacaaataaattataatcatatattacctcttcctttcatattttattaatacctatattttgaaaattggaacctggactgatgtgctgccccttgtatactctaggtgaatgcaaaactgtcaatcatggttagcaccaaactttatgtgggaaaccttaaccctggattagggttgggtgttgtattaatagacatgagttaactgggccagacccattacaaaggggtgagagggtaattacacggggaaaaccccaaacaataaacgggtattctaacactttacatgacaccgcatctgtatttcatactccatagagataatactgtagacatatgttcggactgctgtagaactgctgttcggctgccctgcagtcgcagcagatgcagctgttcggactgctgcagctgcaatccatagagacaaaatactgtagaaatcgcagccgcagtcggattaaagctgcagcaagctgcaacaccagtgatgatgtgtagaaaaagctgtaattatcaccagccaggaactttagttaattgctgtgatgattttttgcagcctagatttgtagtaaatcgcgtcactgctggcga

SEQ ID NO: 304 - DNA, 25180 bp, Zea mays
  Intron number 3 from transcript GRMZM2G022224_T01 (locus G RMZM2G022224) derived from phytozome v7.0 (chr-ID 3; pos 1 59911636 to 159936815)
ccaacacatcttctagtggtgctgatgttgtcggcgtttcgagaccggggggtccctaggccgacgagtgaaatgtcgccgcgtgccccagcccagatgggtcggcgcgagacggagcgcgaagtggggaagaaagggcagccggagcgagagagggaggtggaaatcccgcggccttcgtgtttgtcccgctcccaggtcgggtgcgcttgcagtagggggttacaagcgtccacgcgggagagggagcgagcggcctcacgcgagcgcctgtctcgtcctcttccctgcgtggccccccttctctaagagggccctggtccttccttttataggcgtaaggagaggatacaggtgtacaatggggggtgtagcagagtgctaacgtgtctagcggaggggagctagcgccctaagtacatgccatcgtggcagccggagaggttttggcacccggtttgtgtggtgtcgtggccgtcggaggagcactgaagcttggcggaaggagagctatcgagtccttgctgacgtcctcttgcttccgtaggggggctgagagacgccgtcgtcatagagcgtgcggggcgccatcattgcttgtctggcggagcgagccagatgggacgccagtcttgtttcccgtagcctgagtcagcttggggtagggtaatgatggcgccccctgttgacgtggtcggtccgtgccctaggttgggcgatgcggaggctccttcgaggtcgaggtcgagtctgtcttccgaggccgaggtcgagtccgagcccctgggtcgggcgaggcggagaccgtcggctgaggccagggctgagtccgagccctgggttcgggcgaagcggagttcgtcatcttccggggctgagcccgagtccgagccctgggtcgggcggggcggagttcgtcgtcttccgggactgagcccgagtccgagccctaggtagggcggagcggagttcgtcgtcttctgggactgagcccgagtccgagccctgggtcgggcggagcggagttcgtcgtcttccgggactgagcccgagtccgagccctgggtcgggcagagcggagtgcgccgtcttccagggctgagcccgagtccgagccctgggtcgggcgaagcggagttcgtcgtcttccgggactgagcccgagtccgagccctgggtcgggcggagcggagttcgccgtcttccggggctgagcccgagtccgagctctgggtcgggcgaagcggagtttcctatggtgcctgaggccgggcctgactgccagtcagcctcactctgtcgagcggcacaacagtcggagcggcgcaggcggcgctgtccttctgtcaggccggtcagtggagcggcgaagtgactgcggtcacttcggctctgtcggctggaggacgcgcgtcaggataaaggtgtcaggccacctttgcattaaatgcctctgcgatttggtcggttggcgtggcgattttggccagggttgcttcttggcgaagattgggcctcaggcgagccggaagtatgttcgtcgctggaggggggcctcgggcaagacggagatcctccggggtcggctgcccttgcccgaggctaggctcgggcaaggcgtgatcgagtccgtcgaatggaccggtccctgacttagtcgcacccatcaggcctttgcagctttgtgctgatgggggttaccagctgagaattaggagtcttgagggtacccctaattatggtccccgacagtagcccccgagcctcgaagggagtgttaacactcgcttggaggcttttgtcgcacttttttgcaaggggaccagcctttctcggttgcgttttgttccggtgggtgcgcgcgagcgtacccgccgggtgtagcccccgaggcctcggaggagtggtttgactcctccgaggtcttaatgccttgcgcaatgcttcggctggtctggtcgttccctcatgtgagctggccgtagcccgggtgcacggtcgggttccaagttctcggactggtatgttcacgctatcaacggtttggccggagccgagtttgcgagagcagcccccgagcctctgcacagggcgagaggacgatcagggacagactcgacttttttacatacgcccctgcgtcgcctttccgcaaggaggagggggggaaagcgcaatgttgccctcggatggcgccgaacatggtgtctccggtgagctgctggcgggtaatccgagtggacgcccgtgccccatttgctaggggtcggctagaggcccagaggcgcgcccaaaagtacctacgggtgatctgccggacccggtcccctatcgacggggtccgagggctcgatgcctccctctgatgggattccgttacaagattgttcccgctggtctcagaaatgtcctagggtacctcgggagcgtagcccgagccttggatatgtatcgaacgtacccatggtcatccctcgctctgtgtctgaggcggttgtgaacccttcgagggccaacctacgaacccctgatcagtagtgggcgcggagcccgagtggcctgaggcagccgttgaacccttccgaggggccggccttcgaacctctgaccagtagtgggtgtggagcccacgcgctctgaggcggctatcaaacccctccaaggggccagtagggatgaaagtggtaatccgaactgttagaacaaatttaatattttaaaatagatatgtataaaatttgatgttgatcttttcttatgttatcaaacatattagtacaaatatgaataaaatattatataagttgttttatgtattatttgctccctacaacacaaaaagttgaaaaaaataccgaatttgtttccgaatccataccgaagtttatatctattatttgagaaaatgtaggatgaatttgaggtttaccttttatgaatcttaacaagctggatgttaaaaacaagaatacaaatttgtattgtatattctatatcctatttattcgcaatcaaagaaaaaactgattaccgaataaataccgtttccgaccgttttcatccctaggggccagccttcgaacccctgatcagtagggaggctcggagcctgtttccttcatggagaaggatccttttcggggtatccccctttcccggtccctgttgtaagagagagagaaagaggaaaaaggaaaaggatgcgaaatcgaatgacgtggcgtaccttttttttgacgcggtcattatggcgaaggcgaagcgtcgctcgcttcccctgccagaggcgccgcctttcccgccgcggagttaatgcgacggggcgtgcggttcgcggggcggccgttgcgcgtgcgcgagccattcgaggaacggccgtttcgctttgggtttttgaatcccgcggcgggtccgggcgaaacgttgaacgggtctcaccttggtctttatatactcggaggagggtctggcgacggttctttgctccgcttctcgcctcccccttaggttttcgcaacctgagaggtttagccagagaaaaggaaaccacttacccagtcctttccgtcgccaccccttttgctcggtgatggccgaccgggtgaccatcatctcgtcgcgcgatccatggcctttctccacagtcacggcggatgacctggaggatcttgttgccgagggtttacttcgccctctctctgatgagaggcagccggagtggattcctcccgcgagcggagccgctctgtccccgccaccggggtacgtcgtgagcttcgtctccttccacgagcgggggttcggtgtgccggcaagccgcttcatgcgggcgatcctgcacaactatgaggtggagttgcacaacctcagccccaactccatctcgcaagccgccatcttcgtagcggtgtgcgaaggatacttggggatcgcccccccactgggacttgtggactcatctcttttccgcggagctttttgcttcaccgacgggggagaggagggtccacgcggcagtgcgggccggcggttgcatcctccaactgaggcagtcgcgggcatcgttgtacattcccgccatccttgcgtcctcgaattaagggtggcagcgccggtggttctacctccggaatgacggcgagatgctcccgccgttttcccagcgagtggtcaccgccgtcgccgatgcttggcgctacgggaccccgcacgacagacagaagaacctcgagccccttctcaaggccctggatgcgttgcggaaaggaggactcaccgccgcgggagtgatagccgccattcaccgctgtagggtgcttcccttggcggagcggcggttgtcgctctgggagatgacgccggaggctgacttggagggctcgcggatgtcctcggatcctcttcccatcgacgttctccacgggcgggtggccgtcgcgttgggaaaaccggacgccagcgccttctctcagcccttgatgcgccccgaccaagggtgcgtgaccctggtgagtgtccgctccttccttctccttgcgtcgggttgcccttggtccttacagttgggatttccatccgtctccaggaggttgggtggcacaagccttcccggccacgggtcccggaggacgcggtggaccgagcagcgcggcgggttgccgcggaggagaagaagaaaaagaaggacgcagagaaggcccgggcccgcgagcggatgcgggcccgagacgccttggaaaaactccgtcgtcggcaggagagggagggactcccgagggagccgtcgccagaaacgcccgacgacgatgatgaagatgatgatgaggatgacgacatggctgcccgcctcggcttcagcccgggtttgaggctaggccaggagtcgtcaagccagcccccgagtgggctggcgccgttagttcccagagtcaggacgccgaggtcccggcccgaagagcgggggcagaccgagggggtacttgacccctcgaccggggaagttgaggtgaccccggggagtcaggccgaggcgtctgttccccgagagccgttgcccacgccggcagcgcaggagagcgaccctcaggtcaccgtagcagcgcctgggcagtccgtctcccgggcgtccaaggtgcccaaggcgagggtggtgccgaagctggcggcgaggcggacctcggcggttccttcgggggtcgagatccgagagacctctcctcaggcacggctgatcatggcccggagcgggtaagtatcttggaacgtcttcgtcctggcttctcattcgtatgtcccaaccgcgacttttctttcctccttagcaagtgaagccatggcctgaccgatctggctccccggaaggcccttaagacgacgtcggcttccgcagcaggcaccgcgccgggcctcgctgttcagctgaccttctcgcaaggcgctccacagcggggggctcaggcggctccagtcgccgtggagcgagttcccgaggccagctcttctgccgaggcgaccatcgtgctggaggaggcagctggcgtggacgtggcctcgggcccatcggacatgccgccggtgctggcgcctgctgctgctgaagccgctgccgtcccagtcggggagcgacctgttgctgctgacgctgagatggccaaggcgtcggcgctcggtgccttggaggaggggggcgtggaaacgcgatctgtcccgccgagcggcagccttgtccctgcgcggcggagctccgagggacggcgccagttgctccggttccggacccgtgaggcttcggatcccttcttcgttcttgacgatgagcgggaggagcagtcttgggacgagctccgcgagtgtgccgaagcaacggtggggtcgctccggtcgtcgctggaggtcttctgcagggacgtccccaaaatcctccaggtaatggtttgaggcataccttttttgtgaccaacgcgtcttttgtgacgccccgctcccttccctcaggatctaacggatctgagcgccgccaagtcgtcgttcatccgccacgaggtcgacatctggggctcgctgcgatccctgaggacctcgctcgccggggctactgcgcgcctctctcagcagggcgccgaggtggcggaccttcggttgctctgcgccgatctgagagcagaggcggcagtggcacgcgcagaggcgcaacgacggtagtcggagttcgaccaggtcgccaatgagcgagaccaatctcggggccgggctgccgaggccgaaagccgggctggagcccttgcagcagacctagccgtagcccaggccgcagcctcggagcagcgtgcccgagccggaggtatgtcttggccattttcgggtttcgtttcagcttgtttcctccgcttgtgtttgaggccttgcgttctggctgttcgcagagctcgagtccgcccttgatgagtccgccagggcgcttgccggggcggccgagcagagggagaccgaccatgcggccatgtccgaggccgtctcggacttctgccgggtcttaggtttcggcgatgtcccctcaggaagctcccctcaaagtcgcctgcaggccttgggcgatcacgtgcgtggcagactccgcgaggcgctacatcacggcgtcaggcgggccttcgccgtgcttgcttcccactacgttgtggatctggagcgggtcagcgagggatattgccttcctgacgaagatgaagccgccctggctgaagtccagaggctcgacgcggccgtcgcgggcccgagcgcggtgctggtgaccaccttcgaggcagagatcctcccacctgcgccgtcgtccgaagccggggtggactttgccgagggtggggacgaagccgaaggcgcaactccttccccgggcggcgcctaactctgtcggggcagtttcctttgaatgcacgtgtgtcttttgcggctgctgaggcctgaacactttattattgtagtataaagtcatgccccttttccttttcattttgcgtgtccggccccgctcgtcagtagcagggtggcttgcccaagtaggagtcatttttcgtggcaggtgacgagtgaggtatccgtaacccagaggcataggagtccctcggctcagtcagccttgccacttacatgcacccgcgttcgcttcttggggtcctgctaccgatatagctgggggaacgcagaagcctttttggttgaaaattttgtcgtggagggggttccccccttttgtcgtggagggagttcccccctttttagcccccaaggaagggttgggctttgccgaggcaaggctgacccttccttgatgaccaaattttgtgtgggaacgaggtatacgaacaacttgaaaacatcttaagggtagaagcgacgtagctgctggatgttccaagtgttggtgtagacctcgccctgactgttggccagcttgttcgttccgggcttcagaactttggcgatggcgaacagccctttctaggggtgtgtgtagcccccgggtgccttctgcaaggggccgacgaggtccaggccccacacagcaaaaggccaggtgatgggtatcgtttgcagagcctgagcgggcaggcgggtctgcctcgcgtaggactgacacccttcgtaggtgcggtcaattctaatggcgtcggccaccgccgtcggccagtagaaaccttgtcggaaggcgtttctgacgagggctcgaggtgctgcgtgatggccgcaagcccccgagtgtatatctcgtaggagctcctggccttcggcaatggaaatgcatcgctggaggatgcctgaggggctgcggtggtagagctccttcccgtcccccaccaagacagacgacttggcgcgccgcgccaaccgccgagcttcggctcggtcgaggggtagctctcctcggtggagatattgcaggtacggggtttgcaagtttcgattaggcgtgaccccggttcgctcctcctcgacgcgcagtgcctcaccctcgggggccgagggtacctcgggccgagccgagggtgcctcgggccgagccgagggtgcctcagactgagccgagggtacctcgggctgggccgagggtgcctcgggctcggatatccagcgagtgctcggcgacatccctcggtatgccgggcatgttcgagggactccacgcgaaaacgtcggcgttcgcgcagagaaagtcgatgagcactgcttcctatttgggatcgagctcggagccgatccagatctgcttggaggcgtcgctgctggggccgagggggacggacttaaccgtctccgctggctcgaagttgccggtgtgacgcttcacgtctggcacctccttagagaggctctccaggtcggcgatgagggcctcggattcggcgagggcctcggcgtactccacgtcgcattcgaacgcgtgtttgtacgtggggctgacggtgatgaccccgttggggcccgacatcttgagcttgaggtaggtgtagttggggacggccatgaacttcgcgtagcatggcctccccaatactgcgtggtaggttcctcggaacccgaccacctcgaacgtgagggtctcccttcggaagttggagggtgttccgaagcagacaggaaggtcgagtcgtccgaggggctggacgcgcttctcggggatgatcccgtggaaaggcgcagcgcctgcccggaccgaggatagatcaacatgcaggagcccgagggtctcggcgtagatgatgttgaggctgctgcctccgtccatgaggaccttggtgagcctgacgttgccgatgacggggtcgacaaggagcgggtatttccccgggctcggcacgcggtcggggtggccggcttggtcgaaggtgatgggcttgtcagaccagtctaggtagactggcgccgccacctttaccgaacagacctcccgacgctattgcttgcggtgccgagctgaggcgttcaccgcttgcccaccgtagatcatgaagcagtcgcggatctcggggaactctcctgcctggtgatcttccttcttgtcgtcgtcgcgagccctgccaccctccgcgggtggcccggccctgtggaagtggtgccgaagcatggcgcactcctcaagggtgtgcttgatgggcccctgatgataggggcacgactccttgagcatcttgtcgaagagattggcacctccggggggttttcgagggttcttgtactcggcggtggcgacaaggtccgcgtcggtggcgtcgcgtttcgcttgcgacttcttattgcccttcttcttggcgctgcgctgagttgacgcctcggtggcatcttccggtgggcggccctggggctgcttgtccttccggaagatagcctcaaccgcctcctggccagaggcgaacttggtggcgatgtccatcagctcgctcaccctggtgggggtctttcgacccagcttgctgaccaggtcgcggcaagtggtgccggcgaggaacgcgccgatgacatctgaatcggtgatgttgggcagctcggtgcgctgcttcgagaatcgccggatgtagtcccggagagactctcccggctgctgccggtagcttcggaggtcccaggagtttccgaggcgcacgtacgtgccctggaaattgccggcgaaggcttggaccaggtcgtcccagttggagatctgccccggaggcaggtgctccaaccaggcgcgagcggtgtcggagagaaacagggggaggttgcggatgatgaggttgtcatcgtccgttccacccagttggcaggccagccggtagtctgcgagccacagttccggtctcgtctcccccgagtactttgtgatagtagtcgggggtcggaaccgggtcaggaacggcgcccgtcgtatggcgtggctaaaagcctgcggaccgggtggttcgggcgagggactccgatcctccccgctgtcgtagcgtcccccacgcctggggtggtagcctcggcgcaccctctcgtcgaggtgggctcaacgatcgcggtgatggtgctcgttgccgaggcgacccggggccgcaggcgctgtgttgcgcgtgcgcccggggtggaccgaggcttcccgcatgaatcgagaagtcgcggcgcgatgttccgaggggtacccctgcctttgggaggcggagctctcggcccgtcggaccgcggcgccctccaggagattcttgagctctccctggattcgccacccctcggtggttgatggctccggcatcgcgcggagaagcattgctgctgcagccaggttctggccgaccccactggaagcgggtggcggcctcaccctgacatcgtcggcgatgcggtgctggataccctggggtagatggcgcacttctccggccggaggttggcccgcccattcctgcccgacgtcccggcggatcggctcaagtgctcctgctccctcgtcgagcctggccggcaccccgcggatttgctcgagcagtgggtcatgaccccccaccggaatggggaccacagctagcttccgtaggatgtcaacgcgtggcacaggcctagggagatcaccgttctccggcatactgagatggttgccttcggagggaccccctagatcgacgtggaaacattcacgacttgggccgcagtcctcgtcgccgaggctgcggctaccgtcggaacagccggaaaggcagtagtcgcatgcggtcatgaagtcccgcatggcactggggttgccaagtccagagaaatcccaatagaagtcgggctcgtcatcttcctcggaccccgagggcccgtaggtcgagacatccgcgagccggtcccagggtgaccgcatacgaaaccccagagggtttggactcgcctctacgagagcgtccaccaaagcaaagtcgcttgggcgggtcaaggctgaatccaaagggcgtgagatgggaaccggtgggtacctcttggtcgatgggcggtgacgaagtcacgtcagggactgactgcaccgtcatctcaggtacgagggtgatgcccagcaagcctttcgcgagcgtgctggcgtcgtccgtttgctcggaattggcgtgttgcagggagacggcgctcgtcttcgtctcaaatgcgaggtcgatgcccgacgcgccccccgttggggcgccggcaccgtcgactcgctcgacagccgacgaggtgccgcctcctgcttggccttggttgccccgcctcctcctctgtcggcgggggagagggcggggtgagctcgaatgtcgttcttccaccatgcggggaagacgtcgtcgattccgccgccgacgggcgggctgtcggccgccattgttgctgtcgcacggcgggggaaggagtatcatgtcgtagctgccgtcgagggacatgaactcaagactcccgaaacggagcaccgtcccaggctagaaaggttgcaggatactgcccatctggagcttgacgggaggctgttcgtcaacacgcagcaggcccgtacctggcgcgccaactgtcggcgttttgagaccggggggtccctgagccgacgagtgaaatgtcgccgtgtgccccagcccagatgggtcggcgcgagacggagcgcgaaggggggaagaaagggcagccggagcgagagagggaggtggaaatcccgcggccttcgtgtttgtcccgcgcccaggtcgggtgcgcttgcagtagggggttacaagcgtccacgcgggagagggagcgagcggcctcacgcgagcgcctgtcccgtcctcttccccgcgcggcccccttctctaagagggccctggtccttccttttataggcgtaaggagaggatccaggtgtacaatggggggtgtagcagagtgctaacgtgtctagcggaggggagctagcgccctaagtacatgccatcgtggcagccggagaggttttggcacccggttcgtgtggtgtcgtggccgtcggaggagcgctgaagcttggcggaaggacagctgtcggagctatcgagtccttgctgacgtcctcttgcttccgtaagggggctgagagccgccgtcgtcatagagcgtgcggggcgccatcattgcttgtctggcggagcgagccagatgggacgccggtcttgtttcccgtagcctgagtcagcttggggtagggtaatgatggcgccccctgttgacatggtcggtccgtgccctaggttgggcgatgtggaggctcctccgaggccgaggtcgagtccgagcccctgggtcaggcgaggcggagaccgtcggctgaggccagggctgagtccgagccctggggtcgggcgaagcggagttcgtcgtcttccggggctgagcccgagtccgagccctgggtcgggcggagcggagttcgtcgtcttccgggactgagcccaagtccgagccctaggttgggcggagcggagttcgtcgtcttccgggactgagcccgagtccgagccctgggtcgtgcggagcggagttcgccgtcttccggggctgagcccgagtccaagccctgggtcaggcaaagcggagttcgtcgtcttccgggactgagcccgagtccgagccctgggtcgggcggagcggagttcgccgtcttccggggctgagcccgagtccaagccctaggtcgggcgaagcggagtttcctatggtgcctgaggccgagcctgactgcctgtcggcctcactctgtcgagcggcacagcagtcggagcagcgcaggcggcgctgtccttctgtcaggccggtcagtggagcggcgaagtgactgcggtcacttcggctctgtcggctggaggacgcgcgtcaggataaaggtgtcaggccacctttgcattaaatgcctctacgatttggtcggttggcgtggcgatttggccagggttgcttcttggagaagactgggcctcgggcgagccggaagtatgttcgtcgctggaggggggcctcgggcgagacggagatctccggggtcggctgcccttgcccgaggctaggctcgggtgaggcgtgatcgagtccgtcgaatggaccggtccctgacttagtcgcacccatcaggcctttgcaactttgtgttgatgggggttaccggctgagaattaggagtcttgagggtacccctaattatggtccccgacagatgtggtgcttgatcgatatggtaattgattttattgtttaatatatacatgtctcactataattaaatttatgtagaatactactgaatttccgtacaaatttatgatcagatggatttctatcgattgcacatatttgtgaccatttgtgagatacttgaaagtcgcctagaggggggtgaataggacgaaactgaaatttataaagttaatcacaactacaagctgggttagcgttagaaatataatcgagtcgcgagagagggtgcaaaacaaatcgcaagcgaataaagagtgtgacacgcggattttttttaccgaggttcggttctcgcaaacctactccccgttgaggaggccacaaaggctgggtctttttcaaccccttccctctctcaaacggtccctcggaccgagtgagctttctcttctcaaatcaaccgggaacaaaacttccccgcaaggaccaccacacaattggtgtctcttgccttggttacaattgagtattgatcacaagaaagaatgagaaagaagaaagcaatccaagcgcaagagctcaaaagaacacaacaaatctctctcacttaacactaaagcttttgtggaattgggagaggatttgatcacttgggtgtgtcttgtattgaatgcctagctcttgtaagtggttggaagttggaaaacttggatgacttgaatgtggggtggttgggggtatttattaccccaaccaccaaactagctgtttggtggaggctgctgtcgcatggcgcaccggacagtgtccggtgcaccagccacgtcaccaggctgttgggttccgaccgttggagttctgactgctgggccagcctggatgtccggtggcacaccggacatgtactgtagagtgtccggtgtgccacttcgcgcgtgcctgacttctgcgcgctctggcgcgcattaattgcttctgcaggtgaccgttggcgcgaagtagtcgttgctccgctggctcaccggacagtccggtgtacactggacatgtccggtgaattatagcggagcggattcccgaagctggcgagttcagagtcgcttcattcctggagcaccggacactgtccggtgtacaccggacagtccggtgaattatagctgagcgcctctgagttttcccgaaggtgaggagtttggattgaagtcccctggtgcaccggaccctgtccggtggcacaccggacagtccggtgcgccagaccaggtcagccttcggttatcccttgctctctttgttgaaaccaattcttggtccttttattggctaagtgagaacctttggcacctgtataacttatagactagagcaaactagttagtccaattatttgtgttgggcaattcaaccaccaaaatcatttaggaaatatgtgtaagcctaattccctttcaatcttcccctttttggtgattgatgccaacacaaaccaaagcaaatatggaagtgcataattgaactagtttgcataatgtaagttgcaaaggttgcttggaccacgcttgcaccatatgttttgtttttgcaaattcttttgtaaaaccttttcaaagttcttttgcaaatagtcaaaggtaaatgaataagattttgcgaagcattttcaagatttgaaattttctccccctgtttcaaatgcttttcctttgactaaacaaaactcccccttgataaattcctcctcttagtgttcaagagggttttaagatattgattttgaaaagattactctcttccctttttgaacacaaggagatatcaatttgaaaaatcataccaattgaaaaactctttttaaaattaggtggtggtgcggtccttttgctttgggctcatgctctctccctctttggcataaatcgccaaaaacggaatcattagagccctttcaaaactactttctcccctttggcaaataaaacatgagtgaagattataccaaagccggagaggtgctcggcgcgacggtgaaggatgagttacgtagtggaagcctttgtcttcaccgaatactccaattccctttcaatatacctatgacttggtttgaaatttacttgaaaacacattagtcatagcacatgaaagagatatgatcaaatgtatatgaatgagctatgtgtgcaaatcaacaaaagaagttcctagaatcaagaatatttagctcatgcctaagtttgttaaaagtttgttcatcaagtggcttggtaaagatatcgtctaattgatctttagtgttaatatatgagatctcgatatctcccttttgttggtgatcccttaaaaagtgataccgaatggctatgtgtttagtgcggctatgctcaacaggattatctgccatgcggattgcactctcattatcacatagaagaggaactttggttaatttgtaaccgtagtccctaagggtttgcctcatccaaagtagttgcgcgcaacaatgtcctgcggcaatgtactcggcttcggcggtagaaagatctacggaattttgcttctttgaagcccaagacaccaaggatcttcccaagaacaggcaagtccccgatgtgctctttctattaatcttacaccctgcccaatcggcatccgaataaccaatcaaatcaaaagtggatccactaggataccaaagcccaaacttaggagtataaactaaatatctcaagattcgttttacgggcgtaaggtgagcttccttagagtcggcttggaatcttgcacacatgcatacgaaaagcataatatccggtcgagatgcacataaatagagtagagaacctgaaagtcgcctagagggggggtgaatagggcgaaactgaaattctcaaaaacaatcacaactacaagtcgggttagcgttagaaatataatcgagtccgcgagagagggcgcaaaacaaatcgcaagcgaataatgaggtaagacacgcggatttgttttaccgaggttcggttctctcaaacctactccccgttgaggaggccacaaaggccgggtctctttcaacccttccctctctcaaacggtccctcagaccgagtgagcttctctttctcaaatcacttgggaatcaaacttcccgcaaggaccaccacacgattggtgtctcttgcctcaattacaagtgagtgtttgatcacaagaaagaatgccaaagaaaaagaagcgatccaagcgcaagagctcaaatgaacacaacaaatcactctctctagtcactagggctttgtgtggagttgggagaggatttgatctcttttggcgtgctttgcaatgaatgctagctcttgtatagtggttggaagttggaagacttggatgctatgaatggtggggtggttggggtatttatagccccaaccaccaaaacatgaccgttggtggaggctgtctgttcgatggcgcaccggacagtccggtgcacaccggacagtccggtgccccagccacgtcaccagttccgttggattccgaccgttggagcttctgacttctgggcccgccttgatgtccggtggcgcaccggacatgcactgtagagtgtccggtgcgcctgctcccgcgtgcctgacgactgcgcgcttctggcgcgcattaaatgcgcctgcaggtgaccgttggcgcgaagtagccgttgccccgaggttgcaccggacagtccggtgaattttagcggagcagctgaagtgaaaacccgaggctggcgagttccggaggccgcccttccttggagcaccggacatgtccggtgcacaccggacagtccggtgaattatagcggagtggcctttggaaattcccgagagtgaagagtttgaagtcggagtcccctggtgcaccggacatgtccggtggcacaccggacagtccggtgcgccagaccagaggagccttctgttgctcctttgctcttgtgttgaacccaaactcttggtctttttattggctaagtgtgaacattttgcacctgtataacttatacactagagcaaactagttagtccaatatttgtgttgggcaattcaaccaccaaaattatttaggaactaggtgtaagcctaattccctttcagaacctatcatcgaccgatataccttttgatccacggacttaccttccgtgtcgaggtcgagatgcccattggttcccatgggtgtcttgatgggtttggcatccttcatcccaaacttgcttagaatatcttgagtatactttgtttggcttaggaaggtgccctcttggagttgcttcacttgaaatcctaagaaatacttcaactcccccatcattgacatctcgaatttttgtgtcatgatcctactaaattcttcacatgtagactcgttagtagacccaaatataatatcatcaacataaatttggcatacaaacaagtcattttcaagagttttagtgaataaagtaggatcggcttttccgactttgaatccattagtgataagaaaatctctaaggcattcataccatgctcttggggcttgcttgagcccataaagcgccttagagagtttataaacatggttagggtactcactatcttcaaagccgggaggttgctcaacatagacctcttccttgattggtccattgaggaatgcactctttacgtccatttgataaagcttgaagccatggtaagtagcataggccaataatatacgaattgactcaagcctagctacgggtgcataggtttcaccgaaatccaaaccttcgacttgggagtatcctatggccacaagtcgggctttgttccttgtcaccacaccatgctcgtcttgcttgttgcagaacacccatttggttcctacaacattttgattaggacgtggaaccaaatgtcatacctcgttcctagtgaagttgttgagctcctcttgcatcaccactacccaatccgaatcttgtagtgcttcctctaccctatgtggctcaatagaggaaacaaaagagtaatgttcacaaaatgagcaacacgagatctagtggttacccccttatgaatatcgccgaggatggtgtcgacggggtgatctcgttggattgcttggtggactcttgggtgtggcggccttggttcttcatcctccttgtcttgatcatttgcatctcccccttgatcattgccgtcatcttgaggtggctcatttgcttgatcttctccttcatcaacttgagcctcatcctcattttgagttggtggagatgcttgcgtggaggaggatggttgatcttgtgcatttggaggctcttcagattccttaggacacacatccccaatggacatgttccttagcgcgatgcacggagcctcttcattacctatctcatcaagatcaacttgctctacttgagagccgttagtctcatcaaacacaacgtcacaagaaacttcaacttgtccagaggacttgttaaagactttatatgcccttgtgtttgaatcatatcctagtaaaaagccttctacagtcttaggagcaaatttagattttctacctcttttaacaagaataaagcatttgctaccaaagactctaaaatatgaaatattgggctttttaccggttaggagttcatatgatgtcttcttgaggattcggtgtagatataaccggttgatggcgtagcaagcggtgttgaccgcctcggcccaaaaccgatctgaagtcatgtactcatcaagcatggttctagccatgtccaatagagttcgattctttctctccactacaccattttgttgtggcgtgtagggagaggagaattcatgcttgatgccctcctcctcaaggaagccttcgatttgtgagttcttgaacttcgtaccgttgtcgcttctaattttcttgatccttaagccgaactcatttgagcccgtctcaagaatccctttaatgtctcttgggtatgagatttttcttgcaaaaagaatacccaagtgaagcgagaataatcatccacaataactagacagtacttactcccgccgatgcttatgtaagctatcgggccgaatagatccatgtgtaggagctccagtggcctgtcggtcgtcatgatgttcttgtgtggatgatgggtcccaacttgcttccctgcttggcatgcgctataaatcctgtctttctcaaaatgaacatttgttaatcctaaaatgtgctctccctttagaagcttatgaagattcttcatcccaacatgggctagtcggtggtgccagagccaacccatgttagtcttagcaattaagcaagtgtcgagttcagctctatcaaaatctaccaagtatagctgaccctctaacactcccttaaatgctactgaatcatcacttcttctaaagacagtgacacctacatcagtaaatagacagttgtagcccatttgacataattgagaaacagaaagcaaattgtaatctaaagaatctacaagaaaaacatttgaaatggaatggtcaggagatatagcaattttatccagtcctttgaccaaaccttggtttccatccccgaatttgatagctcattggggatcttggtttttctcataggaggagaacattttcttctcccctgtcatgtggtttgtgcacccgctgtcgatgatccaacttgagcccccggatgcataaacctacaaaacaagtttagttcttgactttaggtacccaaatggttttgggtcctttggcattagatacaagaactttgggtacccaaacacaagtttttgaccccttgtgcttgcccccgacatatttggcaactactttgccggatttgttagttaatacataagatgcatcaaaagttttaaaagaaatgtcatgatcatttgatgcactaggagttttcttcttaggcaacttagcacgggttggttgcctagaactagatgtctcacccttatacataaatgcatggttagggccagagtgagacttcctagaatgaattctcctaattttactctcaggataaccggctgggtataaaatgtaaccctcgttatcctgaggcatgggagccttgcccttaacagaattagacaatttcttaggaggggcattaagtttgacattgtcccccttttggaagccaatgccatccttaatgctagggcgtctcccactatagagcatgcttctagcaaatttaaaattttcattttctaagtcatgcacattgattttagaattaagttgagctatgtgatcattttgttgtttaattaaagccatgtgatcatgaatagcatcaacattaatgtctctacatctagtacaaatggaagtatgttcaacagtagatgtagtgggtttgcaagattttaattctacaaccttagcatgcaatatatcatttttacttctaaggtcggaaattgtaacattgcaaacatctagttctttagccttagtaagcaatttttcattctcaatcctaaggctagcaagatagatgttcaattcttcaattttagcaagcaaatctacattatcattgggaattgaaacattacaagcatttgaatcaaccttagcaataagtttagcattgtcatttctaaggttgtcaataatctcatggcaagtgcttagctcactagataaattttcgcacttttctacttctagagcataagcatttttaaacttaacatgttttttgttttctttaataaggaagtcctcttgagagtccaagagatcatccttttcatggataacactaatcaattcatttaatttctccttttgttgcatgttgaggttagcaaaaagagtacgcaaattatcttcctcatcactagcattatcatcgctagaagactcgtatctagtggaggatttggatttaaccttcttcttttttccgtcctttgccatgaggcacttgtggccgacgttggggaagagaagtcccttggtgacagcgatgttggtggcgtcctcgtcggaggaggagtcgctagagctttcgtcggagtcccactcacgacaaacatgggcatcgccgcccttcttcttgtagtatctctttttttcctttcttctccccttcttgtcgtcgcccctgtcactgtcactagatagtggacattttgcaatgaaatgaccgggcttaccacatttgtagcacactttcttggagcagggtttgtagtctttccccctcctttgcttgaggatttggcggaagcttttgatgacaagcgccatttcctcgttgtcgagcttggaggcgtcgatgggtgttctactcggtgtagactcctcctttttctcctccgtcgccttaaatgcgaccggttgtgcttcggacgtggaggggccgtcaagctcgttgatcttccttgagcctttgatcataaactcaaagctcacaaaattcccgattacttcctcgggagtcattagtgtgtatctaggattgccacgaattaattggacttgagtagggttaaggaaaataagtgatcttaaaataaccttaaccacctcgtggtcatcccatttcttgctcccgaggttgcgcacttgattcaccaaggttttgagccggttgtacatgtcttgaggctcctccccttggcggagacggaagcgaccgaactccccctcgatcgtctcccgcttggtgatcttgattagctcatctccttcgtgcgcggtcttgagcacgtcccaaacttccttggcgctctttaatccttgcaccttgttatactcctctcgacttagagaggcgaggagtatagttgtgggcttgggagttgaagtgctcaatttgggccacctcgtcctcatcataaatcctcaccccctacggatggtacctgtgctccaaactcaacaacattccataatacttttgtggagtgaggttaggtgaaatttcattaaatcactccacctagcataatcttcaccgtcaaaggttggcgatttgcctaatggaacggaaagtaatggagtatgtctagaagtgcgaggatagtgtaaggggatcttactaaacttcttgcgctcatggcgcttagaagttatggagggcgcgtcggagccggaggtggaaggtgatgaagtatcggtctcgtagtagaccaccttcctcatcttctttttcttgtcgccactccgatgcgacttgtgggaggaggctttcttctccttcccttttccctttttgcgggactcttccgatgaagccttcccgtggcttgtagtgggcttgtcgccggtctccatctccttcttggcgtgttctcccgacatcacttcgagcggttaggctctaatgaagcaccgggctttgataccaattgaaagtcgcctagaggggggggggtgaatagggcaaaactgaaatttacaaagttaatcacaactacaagccgggttagcgttagaaatataatcgagtccgcgagagagggtgcaaaacaaatcacaagcgaataaagagtgtgacatgcggatttgttttaccaaggttcggttctcgcaaacctactccccgttgaggaggccacagaggccgggtctttttcaaccccttccctctctcaaacggtcccttggaccgagtgagctttctcttctcaaatcaaccgggaacaaaacttccccgcaaggaccaccacacaattggtgtctcttgccttggttacaattgagtattgatcacaagaaagaatgagaaagaagaaagcaatccaagcgcaagagctcaaaagaacacaacaaatctctctcacttaacactaaagcttttgtggaattgggagaggatttgatcacttgggtgtgtcttgtattgaatgcctagctcttgtaagtggttggaagttggaaaacttggatgacttgaatgtggggtggttgggggtatttataaccccaaccaccaaactagttgtttggtggaggctgctgtcgcatggcgcaccggacagtccggtgcacaccggacagtccggtgcacaccggacagtgtctggtgcgctagccacgtcaccagaccgttgggtttcgaccgttggagctctgactgctgggctagcctggatgtccggtggcacaccggacatgtactgtagagtgtccggtgtgccacttcgcgcgtgcctgacttctgcgcgctctggcgcgcattaattgcttctgcaggtgaccgttggcgcgaagttgtcgttgctccgctggctcaccggacagtccggtgtacaccggacatgtccggtgaattatagcggagcggattcccgaagctggcgagttcagagtcgcttcattcctggagcaccggacactgtccggtgtacaccggacagtccggtgaattatagctgagcgcctttgagttttcccgaaggtgagaagtttggcttgaagtcccctggtgcaccggacactgtccggtggcacaccagacagtccggtgcgccagaccagggcagccttcggttatcccttgctctctttgttgaacccaattcttggtccttttattggctaagtgagaacctttggcacctgtataacttatagactagagcaaactagttagtccaattatttgtgttgggcaattcaaccaccaaaatcatttaggaaataggtgtaagcctaatcccctttcaatactacttgttagaaatttatgtagaatgctattggtaacgtatttgctaaaatagtgtttagtaatgtaggaaaaccagtgaagctaaatggaccaattgatgtgacttggagccatggtgaaccatatcctggacctcatggggctggctttaagtgcttttattgttttaccaccaaaaaggcggggggtgtctcgattaaaagagcatctaggtcacatacctgggagtgtggaggcatgtcgtaaagtgccaaatcatgtgaaggacctaatgtctcaaaaagtaacaaatgggagaattatgagggcacgtggtacgaagcttcgtctgtttatttaaaaggaggttactacaacaagtcatgattatcgaagtgcaagaattcctcttaatgaagaagcacagattgatacgacaatgagaaattcattgagggattctttttccacattggaacatgatagttgttcaccttttgataagtcaactggtagtgcaagtggagctacaagttgttctacagggaagcaaagtaggctctcaaggtactacaagaatacacaagatacctctagaggtccttttgacattgacttggcacgcagtaggacacaagtgcagccacgcatagatgttatgctagagaggggtcacaaagagaagcttgggatagcattggcaaaatggttccatgcttggtgatggagtaccaattccacatgggagagaaatagatggtccattattggatatgaattatgcaaacatggaggctcacacggcgtatgcatggactgattcaatggcaagattttgaacatgtggctctattgtatcaactgtgtgctctatttcagtttcagcacaatattgctgctatatttggtttatgtggcctaccaatatttagagctgtgattgatttctatgcattatttgaactatggactatcaattctttgtgacttaacactagtgttttatttactggtgcaaggatgctaccaaagtactttatttatgtaatattttgattttatttttgactatctcattatcctatgttctctatggatatatattcacagttaatttgttatttattttgccatttatagaatcgttacatgtacataatgatattaggtggtttacaaatgatctatatgtttttctgattaaactgagctgttcattgtaaattttgcccgatttttattttgagaacatcggaaaaaaatcgagaaatccgagacacgtttctcggtgaacggtgaggt

SEQ ID NO: 305 - DNA, 15595 bp, Zea mays
  Intron number 1 from transcript GRMZM2G454629_T01 (locus G RMZM2G454629) derived from phytozome v7.0 (chr-ID 6; pos 9 9336385 to 99351979)
ttcttgaaggtgacgtccttgagaggagaattccacatgtgcataaaggttcaacacaaaccaataaaatatcaaagttagggttcaaaagcaaaggagcaaaggaactgaagggtaccctggtctcgcgcgcaccggactgtccggtatgccaccggacagtgtccggtgcaccaggactgtacaactccaaactcgccaccttcgggtttctcaggtgtagctccgctataattcactggactgtccggtgtgccaccggactatccggtgcaccagcggagcaacggctaacagtgcaacggtcgactgcaacgaacacctgtaaacgctatagtacgcggacagtgcgcgcagaagtcagagcagccgccagaggcgcaccggacagtgaacagtacatgtccggtgcggaaccggactgtccagtgcaactaaaagacaaagctccaatggtcctggagggtccagcttgatccagcagtagtgggtgccccaatcttgaggtaccaacagaaacaaaacaaaaaatttagaaatttctataacagtcatgaagccatgaaatgagggcataaggcaaggtttcaaaatcttctacaataataaccatggcaagctataaaacttagatataagttgctatagaaaaattaggaattctctggattagatatttgttaagatctttctaaaatgtgtacaagtggcacttgataagtgtcgatggctagtgcaacaaacctttgctctattgcctacacacatattcaactcatttgtagcaaatattctagtcctttttagtccttgcaatgatttgcaagtatgaatcatcgatctgatatcaaatacccatgattcactaaaagaaatagccagattaatttcaataacatatataaacaaaatagaagtctcaatttccttagtcttctaagtacttcttgtagttcctagaccgtttctcaaggtcaccacaatgaaatttttgtctttagaagaaaggccagacttagactttgcatttagctttgagatctcatctttagccttgccctcacctttgcccttcatctttagcaaatgtctaggacttaccctattagattaaaataatcaatgagactttgctttggtaggcccaccaagtgatgattagaatctatataaacatagtaattggaagggtatcaaaataaactcttaattttttagggaaactatcctatcatatttagtacatgggtggatagtaaggtaggaaaataaaccatcgcagataattatattaaatgtaggatagaagtcatccatttatcatggtgatctacatcatcaagtcctatatgtggtttctatatttggttcatattattcataatattctctataaaactatgctaggtggagagccggatactaccatgcggtatgaaaatggtttgtccaaataatctatgttgtacactcagaaattcctggtcacatcactgaaagctctatataaatatcaccagattaatcaaatcaagttgatttgaagacaagctaaatgtatctatttttactgtcaatcatattgacaattgtatgacatagagccataacagtatatccaattcagatttcttgacattctcaatctaaaagatacatgtattgttatccctacggtgattctagtcggtagagatatgcaactatactggcaattacctcattttcctaagtggtgctataaccaaagaaatatagatgcaatatactaggagtatcacctatatgcaaataatctagatcaaaaattgtgcatgacctagctctggtaccactgatggaaatcatgcacgatacacactagcatatctaccatgtttaaccaagattgcatgtaactacagaatcatgcatttctactactagacgcaaaacacagtggaaggacacattgatgtagtggaagtcatcgaatgtccttacgtaccaacaacaacacatttgaccatcctcctcaagttcattattgatcaacaccacagtaacaacagtgtcaccatggtatatccatacgtgtgaagatgaaatatcgtaatgtcggtgcgctaacaccatgcatatcgagagaagcggtgtcgacgtatcgagcgtctgcaaccataggaagagacagcggtagctaatatgattctctcaagcatgccagacctttggtacatatagacccttactaatgtgtttttaccataaagactcattagtgttatcatatgtcatgattgtctcttgaacatatattcaacaattggtattaaatatatcaattaattaatatcggtgcatgcaaccgagactataagctaagacatttagtttcgattgtctggtatccgttgaagccagctgttcaggctgctgcagctgcaatctatagagacaaaaatattgtagaaacagtagaaaccggtacagattaaagccaaaggaataagctgacaaatgtttttgtgtagcacttctaccgtcgctgtcccatgaagatcatggggaataatgtacaaggtcctgtactaacacacatggtggatggggtgaaccgagaatgacaacctatctgtcgacggacatggtggatggccgtactgacctggaattgctgcgccaaacaattcgtttttttagaaagttcatatggtaaactattggagggggtaaattaaggttggtgcttattttgttaacttgtctctggtttagcaagtaaattatacatcagagtcctgaagattttctaattactaaaaactactggcgaggaagataaaaataaagccctctatttattttgttcatcgatcacttggcataatcatgcattgacttcccaaatgatttttaaggagggttttggagacgttttgagtgtatgcatatatagagatagattcggtggaatttagcttttaaactgctatgtggtgcttgcaaaaaaacaaaagaaaacaaaaatggcatgtcctggagctcaggtacatgaacttttacattcttctttgaaaaaacaaacacaacgtgaataagtgtctgatgtgaaaccagacgtactctaatacatgcaggattgtacgtaggacgtggtagaagtttggtcaataatatgctactagaacgagcagcagcaacccagattaaaggaaatacatatacgtgggtggtgcttattcgtcactttagtaaaacagggtattttcgacagttaaagccatcagacataagttattttcgacgtacggtcgtaggcttatgttcgacagtacccatccctctgtcataaagggtcaaaaatactcttatttccgacggtggccattggacataagctatgtctgacggcacctttcggccatcgacgtttatcctcggtaacggtagttaacggtcgtccatcgcttatgtctggtggcctatattagccgacggcctatgttagccttcggacataatgaagtattatgtccgacgtcttgtgttaagccatcagacaatgaatttcagcagttgcaaaaaaattatatttttgtacatttctgacatttacatagaaaaccacagatttcatatacaaccacatgtgacggaacctcccaagtcattaggcccacctacagttgtccttgtccaacggacctcagacaaccctacaggtgcccctgaatcacttgacaagttcggtatctacttttcttacctttcccaagagcgttttacccgtcacgcagacattacaagcatcagagttacgaaagtgcgaaagccattacattaacttacctttatttaaaagtaaggcaaagattaatatttacagaccaaaatataacatacgagtgcagagtattattattacaagccaagggaggcaaaaacccctcccgataagttttacacaaaagtttttatggaggatcctttcctcccgcagctttactcttggtcttcttcttttgagatcaccttggaacagaaacaacaaaagtttgttgcttcctcacctaaaaataatagggaataaaaccctgagtatggaattactgagcgagacttacccgactaaaaaagactcttaagggtatgctggttataagggagtcaaggtaaggtttctcaataatcaacgattctgtttgcagaaatgcttactaacagtggatccttaaaaatccagttttatttgtcaagttaagtttaattacctgtaactagagttctttcaaccctagttcaatcacttgacctacactagccaatttcttaacaacccttcatctttactggagttctacgtataggtcagagaccaagttttcataaccgtgaaggtacggagatccgaatcgattatactcagctgaggatctctgatcacatgacatatgtagcacttaacccttgcatatgtcaacccgccaccgaggttcttaagaccagatcaggttcatgccaaccgagagcacagatacaccaccgtccagcctcttgccacggagggtacacgctactctcgccatctctccactcccattgcgtggtatcttattctggtattagtctgcccgaggcaaagcttacccatgacgaggcatgtgaccagttaaagggtcctcggtcagcaggcctacatcgacatggtccttaatcgactcagacggagacactacaccgagactatcttctcatgcaagtcacccgcccgatcttagcttaatcatttcaaatcccaaagtttggtacctgacagaggtacatcttttccgatactgaacccatcatggccatgatggactcaccatcaagttttattttcgaaaacatccctcccactttgccacatcatattttgtaaaaacaaaacattttgttttgctagagcaagactaagcatagtaaaaaccgtttgtaaaacagggattcaaaggaaggtaatcaaattcaaggaaggtaatgcaggaattgttttagcattcaactcctatcacctaatgcatcaagcaagtgagaaagattttaaaagaatcaaggaggtggcaaatgcaccggggcttgccttggtttacaggtgaatcaggctcggatccgaagatatcaaaataaaagcagttgcctgcctgatgttcctcgggtggtggtggtgaagtcttttcttcttctacttcaacttcttcctcgttttctaaatataaccatacataataatgaatgcccatgtaatgctcatgagagtgcaaagatagtaaaagtttattttctaaagtcttgaatacaattttccttcacggttctccgagaacctagggtttccggagttaataaaggaattcaaagggcaggggtagggttttgggtcctaagtatcaaacaaggtccaaatcataccaaactctacccaaggcttctaaataatgtataaagatcaactcaaaagtttggggattttttggagttattatctattttctaaaaatccaaaaacaatgttttaggctattttaaatgctccaaaattctctatttgacctaaaaatcatgaaactatttttattaaattctatgaaaattaggaatttagcaaaattggtttgacatttttaccatttttctacaattttctatagatttctaaagtttcacggaaaaagaaaagagaaaagcttaaacagtgttggggctcatttcagccgaagcggcccagcagcgagcaaattcgcccgcgcgcacgcgtgcccgcgacaactttgcaaaaacgcccttaccggttcaaaattagagtggcggtccttggcgctattcacatgtctcactgacatctacaagatggcgaaccgcgtagggacgaactccggcgagcatgtatcggatgattcacgtgatgactagcgttctactttggcagagatcaaatccaagacctaacgagggtttcccctcaaacaatttcatcaatgggacattgaatcgatcggtccatggaaacagcacggacactcgaatgggtatcgcgttcccggtaattaagggggactcagtgtaatagggttggttgaggagcatcagggaagcacactaatgctgaaacaaggcagcagatagcatgaacaaacctggaagtggctggccacggcgaggtgcgttttacggtggcggaaaccgtgattgggggaagtgagcaattcttggtccctggtggataatccggggcaaggattggtgcaatagatgcgtgattaccctatggagccgcgggtgcactcaatttatagtgatcgtgagcggcggccagggaatttgggttggagatcagctcacggcgacttggatatttcaccgtgctctgcgtatcgtggcgagcgaggagaaaacggtgcaggaggggtaactgactatcctccatgatccctacgacgtggagaatgctttgcggcgtggcacggttgagtgaaacggcgagctccggtgaggataaactcggacggccgtgcggcaagtgtacaggatggccggaccagctagcaatcgcaatccatcccgcccagatctttttacccatccccggtgttatccattcctccccgatcacgaatcgagacagcggtggcacgaatcgcggcggagaggtcatcgacgatgaacagctggcagtcgatcttcttcagtattgtaccatggccattcctcatttagtgcacctgacagccaaagtttagggcgaattttctcttaattttatgtaataacatgatcgacactctttagcaaagttatagctctaggatccaactataatcttggtatagcaaccctaggcaaattcttgctcgatcatgccagaattcgtgcccaaagttcttgtagttgtactgttagtctgaaattcagacatcaaacagcctgacagcctgactttgggtttaattatctccaaattcttcataacaacaatgtttaatcccttaaacaaagttgttcacctttgatagatctacaaaattgatgtggtgacctagggcaaattctcaataatttggaagatatagagctccaaagttgagccaatgtcattgaatttcagactaggtttagaactcaaataggttctttttgcaaataggtgcaaaattcagggtttagcttgcaaatcttcatgattatgaaccatatgacttaagataccttactttcatagtttttgtactttagtccaaacatgcactgattttgcacttagccccctagggtttaggtttagggttttctagggtcctttttagggtttttggtatttcaggggtgtgaatataatttaggtcccttcttagtaacattttatgactatttcacttaagctttagggttttctctttttggattttgttttacccttctaaaccccatttagggttaagtaccctactccagggttttatttgcaaaatgccatatcaatacaacttgtttgaaacttcagcctagtgaatgcattctaggtgtatcaaacacatgaaatgctaatgctgatgatgttatgctcaaattttagtaacagtaacaccaggggtgttacaccacatattcacatacattcacaaacatcaattcacataagtattcacattcacaaacatcacctcacattcacaaacatatagttccaaatagttgcaacaagtcttttacatcaacatatagttccaaattaaacactgacatagttcgacacatagtccttgacatgaacattgacatagttccaaatcaaacacatttgatgaactatcactcatatccgtcacctggttggttcaagttatagccacttcctccggctggactctaggtgttgaaaaggttgttcacctcagaattcgatgtgtcgtcttgaccagacgcatctctaggtgcagcaactgaagcggaaggtgtctgaaatccctataacacacccacatgaaatattaaccactaagtttatcattttaacacataagacaactatgaacatgtcacacacgtatatgtgtacataccatatggaattaaggcagggtggaggcaacaacattggcatcgacagtgcaaagtccagaggcggcatcccatatgtcggcatcgagacgcccgcttgttgtgctagttgctacaaattagatgcaagccattgttgagaaaataaggtacacatcatgtgtttttagttgttatgaacaaaatgttacttcaacttaccgagagtagagcttgattatgggcctggaggtttgaataatactcgtccttcttcttctagtactcagcttgttgcctctaatactccatttgtttccctcaaaactgatttatgatactctgcatgctgacgcaacactgcaatctctatctcttgggcggatgatcgagaacgggacaactgcgaagatgaggatgtggactgtcgtccacggtgtctcagctccctagaatcaatcgtggaatcaaaaatacccaacctacaagagtgaaccatgcacttagtagagtaaaccatggactcggttcaatcacaagcatatgagaacaattttgaaatccaaataaaatactctcatcgtccatgggcttatcctcctgcactagcatatactacctaagggtcgattggttggttcctccaatcgtagtcctgcccatggcgctgaaccatctcctgcccatacaaagcctggaggcaaacataccaaatataagtgcattaccaagttgatgcacaaacacataatagagtaccaaaaactcactagacggtcggtggttgtctgagtgcataaaacatcaggattctgtggatcagaacccttatgcccttacatatacacctccagattcgtaggcatacaggcagatttgtcttcctgtacatacaagttagaatgacacatttctatgtaattcgaagttacaacatactatgacataccattcgcttagccaagtgtacatgtcctcaccgtcgtagttgtggaacgactcagtaccatggtttcccatgttcctttcgaaaatggcatgaaactcaggggaatcccaccacctgcacaaggcccgataaccctatgattgggtggccatccaaggcacagacacctacatgaaatgtttttccatcaagcaaatagatgcattgacatgtacccaaaacaagaatcagtaaaatacgatatgagatgcaacaacttgtttaaaagcgtttctatcgagcctaaatgggtgatcctctagcaaaaaaacatctatggcaatcgaagtaacatatctttccaccaaactttagtcagaagcataaagtgtcttcagcgcatatcggaaatgtcagaatcccatgacaactccatccagcaaagataccataagccataaaatcgtgaatagaccacaaaaacgcagctctcaggttgaacttctatttcttgtaacaatcgtacgcctcgactccttcccacaaaattttcaattcttcaatcaggggtctcatcatcacatcaatctttgttctaggatgatccggactaggtattacaagacataagaaaataaattcatatttcatgcaaagagttggtggaaggtcgtatggaacagcaaatacgagccaacatgagtagtatggtgcagttagattgaaaggtgagaaaccgtctattgccaaactgaagcggacatttggcacttcaatagcaaagctggaatcaaaggcatctagtaccttcgatgcatctatatcagttgggtgtgccatgacatctggattctagcgtaccccttctttgtgccacctcatgtgtctggttgtattcttggagatgaacaaacgtttcaaccgagttataagaggcatgtaacgaacctgcttacgtgctatctcggttttcacggtcaaaccattgtcattttcaacctctacgaatctacgctcaccacatactttacacttcttctcactcatggtctccttccagaaaagcatatagttgttgtcatagacatcgattttttcgtagtccataccgagatcagatagcaacttcttggactcatacatgtcctttggcatcttgtgattctccggaagtacatcactgatcaagttcagaagctccttgtagcagttgtttgagaatgcaaacttagacttaatagtcataagtcgagtcacgaacacaaggatggtcactttcgtgtgctcgtgcaacgactcttcggcagctttaaggagcttgaaaaacttctgaacctcaggcgtaggaggatcctcataatcggagggttgaccggggttctccgaatccacgggtagaagctcatggcgtacatcgtcaagcatctcttccatcctatcgtagacctctcttcatgtgactgaacttacgatacaatacgaggaggtgggtcctcaccgtggtgcacccacacctcatagcctggcatattaccgttcttacaaagatctatcgacatagtccctgtcaaggaaataaatgttccgacacttgctacaagggcacctaacatcgattccagtctccaatcgagcaaaagcatggtcaagaaacgcgttagtcttggcaacccactcacttgataaaacacctcttttcttccaaccttcagacatccatcgacgatcctcctccatactagatacgagacgttaacttaattagttatgattactaataaaccacactaatacaatattacattgaaaaatcatttcatgggaccctaaatcatataaaatgatcttattttcgagggcataataattacactcggaaattaaaagtttaaattatataggcaccactaaataaactaaaacaagctaatttaattacataataaacttaggttgtcagacataacaaactaaacataattaatagcaaacaatctatatgcatatacaaaataatactaaaagttataaaattactcacttagctcgacgtagagccagtgaagcgagcgccggtggggtcgaggcaggcgccgacggcgtcgggggcgggggcagaggctgaggcaggcgcgggctgcgtcggagcggctccggcggcatcgaggacggtgacgaaggtggccatgggctcgggcagcgtcaggggcagggcgggcgggcgccgccgtaggctggggaggtgctcggcggcggcggctggtgggtggcggcgtcctcagcttgtgtgttccttgaagaatggaactgaaacaacgtgggcgggcgctgacggggtttaaatcccttatgtccgacggcctccctaggcgacccgtcggacataaggttatgtccgacggcttatctaatagccatcgaaaataaccttatgtctaatcgtccgtctaacagccgtcgaacataggatcttatgtccgacggctgccttaggccgtcggatataacgttctatccgacggccacctaggaggtcgtctgtcacccggttttggaaggtaaacagaatgcgaaccatgtacgtgccaggatcagaaactcacttaaaaacgattacataattggacatcatcacacattgctcaatgtaaatagtggaaatagtactttattacatcaagatgtccaagacatccacggagtcattaacataacattgtcattactattatcaaagtgcggaaaagcgagtgtatctgataaagccttcacaggcagctgactgggggttcaccactaacataactagaactcatcgtagtcctggaactcctcaaagtcctccatgttgcctgcatctcctcctgagcactgaatatattggcgataaccttgggtggggtggtttttaaagcaagggtgcgtacacatcaacgtactcagcaaatgtcccgtttggctaatgtggactagctgtatgtggagttaaggttaagcaattgcttttagttggtcagatatttattacctagtagtaaagccatgttttagcaataaacccagttattacccaaaagtactccctccaagaggaaatatcattgatcagagttatatttatcatcattaaccataatcataaaagtatcaaaagttcttctaatcaaagaggatcccaaggctgctcttaaccgtgagcatggctgatataccagtttctaacactctacagaggttgcacactttacccacgagtcgtgatccctttccagcctatgttgtacaaactcgatcatcactaccgaggtgaatggctagggatacactacgtagcctttacaaagattcccaagaggtcatagccgcccgttaggtttctctagtttgataaacatagtaattctccccataagaagggtgactaacaaaaccaaatcgaaagaacctcggcaaccagcctcggcagagaaagtgttgtgcctggaccccatagacggccctacggcgaagccaactacacctcaagttcctctaattaatcagctaagggtgtcccattccacactcatggttgtactgttatcccgggtggtcactcaatgaacaggtcctttcggagaggtacacaggaaatagcctgagtcccctaaagtatcacaagatcatcatcgagataacatcattgtatcataaagattcacatcatgttcattgattaagttaaagcaatagcataaagcttagaaacccaaaaaggtaaacaaggataatgtaaatacagactagttaatccttaggtttaaataatgtaatgcgggacggtgaactataaagtaagtaggacatagtaggtcagaggactcttgccttcaccaggttgttgctcaggaagatcttcaacaacacactaaggaaccatgagctgctcattgtctaaacaaagcgatcatgcattcaatgcaattggataaagacaaatgaacaatacaccaaacatatacaaccaagtgaacacaagtttgacagagcaatgtaaacacaaaaggtcaacttaggtgctagagtgaactagcacactagtggtttgtgattccctaaatattatctatctccatggattgcataattttaattccactaattttagtgagacagaaaattataccagggataaattcatacattacatattattaatctcataaggttaaacatctaattaccattagggtttcctttttattttcttatttagtaaacaaactattacatatactaacctatagtctaggcataaaattaacacgtacagacagtgaatgatcataatttatttggatagagaataatcctatgaacattttgcaatttgaatcactccatttgaagttcatatgcaaaagatatgaaataaacaagttttgaagtttaaaatacaaaattaggcctaaatttgtgaataaatagaagtctagggttcaatccgtaagattacagaggcctgcgcgtgaaaaccagggacaacgggttgatttctaaaaagcgagggtctatttagcaaaattgccacgcgaaggggtacggggttgcgctagccgtctgatctccgaccaaaggtccaaattagaatagcgagcgagggcgcaggctcttgacaggtgggctcgggtgggttgaggcactgacacacggggcccatgggtcagcagtatgaagaggacacggggcgcgttggccactggattgtagatcgatggctctggttccacaaaccacgcgaaccgttatccacgacttcgggccgtcagatcaagaccgggctgttcggattcggcacgaggggtttagtctcctctagtcagctaggggtggcgctctccgcggacacggcggcgcagtcgccggaggcgaggcagaccggggcttctaggacactgggggttggtctgggtagccagagaggttggggaggactcggcaagcactatggcaaggtctgggtgccgagaacaggactaaggcgggcagacagtggagggggaccctcgggcgaacccaagcttactctggcgagcaatacccgtcgcggtgagggttaaaccggcgctctgcggttggcataggctccagggagagggtggggtgctctaggcctaagttcgggctcagggaggggttgcagtggtcgaacgccatgaagatgctgtggcccggctaggggcaacttcaatggctgaaatcccccacgtatagcagaattggcgcaaaagaaggacacaggaatgtcacttacccagatacggtgcttcgggcagcttggcacggcgcgatggggctctagttgaccggacgttgaagaatcacgacggcggcgagctccgacctgcgcaggggagaggtggagcgcaaatcgggtagaggatttgaggaaaggggaaaccttcgtgggttcccggtgcgccaagctcaggcaaagctcaccatggccaaagcgctggcagaagtccagcggcgacaacagaaaggtgaagcaacagcggggggcggcgttgcggctgggtgagtgcgagggcagggaaagagcgaatgtgaggcaggggcgagctgagggagtgttcggggtcttcacctagcactcgggtgacatgggcaggtcgtggggatgtgggcacgctttgaccgcatgggcgcacgccatgggcgcgggcgcgacagttgtaggggaggggatgggtctgacaataggggccgcgagtcagcgagggaacgcgcgggcgagcagggcacggtgctgatggggcggtcccactaagaagagagggagagggcgagcggggcgtggcgccgataggtggggcccgcttgtcagcggatgcgggaggttaattgggctggatgggccgaaaggccaaggagggaggaggttcgagctgctttccttttctttttttgaaatttctaatgtcttttctattttaatttctttatggttttcaaatcaaactcaaaccaaatttcaaattcgaaccaattcaaacatgtgcatcaaacaaaagaataatttaggctcagcatgatgcaacatttcatgactcacataagctttgacaaaataaataattaaaccctcgcctaattcacttacttttaatcaaaaggaaaagagagagagagacaagaggtaacacctgaatttggttggcatttagagaagaaattttataccctcaaattcagggtgttacaccgtcgaacataatattgctgttggttgtctgtcgttttactgttgtccgttaccaatggatagcaacaaatgggcaatgcaaggacgagagaaaaattataactagagagatgggtcagtcgacggagggtcaagaagcatgcaagctccttgaggcaacccttggtgctgcccttggcattcgtgcatatagccatggtcttgttgttggtgccgctatactcgacgttgacgtcatccatggtgacgccggtgcatgggaccttggctgtgtagagcaggctaacggcctccggagtggaggaggtgccggtgatgttcttgaaggtgacgtccttgacggtgaccttggaggcgccgtt

SEQ ID NO: 306 - DNA, 4349 bp, Zea mays
  Intron number 1 from transcript GRMZM5G829831_T04 (locus G RMZM5G829831) derived from phytozome v7.0 (chr-ID 1; pos 2 00683092 to 200687440)
tatctgctgctcatctactggtgcgtcctgcccgcatttccgccaccaggtagcaccgcctgcgcggccctctctctcctgttctttacacctcacctccggatcgctcagatatcgagccgtagtccgactggtcgccgcgtgcctccccccatccccccgcagcagcagagcaccacagcgaccaatggaggcggtggccgttggcgtggcactgggtggcctctgtatctctgtccgtcatttctcccgagtttgcatatgatgtgtttgtgtgctcgtcgggcgaattcgagtggagactggagaggtgggatctgtgtggccaacaaggcatggctgcctggatccccgatcggatgcgaccgcccgttgattaagggaagaaggagcttggtgggagtgggctggggctgcttggggaatccgatccggcattgcctctgattggaattgacaccacatcaaggttgttgtgcgcgacttcggtgcatagttaccatttccactgccatgtagtcaacaacctcttgggcgaaatataggtatatcggaaactagggttgccttcagatgaaattgcagatttgtagtgccgagttggaatgtcagggtaagtttagcatcttgctgtagttggtgacctccggttgaactttccatgtgaatgagaattatgtaggttttgattgagacttggaagtttattcctttaaggataaacaaagaagagttcggttacttgactgttgctgcacacgtctgtccgtggtgtcctggtgacaggagctgagtatcctaaccagctagctaagctacaaactctccaggcgcagtgaagagaagctcacttgggtcgtccgggttgggagcagacgcgccttggggacccatctccactgcaggcagatgttctcgatgttcgggtggaacaccttagtcattcattcgtcagttattcagacattcactcagtcgttcattcaatcagctatttagggtgtgtttggtttaaggaatcactacatctaaattgaggtggtgcatcatgggttcattcctcaaatttgatgggatgacctcattcctcattttagtactaactaactaactatgaggaatggggtggtgatggatcaactcattctattccacaaaccaaacaaaaatagtggggagtgagaagatgatggactagctcattcctcaaaccaaacaccctattaggcactaattcagtcattcgttcgttggtttatttactcagtcattgattcgatcattcagtttttcattcattcacttagccaatcgtttgttcattcattcacttttagattaatgtttgaatgcactagaactaataattagctattaaaattagctaaagattcaaaccgcacggaacagccacatcctttgcatttgcaagcgctgcgagcctgcgacgcgcacacatgacacacccgacctgacgctccggcgcttggtgaggtgacaccgtgataggagttggcccaattaaggataagaggtggtgctgaggctatcttcggcgcagctgtatatagagttcactgtttatagaaaatatgaagtgagataagagttaggatgcgaaggttgttgaagatagcttgacaataaaaagattgctccaaatctgttttaaaataaagcaaacaaaatagaaaaaaatgactgaataataagaaagatcgcaccaaatctgtttgagaataaaattaacaagataataaaaacgattacataataaaaagtattgccttcaataggtgacataatttaatacagaaaaaataattaaacacagtgcatataccatggcaaatgtttgccgaagtgatttatcgtgtcctcaatcgatacaagtagcgattccttgtatgtatctattgtttttcatctaaaattgaaacacccttctattggcagtagtggcaacaggctcaactgagttctctctttttcctatacacactaatgttagagagatgattacattatattatattccttcttaataaggattgttaagaaaggaatggctagcacactttgtaattttgatggcttcatttattgagcgatcatattaatctgcattgtaaacatactcaatccttgtagacaaaatactttttatgtgcatcagtgcatgtgcgtcctgtgctgactacgggctcattggtcttcatctctgtctacttcattaggattatgaattcagatttgttcttaacgtcaatgttccttcccttcaatccatagatgtgtctctgtaaaaagagcaaaaggtagtcaatacacttacttttcaaccatcatttttatagtagcaatatgatgatccaagcctccaacaacttcacatcgtcagaatcaaagaacacatagtgcactgtaaaccattttaatacagatgaaactggactttacactctccaaattgcacaagcttctcagccccttaacccacccacctgcataaacatgtacacagaaaaacgccaaggctgttggagaagttcttgctgctcacagcatttctaaaattaagggacctcaccatcagtgatattccaaacatataaaggtggctgacaactctatcaactagcaatgaagaggcccatgtgatgttcttcatggcagcacactccgtgtgttaatggaaaaattctagattttaataatgcgacaattgatcatggatcattattagaaaggtaagggttttcatggcactcttgcagtcttgcttttatcctctgttttcctgataggtttatttacctcagaacatttggctggcagattgagcacttatggcttagttgaataccaaatagaagaggggaattgcaatgttagcttttttagcatgtacaaaatttctttttcatctgtatgaaggggcttaaataggctttttccaatatctaaagatagcacacatgctttccttaagatcattcatttgaaactccgctgctatcgatgcatatgtatttcgatacatgcacacattgcttttcattatccccattctacctcaaaataaatatcacaaatctcattattaccttttcaatttcgtatgttgattgattattttgaaagaatgctaaactcttattataggttgcagcccccaaaagaaaagtattatttccaaactcatactccttgcttccttatattctttagcaatgcactcaattttgtatttctagctttatgtcccttagatgaaaatatgaaacaatgttgggtccatagctacttttttacgaactaagtagtagtccatttatctaattctttgggcatgtcctcgctgcttttttttgctatcgctttagagaattatctcaaaagttatctccttttgaaggtagatattgcaaattcaagcaaactatagtaaaaatagaaaatatgaatgggtcttgcttgggtacaggttgcctcttgcaaactgatactctccgagtgaaaaggggcaaagccttgcctttctgaaaatttttgttcccaggtgcagtttcagcaaatttatgagcgcaaactaggtgctgagttccacaatgttagcttattgttacatatttgatttttttctcctgcatttcttatcaagatttgcaatcctgaagtttccttttgaatgaagtagacacaaaaaaaatcaaaagaagttcacatgagtactgttttcggcgagaactgttcctttttccatttgacactagcagaagtctcttactctctagagccccagatgaagacatcatcgactacgtgtgtatctcctaccagccagcctttaaactttaatcattctctcctcaagaaccacacaatacagatgagccaatcagtcctcaactcttcgtcaggaatcaaaacaagcttatcattggtttatgtgtgcacccaccattttaactctcaccaaacctctatcttttcagtttaggccagctaccatcttaaaggtctatacgatgatttcaaaatcagtgtaagctcaaacagcgccggtgagaagccaatgctctagatgtggcatctaaatagcacgtgttcgaagggtacgatcccaatcataagaaataagaaggatgacttgcttcgagcagctccattaagcggtatggcaggaagtgacatactgctccgaacctagtgtttgtttgttttaatatgttttgtgaggatggtcaccaagtatgtccacatggtttgttttgctgaaattgaagagctcggtagctacattgatatgttgtgattactgaactattgccattacttgatgcagc

SEQ ID NO: 307 - DNA, 1172 bp, Zea mays
  Intron number 1 from transcript GRMZM2G126714_T01 (locus G RMZM2G126714) derived from phytozome v7.0 (chr-ID 8; pos 1 52891801 to 152892972 reverse strand)
acatcaaaattatcattatttccttctttttgagggtaaaccgtcatgtttccaaacaagccctcacacagtttgaaagataaccccatatatctaccgaaatcaccacaaaagatcaaactggtcgtcttcggcagacatcttaaaaaataatccaacagtttcaaaaataatccatcagtttcaaaatagtgatcgttttagccattgattagctattaatttttatatctatattcaaatacatgaaaatgaatctagacacatacttaaaacacatatcaaccattagttaactaaaacgaattttgggacggagtatgacgctacatgtagaccacttgaaataataaagctatgcatgcatcagaaacgccagcatgtagttagaacttggcgagcaggtcactgatttcaaataagatggacagacacctagttagaacgttcgaaacaaatacagaaatcgaaagagcaattggctacaaaacagaggcctaaggacataatgttactgctgtgatacaaaatattacagtatgttgctctgatttttgctctcagtttactcggcgcttcagttgttccctgagttgatttgtgcagtgtcatcagacagcttgtctgattcaaacttggcacctgatctagacagacacttccggcgaacctggtatcagtcttcctcgtgcttccttttagaactggagtgatgctccctccgatgcttgtgtgacctcctgtgttcctcatcagagtgttcctcgtcagagtagcggtgatcatctctatgcctatgccttgatttggaactccaacgttcatgctcatgctcatcttccgaagagctacaatggtgtctatgatgtctggattccctgtccttggagtgactcttgttcttatgtttgtgaacatccttgctctggtctcttgaatgctctgggcgatgcttcttccttgagtgcttatagctatcctcagattcatctttttcctcgtcggattcttggtgtttctttctatacttccgcactctgttctgttcatcatcagagtctttactatgttttgtcaagtttggcccctcatggtcaaacagaacagagctactaccttcacgttccttagccacagattgcagatcaagtccagaggcattcatatcagga

SEQ ID NO: 308 - DNA, 14190 bp, Zea mays
  Intron number 1 from transcript GRMZM2G173186_T03 (locus G RMZM2G173186) derived from phytozome v7.0 (chr-ID 2; pos 1 99653297 to 199667486)
tcgtgatcggcctcatcgagaaccgtgccaaggaggttagtcacgctctaaaacccctccgcattttcccggttgctcgatcaatccgtgcggattttgttaatttctctagtgaccccgttatcctccgcccggcgtcctccctgttcgtcattcgcgtgcgggtcgaggcgctccaactgtgtgagctgttatttcgtcggattgcttgcttcgattggttcgctaatgcagtggcttcgttgaattgcttgctttgattggttcgctgctgttgcttcgtcgaattgcttgctttgattggttcgagtaggacttttgcagctagttattcggttcaagcgttgctttccattgtgctcgatttattcttctagggttcaggggttctgaggattagcctttggattatcacctcgacttattcttctagggtttaggggttctgaggattagctttggattatatgtgtacgattttcctcgtgatgatacagctgttatacagtcgaattgtgtctgcaatgaacccagctgtcgaggggggcaaaaactatttccgttccctgctgttgaatggtccactaaaactgatttgataagatattctaattttcgttgtctcagagtttattctgctttctagttttacgtagcacaagattcatacattttattccaagggacagcaccataactacgattaagtagaaagttctataggacgaggttgccaatagttaactaaactttgataatggattacaagctctttattagccgggaaaaagcacaaatgtgaaatgtcatgatcattttttttctaaccctattgagacggcatgttagcaagtagtggcggaggacacgccaaaattaaggtattgctaaagcaatgatgaaacagaaataaacacaaactcttgcgggagattagacaaaaatcgctccatttggatttggacctgtgagctaaaagaagcatgctcaacagtgttttcactatgcagcagaatcactttcaacctttttctcgaaaaacgcaggagagctatgtttcattccattaagaagaaaaatagataatacaaaacagccaccccacgagggccaagtacaggcatactgatactcatccatgaataaaacacccgaaactacaaactctaacacaaagcctacagacctgggatgcgactagttagcaaggatagctttcttgctctagccagctcgcacttctctcgctcttgattagccatcctatgtgatatcctggcccctgagacagtgatatcctggtccaaggcttaatagaattaatagagtatccataccaacaaggtgcatcttcttttttagaagcctatctcaaaagaacctccaagttaagcgtgcttggcttggagcaatttgggatgagtggccgaccgaaaagtttttagggtgcgcatgagtgaggacaaagtgcacacaaaagactcatgttggtctgtggggacaatatatgatcctatagagctgccaggagtaagtaccgtcggtccgggagtggacagggtgttacatcctaacaacaagatccacattaggtttgtttccgtcgaagacacaactattccgatgtttccacatagtccatgctcctaaaattcagagccaagagtagagagaagcacacccctgctaacacacgacatcttcgtctcctagaggcagaccatatcaataccagaggagtcaactagagtgcgaacagattggcgagctaaggagttcaaacctcttacattccaaatgagcaaacattgtggatccatgagtaaaaaaagggaaaacactacccaaacagaaaaaggatgggcctaaatgctcgctgctcccacttggttagccttcataaggtcctcaggggcacccgcccgaatagagctggcagggccttgatgtgtgagtttgacaaatcgtgcttgaagagtttagcatactcatccaaagccctttggtccaggccttcgttttcttcaataatgtttactgccttcataactttcctggaggctcttgtcacaaggttagtcgtagtgagttcaactccaacactagcgatcctacggctgcgccgaggaatgtaatcatcttcaattggcttgacatgttttttcttgatagaagtctgtcaggttggagagtgaccatcttgataaaatcctcacgacgtggggaaacaagagtagccgcaaccggagcccccaaagggacttcaacaactgcagcatgctcaaccgttacccggataggggaagaggctgcaacggtcatgtcagggatcaactcgccaaccccaggtgtaagaggggtcaagtctagccctggctagagctgccattgcagctggcccgaccacgaccgaggcaaggtaccttggatcctccgtagcaaggggcggtggcgaagcagggggagaaccttcctcaattggaatcgccaacgcaactgccacggtcgcggaagattcaccttccccaactagcgaagcagggggagaaccttcctcaaccggagtcaccaacgcaactgccacggccgcggaaggttcaccttccccaaccagcgaagcagggggagaaccttcctcaaccagagtcgccaacgcaactgccacggccgcagaaggttcaccttccccagccgtgggggcgtcaaccgctcggagcgaggagaccgtcgccggcttccagcgaagccgttttctggtgtagacccgaactggtgggtcggagggaccacacaggccgtcgaggcccagagcgcgccatctctgggaaggaaatgacctaaaacctggcccatcatccactggagggctaaagggcccaacaggacatagagaggtgtccaccaccgttgaaatttgaagtcttgagcggtccgcttcgcctcccacgccgcttttaatgacaggctgcaattcatcgccacacgcgccacctttactgaaatggctcttgggagcagcaggcgtcgctggggataccaaggtccgatgcaaaaggctgttcaagatgcacttgaagcacaacgcttcgatcaagcccctgcccattaacatcatgtaacctcctgttggatgaagatccagcctcatgctgggtcggtcgccatgaacgttgagaggcaccaggccggccgtcgccctcgatgccggcggcgatcgctgccgccatagacgacgattgaagatcgacccagatcgacattgttcttgcccatcagaataatctttcagtgaaccgtagaaaatcaaggatcgaaagcgttatgaattattatggaggagttcaaccaagtaagaagcatgacactctatgactggatggacaattataaagttattattattatatgaacacgtctaacattggaggccaattaccatccaaactagctatcaacactacaattgcaagaccagcaggtcacctagacaccatacccactacttttcgaatcatcaatcactcacaaaagggcaccctagaggccagaacgagagatgcctgtgtacctttgcgattttgactggcagcgacaacgagtacctggcgagcgcgagcactcaggcaggaggcccccagcgaggaacacgagctttaggtggagcagctgctcggcactgtcctgcgccgtcgtgtcagccataggcgcctgggtgggcttctgtttaaccgtccttttgagatgtgagctcgcacaggaagaggacgcgaccgtttctcttttgtttgaggctttctgaagggctctttggggaggagttcggtttgccggcggcttgtcttgctcggcagcgctttggcatggacgttccccgacgccacgctggcaactcggcggaggtgggaggttagaggcggatgggggcacggctgcctgaggcggcgaagctgacgaagtcgggaggctcggcgtcgacggtgtagaagattagaatttggggcaattggccacacctcaatgggagggggcgccttctattatatagggccggctggccttgctttacaaggcaagggtaatttccttgatttacatatgctaactatagcaactaatccctgatttacagcggctaattatagctatgatatgccgcaacatatggtaaagagctgcgacatattctattgcctaacatccgctcgcaggcgaagcgggaggctcccggacgcaaaggccggatcgaaattctcgaaagagtgctgtcgaaagccctttagtcatgatgtcggcgaactggtgagaggagggcacatggagaacccgaatctcaccaagggccaccttttcgcggacgaagtgaatgttgatctcgatgtgcttcgttcgcttgtggtggacggggttggccgtcatgtagactgcactgacgttgtcgcagaagacaacagtggcggaggttagctggatgtggagctcctggagtaactgtcgaagccagcagcactcgaccacaacgtgagccacaacccgatattctgcctcggcgcgggagcgggacaccgtggtctggcgcttggaggatcaggaaaccagattgttgccgagatgtacgcagaagctggaggtggatcgtcgagagtttggatagcctgcccagtcagcgtcagagtagacagtcagcgtgtcgatagagccggtgccaatgtgaagacccgaggagagagtcccctggacgaagcgtaggatgcgcttgataagtgcacagtgaggctcacgtggggcgtgcatgaagaggcacacctgctgaacaacataggccagatcaggacgagtcagcgtcaggtactagagagcccctgccaggctcctgtactcagatgcgtccttctctgacagtagaaccccgtcggtcgcggatagtttggcgtgagtgtcaacaggtgtcggtgtcggatgacactcagccatgcccgcgcgctgaagaagctcgacagcttactgtcgctgggagaggaagaggccatctgaggagcgtgtggcagcgatgccgaggaagtggtggagggcaccaagatccgtcatggtgaacccggagctcaaccgagccataatgcgctgaaggagggccgaggatgaggcagtgagaacgagtcgttgacgtacaacagtaggtaggcgaggctcgtcccctctcgaaaaatgaaaagggacgtgtcggaggtggaggcgacgaagccgagctgccggatgaaggtggcgaagcgctggtaccaggcccacggagcttgcttgagtccatacaaggacttctgcagaccgcacatgtggtctggggcaccagggtcgacgaatcctgtcggctgttgacagtagacgacctcctcgaggtggccgtgaagaaaggcgttcttcacgtccagctggtgaatcggccaggtgcgggacgcgacgatgctgagtacagaccgtatggtggccggtttgacgaccgggctgaaggtctcgtcgtagtcgacgccctcacgctgggagaagccttggacaacccagcgagccttgtggcgagcgagggacccatcggcatggaacttgtgccggaagatccgcttccccgtcacgatgttggcgccggggggggggggggcgagttgcaaggtgttgttgtcgacgagggcctggtactcatccatcatcgcggtacgccagttggcgtcggccagcgcgctgcggtagttcgtcggaatcggcgatggtgaggaggatgtagtggccgctagcctttcatagcgaacgcgagggatggcacctgtcatggtgcgggtggtacgtggcggcagtggtggtggtggcggagcaggcgatgccgccggtgccggtgagggcgccgtcggtggtgtcggggcgtcaagaggggcagccgccgctccggacggctcggggcggcagacgtagacccgtggtaaagggaccacgctgggtccaggcgggggcacgtgaccatgcccgcctggtgtcgaaggaggcgatccatgtgatgtcgcaacgtcggggggtggctgcttaacatccgagggggatggagtgaccacgggcggcgaggaggaagtcccacctgcaacaacagtagagcaaagcaccgaaaccatatcgtcgtcgatgagaaagtcatgggaggcgtgggaggaggcgtctgaggtggctgcaaaggggaaagcggtcttgtcgaatatgacatggcggagatgatgcgacatgtcgataggtcgaggcagcggtaacctttgtgcgaggggggatatccgaggaagacgcatgccgtggagcaaggggcgagcttatgtttggaggttgcttgcatgttggggtaacagaggcacccaaaaacacgcagatggttataggttggcggctgattatgcaggcgagtgtatggaatgtcatgcttaatggaggaggatgggcgcctattatggaggtagcaggccgtcaggagtccctcgacccaatatgcggggggtagggaggcatggagaagcatggtgcgaatggaattgttgagtgtgcggatgatgcgtttggctttgccattttggggtgatgtgtagggacaggaggagcagaggtgagtgccttgagcagcgaagaatttagtggtggcagtgttgatgaattcagccccgttgtcagcctgaaaacattttacgggggagctgaattgtgttttggcgagcgcagcaagctcaactaagtgttggtggacctctgattttttccggagcggaaaaacccaacaatagtggctataatcatccaaacataccaagtaatatgaaaaaccagacaaactgttgatgggggaagtccaaacatcacagtgaactagttcgaaaggggcatgagttatggacagcgaagaactgaaaggtagatgcgtatgcttgcctatctgacacgagtgacatagggaacggtctactttattacaagaaacaacatgcactttattagggcgttctagagtagcgggtgcagggtggccgagacgttgatgccacagagtggacgaagcagccgggagagcatgaggtggagcggcagctgtggaggcaggcatggtgtataggtccccgtcgcagttacagtggagaatcacgcgtcccgtcctgagatccttaacaaaaaaaccatgtgcgtcaaattcaaaggaacaactattgtcacgagtgaattgacggacaaatagcaggttgcggactatggatggtgcgacaagaatattattaagagcgaaatttgtggtaggtgtaggagggatgaagtgacctctagacgtaacaggaatgctggtgccattacctactgttattgaggagctggaggggggaggcattgggtaagcataccagccgaggatgtcatgtgcgtggaggcgccggagtcaactatccagtcgccctgcagttgcatgttctgcagggcagcgatgatgccggctgcatcccaggtgctggtggaggtgttggagtcgctggaggaggtctggagcggagcgaaggcggtattggcctgcggggaaggccctagtatacccgggttgtgtccagcctgggcaccaggacctctgggggcaccaaaactgccctggcggcgctgaccaggaggggtgacgcgctctccaggggccacacgttcgccggtccagggattgaagccctagagaacgcgtttgtaggtgctggtgctgctggaggtgccgccggaggagttttggaagggctgctggccacccttcttggtgttaggacgccgaccgccctgcagctactgctgttggtgaccgccaagagaggaggcagtagccaggagggcggtggtggcgcgcactttttcctcgttttgcaggcgcaattctttgaggaggagctggtgccgggcggcagcgagggtgaggggctgcgtcccggcgatgttgtcggtgacgttggagtagacctcgttgagccctcgcagcaggttgaggacaaggttgggttcagagacgggctgcccagtcgcgcagttcgtcggccttctccttcatgcgaacgtagtaggcgtcaacggacagatccccttgagtcatcgattggaactcgtgattcaagaggatggcgctaggagctttgttcgcctggaacaccgtgccgatggccgcccaaagggcgctcaccgtctgcttgtcgtcggtcatggcgaggttgaggacggcgtcggagacggtgctgtacatccatccgcggacgcaaaagtcagcctgcagccaggtctcgtcggaattcgaggtggaggcagtggcgagatgatgtagcagcccgaatttcccacaggtggcctggaacaccgtcgaccacttggtgaagttagagggcttcaactcaagggtcatggggacgtggagcttgatgttgatggtggcgaaggggcagatcacgggacaacatcgcttttgagagcgccgctggtggcagaagagaggtctgattcggttcccatgcgagaggtcagcctagctgttactactgatggtagtcagtcaacttcgcaagagacccaaacaggcagtacgcagctcaagaacaaacaattccttagcaagctctccaaaaagatttcaggcctccttgcaacaccagaagatcccccttttatgacgtctaaaaatgcccaagttgcagaaattatcccacgccgcagccgtcgaattgctggcgtgggagttgaatttgacaacatggatttatcctcaagaaccacaaagaaagttatgcaggccttgaaagtaattggggatcctggggcagtcacccagcaagccaaagaagactatctgaaagtattctccactgaacttcctatttcacatattgaagcgctggcgtccttttttggatgggtagtaccagatgatctcaaggagggcagcattagtgttggcattagtgcctgttgagttgtcctgtagaggtcgctgatgtaagaggtttgtaatggatccaaaaaaaatcttgagctggaatgtaaggggtctcaattctacatctaggcaatgttctgttagaacttgcattgatgcttgtggcgcagacgttatctgtcttcaggaaacaaaaatgcaggaaattaacagaggaaaggtgctggctattttgggaacagattttgatcagtatgtaatgctgccgtccgagggtgctagggggggaattctgatttcctggaaaaagcatataaaggtgacagggctgaacagagtggattcttatagtatctccttgcaattccagagaaataatgggcagtcttggtggctgacttgtgtctatggacctcaaagtaattctgaaaagatcctttttcttcaagagttaaggcatttcagaagcatctgctctgagccttgggtaatagtgggagactttaatctcatctacaaggttgaagacaagaataatgataatattaatagatctatgatgggtcgcttcagaaaatttatcaatgatgttggtctgattgatactcccctaattggtcgcaaatatacctggtccaatcatcaatcttcaccaacactggtccgactggatagagttctctgcactactgattgggaagcattgttccctaaccatctccttcaaagtgctgcttcagaggactcagatcattgcccactgattcttggacttaacagtatgtgttctggcaagcgtcgatttcatttcgaatccttttggccaaaattggaagggttccaagaggtagttctggaagcctggaattcggttaatgaaagaagttgccctttcctgacattcgaactgaaattgaaatcaactgccaaggctctgcagagatggagtgctaagaaggtaggccatgtgtcctcccagttggcacttgctagagaaattcttcatcagctggagattgcccaagactctcggctcctgtctcctttggaggtttggctcttgagagggcttaaaaaacactccttagcccttgcctccctcaaacgcactattgcccgcctacggtccagaatcagttggataaaggagggcgatgccaactctaagcttttccatatgcatgctaggcacaggcaaaggaagaactttgttgccaagattgtgtcaggggtgaacactttcactgatcacggcgagaaggctagagcagtagatgagttttatttcaaacttttgggctgcaaggcggacagatccttgactgttgatttggattacctgggtctaccttctcatgacctgactgatttagatgcgcagattgatgaaaatgaggttctggaatccataatgcaactaccttctgataaggctccggggcctgatggttacacaggcagattttataaagtttgttggccaattatcaagacggatgtgatggctgttattgctgcaatttggtgcagaaaattccagcagtttggaagacttaacactgcatttgttactcttatccctaagaaggagggggctgaggaagtaaaagactttcgacctatcagtctggtacacagcattgctaaacttgtcaccaagttgatggccaacagattgtcccaacgactgcatgatcttgtttctcttaggcagagcgccttcatcaagggccgtttcatccaagacaacttcatgctggttcagcagactgccagattgcttcaccagcaaggccaaccgagggttcttttgaagcttgacatcactaaagccttcgattctgtttcttggccttttttgcttgaagtacttcagagattgggtttcgggcagatttggagggatatcttaagtggccttttagcaacttcctccacacaggttttactcaatggagttccggggaacaccatcccccacaagagagggctgcggcaaggggatcccctctcccctatgctttttattttagtgatggacatccttggttgcattgtggccaaagctgatgaggaggggcagcttgagcctctctcttccaaaccactgcaccacagaatttcgctatatgctgatgacgcggttctttttttccacccaagggagagtgaaattcatactgtcctaggtattctgaatttgtttggagaagcttcaggattaaaaactaatattcagaaaagcagtgtgtatccaatccgttgtgggcaggatgagctggacatcctcaatgattggcttccttgtgaactttcgtctttcccatgcaaatatcttggtctacctttgtccttaaaaaagctgtccaataatcagctgcagcccattattgacaaagtggctgatcaactttctgggtggaaagcggacctcatgacacgggcaggtagaagagtgcaggttcagtacgtgatgactggcatgcttatatatctagtcatggcagttgacattcccacaggctcgctcaaagctatcgacaagatcagaaaaggatttctctggcgtgggaggaaagaggtcagaggaggacattgtttagtggcttggggaagagtttgtagacctcttgaaattggtggacttgggatttctagtcttaaagaactaggatgggccttaagaatgagatggttgtggctgcgcaaaacggatccggataagccttggtcctcattgcccatgcagatatccaacaaaataaaggcctttttttgcaccgccctgctcactgaaattggaaatgggtcctcaaccttattttggctggatcgttgggtccacggaaagaatattgaagatattgctcctcgactgcttgcagcggtaccaaagagaattaggaacagcagaactgtgcttgaggccttgacagacaggagatggctaactgatattaaaggggccttgacagtaggtgtctttgccgatctcctagatctctgggatgaacttcaaagtgtccagcttcattcagacagggaggacaaacatattttcaggttcgctaatgatggaatttattcagcgaaagcagcttacaatggcctcttcatcgggtcgaccatggctaagtattgggaactaatttggaaaacctggtcccctcccaagtgtaaattctttttatggcttgctgatcttggaaggtgctggacagcagatcgtttgcagaagagaggtcttagccatcctgacaaatgtgtcttgtgtgaccaagagcaagaaaccatagatcacattttggtggggtgtgtttttgctaggagtttttggtttcagctgctgggacaggtcaacttatctgcctttactcctgtgatgggagaaactaaaatgatggagtggtggagcagaagcagtgagcagttacaggggattgctaaaaagggattcaattctttgattacccttgggctttggactctctggaaccacagaaatggatgtgtttttgatagagctacacctagcatggagggtgctatcagaagagttgaagaagaaattattatttggaattttgcgggggccaaacatcttgcccttattacagctcccattccaggtgtcatgtagggatctaggagtgagttcagtagttaacctcactagggaagggtgttggttggttaagtttagattgtgggggtaggttggtctagtttgctttctttcttctcctttttctttttctttttctttatatttctttttctgttgtgtttgtaattggtctaatttttagacccttcttcttaatacaatgatacgcagctctcctgcgtattcgaaaaaaaaaataattctatatttaatatgtcttttcttaattttatatttgacttgtattttcttaagttgcatctgaatgtcttttctcatgttttatcatattaattctttgttgtcatgttgtgataattttggaaataattatttttgtagcccgttaatattctggttatgaatatattttttgaacgtaacaacaagagttctacctttcaattaagaagaataaaattgaccaagttttaaggaaaaccgggcctgaaacctatacagaatgcaaaacagcccagacaacggaaactcccccccccacaacccatccagagttatcgttgccaagctcgacttcgcaagacgggccacacatggccaaagaaaatacgacgacgcctacatccaaacaccggcacagaaggaggaagatcgcagtgcgccatcgttgccaagcctcaacacaccccacgcgaggtagctccgattcttcaccaacgagcttgaacctctgtcctgccctcgacaaatgcccaaacattcgaaacaatccagtccacgaagaaggggtctcgacagctgtcatcgttgccgagccacattctctaatgtagcagcttcgacttcacgttgcaaagccccaccttcacctgcataccagatgccgagaagcgaaagcaaccaccgaaggtgaagccgtggctgagacaagcttcaatgcgacgccttcaggaagggagtgacgtcgaggacgaaaccgtcgggtgcccgagatggactgggctttcgcccaaggaagacatgaatgcgacgcccccaacaggggaagtgacgcctacggtcgttgccgtcgccgaggctttcgcctaagaagcccccagcatcatcgtcaggccaagaaccaccgtcactgccgtcctgacatcccgcccgaacccctccagaggggcatcaacgcgctggctgccgcagcagccgcaaagctgcgtcggccgccaccccctctggctgggcacacagaaccggacaactccttgccacgtgcgtcacactggcgcgtgccagagctgaagctggcaggcggcagccgccgatggcactggcacacgcggccaccgaagccagctgtcgccgggcaccctgccaccgccaccaccaccctgcgccatcccgggccacttacacataagctgatatgtattttgatgataaacaaaataattcaattcaaagtatacatagatagagaactatattgtgaaaagatatatccttttaatgatttggtcatccttttttgaagaaatcaagtatgatctattaattacagaagacattatatactgttataggttggtgttgcagcctttgatttaagatcagcctc

SEQ ID NO: 309 - DNA, 26661 bp, Zea mays
  Intron number 1 from transcript GRMZM2G118312_T01 (locus G RMZM2G118312) derived from phytozome v7.0 (chr-ID 4; pos 2 21986277 to 222012937)
ccgacgtcctctttcttcgacggtacgtacgctacaaacaacatgtatagtgcactccgaactccgatccgtcgtgtttgcattgcaacaacctgctagagcccagaccgtagccggccggtcgtctatctatatacctcgaaattaccgaaacacgacggagcatatactctcctaaggatgcatgcaaagcaaattagttatatactaataaccagataaacgtccgtttcagaaatagctagctgcctgaatttattaactaacccttccatatagttggacgatcatttatatatttatttaaatagacggtaaagcatgcatgtggctgtgctagtacgtacggaggcaaggagacaatttaattaccgaagacctagagcacctgctgggtcaatcaattggtaggtctgtttggtccagttttttttctgacgaacttttttaagaatatgactacagaaagaaactgaccgtagaaagaatttgagtatcgtggaaattacataaagaagaagataaaaaaagtttatatggtttaaaatgtagaaaatgatgttttctactattgtaattacttgactaaaatgatttttataagaaaaaaagttaagcatttaacagtctgcaacagaatttagtgtccacgagctgaaaaaaaaaactgaaacaaacggctccaatataccggtcagacaagatcacaagaggtccgtcgagtcaagtggtgccatacgtactgtacttgataagctcgcgcaggccacaagggcaccaggcccagctgccgccagtttttccaaaaaaaaaagagagaactttttccaaagaaaacatggccagctgccgtctccgccactcagcacacgtcaacgtacggcagagcggtgtcacgatcctagcacaaaatagactttagttctacatacggattattcatatatatatatataatctgtaaaaaatggtataatatgtggcacacaaaattcgatttatttgtgaataggaagtgagcttcacttgactgaatggatgagtggtgtggtggtcatgcacctaaccacctagctaggtcaaatccacttttcgactaaatttgagtgcctgtttcttttctaatgaaaattcacttaattggtttctttagtccacaaataacttgtctgtatatatgtagacttgagcaaattgagcccggcgtgtctaatatacattgccgaaacacatcaacatctttatctccagcagcttttatatcccacattctattcaactctctattttaactccactccataaaacagcgttttacacacactctagtgagcacagccttataagaaccacataatcatgatgacatgacaatgaaactagtgtttatataaaaatcacatgtctagcaacctttagtactgtacgcacgggcattcctccactttttgtgatccggggataaaagtggcactcatgttcacctttgttaccgctttttatgaaatccatggtgaaaatctaacagaaatacataaacatccctgctaatatgttcggagggcggcaccgcgctgccgagggcaatgaatggtgtgggagaatttttagccccttcacttccaaacaagctctagaccagggaacacgggtgatagaggtgggaggagtagcgaatctagctaaaaatattgtcaggatcatcaagaacagctttactatattaaataattttttataaatattaacagcgtttttctaaaagatttataaaatttatcggggtcagctgaccccgataaacccatctaaatttgtccagaccggtttttaataccggttcattgcatgaatcaatgttgaaaattttggacatcggtttttaataccggttcattgcatgaatcaatgttgaaaattttggacaccagttttattataaagtgtagtgatgtatttttatcaatgattttaatagaaaatgtggtaaaaatagtgatggtgaaaattatttctgttatagtgtagaaaatctaaatgatctaaatctatgttaggtaaaatttaaacgtggatattgatattcatgtccaattctatggtggacactataatagatatatcccaatatttttttatttgaattcgaactaagacaggaaaatttggacatagatcgatatcacatataataggacaccaatagaaaccaaaatataaatatattgttgtcatttagttttgaaaatgatgtatttgtgcacgtaaattttttccagttatttttgtcttatttatgtatttatatgttaacatgaatttatatatatatatatatatatatatatatatatatatatataatggaagctcagggcttccgataggtataggaagccctagccagggtagtgatcacgcgcgtggtcaggtcgggccagtggggtgcgtgcgtccgcgcgattgtgggacacgtttatgcatgtgtaaacatgtgttatgttttgcgtaaacagaaggtgcgcacatggtgagatcgagttgggatggacagaggtgggccagcgtcgtgttcgttggtcgggtagttagttcctactcatgattatgctagcatatttaatggtttagacttgcataacaggagagcggcaacgaaccactcgttcaggtgggcccacacaccaccatgattagtgcacccacgaagttggaagttaccgtatatatcggaaaagaagatatggagatgatcgtgcgtgggagctcaggcagatttcagcgtaaaacgtgaaccaaacagtgtaaatgggtatgaattttagtgtaaatcatcgatctatttcataacgaaaacatgtatggaaacaaaaaaaatctgatttaaatgctttaatatatcttatacaaatggcataaatggtaggaacccaatacacactggattaagtaaacgagataatgcataaaatcaataaattgtttgtgaaaaatgtgaatagtaatattataaacagacaaatatatggaagtggagccatgaactgaaatataggtcgtaaaaatctattgacattggcataaatatgtatacaaaatagcataaaaataggaccgccgcgctgcgaaactgccacctcgcatctgggatgcgccaccacttcatgccaaggggaggctgccatcgtcactcgcgcctagggaagtccgctatcgccgctcccaccttagatggcatcacagtcttacacgctcaggggtcgaccctcgcgcgcgtgcatcctgagatccgtcgcaccagccgctcccacctcgtcgtcatgcacgccttaggggtgccgtcgttgctcacgtgtacccgagatccgtcgtcacaccgccgcagccgctcccacctcaccgtcgtgcgcacctcaaggggtcgttgccgcgtgcacctcaaggagaagctgccacgctagtgccccctaggatccggcgccgcggctgctgccacctcgcagtcatgcatacctcatggggccgccgtcgcgtgcgtgccctcgggatccgataccgcaaccgctcccaccttgccgccgtgcacgcctcagggggcctcgtcgtgcgctggcctcagggatccgtctccatgagcgtgtcccccggatccaccgtcgcgcgcttgctcctagaatctgccgccgtgcgcgcctcttaggggtgggggcgtaaatctcggcttcgctaaaactgaaccctagcgatctggagcttcttttatagacgctttggacctggtgcggctgaaccggttggcaacatcgggtcagggctttcccccagctattggaagccaaggtcttctaatatctaaactatatatatataagcggactcaaataaaatgttgttaataaatttagatacaccaggttccaccataatagacgacccaaccagctaagctatgcttaatttatgttatttatctataattgatatgactattgaggtagaatttattaattatatagacaatatggttagtactttgtttttcgtatgcacatagtatagtatgctaatattttgatggaatataagcacttggacattcgactataacctagattcaaactcctttcactactagaaccagctgctttgtcgagtgtctgaagcactcggcaaagcctagaaaatactcgacgaagtctttaacaagtgtcactcggcaaagaagtttcggtgaactgtacatcggcaacggtttctttatcgggtacgttttgttgggcactcgacaaagaaaatttgccgtcacgacacctggtgacggtgacggagactttgccgagtgccaccgtgacactctgcaaaagctaactctttgtcgactgcctactgtagtggcactcgacaaagaagcacctgtgggcccctttgtcagttcctttgccgagagtattaggaggcactcggcaaaggctccgtctttgtcgagtgcccgtcggactagctctcggcaaagggagcaccagcggcccctttgtcagttcctttgccgagtgtcaaggccacatcactcggcaaagaagcttttttggttcccaggtgtgccttctttgccgagtgctatggccttgacactcggcaaagtagctctttgtcgtgtgttacactcggtaaagtaaccagaatacccttttttatttgtttttgttgttccatctaaacaaacaaaagatatatcacataatcatcacatatacatcacagttatcatagaatcatcacatacatcaaacacacgatatagctcacaaagatcacatgtttcatcacaaagagcacatgtttcttcacaaagacacaagtaccacaaaatagttcacaacactaacaagtactcatataaataagtctacaaacatcgaatatatggcataaacatgtctcacaactaaatttaaaagaacatcagtgaggtgggcggctggactggttcggcgatgggctaggcgatccatgagggttgttggatgccgcatattgtccctgcacagagaagagattacatgtgttataccagatgaatatatatcatgcaggactagcattttgatactcacaggagtatggaactgagcagggtaagctagagggaacaacggaggtggtggagcaaaaccctgtgcggtgccaaggctctgcaagtactggaccatctctgccatcctctgctgatctgccaagcgagccacccgctctgcctcccgctccaccatcatcctcgcctccatctcctatcgttccctccgctcttcttctagctaggcctataatatttcacccccaatgttataataactcaaaaagaaggtatataactcaagttctgatgagttacagaagcactaacctggagttgttgtatccgatgatgtgagatgtcctgtcgaggtcgtatggctgagctcgtgctcgtgctccttgctcgcacctgagatagagtgggagtggacaatgagtctaatgccccgtcgtcaatccagtaacgcccatgcctcttgtctcctccgaccctcatgaggacatctccgtcgatgtcctcggtccttggatcgtaatttggcccagggacctcctatgtcgtggtagtgtactcacttaggtggctgtagacggtggggttgctatacgcctcaggcccgtcctccaggttgtaggtgacatcggacgtcgtcttgaccttatgggccataacatacaccgagaagatggagcaagactggccaccatgtgttctgccactgcaaacaggaccatacgagcacctaggtcaaaccgtccgagcacctatgcataacacctagtttttccacacaccacagtaacaccaccctctaccttcggcgcaccaaggccgaagcatgcccatacttagaatcaaatatcttccaacacatgcagttggaggggttcacatcaccacacgtagattatcatgatatggataaccgacgtaagaatgcccaataacctgagtgtcacatctcgagatctggccttttaccaccagctaccatagataaaattcaaaaagaaatagctaaattattctgagacaggctagggatcagtatgtctggtttagtgtcatcatttgaaaaccatatgatcaccgatttgacatcatacgatacccgcaagtgtcacacatagatttaagggcaaacccgagtgcgtcttaaatgtgtgcaaggatcaagtctcacacatatgatgactcatggtacataaatcaatgtcacatctttattatataatagaggttctgtacaaaatagctaaataattacatcatatgatgacaacgatcctccacgaccatagttgattgggagatgacagtctagctctcacgaactcatcacgtcatccttcatgctcctcatcttggcagtacctgttcttgacctagtgtgagtacaacaaaaatgagttcacatacgctcatcgctcaacaagttatgaggaataatgtgcatgagctcgcttacggtgagagctcatgtgaagtgtaaggcttaccaaagagaatggttaaggctcagcattgcttttaacaagttggtcaaaattttattaacagttactaagtataagtagatatcatcgcaattaaataagagatcacaattaataataaatcccacagtgcaatgcaaatgacagattaagtttaattccataagttaatcatgcaagagtcttgagtcgctcttgaccgtgagcacgattgatatactagttttacgttctgcagaggttgtgcatctttacccataagacgtgtttcccgtttagccagggtttgcaagacccttagacactcccaaggtgaatggctagggatccactgtgaggcctttataaagttccactagatgagagaacccgctatggattccgagccaaaggcgatataggaatccctcgttagaaaagctttacagacagtccgacccaaggacctccctatacctcactcctccaccccactttcccctttcaggaaatgattaagtcacactagcttttctaattaatcagccaagggcatcccattccacccttatggtagcactgttatctcaagttaagctccatgttccaattaacaccatagtcatatcatgaacaataaataattcagtaacaatgataaagcatgatcatatgtcatatagcattacttcccaaaaaccaagtagagcatagccaaactacccaatagttcatttgtatgcaaggtgtggggtaaacaaaactagggtaacctattaggtcccatcaaattaacctgagcatgtcatagtgattagtaataatattattaggtaaagaagagtgatcaagggcacaacttgccttatacttacgataaccttatagttcaaatgttgacccaaaagctgggcttaagatttctcatcacctctactcgtagcaatacatataaccaagcaaataattgatatggtaattttacaccaaagcataagaataaactgtgtaggaatattctacgcgccgctacgaggttgtaggtttgagaatcactaaattctgagttatggttgaagagaggtggtttttggaagatctatgtgattagatatgaaaattatgttccatgtggactaacataaagcgtgtgagaaatatattctaaataaacaccttaattcatctctagtccaagttgtaacttaattagagatcataatttgtcaggttataattatagacaaattaactttgatctagaaaggttagaacataggttaatcaaatatctaattataaaagtctgttatatgacaaaaatagtgttattactacgtaggtgatttttactacgaagataatgcaaattgaatgggtcaaatcagagttaaaatacaaaagtatagcaaaaacaagtttatgggtcattttggtattaattctatactaaaagttacttctaagggcaaatttgcaaattcctgatgtatcctatttattttaatcagttaatggatggcgggttgagtcattaaaagaggattggctcttttgcaagtgttgctcggctaaaagggtattggttgatctcgaccgcccgttcaaaacctgatggcccagattaaaaactctcttatccgaaccggtacgaaatattaaccatcagattgagatctgattgtccggatccaatgtaaccaaacaattattctatgttctaatcccgatcgctctaggtggatcccttcattttagaggaattagaattcacttaataaagtaacttatttagtttggaatttgacattccaccactttataaagttcagatataagcctatctcaaatttatggggtggaggatgagaaatgattttatacattagtagaatttgtttctactttataacttatatggaactcttcgtctcactcctctatttaaaaatatagcacataaatatctccaaaatattactaataatagtatacaaatataatttccataaaaccgaattagcttagtatacaaatataatttacataaaaccgaattagcttagaatggaattcaattacattgatccaaaggggcgtaaccgaattcttactctacttttaatcagaactgtatgctacgcgatcgacggcacccatccccgaaccgtgcccatgagatccaatctccaccgtttcatccggggtctacgattgacgctcctctccctatcacgaacaaccctaggcagcgccgccgagctcctacgacggatgctcgctggggaccacgaacccgatgtccaaaagccaaacactcaatagaccagtgataaatgaagaagaggacctagcaaaacaggacgacgtgagtttacctgaagcgaggacgctagtggtgccgcctatgctgtggcgcggctctgagtctccggtgatgaatcccagccaccccaacagcccatcactcccgcaaccaccacggatacgttacgcgaaccctagagatcgtccatggcaaacctccgaaggtggagcagcgatgtacgcatgagtcgaccaagatggctccatcttctcttcggcaccaacggcgacttctctgttctctgtgtctggctccgattccggtttatgggtggagggtcaagggacacagcgaggtggttggaactgccctgcgaatcccgcgcgggatccatgtagtcggtcgttcaggcaagcgtaaaggggaaggggagtctggaggcttgggcccgcgtgctaatgagcagaggcattcagtggatacgcgcgcgaagtctgcattcagcgccaagttgaggcgtgagttgggctgcgtaggagaaaagtaggctggcccgcggtgagggtatgctaggccgacgtgtgaggttagggtgggctagtctgaggggttttgttcttcttttgttctcttttttttttctatttcagatttcaattcaagttcaatttcaagtcttcaaaatccatcctagctggaattgcgaacttttgatttagatgcacaatcaaaaggtactccagcatgaatgcgaaacataacatgtttaatgaatttatttattatcctatttaaacatatgcttttaaatatgaaattcatacacaaaaatacttactctaaaaataatcttcgaaggcataatatttattaaaggatacttaaattttaaaacatttagaggacattcataaagatattactcaatagcttaactactataatgatcttctcatttgtttcatatcttttaagttcaaattcaatgtctagttataaaagttcaacctaagtttgaaccatttaatattactatttaaccataactttgaaaagaaagaatattctagataatgacatttttatttttaatctttttggagagtcttttctaaatcccaaaatagaactttagggtgttacagcaagggactaggataccagatttatctaagttttctagagaaggcgattgtcgggtaccgtaattaggggtaccccaacactcctaaacatggccggtaaccaccatcagcacaagctgcagagactgatgggcacgattcaggtcaaggcttcgtctactcaagggacgcgatctcgcctcgcccgagcctagcctcgggcgggaacagtagccccagacgaattcatgcctcgcccgaaggccccctcaagcaacgggcgcaccctcgactcgcccgaagcccagctcgggcaggcttcgtagtgaagcaacctttgccaaatcgcctcaccaaccgattgtatcgcaggcgcattcaatgcgaggatcgcctgacaccttatccatacacacgcgcctcagtcggcaaggtcgaagtgaccgcagtcactttgcccttccactaaccgacctgacaggaaaacagtgccgctcgcccctctccgactgctgtgccacccgccagggtgagactgacaacagctaagtttagcctcaggcgcaacaggaagctccgcctcgcccgaccttggggctcggcctcaggaggaggtctccgcctcacccgaccccagggctcggcccccacttcgccctcaggaagaggtctccgcctcgcccaaccccagggctcggcccccgcttcggcctcggaaggtggtctccgcctcgcccgaccctagggctcggcctcaacctcgcccgagggccccctcaagcaacaggcgcaccctcgactcgcccgaagcccagctcgggcaggcttcgtagtgaagcaaccttggccaaatcgcctcaccaaccgatcgtatcgcaggcgcattcaatgcgaggatcgcctgacaccttatctatacacacgcgcctcagtcggcaaggtcgaagtgaccgtagtcacttcgcccttccactgaccgacctgacaggaaaacagtgtcgctcacccctctccgactgctgtgccacccgccagggtgaggctgacaacagctaagtttagcatcaggcacaacaggaagctccgcctcgcccgaccttggggctcggcctcaggaggaggtctccgcctcacccgaccccagggctcggcccccgcttcggcctcaggaggaggtctccgcctcgcccgaccccagggctcggcccccgcttcggcctcggaaggtggtctccgcctcgcccgaccctagggctcggcctcaacctcgacctcgggaggaatcgcgtcctcgcccgaccccggcctcggcctcaggaggagtctccgcctcgcccgaccttgggctcggaccgaccacgccacgggggatacatcattaccctacccctagctagcttaggctatgggggaacaagaccagcgtcccatccaggctcgccccagtaacaagtaatgatggctccccgcgtgcatccatgacgatggtggttctcagccccctacggaagcaaggagacatcagcaaggtcccagcagccccgacaactatgcttctacatggctcaagcgctcctccgacggccacaataccgcgtacacagggctctagcacctctccgacagccacgttggcatgtacacagggctcaggcacctctctgccggacacgttagcgcatagctacactcccattgtacacctggaccctctccttgcatctataaaaggaaggtccaaggccctcatgcgggagggtcgcgcgggaggacgggctgacgaacaggctcactctctctctctcactcgcgaacgcttgtaacccctactacgagcgcatccccctggcgaggataacacgagccacgtttttcccccttgtgttccatctcgcgccaacccatctgggctgggacacgtagcgacaattttactcgtcggtccagggaccccccgggatcgaaacgccgatagttggcgcgccaggtaggggcctgctgcgtgttgacgaacaacttcccgttgagttctagatgggtagcctccagcaacctcttcagcccgggacgctgctccgcttcgggagtctcgagttcatgtccctcgacggcagctacgacatggtactccttcccccgcagcgcgatagcgacaacgacgaccgacagctcgcccggcggcgacgaactcgacgacgtcttccccccgtggcggaagagcagcatctgggtttgtcccaccaccttcctcgccgcaggaggaggagacgcggtaatcgtggccaggcatgaggcagcatctcgtcggctgtcgagcgagtcatcgacgccggcaccccagcgggggacatgtcgggcgttgtcctcgcgcctgagacgacgacgagtgtcatttccccgcaacatgccaaccccaagcggacagatgacgccagcactctcgcgaagggcttgttgggcgttagtcttgtacctgagataacggtgcagtccgtccccgacgcgacctcgtcgccgtccatcgattgagaggtaccgtccgttttccaccctgtgccttttagattcagcttcgatccaccaagcgaccctgcttcggtgagcgctttcgtaaaggcatatcctaaccttccgaggtaccatatgtggtcaacctgggaccgactgacggccgtctcaacctatgggcccccgggttcgaggaagaggacgagcccgactctggttgggatttcaccgggctcggtaatccccgtgccatgcgagacttcatgaccgcatgtgactattgcctctctgattgctctaatgatggccacagccttgacgacgagggttgtggcccaagtcgcgaatgtttccacgtcgatctagggggtcacgacgaaggcaaccacctcggtataccggaggatgatgatccccctgggcctgcgcctcgcgttgacatcctgtgggagctagctgtggtcccagtccctgcggggggccaggacacacagctcgagcaaattcgcgagatgcaggccaagctcgacaaggaagcagggcaacttgtgcagctccagcaaaacatcgagcaggagtgggcaggccgagcactcgccggagaagcgcgtcatccggcccaggacgaccaacgtcgtatcgttgacgatgccagggcaggactgcccccgatttccagcgaggttggccagaatctggctgcagcagcaatactgctccgagcaatgccggagccatccaccaccgaggggcggtgtatccagggagaactcaagaatctcctggaggatgccgtggtccaacgggctgagagctctgcctcccgaaggcaagggtaccccccggagcatcacgcagcaacttcctgattcatgcaggaggccttggtccacaccgggtgcacgtcggacgcgacgcctgcagccccgggtcgcctcgacaacgagcaccaccgccgcgaccgtcgagcccgcctcgacaagaaggtgcgccgaggctaccaccccaggcgtggggggacgctaagatagcaaggaggatcgaagcacctcgcccgaaccaccaggtccgcaagccttcagtcgggccatacgacgggcgccgttctcgacccggttccgagccccgactaccatcactaagtactcgggggaaacaaggccggagttgtggcttgcggactacctgctgacctaccagctgggtggaacggacgatgacaacctcatcatcctcaacctccccctgttcctctccgacgccgcccgagcctggctggagcatctacctcctgcgcagatctccaactgggacgatctggtcaaagccttcgctggaaacttacagggcacgtacgtgcgccctgggaactcctgagatctccgaagctactgccagcagccagggaatccctgcgagagtacatccggcgattttcaaagcagcgcaccgagctgcccaacatcaccgactcggatgtcatcggggcgttcctcgccggcaccacttgccgcgacctggtgagcaaactgggccgcaagactcccaccaaggcgagaaagttgatggacatcgccaccaagtttacctctggtcagaaggcggtcgaagccatctttcggaaggacaagcagcctcagggacgccagcaggaagacgtccccgaggcgtccgcccagcatggcacgaagaagaaggccaagaagaagtcgcaagcgaagcgtgacgccgccgacgcagatcttgtcgctaccgacgagcacaggaaccctcagaagcctcctggaggggccaacctgttcgacaagatgctcaaggagtcgtgcccctatcaccagggtcccgtcaagcacacccttgaggaatgcgtcatgcttcggcgctacttccacaaggccgggcccccggcggaaggtggcagaggccaagacaacgacaagaaggagggcgataaggcagaggagttccccgaggtccacggctgtttcatgatctacggtgggcaagtggcgaacgcctcggctcggcaccgcaagcaggagcgccgggaggtttgctcggtaaaggtggcggcaccagtctacctagactggtccgacaagcccatcaccttcgaccaaggcgaccaccccgactgcgtttcgagcctaggaaagtacccgctcgttgtcgaccccgtcatcggcaatgttaggctcaccaaggtcctcatggacggaggcagcagcctcaacatcatctatgctgagaccctcgggctcttggaaatcgatctgtccatgatctgggccggtgcggcgccctttcacgggatcatccccgggaagcacgtcctgcccgttgaacaactcgatctgcccgtctgcttcggaactccctccaacttctgaaaggaaaccctcacgttcaaggtggtcgggttccgaggaacctaccacgtggtgctggggagaccgtgctacgccaagttcatggccgtccccaactacacctacctcaagctcaagatgccaggccccaacggggtcattaccgtcggatccacgtaccgacacgcgtacgaatgcgacgtggagtgcgtggagtacgctgaggccctcaccgagtccgaggccctcatcgccgacctggagtgcctctccaaggaggtgccggatgcgaagcgccacgccggcaacttcgaaccagctgaggcggttaagtccgtccctctcgaccccagcaacgacgcctacaagcaagtccggatcggctccgagctcgaccccaaataggaagcaatgctcgtcgactttctccgcgcaaacgccaaagttttcgtgtggagtccctcggacatgcctggcataccgagggatgtcgccgagcactcactggatatccgagccggtgcccaacccgtgaagcagcctctgcgccgtttcgacgaagaaaagcgcagagccataggcgaggagatccgcaagctgatggctgcagggttcatcaaagaggtattccatcctgaatggttagccaaccatgtgcttgtgaaaaaagaaaggtgggaaatggaggatgtgtgtagactacactggtctaaacaaagcatgtccaaaggttccctaccctctgcctcgcatcgatcaaattgtggactccactgctgggtgcgaaaccctgtcattcctcgacgcctactcaggttatcaccaaatcaagatgaaagagtctgactagctcgcgacttctttcatcacaccttttggcatgtactgctatactactatgccatttggcttgaggaatgcagatgcaacataccaaaggtgcatgaaccacgtgttcggggagcacatcggccgaacggtcgaggcttacgtcgatgacatcgtagtcaagacgaggaaagcctccaacttcctctctaaccttgaaacgacattcaagtgtctgagagcgaagggcgtgaagctcaacctcgagaagtgtgtcttcggagtcccccgaggcatgctctggggttcatcgtctccgagcgaggcatcgaggccaacccaaagaaaatcgcggccatcaccaacatggggcctatcaaagatttgaaaggagtacaaagggtcatgggatgccttgcagctctgagccgcttcatctcgcgccacggcgaaaaaggcctacccttgtaccgcctcttaaggaagaccgagcgcttcacttggacccccgaggtcgaggaagccctcggaaacttaaaggcgctccttacaaacgtgcccatcttggtgccccccgctgcgggagaagccctcttgatctacgtagccgcaaccactctggtggtcagcgtcgcgatcatagttgagagatgagaagaagggcatgcactgctcgtccagagaccaatctacttcatcagtgaagtgctatccgagaccaagatccgctacccgcaaattcagaagctactgtacgcagtaattttgatgcggcgaaaccgtgaaagttgcgacactacttcgagtctcatccggtgactgtggtgtcatccttccccctgggggagatcatccagtgccgagaggcctcgggtaggatagcaaagtgggcggtggagatcatgggcgagacaatctcgttcgctcctcggaaggccatcaagtcccaagtcttggcggacttcgtggttgaatgggtcgacacccaactaccaacagctccgatccaaccggaactctgaaccatgtacttcgatgggtcgctgatgaaaacaggagccagcgcgggcctgctcttcatctcacccctcaggaagcatctccgctacgtgctgcgcctccatttcccggtgtcaaaaacgtggccgagtacgaggctctggttaatgggttgcgcatcgccattgagctaggggttcgacgcctcgatgttcgtggcgactcgtagcttgtcattgactaagtcatgaagaactcccactgccgcgaccggaagatggaggcctactacgacgaagttcagcgcctggaagacatgttctacaggcttgagctcaaccacatcgctcgatgatacaacgagactgcggacgagctggctaaaatagcctcggggcggacaacggtccccccggacgtcttctctagagacatacatcaaccctccgtcaagacagacgacacgcccgagcctgaggaggcctcgacccagcccgaggaggcctcgatccaccccgaggaggccttggcccagcccgaggtatcctcggcggctgagggcgaggcactgcgtgtcgaggaagagcggaatggggtcacacctaatcgaaattggcaggccccgtacctgcaatatctccaccgaggagagctacccctcgacaaggccgaagctcggcgactggcgtggcgcgccaagtcgttcgtcttactgggtgatgaaaaggagctctaccaccgcagcccctcaggcattctccaatgatgcatatctgtcgccgaaggacaggagctattacaagaaatacactcgggggcttgcggccaccatgcagcacctcgagccctcgtttggaacgccttccgacaaggcttctactggccgaccgcggtggccaacgccaccaggattgtacgctcttgccaagggtgccaattctatgcgagacagacgcacctgcccgcttaggccctgcagacaatacccatcacctggtcgtttgttgtgtggggtctggaccatgttggtcccttgcagaaggcactcgggggcttctcgcacctgttggtctccatcgtcaaattctccaagtggatcgaggtccgacccctaaccagcatcaggtccgagcaggcggtggcgttcttcaccaacatcatccatcgctttggggtcccgaactccatcatcaccgacaatggcacccagttcactgggaagaagttcatggactcctgcgaggaccaccacatccatgtggactgggccgccgtatctcaccccatgacgaatgggcaggtggagcgtgccaacggtatgcttctgcagggacttaaaccaaggatctacaatgacctcaacaagttcggcaagcgatggatgaaagagctaccctcggtggtctagagtctgaggacgacgccaagctgagccacgggtttctcaccgttctttctagtctatggggccaaggctatcttgcccacagacttagaatacggttcctttaggacaaaggcgtacgacgaccgaagcaaccagactagccgagaagactcactggactagctggaagaggctcgggacatggccttactacactcggcacggtatcagcagtctctgcgacgctatcacgcccgaggggttcggccccgagacttccaggtgggagacttggtacttcggctgtggtaggacgcccgagggcgccacaaggttactcctccctgggaagggtcgttcatcatcgccaagattttgaagcccggaacatacaagctggccaacgatcaaggcgaggtctacagcaacgcttggaacatccgacaactacgtcgcttttacccttaagatgttttcaagtcgttcatatacctcgttttccttacatacaaaaataaagtctaaccgtcaaggaagggtcagccttgcctcggcaaagcccgaccctccctcgggggctagaaggggggaaccccctctgcgttaaaattttccttggaaaaagtcttttgccagaacgtctttcgcgcttttcgactgcttcgatagcggggtcctaaaaacgacgggagtacacgtaagtggcaaggccgaccgagccgagggactcctaagcctccaggatacggatacctcactcatcaccttccgcgataagtaactcacgctcggataagcgattctgctgccgaacaagtcctaacgctcgaaaaacttttctgccagaacgactttcgtgccgtctcgactatatcggtaacagaatcctacgaacgagtaagagtgcacgtaaacggcaaggccgaccgagccgagggactcctacgcctccgggatacggatacctcactcatcaccttccgcaaaaagtaactctcgctcggacaagcgattctgctaccgacgaacaagtcctgatactcgaaacaagaggaaagaaaacacagctttataatacgacaataaaatgtttgggcctcggcggccgcgaaaaacatactacaaacaaactgttcctgcaggttcagacatcgatagagggagcagcagcaccctcggcgccgtttccactttcggcgggatctggcccggcctcggacggcgacacgggcggaaggatctccacctcgaaggaatacgccagcaccgcgcttgggccgtcgcagccagggtctccgcaagggtcccggcccgagcagacacctcgactggccgctccgtagcctcagccagctatcccccgaggacatcagcccggctcacggcctcggcagcgtgactccgaggttggtcccactcacggatgacctggccaagctccagccgccgctgctgcacctcctcggcctgggaagccacccgctcctgggccaacgaagcctctttttgagccgactccacctctgtccacgccgacaccgcagcctccggctccagctcatcgcagagcggccgaaggttctcaaactgagcaagggaagccttgagcagcaaggccgaccgagccgagggactcctatgcctccgggatacggatacctcactcgtcaacttccgcgcagggcaactcacactcagttaagcggttcagctagccgacaggcgagtcctggtgctcgaaatgaggaagaaacacgacttcacgccaaaatacccagatgttcaggccccgacagccacaatgaacatacacccactcagggtgccattacaaacggaattccggttccactcccgcgggtatgaactacctccacaccagagggcctgcgggacagcaaactccaggtggctcgccggcgaccactgcagcagcagcgacaacgacctctgcctcgggcggctgaacagcagcaacgatgacctcagggcaaatgctgctgtaggaaggcccttgcccacgtccccacacgaggggcgaggacaagccgtcaaggccaaagagccggaggtccgaccgcaggtggcgccgacggtctcgtcggcggagaaacctcctctagcgaccaccaccttagcaccgacgacaacggccacctgcgcgtcggtgctacgctaacgaattgcggctggcccagcctgcaccggcagatccccactcaagtcctcgcggacgggcaggcaccgacctccgcatgtaggcgtcgtgccagagtgaggacaagacaatccaagaacacgaacgccgccctagcggcgtgcgacgtcttggacgatccccccggtgcgcacggcgcaacgaccacccgtgcggtggacggacggccacgcccggatcaagcggcaggaggcagcgtcggaggccgcgacagagccagctgagccagcgagccaagcacgctggagctgacgacgcttgcagccgaccggccctgcgttgtcaaagttcgccccctccgcaaggccggtgagcgccctctcccccgagtgctgaaggaagaggcggaccgccggcccatgtgggaggtagaaccccggctcagctcgccccccgccacagcaaggatgatgaagatccttgaagctgagggcggggcagaggccgcagcccggcttgcttctccccaccatcgaactggtggtcatcatcatggatgaccattggtgagtgaatgcggccgggctgcatgatgaaaatccttgaagccgagcgatggctgaaggatgccaacccccgcgaggtcgcgctcctccaacagtagcaagacgaaggcatcgcgggtgctccccatccgggggctcggaaggtggaagggcgcgatgcatgaggggagtgcgaaggcatggctatcgcccgtgggatcgacccctttttaaaggcggctctccccacttgcatcctcaggcgtcgcgggcaaagtcttcaccgacgtgctctagggtcctccccctacgacacgggggctaggtcccacacgtcatgcaagctaacccgaaacggaagaagccaatccgccgcacgcggagcgtgtaaccgccccgcggttacaagcactcctccatccttgccgaaaccagcggtcgaaagggcggaccaccatgcaggtggcgtacaaccgcaccgcgggggcgcaccccttcggcttcgtcgcatccatcatagaggcccaggcccacacgtcatgtaaccggcgcgccggttactacgtgcaagcaaccgcactgccacttgcgccaatgccgcgcctcctcgactgcggaaccggtgccgcgactcgaggcaaccctgcgcgtggcccaacagtgccaatcgagcacatcgaccacgggtcagtcagccacgggaggaggcgcgacggttgatatggccaaaagtggaccgacagtaatggcggcagcaggcgagcggaagtggcagtcaaatcgtctgcaggctcacgtcccctcctggagcagcaggggagccctctcccatggcatgaagatgacacgcctgtgtttcgttcctcgaacggctcgcgcacgcggcctccccgcgaaccgcccgtcccgacgcattaactactcggcagggcaagcgacacctttggcaggcgaagcgggcgtcgtttcacctccgccatgatgaccacgtcaaaaaaggtgcgccacactgtttaaattcatatccttttcctcttcccctttctctctcttgctacagggaccaggaaaggggataattcgaaagggatccttctccgcgaaggaaacgggccccgagccctcctactgatcaggggttcgaaggctggcccctcggaagggttcgacagccgccccaaagcactcgggcttcaggctcattactgatcaggggttcgaaggctggcccctcggaagggttcgacagccgcctcagagcacttgggctccgtgcccactactgatcaggggttcgaaggctggcccctcggaagggttcgacagtcgccccagagcacgcagagcaagggatgactctgggtatgtctgttacatggccgaggctcgggctacgctcccgaggtaccctaggacatttctgagaccagcaggagcgattttgtaacagaatcccatcagagggaggcatcgagcccttggaccctatcgaacgggtccgggtccgacaaatcacctgcaggtacttttggagcgctcctctgggccactagccgacccttatcgaacggggcatgggcgtccactcggatcacccattagcaactcactggagacaccatgttcggcgccctccgagggcaacatggcgctttccccctcttcctccttgcggaaaggcgacgaaggggcgtatgataaaagtcgagacagtccttgatcgtcccctcgctccgtgcagaggctcgggggctgctctcgcaaacccggctacggccaaaccgttggcagcgtcaacaaaccagcctaaaaactcggaacctgaccatgcacccgggctacaatcaggtcgcatgagggaacaaccagaccggccaaggcgtcacaaaaggcactaagacctcagaggagtcaaaccactcctccgaggcctcgggggctacacccggcgggtgcgctcgcgcgcacccaccggaacaaagtgtaaccgagaaaggccggtccccttgcaaaaaagtgcgacaaagcctccaagcgagtaccaacactccctttgaggctcgggggctactgtcgggtaccgtaattaggggtaccccccaacactcctaaacacggccggtaaccaccatcagcacaagctgcagagactgatgggcacgattcagttcaaggcttcgtctactcaagggacgcgatctcgcctcgcccgagcctagcctcgggcgggaacagtagccccagacgaattcacgcctcgcccgagggccccctcaagcaacgggcgcaccctcgactcgcccgaagaccagctcgggcaggcttcgtagtgaagcaaccttggccaaatcgcctcaccaaccgaccgtatcgcaggcgcattcaatgcgaggatcgcctgacaccttatccagacacacgggcctcagtcggcaaggtcaaagtgaccgcagtcacttcgcccttccactgactgacctgacaggaaaactgcgccgctcgcccctctccgactgctgtgccacccgccagggtgaggctaacaacagctaagttcagcctcaggcacaacaggaagctccgcctcgctcgaccttggggctcgacctcaggaggaggtctccgcctcgcccgaccgcagggctcggcccccgcttcggcctcggaaggtggtctcaacccgccagggctcggcctcaacctcgacctcgggaggaatcgcgtcctcgcctgaccccggcctcggcctcaggaggagtctccgcctcgcccgaccttgggctcggaccgaccacgccacgggggatacatcattaccctacccctagctagctcaagctacgggggaacaagaccggcgtcccatccaggctcgccccagtaacaagtaatgatggctccccgcgtgcgtccatgacgacggtggttctcagccccctacggaagcaaggagacgtcagcaaggtcccagcagccccgacaactgtgcttctatagggctcaagcgctcctccgatggccacgataccgcgtacacagggctctagcacctctccgacagccacgttggcatgtacacagggctcaggcacctctctgtcggacacgttagcgcatagctacacccccattgtacacctcgaccctctccttgcatctataaaagaaaggtccagggccctcatgcgggagggtcgcgcgggaggatgggctgacgaacaggctcactctctctctctttctcgcgaacgcttgtaacccctactacgagcgcatccccctggcgcaggataacacgagccgtgtttttcccctttgtgttccatctcgtgccaacccatctgggctgggacacgcagcgacaattttactcgtcggtccagggacccccctgggtcgaaacgccgacagcgataaaagtacatatcagcactataggctagtttttagcctagttagtagaattggccgatagtgaagctttctgtgttcgtttattttctttgtcctttaccggtactgcttttcgcatggtacactgccttgccccctaactcgattagttcttaaggtgatatagagcataagtttcatgaacactttttctccagggattacaagttagatttagttgatctggcatcgcttcaacaatgaggcaatgaatcggttaatgattatctttaaaggttctgagatactagaaactggtgcttctaggtccatgtcaaagataagcagttagcatggctggttttcaatgggttacatccatacttgaaagaaaaattagatggcacccaatttctttcgctagcctagttgcatcagcagtctttggattatgaaagccaaagcaaagaaattcaagagccatctcgttataatgagcattgtggcagtagtagctcagttgacatgccaaaataggtatatatcattgaacatgtttggcccactaaggctaaacttcccacttgatcttccctacagccggtttagaagaattaccaaggagaagttaagttcgcattcaatgttgctaattatgacaaaatatttgatgaattacttaagagtgtcaacatcaaattgtctgacacaattcccctaatagatgaactaaaaaggtgtgcttattataaatggcataattcattttaccataccaccaatgattgcgatgttttccgttggcagatacaatcgactataaatgaaggccagttgattttttaaaatatgaaaattgacaagcaaatgttccccgttaatacacttgagatgaacgacaagaaggtcttagttcagtcgaatgtagccgataaaggcaagggtaagagtatagtcaccggtaatcctgccaaatctacctcgatgagtggttacttagaaggccccgggcaagagagacattgtaaggaccactaataagactagaggcatcaccgacgaattctcgtacaccaaataatttagtagttatcactaaaaaatctggtgctttagaaggtctgatgtgtagaattgcatagtccgataatgtcaagaccagatcaacgatccatgtttcggaggtgaacgggactaagaagtaggatcggactaaggctttgtataagtttactaaatttagtcctacgttcgatcaacttctctctaaataaataaataagaaggtcgttcccacacaactggctagcaaaacaatcaaagttgtctgcaaaaaagaagcaatctatgcaggggcaaaggacgactaaaccagctcgagaagtggtgcaacaaatgtcgtctactcatctatcttcaaggatgtcgtggtattttcctcctatctactcatcggcgatgttttgtcctgctcacgtgcgggataatacaacgatgaattcgtattacatgcatactccgtttgattattcgggctaggaggcaccacatttttgttccttttgacatattgatcagatagtcatggccaaagtagatccaaccataaatggcctttatacattagaaatctattaaatgactatactgtttggttaggagtcattagagttcttattttgggaataaggtgacttgtgaaacccattgtttcccgaaacttgttgatagtatatgtgcttttggttcgtgaactccaccaaaatacagggttatatattgaacacaaaatttggcagtattggtattgtcagacagtccgtatgtatgctcggatggtctggccccgagaaatcggacatgtcatcccagaccgtcttggattaaatcaattcgatcgggagtcctgatttgtcgtgatatctttttgttttttgtgaaatatattttgttggactttacttagaataaggtacatacttctttccctataaatataaagggatataaccgatcgcaaagacacaatccattcgaaacagttcaattaccttacttatctttatacattaggtctagatgtagcgtagctttatttgtagttcctcaagcaaccctatgatctctctcctctctgatagggtctctcccaaatacaggatctatgttctacacgaggcgctatgtgtcatcacacacaagagcgtagttatttacgccataacgagcggtcatgtgacctatcccgaatcgtcggatgaccaaccacacggataatcccgtgacctatcgcagacggtccgtcaggtcgtggagaagtcacaaaggtcttgcacgccacacataggtcctagggatcattagtgtttggttaaaaaggcgccaccgtggtaatatggttttgctttttgaggaattgcatacttctaatttttctgtacgtgcgatgaatcaggctcggaacctccgttgaacatcaccgacgagcat

SEQ ID NO: 310 - DNA, 3860 bp, Zea mays
  Intron number 1 from transcript GRMZM2G024976_T01 (locus G RMZM2G024976) derived from phytozome v7.0 (chr-ID 5; pos 1 59204375 to 159208234 reverse strand)
ggcaccaggctcaagtaaagcatttttccgacttccaatacgcacatgacctcgccgccggtgccgatccggttgccgcatttttaattcctctgttgcgttttcttctgcatctgatgcgatggtgccgttacagttgttactatccctgttgcttttaccatcatttcttgaattcaatgcgcgaaaattgcaacttggtataaatgcgtggtgggaaagagaagtttgtgggggcggtggcgattttagtagtaacgtgtgatgcaaatgcatgcgatctgggaggccgcacaccattgattttgattttgactaatcaacccgtgttcgtgtttcctttataacatttatttatgtgtggaccaaatcctccaacacgagttggggattgcggccatcgatatgtcggatggcctacattggtagcttgatgttattttcgattttttgggggatccattgcaacgttcctgttgcatctgggattcttgtttttgtcgaggatgaaatatgattcttgttttctggggaccttttcaggacattatgttagtttgtagtggcataggaatccattgcaacgggctatgtatgtgaaacacgcttacttttcgtgggtgtctgtattgaaatattggatttcgatcatgtatgggcattctttttatgtcctagtaataagagtagcgacatatatttcttattctatgagattctagtgtttgttagctagagtaatctttttgtaatgaaaaatgatgtctgatgtactccctctgtcacatgccaatcaaattttctcaaatttggctttaagtttgtagaaaatattagcaatatttatatcttcgaataaatttattatgaaaatagactcagtgatctatctaatgatactaattatatactataaatattaatgttttttctatccttgtttcttgtgggtttcatctctagcctaccccaacttgcttgggacaaaatgctatgttgttgttatttaaatatggaagtgagaacacagaaaagggacaaatggagtattgaacaaccaggatgtcatatgtcagcaaaagaactgtggagtattgaacaatgaggatgtcttttgtcagcaaaagaactgatttgtcctacttggcttgctttgtgagattattgcagattgcaatacaatgtaaagtttatttggcttcaagcttagtgttgttttcattgaaatgtatggccatccgatttttttctctcgaacacgcaggagagctgcacatcatttaatttagagaagaaaaaggtccaaaatggaccaagatacaaagcctaaaaaggcaagataaaacacacccactcacaacctgccttgcaacaacgctgcagcctccactattactgagaaatcagcaggacaacaaaggccacagcgaaaaaactgcaggcagaccccactctccacaaacactacgccctgaccatattaagggcaacctctaggcctaaattctcaagatgtttagctccaaccttactccaacacgccaactcatctaaaaaaacacttcaaactgtgcttaaagtagggttatgtccattgaagactgccttgttacagtgaacccataggcaccaggcccccagaatgatgatgatgttcataccctttcgcttgcttctgtgcaccttcttacatattttctgcaaaggcgatctcatcactagacggagagaaattaccaaaccccaagggcgaaaggatggtatgccaaaattgtcttgcaaaaatgcatgtgcacaggagatgttggacggattcctgcacgtggtcacataatggacaagactccgggtgatccaaacctctcctttccagtctatcagaagtccaacatttattccatattgccagccaaaggaaatatttgcattttggaggagcccaagacttccacagcctcccctatggctcaaaggtaatggatcccatgaaaaaggccttgtaacatgacttggaagtgaactggtcagaggaggtatgcagccacacatgtctatcagcttcatgtgttaacaccactcttcttatagcatcccataaatgcaagaattgttgcaccccaatcaaagaaagaggggtctcgatgtcactgacccactgccggctttcaataagcctgagcacagttctagtgcaaagagcgctcttaccgaccttagaggcaactgcgggggcaatgtccttggcgcaaccaccatctatccgaccaaaataaagtattggtcccatttccaatcacaataataatcgatgatgcaaagaacttcctgacttgtttcggtataggaaagtttagcccatgccaaggtctgttagggtctgttttctccaaccacaaccatttagcttgcagtgcccagctctggaaatataagttaggaaccccaaatccaccaagctttagtggccttgtaatgatatcccaagagactacaatttcctccattcatgtcatttccccctttccataaaaatcctcttcgaatcttgtcaatcaacttaatcacccacttagggatatccatggcaatgaggagataaattaggatggctaacataacaaaccacaccatagtcgtccttccagcaagattaagcagtcgagcctttcaattaggaagtcgatctgcaatctttcaaaccaagccatggggtctatccttcttagttttttgtctgaaatcagaagccccaaataggagcaaggaaaagaagctgagctgcaatgtagaatgttgcagccctcctacacagcctgctcgctacaccttatcggaatggcacaactcttatgcatattagatacccaaccagaaactgagccaaaacaatccaagatcattttaacacaattcagatcttcctcaaaaggctgaataaaaaggaccacatcatcagcatagctggaaagtctgttccgaacattttctccctgcagactctgaagcagccccctattttcagccaacaaaaatagactgctgaggagtgaggacatcataatcaatataaacaacataggagatagaggatccccctgacgaagtcctctccgatgactgataagattaccaggagacccattcaaaagcacttgagtggaagaagaggccaacagatatgaaatcagattacaccaattaggtccaaaaccaaggtgagaaagcacctcaataagaaaagctcaatagatcgagtcaaaagctttcgaaatgtccaacaactttctggacacagaaaataccgcaactaagtttttgtttttttaaaaaatggcttgcatgttaggcaaagttacttaaagttgtctacctgaatagttaatactatgccatctaattttttttctggaatacgcaggagagctgcgcatctttgtattaatagaagaaaagaaaaggggggggggggggagaaccccaatacaacacacacaccactagagactaactacggatcaccgactaaaacatggaagaaacacgacccacaccgctgttttaagccagcaactcatcgacttggaggaaggacaaggccttggcaccagtcatggaccagagcaccgcctcttccctagccatcctaatggccatgaccaagttgggattacaaccatcaaaaacacacctattcctatgcttccaaatggtccaagcacctagaatcactaaagaattgcatctgagttgcattcataattttctttagttttattaattgccatgcttcatctggttcatttataacccttttttgggggtaagggtgccgatcattggagggaaagatttggatcttc

SEQ ID NO: 311 - DNA, 15494 bp, Zea mays
  Intron number 3 from transcript GRMZM2G040887_T03 (locus G RMZM2G040887) derived from phytozome v7.0 (chr-ID 1; pos 7 244376 to 7259869)
ggcggttttaaaaaagctcagacgtgaaggtacataactcttctactgacttttttttttccatttgtgagtgaatagtttcaacatgtcaactattctcttgaccatgcattttcttctcaatactcctttgatccatgaatttaaggtgcacatgcctttcagaattaaatattggtaaattttgaccaacatctaggcttattatatgagtttaggacctgtttaacatgtcataactattctcttgaccatgcattttatttttaaaactcctttgatctgtgaatgtaaggtgcacataccttccagagttcaatcttggtaacttttgaccaacatatagccttatcatatatgagttcaggacctgtttgtacagctctagctccagaaaacttgctgctggagctgtgggctcattgaagatatctggtttagcaatttgttattatttggatcaaacacatatatctaaataactttgtttctttacagactccaaatcctgcatggatcttggggctggagctgttttacacaaggccatgatacagaggtggcacaatgttgtagattcttttgtgggaaggcattatgctaggcgccagatttagtttgttaagaagtactaaaagttaggcaataattaatgaggcttatcctcccgggagagttatcttatcccctagaaaatctgtaatatggttaggcacctaagctataaaggtggccttagattgtactaggggatcatcaaaagaagttgtacctgtgggtgcggctgcttgatcaccctgccagaccttccgccatcaggtgacctaagtccccaaccgccacacaggataccctattccctgcgctcttccacccaatccaccttgatatcccacccttcgtggtgcactcctccccgtcctgcgcatcgcagccgggttcacaacaatttggtatcagattccaaagctgcagcgacatctatgtccgacagcgacgaagatcttgggaagatgactgactccgaaaagctggaccgtattctgggacagttggccacaatgaacaaccgcctggacgcccacgctcaacggctcgccctcctggaacaagaacctgttcaaccgacaggatcgccgctggcgccacctctggtcgcgacgaccctgtccacaggtcctgccctagagagtcacgcaggtgcagagcacaccagttctggcgcttacaatggcggattcgtcggtggtcgccgagccccactgcacagcggtcaccgcgatcgctatgaagacagcggaccacgacgaccaaattttacctttccccactttgacggtgaagctgaccccttgccttggatcaacaaatgcgacacatattttcgcggcatgggcgttcatcaagatgagcgggtttggcaagcatccttgcacttggaaggcgtcgcaacagagtggttttatgccctggagcgtgacattggtggtgtactcacttggtcaaggtttatagaattcctccagatgcgttttgggccaccactccgtttcaacggcacggctgacttgaaagcattgcagcgcaccggcaacgtcgaagactacactcggcagttcttgacaatcctgtgccgctgtgacgacatgactcatcgacagcagaccaacatgtacacagcaggattgggggagcccctacgcactgatgtggagatggaaatgccagagacacttcaacgggcaatgcatctggcccgagtgtatgagcggcgtctgctgttatctaccaaccccagcaccacctcatatcaggcaccagcagcaccatccaaatcctcaacacctgcaccaacacgatcgacatcatctgcctccagcaggccccgcttccgacgtctatctcccgaggagatcgctgccaagcgagccaatggcgaatgctaccattgcaaagagaagtattctcctgaccacaagtgttctggtcgcggcgtgttcctgctagaattggaggaagatgacactaccacagagactggttcaccagaagacttgggtatctcgctgcaggctatgaccggaataggagtcgctgacactctcagactcccggtcagcatcaatggcatcacactcactgcattggttgattcaggttccacccacacgtttctttgtgacgctgcagtgtcgcgcctgggcttacaagtggttcctcaacccggtctctcagtaaaaagtggccaatggcgagcgcatatccagcaagggcagggtcactaccacactcaccatcggcgctgaggatttccccacaacatgctactccttaccattggatggcttcgatctagttctgggggttgagtggttgcggtctttaggacccgtcatatgtaattttgacaaccacactatggcattctggcgccaaggacgactgatccgcttgacaggcatgggggacccgattctctgcagcacagccgttgacaaaagccgagaatgcatggaggaacttctacaatcctttgttgctttgtttgaagaaccacacggtctgccgccttcgcgtcgccatgattatcatattcggttactgtctggaacagaaccggtggcagtgcgaccatacagatacccccaactcctgaaggatgaaatcgagaggcagtgtgaccaaatgttgcagcaggggatcatttgtgagtgcacatcagcattttcatcgcccgtcttgttggtgaagaaggcagacaatacatggcggttttgtatcgactatcgtgagttgaatgcaaaaacagtaaaagacaagtttccaatcccagtggttgatggacttctagatgagctacggggttcatgcttcttcaccaagcttgatcttcgcagtggatatcatcaagtccgaatgcatcccagcgacatccacaagacagctttccgaacacattgtggtatttcgagtttcttgtaatgccattcggccttaccaatgcaccatccactttccaggctctcatgaatggcatcttgaagcccttcattcggaagttcacactggttttcttcgacgacatcttgatatatagttcgtcctggacagaccacctgaggcatgtaaagcaggtgttccagttgctgagtgacaacaagctggttctcaagcgttccaaatgctccttcggtgaaccgacaatgtcatatcttggacatattgtatcagcacagggggtcgccatggatccatctaaagtggatgcagtggagtcatggccaataccgcgtacactcaaagctctccgcggttttcttggtcttacaggatattatcgcaagttcatagctggttatgggtctgttgcaagccctctcactgctcttctaaaaagggatgccttccaatggacagatgaggcagcagaggctttttgccagctgaaacaatcactattaacagcaccacttcttcagttacccgatttcaccaaaagattcttcattgactgtgatgcgtcgggctcaggatttggggcagttctacaccaaggggatggagccatagcatttttcagcaggcctgtgtctcgccatcatcagaaactgccagcctatgagagggaattgattgggttggtcaaagcagttcggcattggagaccatatgtatggggtcgaccattcacagtccggactgaccattatagcttgaagttcttgctcgatcaacgattgtcaacgattcctcaacacacgtgggtcagcaagctttttggatatgacatcacggtggaataccggccaggcaaactcaatggcgcagcggatgcgctatcccgtcgggatgaggatatgggaactatgtacaccatctccttgccttcctttgatttatttgcttctttaaaggcagaagctgaatctgattcacaggtggttgcaatctgcaagcagttggctgacgacactgttagtccgggttggactacaacggatggtctgctacggttcaagggcaaagtattcattccagaggcgtcgtcattatggtctgtacttcttgcccaagctcatgaatctggtcatgaaggcgtgcaaaagacagttcacaggtggaggacatctttttacagtccaaaagcactccaccgggtacgtgagttcgtgcgcagttgtgcagtttgccaacgcaacaagactcagcaccttcatccagctggtttgctgcaacccttgcccattccttctatggtttgggctgacatatcaatggacttcattgagggctttccaaaggttggtggcaagtcagtagtgcttatagttgtagaccgattctcgaagtatggccatttcattgccctgggccacccctacacgacagtctcagtggcgaaggctttcttcggtgatattgtcaaactccatggtctaccatgttccattgtaagtgatcgggacacggttttcactagccagttttggactgaactgtttcacatggccggggttaagttacagatgagctcagccttccacccacaatcagatggtcaatcagaagtggtgaaccggattataactatgtacctccgctgtctcgctggggatcgccctaaatcgtgtttgaagtggcttccatgggctgaatattgctataattcatcatatcagtcggctctaaagtgctcgccattcaaagtagtgtatggcagggaccctcctatggtttcctaccagccagggaactccaaggtagcagccattgatgtccagctgcaggacagaggtgcatttcttgaggaaatcaaagcacgtctagtgcaagctcaagtcactatgaaaagctaccaagatcagcgtcgcagagaagtggaattcagtgtgggagattgggtctggctacggctacaacagcgaacaactgtaggggtcactatgatggaataagtcatgtggtcagtgttagactacccgtctagggtttggggtgttcccctgtaattaccgtcataccctcactgtaatgggcctgacccatatactaagtctattaatactactcccaaccctgtttagggctatgggttcagtttccaatatggtatcagcctaggtttaggtctttccttctccacacgcagctacagccgccagggggtttcctcccccctgcagccgccgtcggcccccagccgccggcctcccctctccggccctccctgcctccctgctcgccgcgccgcctgctgcctcggcgacccgacgccacgccaggacgccgccgcgccctccctctctgtccgctgcgcctccctctggccggatgcagccgcgaccgcgccaggtcgtcgccgcgccgcccgctgccaggacgccgccgcgccctccctccctgtccgtcgcgccgcccgctggccggacgcagccgcgaccgcgccaggtcgtcgccgcgccgctacctgtcaggacgccgccgcgccctacctccctgttcgccgcgccgccagctgcaccggtgcccctcgccccaggacgccgcgccatcagcaggtccgcgcccgactgcagaacccctctgcctctctgtcctgtcgccctgctgcgtcaacgcccgatggacgcacctgccaccactacggccggatccaacgtcggggacatcaccggccctggcacacacctccccatcgcccctgctgcactcagcagcgagctcacccatgggggccccccctacatcgccggccttgggccgatccacgccgcctccccgctgcccctgcgtcgcagctccccgccgggcttccccgccttcgcttcacccacctggagtcaccgagtcgcgccctccgcactccccatcaccgactccccgctcgtcggcaccctcgctacgatccagaccgctgtgacggcctcgcgggagcgcgagcgcgctgcctccctcgccctggagcgtgagcgtgccctgggcgccgctctgaccacccagatggccaccacgcagcgcctcctcggccacccgacactcgccgatgcggagcccccagaggacccccacgcctctgacctcgacgccgacctcatcgctgctctccacgctcaagccgccggcctgcacaacatccgggccctcgtgtccgtggtgttggatccggcgtcttcccactacccccgttggcgaggacaggtccttctcacgctgcggcggttcgtccttgacgatcacgtcctcgtcgaccacgacactccgtcgcctcgctcctggtgcctcatggacaacgttgtcctctcgtggctccacggcaccatcaccgttgagctacaggacatcatccgtgaccaggcggacactgcgcgccaggcgtggctcgctctcgaggaccagttcctcgggaatcgggatgctcgggcactccacctcgacgcccagttccacctgttctctcagggggacctctccgtgggagaatactgccgccagatgaagggcctcgctgactctctccgcgatctcggcgagccagtagccgatcgtaccttggtgctgaacctcctgcgtggcctcagccctcgctacggccacctgaaggctctcatcaagaggagcgtgcccttccccaccttccacgccgtgaggaacgagcttctcctcgaggagctcaccatggcacatgaggcgcccactcctgcctcggctctctacagcgctcctaccagcggtcagccgccttcagggggccaggccaaccgtcctccgtcgaccggggctcctacacgccctccaccctccgtcccggcggcccctcgtccgacttccacgcccgacggaggtcgtcgctcccgcaagggcgaccgtgggggtggcagatcctctcgtggtggtccctccggccggggtggcggccatgcgtggccgtccttctacaacccctggaccgggaccatcgccatgtggccgggccaggcaccgagtgcctcccgtccctcggcgccggccctcctgactgcacctcactacggcatgcccccgacgcctccttacggtgtgcccgtcgtgccccaggctccgccagcgctcctgcacccggggacccacacctggacgccttggtccccaccggctggcggttgggacaacgcctccctcgctgctgccttcagcaccatggcgatgaccccaccccctctgattgggtgatcgactccggtgcctcgtaccacaccactcccacgacaggcacgctctctcgctctcatcccccctcccctctcacccatcctcgatcatcgttggaaacggatccactctgccagtcacctcagtaggtgcctcggttctccctgggccgttttacctcaacaatgttctcgtagctccccacatcactcacaatcttctttctgttcgtcgattcaccactgacaactcatgttccattgagtttgacccctctggtttttctgtgaaggatctggccaccaggacccttctcgcccgctgtgacagctcggggccgctctacacgctccagccctctaccgccagcgtgtcaccacctcctgtcctggtctccaccacctccaccacatggcatcgtcgtctcggccatcctggacccgacgtcatgaccaagattatcagtagtctagatccttcatgtagtaggggacattttgagggtctctgtcatgcttgtcagttaggccgacatactcgtctcccatttactacttcttctcgggctgagcaggcttttgacctggttcactgtgatctttggacctcccctgtactcagtctttctggttataaatactatttggtaattttggatgatttttcccattttctctggaccttcccgcttcggttgaagtcggacacattcaccaccctcacacacttcttcacctgggtatccactcagtttcgtcgcccggtccatgctctgcagtgtgacaatggccgcgagttcgataacaacgcctctcgctctttcttcctcactcacggcgtccagttgcgtctctcgtgcccctacacctctgcacagaacggccgagccgaacgcatgatccgcaccaccaccaatatgctccgctgcctcctcttccaggcgtctctccctgccagctactgggcagaggccctgcaaactgccacccacctcctcaaccgtcttccctcgaaggcggtgcgccaccctacccctcacttcgccctatacggcacaaccccttcctatgaccaccttcgcgtgttcggctgtgcctgctaccctaacacttccgctaccgctccacataagctttctcctcgctccacccgctgtctattccttggctactcccctgaccacaaggggtaccagtgtctggacctcacctcccaccgcatcatcatctctcgccatgtcatcttcgacgaagatgtgtttccccttgctggctccaccccacccaccgatcttgactccctcctcgagtctgatccgattcctcccccacctccggctccccgtcttgcgccgttccccgctcctcgtgcggccactacgacctcttccgcgccacgcgcggccccgtcgaccacgcctgcgccacgcgtggccccgtcgatcctgcctgcgccagggggggggggggggagaccccgcctgtgccacgcgcgggccccgtcaaccccgactcgcttcgccaaccccgcactcgtcaaccatcggccgcggccacgccactacctctgcgccccccgactcgggcccgtcgacgagcgcggcccggttcgccgaccccgccgtcgtctatcaccgccgcgagccggccccaccagccgctatcgacgttccggcggttcgctccgagtcgtccgtctaccacccggtcgccatccaccacgaccccgggcacgtccacccgatggtgactcggcgcgctgctggcgttctccgccccgtcgaccgtctaatcctggcagctgctacgtctggcactccacccgacgcttccccggtgccctcctccgttcgcactgccctcgccgacccacattggcgtcgtgctatggaggagtacgcgaccctcttggccaaccacacctgggacctggtgccgcggccaccaggcaccaacgtggtcaccggcaagtggctatttcgtcacaagctgacctcggacggctccctcgaccgctacaaggcccgttgggtccttcggggcttcacccagcgccccggggtggactacgacgagaccttcagccctgtcgtcaagttcgccactgttcgcgccgtcctctccctcgccctctcccgcgactgggcgatccatcagctcgatgtcaagaatgccttcctccatggcactctgacggagactgtctactgcagccagcccaccggcttcgtcgacgccgaccgtccggatctggtttgccggctgaatcggtccctgtacggcctcaagcaggcgccacgggcttggtacagtcacttcgcctcctacctggcctccatcggcttcgtcgaggccaagtcggacacgtccctgttcatctaccggcgcggcgacgacaccgtctacctcctgctctacgtcgacgacattgtgcttacgacatccaccaccgaccttctacaccgcacgatcgtcgcccttcagcgggagttcgcgatgaaggacctggggccccctacaccacttcctcggcatcaccgccgaacgtcggcctcagggtctcttcctccaccagcgccagtacgccatcgacatcctggagcgagctggcatgtctgactgcaagccctgctccacgcctgtcgacactcaggcgaagctctctgaggacgacgggcccccggtcgccgacgcgacgtcataccggagcctcaccggcgcgctccagtacctcacgttctccaggcccgacatcgcctacgtcgtccagcaggtgtgcctgcatatgcacactccgcgggagccccatctcactgcgctcaagcgaattctgcgctacctccgcggctccctcgactacgacctcctactccgcccatccccgacgtcggagctcgtggtctacaccgacgctgactgggctggctgtcccgacacgcgccggtccacctccggctacgccgtgttcctgggcgccaacctcgtctcttgggccgccaagaggcagcccgtcgtctctcgctccagcgctgaggtcgagtaccgtgccgtggccaacggtgtggcagaggcctcctggctgcgccagctcctccacgagctccacagtccccttcagcgcgccactctcgtctactgtgacaacgtcagtgcggtctacctctccaccaaccccgtgcagcatcagcgcacgaaacacgttgagatcgacctgcatttcgtccgcgagcgtgtcgctgccggtgacgttcgggttctcagcgtccccaccacgctgcagttcgctgacatcttcaccaagggactaccgtcgagtgtattattagactttcgatccagtctcaacatctgtacaagatagagttgtgactgcgggagggtgttagactacccgtctagggtttggggtgttcccctgtaattaccgtcataccctcactataatgggcctggcccatatactaagtctattaatactactcccaaccctgtttagggctatgagttcagtttccaatagtcagcagcagttgcagtttttgactgctgcaggacagcagcagttgcagcaggacaacatgcagcagtcttttgactgcacaggacagcagtagcagcagtcttttgactgcgcagcagtagcaaccttttgactgctgcaggacagcagcagttgcagcaggacagcatgcagcagcagtcttttgactgcgcaggacagcagtagcagcacaacagaggacaacagtagcagcacagcaattttgactgcactttagtatctaaaggacaacacctgtgtgctgcagcgtgtagtgtagtgtagtgtagtgtgtagtgcagtgtagtgcagcccctagggctataaatatgtgtccccaacccttctaagggtatgacattgtgtagtgtttgaggaaaaaacagaaaattgccccaactcatagtgtcatcctcttgatgagagttagagtccctctacttacacactacgacttctccctccaagttgggaccaaaattttatggtccatatcaaatcacacaaaagataggggaggtgtcctacaagctgcaactaccaccaaatgcacgcattcatgacgttttccatgttgctctcttgaagaagttcgaaggcaccttgctaacacagctggtccccttaccacccttgttacatgggcgggttattccatctcctgagaaggtcctccgagcaaggctgaatagaggagtctgggagctgctggtaaaatgggtagggcgctcagaagcagatacgtcatgggaagaagttgaggcatttaaacgccaatatccacatgtggcgctcgcggacgagctgtttgttggggaggggggaagtgttgtagattcttttgtgggaaggcattatgctaggcgtcagatttagtttgttaagaagtactaaaagttaggcaataattaatgaggcttatcctcccaggagagttatcttatcccctagaaaatctgtaatatggttaggcacctaagctataaaggtggccttagattgtactaggggatcatcaaaagaagttgtacctgtgggtgcggctgcttgatcaccctggcagaccttccgccatcaggtgacctaagtccccaaccgccacacaggataccctattccctgcgctcttccacccaatccaccttgatatcccacccttcgtggtgcactcctccccgtcctgcgcatcgcagccgggttcacaacacacaactggatatttatgtgagatatgttcctatggttagaattttgcaaatagtaacaatatattacctccgttctcgaatatttgtcgccggctagttcatttttgaactaaaacgcgacaaataaaaaagaatggagggagtacattctttacttcataatataggtatatccagcaatacttccaattcaacaaatataaatcaatctacaactcctattttacgcttatttaagtacaacatgtaaatatttcacgcatgccaagtactagctgcggcaattatgctaatctttcatgggtaccaaaatttctacaatctaccttcaattcctatgcctaagtggccaagtcactggaatcagagggagtatttcaaaagaaacttgtagccgaaaaagttcaatttattaaagggcatactatattgcatagattatgaattggtgaaatctggtaacatgtttgtttttatttagttctgctttctgttttaagtacataagaacaactccaacatcacaagggaaaaataaatcttgttccatcacaattcagttgtcattaccatctgtcgttaccttaagaatggggtatccactactactgggtcaaggcggaccctttaggactgcccttagtcaccatgctaatggtggtccgccctagccgagtggctgggcctgtctagtaaggccactggcctcgggtgaagaccaacacctataatcagcgccccgggaccccaacggaggggcctcggatttgagatgagtctggaagacgagggctctcggcacctgcgcccaggggccggacccccaggaacggtcccgaccctcatggtaggccacccggacctccggcctaagggtttccggtgctaccacgtgctggccaacaccggaggagatgggacctcccccaggcaccatccggacctccagccaaggacggtctggagctgtcacgaggaagggtggtcccagtcactactccccacacaaggcgaggcctggtgctgccacgtgttctacgacgcgtgacataagccaccggggaaagcctaacgtcaacctccgagtcaaaggcttctctcattaactgcggatgagacgtatacctgcccgccccagtggcatgcggcgcgtccgcagtacacaggccgcaaagtaactcgcgtgttaccgaggcaagaccattgactccctgcgccgcttgggttgctgtcattatgactcccactgtagcccgcgcgttaccgaggcgaagggaggcaggcggagaagataggacgccgtcgcctgagcacccctacatgaagtagcacttcagcctacgccgcaacctacacctgcgccctgctccgattagatatggcaagggcatgacaagccaggagatttacacggagaccaagaggaggtatccgttctccacgaaccgtcgctccagttactccatatctagcactagatcaatgggcccacttgccgggctcggtcaccatgtacgtgcctcccttggactataaggtagtgtttggttgaagagccaagtagaacggagccgttctgtcccagttttgttgttgtttggttacaaagtaactagaacggaatggctccaattagtgaattattctcctcagatccggaaccatcccgctccaaaaaatcaaccggacggagccgctccgttcccagcccgctcgcatagtcacgctccgttccgttcactctgcaaccaaacaaaaaacagagccacttcgttccagattaccaaacacagaacagagcggctccgttcatagaatcagggatggagcggctccgttctacttggctcctcaaccaaacactacctaatagggagggcacgcacacggtagaggataagtctgaagaagttccaactcaagcttctggacgcacacagagactcccatgcaatgatttcaagtcgtccgactaatcacgattagtcgggctgattggctatttgggctcgattagctggacgactcgactagataggctggtcgtcctggtcatccgactaatcgctgattatggcgactaatcgcccgattactgtttcctagtcgtcccgactagggttttgttattgggccattgtcagcccatctacagtatactttagactaccctctcctctcctctgtaatacctagccgccaaacagtgcactacgtcgcctactctcctcttgccagcccgactattgtagcccttgcccttattcacacttggtcgcggtggctgccccttcagacctacagctcaccggtggctacatcatcagcggttacgtcaccctgccccttcccttgctgtagtctccacctgcggcgattgtttcaaggttcaccagctacagtctccaccctgccccttcccaagctccagcagacctgcaccattgaggagatgagctcgtcatcttaaggttcctcctgctcccccctaatctcccccttctctgcagttctgccaaactagtggatggttgctggccgctctaatcctaagcctgtgctaagtagtgactttctaatttatataatgtatagttgtatacatgtatacttatatatatatacctatataagtataactactagactaggacgaccagggactgactaggagtcgactaatcgccctagtcgtcgcctaatcgcgactagtcgcctggtcggtcccagggatagaccaggtgacttgaaaccatagctcccaggcaatacaactcacagttgggtattacgctccgacggtccgaaccactccaacccttgtgttctcgtgttcttccagctaatcaggcaaatccctaagccccctcctcatcttaggaccagagcgggtgcactccgccacccgaccggagaaattttctctctgacaccatccattcatgtatattctttgatttgaaacctaaggttgaagtgagggcatcaggtgtttcaaaattaccataagatgtttttgaaactctctctcgtcctcgttttttgctggactccaagcctgtagcctagtggttacagtgctttatgtagtgtttggttccggagtatggtgagacagagccactccgctaccaatttgttgttgtttggattggttccatgtaggatatagtggttctaaaaaagaaaaaatatgctcaagtattgaaccatccgtctctccaaaatatctcggatggagccgattcatcccaactggctttggaaccaaacactaccttaatagcaactccaagtcctaggtttaactctttgtgggagtgaatttaggctcgctgaaaaaacaatccccttgacagcaaagccagggtctggggattttcttggcccgcaaggttgagttcttccgtctactcattttttttccttgtgagggcgttacttttcttatttaactcaaaatattttttactagttgaatgcggataagaatgtatgcagtattcaagaaaaaatattacaggttttcaagcttaccttgttggtggctgtgtgaga

SEQ ID NO: 312 - DNA, 3909 bp, Zea mays
  Intron number 2 from transcript GRMZM2G106980_T02 (locus G RMZM2G106980) derived from phytozome v7.0 (chr-ID 1; pos 2 03649364 to 203653272 reverse strand)
ccgagccatactcgacctattgaccacatctacaggtatatttaatttattacaaatacatactgtatctgctttctgttttccattcaagcgtccgagtaaaactagatacttctaaggccattctcggtcataaactctctcgtcgtagagcttcatgacgcagtttgataggctaacatgcgatatatataaatgttgcatataaataaattgctttcaacggtgcgctttctaataccttgaaaaggggttggcatatagtttggtgatgatgaaactaatttcacctatttcataataaatatagtgtcatgtcattaaaaatcctatatgacatactaattaatgcaatggaatctcacgtgaaacttccattgataacaacctaacttgaaatagccaggaaactagttgtaagtcggacgataaaacaatatttttcaccagctttgggaaattctcttctagagtgggatggaaatagacgagatcgatttcacatatttcaccaacgtgatggtttatacaacattccctttataggacgtactttgactatccaagtgacccttgaccacaaattctctatgtaatattatttaataattgaaaaatcatgataactaggaagcgattttaagaaatgaatctaatggtgtcgttttgttggcatatataattaatttattattgaaatagttgttgtcaaaacataaacttggatagtcaaagcaagccttataagattttttttatttcagtactccatgcttgttttaatatcaatagttctaaaaaaccatactagagtatggttagtagagctccgctcccagcgattctgtatatatgtaccaaatggttaaattcactactagaattcggctttttgccgagtgtcaaatgttttgccgagtgttttttcggcactcggcaaaaaagctctttaccgcgtgccaagaaaaaaacctttggtaaaagaaaacactaggcaaaaaaactctttgccgggtgttttatttttgacactaggcaaagagtgtctttgctgagtgctttttttaatactcggcaaagagcttctttaccgagtgtcaaatatataacactcggcaaagagctattttgccgagtgcttttttaaacactagataatgacaatttaaaaatcacattctaaatcagtaaattaattcaaacgaaaaagtttttaattataaatttgtataactcatcatgatgtgcagtttatattttaaacatttcttcatatgacaaaataaaaataaatttgtttataaaacatatatctctcccctagtttatgaaactacgagagagatgtattagatttgtgcatattgttagaaccatcatgtgagatgaacaaatgaccaaacaaccaaaataaactttatagatctttagaagttatagaattttgtagttgacaactttttcatttgaagtcatattgtcaactaaaactacgtctaaatttaaaaattttaaaaattgaattttgaaaacggcctcgaaagaaaaaaccaccaacataaaagttgtaggtattgaagagttatgaaactttgtagttgacaatgttttggtttgaaatcaccttgtcatgcaaaactatgtttgaattttaaaatttgaatttttgaaactacctcggatggaaaaaccactaaaataaaagttttaggtcttaaaatttaatgaaactttgtaattgacatttttttgatttgaaatcatcttatcattgaaaattttgtgtgaagttttcaaatttaaaaatcaaaatttttaaacgacctcggatgtagaaactatcaaaatagaacttgtagatcttaaaaagttatgcaactttatagttgatcacatttgcaaatgaatttatttagtatctcaaataatcaaattactctcggtttgttatagttaatgaggaatgaaaacgtagtatagatataattgatgtagtagtgtaatggtagaggagagtatgcgtgagagagattgcgagttcgaatctcaccattcaaaataatagtgaaaaatgatagggtgatgggtatggtaatgggtagtggttggagagttgttgtttacataattttaaaaaatgttttgctattttttggttttttttgcgattcttaatttgcggagtgttttttttgtcgagtgcttttcgacagtctttgtcgagtgtccgaaaaaatactcgacaaagaaccatttgccgatgaaatgtctgccgagtattctatgccgagggtaacactcgggaaaggctttgccgagtgtcttagacattcggcaaagaacgcgattctgatagtgattgttactgaattctagtggagagttaaaaagtgaatgaagaaaaaactactgcaagttggaaactaaaaaccactactcggagtacccattcaatcaccaccaaaatcacttctcacctgcatcccaacatccatccaccaaaatcactccaccatagaatcaaggagtgaagaattagaaagtggagctctacccaactagttctaatatatttcatccattgtaaatacaagattatttgttttttagttttccatgtacaatatttttcttactagcttcttttattgtcattatattgcatctcttctcaattattgattttccatgtcataaaaactagtcattgatctcaataagagcatgtacgctccacatgttgtcaatccaaaaagggaagaatttcacatgctttgaggttgttataagttatgatgtactagcataaacaggcacactccgccacatgctttgaggttgtcataagttatgatgtactagcacaaacaggcacactctgccaggctgaactttttctagtgaacagtaaacagtagcaaacaacaaaactagatgggttgtaagaaaaaaaaacgataaaacagtaaaaatggacgaacggtaatagaagatcgatatatagtgtctgagtaggaaataaataacgcacatcagcatatgctacagtaccgacggtggaatgaacagtgtagaacaatgtatgagtgtctaaggcgttgagaacacaaccatccgtgtgttcagagatcttattgtgcaatgaatcaaagtacgttatcaaataatttagtactacctccgttcaaaaatatatgacaccgttgattttttcgaaaactttgaccacttgtcttattcaaaaatataaaattttaagtcaagcacaaacttaaggtagataaaacaaatcacaaaaaatgataactcattattttctttgaataagacgagtggtcaaatcttttaaaaaattcaacggtgtcatatatttatgaatagagggagtatgctacttttagattcctaattccattttattattgtaaaactgaaatatctgtattaggtttcttagagtcagcatcaattcacacatattttttctctagaaacgaactttgataaatgggatatgatatgatatgatatgatcgttccagcttcatttcaaaattccttaggtcatgactgtttcccatgattttctcataataactcaataaatacacaatgtcgtatttgttataaggaccatgagagaaatttgtaacaaaaagtttagttttcttcatagttagcattaagaatttatcctttttcaattaacacaacctagtgcataaagtataaaagggtacatataatttacatatatagaatgtgcatgaaatctaattaccacatacttattttatttcctcaacatgcctttatcatcgctaattcatagtcaatactcattcttgctggctatcaatgtatggttcccaagttggtgagggctcaaggaaggtcaccacgtcaaat

SEQ ID NO: 313 - DNA, 847 bp, Zea mays
  Intron number 3 from transcript AC208907.3_FGT005 (locus A C208907.3_FG005) derived from phytozome v7.0 (chr-ID 1; po s 285022162 to 285023008)
accaacaagtacatagttcattagaaatccttatgtgaatacatatttatattttaaatcttaaccaatagtcctttttcctgaccttgtcatatgaaatcgtcccgcttgttaggtatgacagtgactcaactataggccatagattatacacagaagatgtaacaatagaattggaaggggaagggtggccgtttgacaagactagctaccaatatttaatgggaaacaattgcaactaaccatgacgagtttcttgaaatataagtaatgctttctacttatatatatttgttgtgcacttatattattactaatgtggttgacataaaatcatgacagtagaagttatctagaaagggttgtgttgaatctgctattgtagagcatcttaagacatacattattccaattgtggaggagtttcaaaaggtctgaaaattttgcaattagaaagggaatatctaattgaaattctgtcgagcttaagtttcttcatcaaatccattgtgggtggtttgaaaaggttacttagttatgcttaactacactgatcactaaagggttcagtttaattaggatttacttgtagtagtttgttgctaaaattttatgataaatggagaaccttcaaaaataaactatgtcagagggaattgcatacctcatgatactcagactcaaatttagacaacccagaacattttgcatcaaccactctgattacttgctttcctctcttctaatactgggcattctcaagagttaggtccttcattccctcactctttgtttgctcatattgttagcagcctttccactgtcatcattaggcatcgagcactca

SEQ ID NO: 314 - DNA, 8419 bp, Zea mays
  Intron number 3 from transcript GRMZM2G106647_T02 (locus G RMZM2G106647) derived from phytozome v7.0 (chr-ID 10; pos 148856901 to 148865319 reverse strand)
gcactagagacaactgccaaatccttacaaaagaggtttgtgttatttcttacttttcgttcacgtacttgttcgcgtcttgctgtgctgcctaaagtagcaattataattttccaccaactactatgctttccccacgcgtcattgctatgacggcatgctttcattacaaagcattcttagttcttcgcataggccctatctatgtaagtataatttcatcagtgaacaacttttattaagttgcagagaaaacatgtcattacatgttgttttgttttattaaaactcctcttttagaaatgaccatggttcccctgtgtggaactgccatatctatacatgcatcggtggctcggtgcctttaggctgtctctagcagcttacccatcgtatctcttatcccatctcctatttcaaactccactcttagactgtctccagcagatcgcacatatggtaagcgatgtgacgtgagaaattggataggtataagattcagtcatgcctgtaggtatgatcttaagagactacatgcatgttcacaaggaaattagcttcttgaagtcactctgacttattaccaattcaaattggacgctcttattttactcaatgaattactgatatgatacattcaattttagttgccactcccataatttaggtagttgatgatgcacaatgacagctaggaaagttttccagcaaatttgatcagggctttgactcagcccttacagactccaagccgcttacatgcgcccccacactgcgtaggcctcttgagtctatttcgcctcagtctgttgtaaactagcgagatgtgtgttggcttgtctttttttttgaacgtcgcaggagagctgcgagtcatttcattaaggagagaaaaaacaagagtacgacgcaactggaaaaatagcgtcgtgtacaaggcggttaggaactaacgcgccacagcgacacacacacacgaccacatcactcatacacgaccacagccacccgagacctgggctaatcccctgagatgagtcggcaggtgagcagttctctgaggcgagaggcacctgccgcactccaaagagcacattcagtggccacgatttgcaggacagttcgaacacatggcctttttccttcgagcacgcaggcatctcgatgcttccaaatttcccaggcgaccagaatgatgagggaattaacactttttttcatctctttcgggactgctttagtagctgtacaccaccagcccacaaaacggcgacaaccaggctgaggtgcaagggcattcagccccaagctattgagggtagatgtccaaacctcacgcgcgagaacacaaccaatcaggacatgttggatagtctcctcagcttggtcacaaagggggcaggcagatggatgaggcagcccccttttggcaagcctatcagccgtccaacaccggttcttgatagccaaccaaacaatgaacttgcattttaaaggtgcccaagacttccaaatacgcctccaggggccaaacttaattgtccccgtgaaaaaggcctcgtaagctgatttactggtgtagtccccatgatttgttagccgccatacgtgctgatctggaacttcctgttggagcgccaagttatcaaagaggttccagagctgtaaatactccacaagcacctgtactgatagggcgcctcttatatcagaaatccaactatggttctgcaacccttgcgccattgtcctatgtctcttagccctgttggggatcaactgaaacaaactgggggcccagtacgaaactgattttccttgcagccatcgatctgtccagaatttagttgattcaccattgcccaccacagtaacaacagcaacgtcaaacagggcttgcgcaagaggaggtacttcgagggggaggccagcccaagggcgggaggcatccgtcttctgcagccacaaccaacgaatacgcaaggcccaaccgaacagctccaagttaagtatacctagacctccaaactgcagaggacgttgaacacaatcccaggaaacaagacagctgcccccatttgcattttcctgccctttccacaggaaaccccttcttcttttatcaatagctttgagcacctatgatgcgcggatacttcacaaaactcacgtaccggtgtcggataccgtatcagatacggatacttcccggatacttccggatacgtatcggagacgtatcggatatttttgtagatttaaataaataaaaaagccggatactcctgggacaccttcccgatacctgtgcgatacgttccaaccctaggcttcatatacgcacgtactcctgtatcgcatagccgctgccccgaagccacctctttgtgcctccacttgcgtgccgctagccacagccgctcgtcgatctgagctgccgccgccgccgtcgttcgccgattggagccaccgccgtcacccagtcagtggccgattggagccgcctccgcgaggcctgtggtcgtcagcccgtcagccgccgattggagccgccgctgcgaggtctgtagccgctttcttcccttcttgcttctcaatctcctcctttctcctcaatctgctcactgctacttgtctggtcttgttagattcagggcagcggctctgggtgaaggccgctgcctgctacttttgctagattcggggcagcggctctggatgaaatctagttttgctaggtttgatggcttgatggcctaaactttatctagttttgttagattctggtcttgttagattcggggcagcggctctggatgaaatctagttttgctgcacagcaacagccgctgcctgctacttttttgctgctctgggtgaaggctgtaggctgcagcagcagtgataccgttgctgcaagtatcacagccgatggaagcagttttctttatttattatgtgatattgtggtctattagtgttagaacttgaagactgaacactgaagtttctaggtttgatggcctaaactttatctatgtactatttgtgaaattgtgtggtccactatttcagcatttaattttatttataatatttacgtatcgccgtatcggtgttttttgagaaatggcgtatcggggtatcggcgtatcgcgtatccgtatcgccgtatcagggcaacacagttgagcacccatttagggaggtccaaccgtccaaggctagcatagagtacacagggatggaagactaccactctcaccatcacaaggcgaccagcacggctcatgagcgatgccttccagcctggcagtttgttggatactttatcaacaaggggctgcagcgctgcatttgtcagtttccgaattgacagaggaagtcctaggtaattgcatggaaactcctttaactcacaaggcaacagctcagagataacagccaaatcatcgtctccacactggataggtgtgactgaacttttggtaatgttggtcttgaggcctgtagaatgcccaaaaatatcaaggagccgagtgaccataaggaggtcagatcttagtggccggaggaatatgacaacatcatccgcataaaaagaaatacgatgtttagcctgctgatgagcaatgggctgtaagagatgctcctgagttgcaaaatgaacaatagaatttagaacttccatgaccagtataaatagcatgggtgacagagggtccccttgacgaaggcctcgacggtgagagatgcagtccccaggttcaccattgattagaattctggtagaggatgtggacagcagcaaactgatcagattacaccacttgcgaccaaaaccaagatgttgcagaagctccaacaagaaagcccaggacacagaatcaaaggccttggaaatatccagttttaagagcacatgaggctccttatgatgtaacgtccttgcaagctgctgcaccatcaaaaaattatccaggatgctcctccctttgacaaaagcactttgattgatggtgacaagcttgggcagatgaggagccagacggttagcaaggagtttagccaccagtttagcaaaactgtgaattagactaataggcctgaaatccttgacatgtagggcttcagtctttttaggcacaagagtgatgaaagcggagttgataagcctgaaattgaaaacatggcccctctgcacagcgaggagcgcagccaagacgtcatccttgattgaattccaacagaccttatagaatcggcccgtgaaaccgtcaggccctggagctttgtccaatggaatctctctgatagtagcccagacctcttcctcagtaaatggcacctcaagctcagagaggtcatgctgctgcacgcctaaggaaagaaaatccagagtgaagtctctttgctcagccgaaccgatcaaagcatcataaaaatcgagggctgctcgaagtttgtcttccggagatgtgacaacccgatcattaacaataaacttggcaatgatttttttttcttgcggtaatgtgcctgttggtgaaaaaaggaggtattgtcatcgccctcccggaggtaaagaatacgggaacgtaatcttgcaaccgtgtgctcaagagaggccagatcgagggaatgcatctttaatttttttttctaaaacgctcctcatcagctgagagggcacggctatctcttgcaatttccaagcgatgtaagatttcattagccatttcaagctgcagcctaatgttgccgactttgtgttgactccatttttgtaagcctttactaaggcgctgaagtttcagaaatatgcgctccaccgggtagctagaagcaactggagcattccaattttgtgagacagcatccatgaaaccaggaagtttgggccagaaactttcgaaatggaaacgtcgtttgccctgagtgacaatattcagacccaggaccagagggcaatgatcagatactccagaagctgcactctggaggagagaatcaggaaaaatatcatcccagtcagcacagcaaaaggctctatcaagccgcacaagggtgggggacgacctctcatttgaccaggtaaatttgcgaccgtgcaaatgaagttccttgacattgctatcatccagaaacctctgaaatcttcccatcaatactctattcagattggcattatttttgtctgcagcttggtagatcatgttgaagtcgcctgccagcaaccaagggccaacacagagagctctgacctctcttagctcctgcaagaattgtagcttcagatcatcctcttgggggccatagacaccagtgaaccaccaattcctaccctcttgctcacaaactggacagaaaccgaaaatctgtccacacgggaagagattgcatgacagcaggcccctttccaagcaatgaacacgccacctcgagtaccatcagcggggagagccacgaacttgtcaaaagcagacccaagagcagagaggaggagctgtgacgacacgcttgcaatcttggtttcttgaagacacacgatgtcagcgctggaggaaaggacagtgttgcgtacagagtttcgcctggccgtcagattgaggccccccgggtgttccagactaggatggatgacagattcatgaggaacacgaggcacgaccaaaaggacaaaggttcctcagaaaccgatcagcagctccctctccaggacgtcctcatcatgatctgtctgccaaccgaaaatagcagcaagagcagcaagctccacatcagacagaggcgtctcgaataattactatatacaatgtcgtgcaacaaaacgttcacccgtaacgccacgtcgccttcttaatatcagccatctgatatgcatcacacggttgttcctactcttccgcttatctctgctaggctgccctcgctccttttggaagcggcttcgtcgctttttcaccgacgacgccatcctttttcgccgccggcaacatctgtgagactgtgaccgcgtaaggttcctgcttcacttcgcgtcgcttgcgatttctctctcttcttctactttccagcctctctggcgatgcaccacagaggacacagcacgcatgcgacgagctccaagcagcttgcattatttggagctttgtctgcaagacgggagccttcggctgccttactcctcttcttcgccctgggcccgagctaggccggcgtggctgcaccgctccgtcctcgacaagcccgcgtcaccgagtgcctcgtcggagacagcactggcactgtcctcgtcgccgcccgcacgatcaggaatgttgcttgcggctcgctttgctctcctctctcgtcccggcgtggtcgcacccgcgcagcgcctccaatggcgacgacgacgaagacagcaagtctcagcatggggcgagtctgagtgcataggctacgccctagcaaagtcactgctaaggccgaacattgtacaccatggtggttatctctctccaattccatctactcaagaatgtctcactcatggatgatgcacaccacgtgctcgatgatttggctctataacaatttttggtgctagcctcagattatttctgtttgagagttatgtaaggtactactaactctgcattttttagttatggtttcgaaacatgtattttcaaaccatgactaatcaagtatattctccaccattaattcctctaggcatgacctggaaaactgcttagctgatgctgtaacattttgatgtctctgttctctgctttctggaggtgccatcccctctctttggggaggcttctggttaaacttgcttcagtcacgatgttactgtgctggataaagaagatgccaaaggtgcaatctctcacaatgctgttgtattatgatttgcattcttcccttgatttagtcatattaaataatggtatgaatggatagttttttgctaccagagctaacagaaatcgtcatcttccattttcgtatgttgtgtagctgaactttgaggttgctaaaccatgcacccagaatcggagttttgtagttgaagctccatgtggtaggaatgtgctcacaaagcaaatcaaatctcttttccaataacagggccgttagtatccttttcccttttattttgaccagaatctccatatcttttatctgcagagttgagatacttgcaactatacacaatagaatgttcttcgaacctcaagctgcagctcttgctccaactattacttgcctactttgtttttcctatcagtaatgcttgctgactcattgaaacaaaccagtctttcctttgtttggttttacattttgagagcttttcttaaaaacaaccggaggctggattggttatgtgcaaaactattatagaggccggaataaaatttctattttctaagaaaatagaaataaaccaaatacgagtccgagtccgactatgtgcaatgtacaagaatatcttaaaataagggagatactatcctacaggtgtttggttttcattttttcatgtttattatctatatgatcatgactcatatggctcaggtcatgttatctattgtagcgtcttcttgtctccctcgacattgcccgtctgcttccttgcgccttgcttgtgctgtgggctcccttgtctcgcctcttttccagccgtggccaattgtgtccattgctgggtttgccaccaccttcccgtgtcaaggcaaacccctccatttcgagcacgttccaaacccaaacttcacattgccttcttttgagagctacgtaaggtactactgtactactaattctgcatttttgaattatggttttgaaacatgtatttttcagaccatatagttgttcgtaaagttatattgaatacagacacgcgcagcgcgtgcactatactagtttgcagtaatcatcttgggctttctggtcaataacctccttgccacccaaacttttgattacatgtcgctgggctgcggtaacaacaggacccggggagcacggctttccaccggcgacacttctgctgcgccgcggggcagaggcaggcacagccactctctttctcctcctcctaggagaaacggggagaggcattgtcttgaaactgtttcagccatgtttactaggccctgacaaacaaatgttccaaataagaaatacttgaatgtgttctgatgaaatgtgctgtttttgatttgtcaataatgcatcaagccaatattttcctgccatgttttctgatgcccgctacatgttcagtgtgtttactgtacccttttctttcttttcttttgtttgcatataatgtttgccgacttcagtttacccagtgttgacggtgctgcatgcaggttccaaatttgaaactgacaggtcctagccgtgc

SEQ ID NO: 315 - DNA, 5858 bp, Zea mays
  Intron number 1 from transcript GRMZM2G436787_T01 (locus G RMZM2G436787) derived from phytozome v7.0 (chr-ID 2; pos 1 97847980 to 197853837 reverse strand)
tggcggtaagtttcagttttctgttgttacactatcatcaatggtatgaggatggttttctgtttttttgtgcaagttaatccccttaaactgaacatggttatctcacctaatcccctttgaattgcaagctcgtttggggttaaggatgcaaactgtgagtttggagggcaagctgagacgacaactatgcaagttttgggcctatggtgcaatcttgtgaaaagaacgagtcagatattgtttcatcagcacctgcagacaattcttatgcagcaggaagtagacaagtggaaacaaactgaatatatgctgaaatttcccagaataaggtggaccacttttgtccactgagatcgatgggccaacagccagtggatcagaacatatggcgctattgctggaagaccacttggcaaccaaatattccaatccattataatatatacaaaaataaggggacttgctctccttatccttttttcctcccccgacccatatatattggctatctacaaatatctatctattgtatagtttcaaggtccgttgtgtgacggaacctcccaagtaattaggcccacctacagttgtccttgtccaacggacctcagacaaccctgtaggtgcccctgaactacttgacaagctcggtatctttccttaccttaccaggaacgtttcacccgtcttgcagacattatagaacatcggagataaaggaatgcggaagcgattacataaattacatttattttaaaagcaagcttaagttattttattacagaccagaactaaaaaggcgagtgctgagtagtaatattatacaaaccaagggaggcaaaaactcctcccgataagttttaagcaaaagatcctatgtggaggaccaagtcctcccgcacttcattcttgtttttcttcatttggtaccaccttggagcaaaagcaacaaaaatttgtcgcttcctcacctaaaaacaacaaagggataaaccctgagtatggaattactcagcaagtcttacccgactaaggaaaagactctcaagggtatgctggataaataggagtcaaggagaggctttagcaaaaatcaacttatacttttgcagaagtagcttactaaagtgagtccttactttcaatcttttaacgccatattaagtattaatagactctatttgcatctagtctaatttcaacatctcatcaatacaacatcatttttatccatagtgttcatatcctgacttaggttgtagaaaagtgaccaagtcttcataaccgcgaaggtacggcgatccgaatcgattatactcagctgaggatctccaatcacacgacatatgtagcacttaacccttgcatatgtcaacccgccaccggggttcttaagaccagatcaggttcacgcaaaccgagagcacagatacaccaccgtccagcctcttgccacggagggtacacgctactctcgccaccgctccacgcccatttcgtgttatcttattctggccttagtctgctcgaggcaaggcttacccatgacgaggcatgtgaccagttaaagggtcctcggtcagcacgcctacatacgcatcaatccttaatcaacctgggtagaacatcacctcttcctaacccaagtctcaatttaagtatttccatcctcaggattgtgtttgttccttaggatgaaagagcatcacagggaactttgcagtaagatcccactattgctccaaatgaaaatattcttgcaggtagaagccatcctttcccgggctaggctatggacaacctctatccacaagatctaagcaaggctaagcatttttgtaaatcataattttgatacttcacagaagtatctataaaggtacggatatcaaggaaagcaatgcatcaaagggtttcaagcaattcctatgaacttaatgcacatttcactagacttaaagtgtgcgaaaagtatttaaaaacacaaggaaaggggttgcatgcaccggggcttgccttcgttagtaggtgagtcaggctcggatccgcagatatcaaagtagaaacaatttccggcctgagattccgaaggtggtggtgtcctttcctcggtgacttctatttcttcttcacgttctaatcataaccatacatatgtataagaatggatgccatgggatgctcatgaggatgcaaagataatataaacttattatctatgtcttgaatacaactttccttcatggaactccgagaacttagggtttccggagtcggtaaaggagttcatagggcagggggtggttttgggttctagttatcaaacatggtccaaatcaattcaaactctacccaaggcttctaaatattgttttaagttcccataaaaaatttgggcatttatggacttacccattattttctaaaaattcataactattacttttaaccactttaaatactctaaaaattcttatttccactaaaaatcacaaaactatttttattaaattctagggaaaataacaatcctaggaaaattggtttcacaattttatcatttttctactgttttctataattgttttggctctggagataaaagaaaaagaaaacagatgaatagtattggactgaatccagcccaggtcggcccacgaccagaagaattgcgcgcgcccgcacccgctgggcaagtttgcacaggggccctcggggtttggctaattggagaacgagcttctttactgttgcactgtgtcgctgacagattgcaaagaagcccctgcagttctaattcttcgcagagggaggtccacgacaacggccgcgcggaggatgaactccggtgaggttgtgccggcggatttaagcaatggccggtgctcccgagcggcgcacaccggattagaccctccccgaacgattcccctaacttaatttcacgattgactaactaataagctctggccacggcggccgtgatcatggcggctatacggtcgtgtgcccggcgaccagagaactcctagttcaattcagtggctcggcaagcatcgtaggcttaagggaaaacttgaacgaggaagaggaagaggtgaactgaccgggagaggggctagccgcggtgaggcgagttcacggtggcggaaagtggatttggggagaatcagaaattatcgagctctggtgaacgattgtggctgattagtggtggctggttagctgacgaccttgcggagctagtcacaggctcaatttatagggaggacgggcggtggtgatcaattcggccgagccgtgctggcggccggagctagagaggaacgtgggtgcggtgaattcgtgtccaccgccgtggcaacctccccgtcgacgatgggacgggtatagggagtcatggcgacgcggtggaaaggcttggacacgcggcgcatagccgggaagcggcgttcatcggtgattttatcggcacagccgcaacgaggaagagggagccacggggatcaccggagtgctctccagctcaccgtcggcgaggatcttttaccatgtgcccttatctgcccatcccgagcacaagtcgggccggcaacggcacgaatcacggtggaattggtcgttggcggtgggtttgctggcgaccttatctgtttcagctgtacactgtaccatggtgaacaccccatcagagaacctgacagccagagttgagggtcgatttccttccaaatttctgtggcaacacaaaccaaactctgcagcaaagttatagatctactaaccagctacaagttggtcatagatgccatgggcagattcatgctggaccatagaggaatctttgctcaaagtctcagtggttgcactgcttctctaaaaattcagacttaatgacctgacagtccaactttgggcttaattatctctgggtttttcttaacaagtgagcttaccaccttaagcaaagttgttctcctatgtttggtcttcaactttgatgtggtgtcctaatataaattctcattattttgaaagctacacagccccaaagttgggcctataaccctgatttcagacttagcataggaatcaaaattggggtcctttttgcaaatgagtccaaaaacttagggtttaacttgcaaactcacatatttgtgacccaaatgatttaagatacttatttagcttggtttttgcactttagcccaaaagtggactaattttgcacataggcccctagggtttagttccagggttccaattagggtttctggcatcccaggggtataaatgtgactccactttgtttttagggatattttatgactctttccctaaagtctttaggttttctcaccttaggttaagctttacccctttaacctctatttagggttaagttccttaaccagggttccatttgcaaaaacattaaaacaatacaacttgtttgaaatttttgcctagtgaatgcattctaggtgtattaaacatatgcaatgccaatgcttatgatgctatgctcaagttttagttatagtaacaccaggggtgttacacgctggcagctatgagccccacctagagctgctattttatattaggtcatggccaagggctgttgttgattgatgctattttagattttgtttgctgcttacagtaaaactggacagtaatggtatcatctagagctcacctcaaatagttttctgcagaaaaataaagaagctaatgggtacagacacaagacaatcttatattgggacttgatcagcttggtgtttgggaaagatcatgcaaatggtgaagcggcaaagaccccagctgatggtgcgagagatatgagtaaggaagagggaaccggtaaagatcttacttcatcaacaacttcaggaagcttgaagaggcagcggtctagtgattccttcacctcaatgatggcggagaaattagacaagttcactgaaactattagggatgaagcaccaaaagggccaacatcataagaaatttttagcacattggaggagatagatgggttagatgaagacacatttttagacttgtttgatatcttaacatgtgatgcgcgcaagtacgagtccttattggcacttgtcgtgatcctaaggaagagatggctgttgaagcaacttaaaaagtgaaccgagttgtggttgggtgaattcaacttttgctgggtgtgttgatgttgatgtcttagtttatgttgggtgaattgaacatcacattgagtagcaagtaatgtgttccaatgatatgtagacatttgagacaaatctacattattattactattctcgtgatgcatgttgcttgataaattgtagggtgaaaacttgtctctaatctattgcacatgtatatgactcatcaaggcacatgtgcacacaagaaacatgtgtattttgtcgtgtacaagttgatgtggttacttccctccaaatatataaattccatatataactatccaaacaggatattgaatttgattcatagaaaagaattccattagcatccaaacaaaaaaattgaattgtatcaaattctaaggaattactttctttaggaatctaatatctagaatgttattcatggaatgagtttcatttccaaggaaacaaacaggcccttattgacttcttgttttagtggttggtcctaatggcgtcggcaagtccattatactgaaactaatttttggggatctgcagccaacttctggaacagtatttcgtagatgttgagatctatttcctgttgctgttgattgccatgttttccatgcaggaccctctttttgtttgtttgaaatttccctgtgg

SEQ ID NO: 316 - DNA, 2836 bp, Zea mays
  Intron number 7 from transcript GRMZM2G383215_T01 (locus G RMZM2G383215) derived from phytozome v7.0 (chr-ID 8; pos 1 29652417 to 129655252 reverse strand)
acaaaaaaaagaaaggtatatcttcaatggtgttttattcttggatttgatagcctggtcattataggcctcacaatatgacttctatcgcatagtgtatgctcagacacgatttttttgcttgttgaaatttgtgataacaagaagatggcaagggttgtgtttgaatttatgttgtttgttcttttttgttagataaacattaaacattaaacatttgtagacaatgtgaaagtgttagttcttcagtcaagtgccctgagacatatacgttgttcttcattaagtgccctgaaacatatatgctatcttctgatgtttacttggtgactgtgtatatatagaaattaaaacatgcattgttacttaggaaattgtatatattcatgaaaattattgactgtcaagccctattaattaaatggccatggtaaactgaactcaccttgtaagtgagtttatttataaagtcaatgcagttgacaaacctctggattctaaaacatatgttctcattcagcttttgtgtcctgtcctgtttcctcaatcaattcacacgagtcaaaatgtggtaatttttttaagaaagtctatggttcattggttccaagagccaattacatctgattgtgatgttatagatgttatgttatcgtattgcttgaaagtgacacctccacaaatgattaacctagataacataataaaacttgatcatgatacttcaagtcaacttgataggttcgatcatgtattaaaagctaggaatgactatgccaagtacataatactttggatcaatgcctatcaactttatctaaccattttggatatgttggagcctaatagttttggcttcgctaaatatattttgtcttatcttagtacttgttgtatggaaaaattccattttttgtgtgatgttctcatggaataactttgcagattgtgcatttgcataggtagtggataaacttcagaaagttatagtacaaccaatgttgaccaagccattctaaaaaacgtaattttgaatatgctaagttattccatgtttttagtatactgtactattcatgaaggtgctagattgacaaggattgatcttactttcaggttccatcaaaagttattggtgttgttttagcaagtcaactaggaaaagaataggtaaattaaattacttccttcccttctattgtgtgaatgatttcatcaattggatgccttgctatttaaccttttgcccaaactgtggatttatataacatacaatgctattttcagttttagattgatagaattgactttcaagaaacacctctttaacacattttacttcctgaaaatacctaccgtggattttagataaatttcttgattgtttttgttctgacacatacaaatggtaggttagtatggtatttagacctgtaggcttaagtttatctataggattaagttgcagtaaataggtgacagatggatatttttatgtttatttgaccttctgatgctctttggattatatattcattcatccattacatgttaagtgtgcgtcaaatatttggttagttggtctcgagatgcatcacaacaatagagttgtggggtattcccgtgcgttgctatggaatcaatatgataaaatacattgacatgtaaaaacactaatttccattgcccacctcgctacttccctcgctccctctgtattccttgccactccctctccactggcgctgcagagctctctcccacccagtcaccctttacctatccagatctccagacaggttgcctcgactgaacctccctcagagcagaggttgttcactcccttctccagatgaaattttccttctgtcgtgcgaactgagaatgcttctaggatcatatatctcatccaacaacaaacggttgaaaaggtcttagatgtaaactacaacctgcagatcacatgtaaactgcaagctgtcaagttgggaccatatttaactacagattttagatataaactgcaacctgtagattacttgtccaggaaactgaaaactaaaaacatgtcaggttttagaagttttcctgtaaactgaaaacttcacagaaactgctttatacaatattgatatcaacgagttgcttgataggcaatgtgatgttctaggtagttcgtagtagttagttgttgtatggttcatagctgtatgccctaggtgctagatgttgtaaggttaaatgtgttgccattatctatgtatggacatgatttgtttctatgaacatggtcagcttctatgataaacatggcagcatatttaaccacgaaccaccaatatttaaacacattagaggcatgactataataatcaagagaagtgatattttaataaaatataaggaaagtaacaagttctttattaaaccagaaaagtgaaagaaacaaatggtttgtaactattgtttcataacttgcataaattaattgttctgtctagggttgctgaccgcctgaccatcgcaccttgatattaggatgccattcgtaaatggtaatgactgctaccatgcttatgacaaaaatatgaatacctttatgatggtgtagtttaaagaatgtgcccctgttatcccggattttctcttgtttaacatagatttgattctaagttgtagaaagtatgtatcacatctagatagtgtttcctgtagaaaatttcccctgcactgattttacttttcactttttagtcttctgtttataacatacatttttcattaactatctcttcttgcagcactggttgcgttgtacctttaccctttcttgaac

SEQ ID NO: 317 - DNA, 8725 bp, Zea mays
  Intron number 1 from transcript GRMZM2G032423_T02 (locus G RMZM2G032423) derived from phytozome v7.0 (chr-ID 1; pos 2 4932050 to 24940774)
ccaagtaagtcacatttctctctttcttggacaaggaggagggcggtaaaatgtcttgtttaaccagaggagtgtttctcaggatgcgtatgagtgataggttaaggggtgaattctgtgtcttggtcttgtgagtaagctattgcttaaaaatgatcaactcaatatcaggatagttagtgacctttagttcaattgaataattctgtataattcctaagttagcactcgttcatgcttcaatcaattcaatatcaaacttcatgtcactttcttattattctgagttgttattcctattacataaatttgccccattcaggttcagatgtactttcctgttctatcacattcaactcagctcggccttgagatatttgtgaaatgaaaaaccagacattggcatgcaactgaagtgaaaaaaatgttaaccattgtatcagaatctgtttgcttggaattctttctttcatggtttgtgagctaagctggcggacatgctgttggtcctgcttcctagatctgattgtcattatcttataaatatgttctatgattgtatgccttctgttgttttggttgtcttccgggctgagtcctgtgtggtcatcacaagggatgggtttcgttgtctaaattttgaagtatctggtgatagaattaatagactaaagaacttatgaaataaagaatgtgttgatctgttctccgacgggatgaatacataaacagagaggtagtcataccttcttgcccttgattaagggcaagattagccaattggttaacgtcctgggtagaaggtgctcctgcatcttatcgtcctagctcctggtcaccaccactctgcacattaggacttcgtggaggagtgttagggatctgtgccgtgggtacaccggaattcactagtgccatagaaatgaattcttagttctctaaaaaatggttaagaattgtagaaaaatattttatgagacaaattttttttctggagatatttatggactatttagtttttgctacgcaattttggaatattttatgcatttttgtgttaattatgaagccaaagtgaattaattttcattaaattgcatagaaatttagaaataatgtggtaatttaatgtttgaccaaactttaatattttttgtgccacatttagaacataaccttaattttctatttcatccaacgtcgttttagaatttgagtcagaaagttggtattagttgcatgattgttatttaaccaacatcgaatatttaatacatgcaagtatttttttctcgaaaaacgcaggagagctgcgcatcattgtattaataagaaggggaaattaaggtccaagaggaccagtacaaaaaaccacactatggtggccagcaacaagtataaataaaactatccataggactaggatacaaaaagacgaccaaggaaaaattaggtcgggcctgctgcgcctagagcagcagcaagtccaaggcttccgaggtgtttggcaccagccagcacccataaggatagctcgtcgatgaagcttctatgcaccttgccaatggttggtaaatctccatcgaaaataactctgtttctatgcaaccaaaggcaccatgctcccaaaataatggcactgttgactccctttctcttgcttctgtgcacctgaatggtcactagtccccaccaatcagcaaaattagtatcttctggtcctggagttaagtggcccataccaaagggggagaggatgctatgccaaaactgcctggcgaagacacaaccagtcaacagatgctgaactgtttcttgctcttgttcacagaaagggcatgcttccggatggggaagacctcttttttgcagcctgtcagctgtccaacacttattctgcatggctaaccataaaaaggtcttgcacttaggaggagcccacgatttccaaagtcttttccaaggttcgaaggtgatggagcccaaaaacagaaccttgtagcaggacctagaagagaaaaggcccgaagactcgaatctccacacatggtgatcctcctgagaagtgagcacgatctcacccagggtgtcccaaagcgtaagatattgctgtatccctacaagggagagggttggcttgatgtccctgacccacgacatgccctctaaggcttgatgcactgtcctggtagaggcaacctttttatccacctttgagatcacttcaggtgccagctcagcgatagagcacccatttatccatctgtccctccaaaaaagggtgttattgccatttcccacattagtgtacatcgaactggccactagtttccttacttgtgactgaacagggagatccaatccactccaaggcctattcgggtcagtcttggagagccaaagccatttagcttgcaacgcccaactcttatatatcagatttgggataccaagtccaccaaggttcagcggtctggtgactttatcccacgccaccaggcaatgcccacctttcacatcttttctacccttccacaagaaacctcgccgaattttgtcaatagcactgataacccacttgggaacgttcatggcgatgaaaagatatacggggattgcagagagcacgaacctgaccaaggctgccctgccagcaaggtttagcagtggagccttccaaccgggcagccggttagctatcttgtcaacccactgcaaaaggtcccttttccctaacttcttatcagaaataggcagccccaaatagttgcatggaaaaaaagccgagttgcactgcaaaatgttacagctgtcctgaaccgtctgatcatcacaactgagagggatagcacaactttttcgcaaattcacaactaagcccgaggcctctccaaagcaatccaggatcattttgacacaagtaagatcatcaactgcaggcttgacaaaaagaaccacatcatctgcgtaaatcgagagcctagatttcacatttctgatagccaggtcctgcagcaatcctcttttcctcagcatgcttgacattgttattaaaacgtcgcttaaacgtcgtttaagcgtcgtttaaacgacaaaacgtgcttagagtttagaacgtccggtcgttttagcaaaaacgcgtagaacgtccgtttatcacgtttaaacgtcgcttaaacgtcgttttctcgttttcggacgttctaagcacgttcaggacgttctacgtgtattgggtctttcacaggccaaaaaatacacagggctaccaggcgtccagtgccgacagcctccctcctctcctctcctctcctctgccccctcctccctctccatcctccaacagttcagcgccaccctccctagttttagactttcaatcatcaagagttccaggttcagttttccagttcagacattgacgcactccctagtttcagactttcagtcatcaagagtttatggttactgatcatatatacaagttgtaacttgtgtggttgaacttgatttgtttcattttgttttgtgaactcaagtacttaatttatgtatgaacacattctataattgaaattttatgtattgtctgaaaagacgtttcaacgttcgtttaaacgtttaaatgttaaaaaggtggttcataacgttttaacgttttaccgttttaataaccatgatgcttgaataagctactaagcacatccatcacgattatgaaaagcataggagataaggggtcgccttggcgcagccccctccgatgacgaatataatcccccggagctccgttcaatagcacttgtgtggaagcagtggataacaaattgaacacgagaccacaccacctaggcccgaagcccagatgggataatacttctaggagaaaggcccaggacactgaatcgaaagcttttgtaatatctagctttagaaacagaccagcgatcttcttcctgtgaaaggccttgatagaatgttgaaccaacatgtagttatcatgaatggaacgtcccttaacaaaggcactttgatttgtagccaccaaattttgaaggtgcggtgctaagcgattagccaagactttggatatcaacttggcgaagctgtgaataagactaattggcctgtagtccccggctgtcttggcatcaactttcttagggataagtgttaggtatgcagaattcatcatccacaatttgcgtgtgttaccttggtgcagggtgataactgccgccatcagatcagccttaattatgtgccaacaagttttataaaatcttcccgtataaccgtctggccccggggctttgtccgagggaaggctagcaatagtggcccggacctcctcctctgtaatgggaaggtccaaggccccaaggtcaacatcagcactgtggcaaacctccaaatctagagtgaactctcgctgcttcgctacccccaacagattggagaaaaaatcaaacaagacctcctgcttttcctcttgcgaggtggcgatctggtccccatgcactaattcagagataaagtttcgctttttccgatagcaagcctgtagatgaaaaaaggaagtgttggcatctccctctttcagatatttgatccgcgatctaagtctagcaattgtcctttccagagatgcaagccccaggcagtgatgcttaagccttcctttcagccatatctcgtccccacacaacagtctattgtcttgagcaatctcaaatctgtgcaaaatttccctggccaggttaagctgaaatttaacatttccgatccttttatggctccacgactgcaaagcctttgcaagccttttcaactttagagctaatctttccaagggacaagaaatcataactggctgctcccaagaggtagccaccgtctccaaaaaatctggaaacttggtccaaaaactctcaaagtggaatctccgtttccctttgacattctcattaagatgcagggctaagggacaatggtcagagagttctgaagagttgctatggagaatacaatccggatggatctcctcccaactggctgaacagaaaacatggtcgagtttaacaagtgtagggacatgcaagtattatgttttagaattttaggttacattatggtctcaaatattttcggttttattttgtaaaggtgcaaacattgccttgattcttggccaactgtggcaaatagaaccgctaaatagtagtaactaccatgtttggcgagagatttaaaaatggtgttcaatgtaagtgaaatagactatgcacttcagtatgagaaacccactgagcccacagagggcacactgacaccacagtactatcataagatgatgcagtacaaccaatgatttcaaatcgcctggtcgaaccctaggaccgactaggcgactagtcgcgattaggcgacgaccaggtcgattagtcgacccctagtcggtccctggtcatcctagaccttttagactagtagttatatttatataggtatatatacataaatatacctatatacattatataaattagaacaaacaactaggataaacaaaataacagattgctttattgtgatttgttacttacctgaacctgactacctagcaatggcttaggagtagagcagtaagccagcaaccatccactagtttgacactgggcactggcagaaataaagagacggggggggggaaccttgaggcaacgagctcatctcatcaatggtgctgatctgctggagagtggagacgccggtagtctgtcacagtcgctgctgttgctctgtcacaggtcacagccgccgccggtactggtcttctggactgcagcaggacagcagccgagcaggcagaggcgccggtgtagcaggccagcagggggcgaaggtgagcagccgccggtgttctgtggtcgctggagctggatgtccgatctggggcgcaggggcagccgccggcgaccaggtctgaaggctggaggttgggcaagagaggaggtgtacgtgtacgctggttttggagggctgggcatgggcagaggagaggctagaccaaatgatactgtagatgggctgaaaatggcccaataccaaaaccctagccggacgaccaggaaacactaagcagacgacatgaagataaagatagtaagatctgaccgcggggcgagtactacagacgccatacattgtatggcaactaccaggaccttttgcaaggttcatgcaaaaaacggaatagttacctagttctcaaaccagttgaaccccaacagaatagggtggtagaaagaagagaaacaaaacaatgatggacatggtaagaagtatgttgagttactctagtttaccattgagtctgtggatggagtctttaaaaaccaccatacatatactcaacaaagttcctagcaaatcagtgcctaaaaccccatatgagttgtggactggtagaaaacctacaccaaactatttacacataagaggctgtccagcagaaggaagaatattgaatctcgtatagggaaaattagttgaaagaacaactagctgccattttattggctaccctgagaagtcgaaggattttagattctactgtccggatagacaaaacaagtttgtagaaacaagacatgtagtatttctggagaatgagatgatgttgcagggctgaacgcgcgacctaagctttcaccccaatggacataaccagccggacaagcaaatgaatgcgtatctaatggatccgacaccctatttaataggggcatacacgggaaaactacatgcaattaattgctccttgatatcacaaatgatgtcctaaacgaccttaattctgagtatggagggagtatgctttagctatcggaagcattatgtatgctcaaatttgcactcgccctaacttcgcatttactactggggtgcttggcagatattagataaatccaggcacagccacagaacacaagaaagctctaagatatttggaaggcacaaatgatatatatatatatatatatatatatatatatatatatatatatatatatatatatatatatatatatacatatatattggctattcagatgctgaccgggcaggttgtgtagatacattgaagtctacttcaggttatgtattcacacttgataggggaggtgttttttttggaagagctgcaaacaggcagtggttgcatcatcgacaatgcacattgagtttgtagcaatgcatgaggcaagcacgacgatggaggcaaagaaatttgtacccggattaagagtggttgatagcatagaaaaaaccacttagaatttgccgcgataatgaggcggcagtgtcttacttctacaacaagttaagtggggctgccaagttcattgacattaattgttatgatgttaagaagaagatccaggatcaaaccattaaagttgatcatatcagaacccaacagatgccaatggatccactcacaaaaggccttccacccaacgtgtttagacaacacgtagctagcattggacgcattggattaagggagagcctatgattctggatcaaggggataaagaagcaaccatagaaaagatattccattctgaggcaagtgagcatgttatagtcaatggattcgatgacacttaatcggtcaccgttacctattagtcttgatgtgtaaggttgttaaggagtggaacctagaaagttaaagaacaagaaaattagagaacaaagaggaaaatgttagcgtgttctctatgtttgttaacagaaaccgaacaaaaaagggggaatcctaacgaactgcgccctgatcgggggcgcaatcctatatggttggttgtggcccccggtcacagagccctatataaactagggcagtggcctacatggaaggccatcgccttctgccttgcataaaccctagccgccacattacctcggatgcctgatcgccctagcccctgccccagtttatatagcgccatgtgaccaggggctgcaaccaatcggataggattgcgcgcccgatcagggcgcaaggcttcccctttttcttcagtttctgttaacgaacatagagaacacctaacatctggaactcttgtaattttgttggttatcagtaatgaaattcagttcctctgtatcagaaaaaaattgtgtgaattctgtagttctgttctcgaacaatgtaagagagctgcctacctcgtatggtgaaaggaagagaatagttgtgcagactgcagagcccctcagggataagaaaaggagagggacacaaattgtgcgttttatttgccttagttaatcacatagatgctgccacttttttagcaatgccattttgttcataagagtgtttttatagaatgccacataacaagcttcactaaaatgttgtgtttgcatttattcccaatatctgtagtctattattgactcaaccagggtcacctctgcacctgctgcttcaaaatttcaaggcaatttttgaggtttttatttttgataaaaaactgacatttatatgaaataattctttgcaccagtcctcattcagaaaatggtaaacaaaaacaaacagctagaggcagtcaaattcattcaagctcttaatatagcgcacaaatacgctttgttgcctattatgagatcgtacattgatcatgccgcagttgctggtaag

SEQ ID NO: 318 - DNA, 9509 bp, Zea mays
  Intron number 1 from transcript GRMZM2G420327_T01 (locus G RMZM2G420327) derived from phytozome v7.0 (chr-ID 1; pos 1 45249060 to 145258568)
gaggttaaaatacacagtctttccccaagcacaacaagactgggctcgccttagatatgctgactgttggggacttgttctcaaatgctatgaattaagaacaaggcaacataaagtgttaaatgttaaatgtccttcgtccaacgaaggacattattcctttgaggattaatggaccttggacgaaggttgatgacaatacgattacgaagattaaatcttcgtaattgtagtttaatagattgtataaaataacataaagtatagagtatcaaaggtaaacgaatcataaatgaaccacattacatttactcggcatatttaattattgaatacagttatacctctgccttggcaaagattggtttccgaatgatgcgattgtagatacaggaatgcgtgaacagtaaaggaatactgttcactatttataggcacagggcgcagcctgtgagagattacaagtatgtcccttatgaaagtttacaacattgacttagacctttatggactaaaaggtcattctatctttaagtcggtttgtgataccgaagcttcatgaagagggaccttcggccatcttacacaaacagcttcagccgaaggtcgcttcttcctagaagaccttcggcgacgaagcataggcccaacagtagcccctttcgcggtgctagatcgtttttcgtaacgagcttgatccgtgaaaaaagtttcttaagcttcggagcgccgaaggtctaaaaaacaccttccctgagctcgttgtcgagaaacgattcaatttctcatcgtgtagcggccccaccttgcagagctactgttcgatctctgcggtccaccacgcagcgagtacgagcgggtgtccgcctggtgtaaaaatcctggcgcttcgccttcttacctgcaacactatataaacagacgagtaggtgtgaagttaccacagcattcactgctatttacactgttttgctgccaaaatttttaaccgtcgccgaagcttgtctgtcggaatcgaacgaagctccagtttgatacctgcttcggaggaagaaagtattaacgttccacaagttcataattaaatggccagagtgcgttctaccgccagggttgagcgtgagggggacgagactgaagcttcggagactattcccatctccgaagctatgcaacgatccgggctggtgacttcggaaaagatccctcatgatgatgcagaacaagcagaacaaacaatagctgaagcagaagaagaagatatggaggaaactgattctgaagatgattatcgcattgccatgccaagcaagcccagccacttggacttcgggaaatctactgtttcgaaagctgatttgtccaagatggtaaaatcgggcttttttactgaaaatcagaagaagctattgcgcttcgggggagaagagactaccccaaagccggagaaggatgaaattgttattttcaaaagctttctaaaagctggattaaggttcccactacatgggattattgcagaggtactgaagaggttcggtatttattttcaccagttgacccccaacgctattgttagacttattgtttatatctgggcactccgaagccaagcagtggaaccatttgcggacagcttttgccgggttcacgagttgcattatcaaacgaaggctagaaaggatggattgcacgacaatttcggttgttataacttcgcctatcggaaaactacaaagtttcctgtaattagctaccgaagcaaatgggcagcaggctggaaatctgagtggttctatgtcaaggttgatgacgacaaggaaaagcttgtacaaagtccacttgaattaatcttcggagaaacccgacctcgctgcaacatgacacccgaaggtccaacacaacaagcaatgagtgaattcagaattattgcagagcatatcagcacaagggacctggttcaagagtttttagctttcaaagtttttcccagtttaaaagaatgggaaatgccgaagctacaaggggaaaagaaagaaggtgaacttgtacgtttaccttactacttcaagtttaagaaatactttaaaacaccttgccaagagtggctggaaacgattgaagcgatgtgcaatgaaatacttggcaattattccaaaaaagaagatcaattgatgaccgcttccttcggcacccgtccgaagcgaaggctaaatcgagtgttggacgccttgggcttcgattatcctgattatgaaaatctgaacaaaggtgctgggggccaaaaaagaaaaaggataactgaggccatgaatgaagaaaaagaaccaacaaagaagaaaattccgaagaagaggaaaacttcttctccgaagcaacaaatatccgaagcagaagaaacccccgcatcaccttctgctgctgtcattgaggaaattctgaaggtaatgactgaatccttacctgcaaagctaagtccactgggccctcaactgacaaagttttttcagaaggacaaggagcccgaaaaatcgaagaaaacaatcaaggcaaagaaacaaagaattattactgtgacagaggtaattgacaagacgccgccaagagcttcagcccagaaaacaccagtggctgcagaggagacagatattgaaattgcaccttcggaggccgcggctgccgaagctgcctcagctgaaggtttgaacctggagagcacaattgaacacattgaccaaatattgctagacatggctgcagaagaagctaccaccgccgccgaagaggccgtgaccgcagcgtcggggaaaggaaaagaaattgctgatgaagcttcagagaacgagaccttcatgtttcagaatttagttggagaacaactatcaaaagctgaaatagaagagcttagagagtatgccaaatcctgtggatacaaacctagggcactcctcttcggaggcgttgatgatgagaaattagattgtattcgagatcagacaggagccaaagttatcagcactctgtccaagagtatcggcttcccgaaactagaaacagacatcagccgctaccgacgacaacatgtcgttggtagtttattttattccaacttcaaggtgaactacttgtcccttaactttattgtttctaacaataaaacatgtctgacgaaggttgttttcgtgcagagtatgctattgagcaaagccttgcaaatgcagcaagattttgaagataagaagcacgaagttataattgaaaatttagaaagcaaaataaaggagcaatcggatgttattgagaaaaagaactttgagctccaggcagccgaaggttcattggcggaagctgaagcaaaaataacagaactgaacacgaagcttctccgccagtctgaacagttcgagcgagaaaagctagagcttaatgcaaaacttgaagccgaagctcaacaaaattcagatttgagaaaactattgacaagccttcaagaaaaatgtctggaatttagcaacaaatgcattcaacgcttaagaaagattttttactcagttggagccagcagtgaaaaattcgccccctcagctgaagatctaccgaaaaccttcgaacatattgagggggagattgacgagctcgacgaagtcatagctgggcatggtgacttctgtgcctgggtggcttctcgaggcactgctgcagctttcctgaaggctggctgcgatcatgcaaagattgtcaataggccaaatttcactttatcaccatcaatcctggatgacattcctgatctcgcccggagtatctcgaatagatttgtaaaaatgatatggacaaaaggtgggcgagaaaaggctggagacgaagctcgtagccaccttgaaccagtaagaaaccataccttgtgcttaccttttcctgtaagcttgattttgacttacaacgaccttaatcatataggatgacgaagccgaagccgatgatcaaaaatgacgccgaagccgatgatcaaaaatgatgccgaagccgaagctccttggagattagatagtagattgtagacagtacttgagaaacttttgagataacttttgtaaatgtaactaaaacttttgagataacttctgttcataccttgttatatatccttatccttccattgatgtatgagaaatgctttgatgtggacgaaattttcttttgagccgaaggcgaaaaaacaccttcccttcttttcgtacgcagcaaagcatagaaaacaacatttttccttttttccgaagctctcctttttgtacacgaagctcttttttccccttctttttcctctttttgccgaagcaaccatttatgccatgaagatgattatcctacatatgcctagatgaatgtttatgaatgcaaatgctatgatgtaatgcgatgtgcaaatgaatggccaaacacgtatccgaagccatattcatagccattattttcttaaaaacaatcgcacctcagctctgcattcccttaggaacgactttggagcttcttcgcctttacttttggcggaatcagcgttgacttttcgctgtaagctctgcattcccttaggaacgactttggagcttcttcgcctttacttttggcggaatcagcgttgacttttcgctgtaagctctgcattcccttaggaacgactttggagcttcttcgcctttactttttggcactcgatggtgcgttctcaacttttacatttacattccttgggggattttgctcttatagaactaaaaaaggaaattacatgtgctggccccattaaaaacctttctcccccttcggaaaggaaaagggtgccatgaaagaaaaaatatgaaaaattacatcgagttatacataatatcgccgaagctcatccgcattccaagacctaggaacgtcgttgccgtccatatccttcagtctgtatgaaccgggtcttgacgaagatgctactaagaaaggtccatcccattttaactgcaacttgcccactgtttctgggttggccactctccgaagcaccaagtgtcctggctcaatattctttaactgaacctttctatctcgccatttaattgtttcggcttgatatttattaatgttctccacggcttgcagcctgatcccttctaaagcatctttttccacagaataagcagcttcggaacctgattctaccgaagctattacccttattgatccggttttagcttcctccggagttattgcttcgtcaccgaataataacttgaatggagtaaagcctgtagaccttgatattgttgtattgtggctccacaccactttggttaactgatctggccattttcccctgggttgattgaagattaacttcattattcctgtcattatgatgccattggctctttcaacgagtccatttgactccggatgtctgactgatgcaaaatggatcttcgtaccaatttgatcacagaaatccctaaaagcttcggagtcaaactgtgttccattatccacagtaatagcctttggtaccccgaaccgacaaacaatattttgccagaaaaacttttggacggtggccgaagttattgtggctaaaggctttgcctcaatccatttagaaaaatactccaccgccactacaacatatcttaggttcccttgggccggtggtaacggacctaacaaatcaagaccccacctttgcaatggccaaacgggttgtatgagctgtgttaaggacgaaggttgtttttgatctcgcgcacatctctgacaaccttcgcacttttgaactaattccgctgcatccgaagctgccttcggccaataaaatccttggcggaaaatttttccaagtaacggcctagacccaatgtgagatccacacaggcctgcatgtatttctttcatcaactctataccttcggttctggataaacacttgagtagcggagcacaaactccatgcttgtacaactccccttctatcataacatatggacgagctcttgcctctatcctcctgttataagcttcgtcatctgaaaggaattttccctgaagataagagatgatctcagttctccaatcttcgctatacacaggagatatactgaggactgccctttcaagaagttccaccgaaggtgcttttattgtttcgaagaatacatccgaaggtaaaggcagcccctgtgctgctgacttagctaacaaatcagcatgctcattttgtcctcgagggatatttttgacagaaaatccttcgaaggaagcttcaactcttcgaaccatatctagatatttttcaagcttcggatccttagccttgcaactcttgtcaatatgacccgaaacaacctgggaatcagttttgagtatagcccttctgattcccattgcttttagcttccaaagacctagaagcaaggcttcgtactcggcaatgttatttgtgcaactaaaatcaagctttgccgcataacaagttttgaccttggaaggtgaaaccaacacagcagccgctcctgctccgaaggttccccaagatccatcacaaaacactatccatgcttcggcgtctttatttgcttcttcctcctgagcccctggcgtccagtcagcaatgaagtctgctaacgcctgggactgaatcgaagatctatgaacatattcaatacaaaattcattgagctctgcagcccattttccaatccttccagtagcttctcggttcctcataatatccttcagaggttgtgaagaaggaacgattatgttgtaagcttgaaaataatgccgaagctttctggatgccatcaaaacagcatataacaccttctctaattctgtgtagtttttctttgatatactgagaacttcagatacaaaatatactgggacctgtttcctggcttggccatcaagcttctcctggacaagtgctgcacttaccgctgagtgcgaagctgccacatataataataaaggagcccctggcacaggtggagttaatgctgttagatctattaaatactgcttcaggtcttcgaaggccttctgctgaattggtccccattgaaagacttcggctgacttcagcacttcgaagaatggtaggtttctctctgctgatctggatatgaatctattgagagatgccaaccttcctgtcaatctttgagcccccttttttgtagttggtggctccatccgaagtatagcttcaatcttacttggattggcttcaattccctttgttgaaaccaagcatcctagaaatttccccttctttactccgaagacgcatttttctggattcaactttaaaccagcttgtctgaaactggcgaaggtctcctgcaagtcagcaatatgattctcctgcttcgtgcttttgacaatgatgtcatcaacataagttagcacatttctgcctatctgagactggagaactttcgcagtcattctgctgaaacttcctccagcatttttgagcccctcaggcatccgaagataacaatatgtgccacttggagttatgaagctagtctttggctcatcttccttgttcatccaaatttgatgatagcctgaataacagtctaacagactcatgagctctgaagaagctgctgcatcaactaaagagtctatccttggcaatgggaattcatccttcggacaagccttgttaagatctgtaaaatcaatacacattcgccacttgccattagccttttttaccataacggtattagctagccattctgggtactttacttctctgatgactcctgcactgaggagtcttttgacttcgttacgagcaccttcggccttatcatctgacattttccgaagcctctgttttctggctctgaaggacggatcaacattaagcgaatgttcaataacatccctatttactccgcagagatcattagctgaccatgcaaaaacatctttgttgttgaacaaaaaccttatcaaagttttctcctgctcttcagataattgagagcctaacagcaccttctgctctgctatgtcttcacataagagcataggcttcggctgatctgctgaagctgctttctcccttctgaatttgtactgttcacaagcttcagctccatctatgttatggattgcttttgagtcagtccaattaccttcggcctttctggcagcttcctgacttccatgtatagcgatgggtccttgatccgaaggtatcttcatgcaaagataggcaggatgaagaattgcttcgaaagcattgagggtgccacgaccaataattgcattgtaagggtattccatgtcaacaatgtcaaacacaacttgctcagttctagtgttgttgatgaacccgaaggttacttacatggtgatcttgcccaatgctacaatctgtctccctccgaagccacagagaggatgtgtagcatcatgaatcttatcttctggctcttgcatttgtctgaaggccttagcaaatatgatatcagctgcactgcctgtgtcaaccaagacattatggactagaaatcctttgataacacaagagataaccatggcatcattgtgtgggtagtccttgagatgaagatcctcttgggagaaggtaatgggaatgtgagaccatcttgacttgatgaagggtccttgcaccccaacatgctgtacccttctctgtgcttccttcttttgtttcttgttagctggttctgaggacgaaccacctgttatcgggagcaccagcttcgggtccgaagcagctccagcttggtcattgaacgaaaccatcagttcgagaagtggaagtgagttcaccggaggtgggcgccaatgttggggacttgttctcaaatgctatgaattaagaacaaggcaacataaagtgttaaatgttaaatgtccttcgtccaacgaaggacattattcctttgaggattaatggaccttggacgaaggttgatgacaatacgattacgaagattaaatcttcgtaattgtagtttaatagattgtataaaataacataaagtatagagtatcaaaggtaaacgaatcataaacgaaccacattacatttactcggcatatttaattattgaatacagttatacctctgcctaggcaaagattggtttccgaatgatgcgattgtagatacaggaatgcgtgaacagtaaaggaatactgttcactatttataggcacagggcgcagcctgtgagagattacaagtatgtccattatgaaagtttacaacattgacttagacctttatggactaaaaggtcattctatctttaagtcggtttgtgataccgaagcttcatgaagagggaccttcggccatcttacacaaacagcttcagccgaaggtcgcttcttcctagaagaccttcggcgacgaagcataggcccaacactgactttaaaaccgtgggagaatacaatgcaacactgcactgaat

SEQ ID NO: 319 - DNA, 5336 bp, Zea mays
  Intron number 2 from transcript GRMZM5G852454_T02 (locus G RMZM5G852454) derived from phytozome v7.0 (chr-ID 3; pos 1 91887806 to 191893141)
aaaagtgaaccgtttgaagctggtggctacaagtggtaaaattaaatattcccaatgatagctgctgtggcattcttcattcctcatttctacttttcttattggtctggtgatgaatgtactttgaaatgtctgtgttttagctttgtttttgtatattattagtctttattaacattgctgttattgctgtacaatgctctctggctcatgtttcttcactgttgtgtgacaactgttttcataatggttttaaaagtacagtgcccccactgagtgctaaacattaacttatgattttcttaatttatgtaaatttgattgttgattagttgtgccagttttggtttgattatagcaactgctaatttcagcaaacgctacgttgtacacttcaattttacatatgttatttttcaatggagtatgggatagtaatcatgaatctatgcaaactggaaagaatttgctgtatataattgttattttgattaccttgtgttaggaagtttttttttatctcgaatacgcaggagagctgcatatcattttattaatagaaaaaaatgagattacaaaccccactaggggtaacacgcaacccacacacaccccacctctcaacaccaaggactacgacactacgcgccgctaaaaaaaggagacaagaccagaccaaaactatcacaactgaatttaaggacaaattcagatgcatctcaaatgtgtgctatgatcaagtctcacacatatgatgactcatgatacagaaatcaacgccatatctttattatataataccagttctgtacaaaataactaaataaaatgcatcatatggcaacaaccgacaacgatcctccatcatcatagttgactaggagacgacgacctagacctctccgaattcttcatagcatcgttcaagcttctccagcggtacctattcttgacctggtgtgactatagcaagggtgagctaccatacggtcattgcttaacaagtgtggggaataatgtgtatgagctcacttacggtgggtgctcatatgtagtataaggtgtactaaggaaaatgattaaggctgagcatcacttttaaatagttgttccaaattttattagcatttactaagtataagtgtatactaacccaattaaatacttgatcaatatagaaacatcatatagtaatcccacaatgcaatgcaatgcatgtcaagtttaagtttagtttcatcatttaatcacgcgagattccagagtcgctcatgatctgagcacgactgatatatcaattttacactatgcagaggttgcacatctttacccgtaagacgtgtttcccgtgtagccagggttagctagacccttagacacttccaaagtgaatgactaggggtccactgcgaggcctttacaaagttccacagttcgtgaaaacccgctagggtttcagaaaggagcataggaatccctcgtctgaaaagctatcacagtcaatttgacctgagaacctccctatactctgcagcgacgtctccccgcttccccctttcgggtaaggtaatctattactagttttcctaattaattggccaagggcgtcccattccacccttgtggtagcattgttttctcaggttaagctccatgttccaattaacaaaatgatcttataatgattaataaataatccaacaatatgtcatattgaaacatgatcataattcataagtatcattaacccaaaaaccaggtagagcaatagcaagactatccaataattcatttgtatgtaaggtgtatggtaaacaaactagttaacctattatgtcccatcaatttaacctaagcacgccatggtgattttatcagaaacataaacattcttaggtcagaaaatgtgatcaaggacacaacttgccttttcttgtgattccaggtacttctccaaagttggtgcttcagatccccgtcacatcactttctattcatagaaaaacatacaaatagacaatgaatacataaaaataacattacaccaaacataaaaacaaactgcgcggtaatattctatgcgtcgctacgagattgtatgttcaagaaccactagaatcagagttaaaacaaataacttacagattttctaagcatttcgattattttttgtactaaaaatcattttcaggggttttctggattataaatctcattttttatttactttactacgcagccagggacgacatgttttaattgggaataatttagggtgctcagcgtaaattttgggacctactttgaatgattcttaaactgtttaggatggcgggtaattctacagaaaccaggggtctctttaggaaaacatctgcgacgatgggggtacaggtttatctcagtcgttcgatctagaatggagggctaagattagttgagactcctcccgaagcggtacacgaccagggccattcgatctacaatccacgaccacgatttaaaatcccacgattcaatcttgcacgttcatcttcgaaccaacgcaccggattcgatcaccgaaacgccactctcattatcaaatctgggccgtcaactggccgatcaacggccagcagccatccctcctcccgatgcctcgctgcggcagagtgacagggcgtcgcccaacaagctcaccagcgcgcgcgaaccctcgcccccagagcgaaaaaccccacgaaaaccgtgctacatgatacagggaagaaaacaagtcgattggtggtgttattaccgtggtaggagcggtgtacaggtccgacgacgactcggtgcgatgctgcggcggagcaccctcaacggtgagaaatactttgctcaccaatggttttcgcacacggccatgctctcccacacgctccatgctctctggtataccctcacacccacggcccaccccctgttccccgagtggccacacagacgaggagcagcggcggcgacacttctctccattctcggcgatgattctctccgccttcgatagcgagctctctgtgcgggtctccgaataccaatgggatggtgaggcggccgcagggatcaggtttttatacccccaagcgggatgacaacaaccccgagtttgttacatcggtggagatcacggtggtgcgattggttgtagagatctgatgaaaatcgtaacaaaccatagaagattcctccagcttcgttggccccacgcgtcggcgactactcgggcaaaacagtacgggtacgcggaacccaaggtgtcagccgtggagccgacaacggccaatatcccctccgagtcgccctcgcggacgaggaagaagactctggaaatgtgaccccacccgacaacggtagtagaaggatgcaggcgcgcgggactggcctatgggccctgcatggtggtgatcagacggcgggcacgtgggtggctgagaggctgaccccgaggtcccacaggtcagcgtgatgacgaatgtgggctagcagtgtagagttgaagatgggccgaggaggatttggcccaggcgggtgtgggtgagtcttttcttttttttcttttcattttcttttctgttttcttatttcttttctattttctaattaagattcgaatgaggtttgaatttcaaattcaaacaaaatgcacacccaaaaatccatcatgatgcaatatatctatatattttatgttaattaatttattcattggtttggtagatgtttgaaatatgaaatacattttcattattctttttaggaaaatatcatttttgaatgtggaatgagaattaaaagttaattcagaaataaatattcattatctacttatttttagaagaaagttttgtatactttctaccaagggttacttgaatatttgaaaatgtttatagtttatggggagaacatatcaatagagtgtcctattatttatcacaaactgaatttcagtttctattttatttaaacaaacattgttttaatattactatttatttttagaaagggggaattccaaagcatatttattcatcagagacactttactttgatttattttactaatctcaaaaccatgattttgggtgttacaaaaactgaaaactaaatactatccttgtgtcagggaagttgaaaaccgctttcagaacctatttttatgatctacaacatcattgccaatagctgtcctgttcgttgaaatatttcttattgttcagtttttagagctgtaatattcactccatgtttccatatatcaattatcacactgattttttatgtttgctattctatgggcttaaatattattctgtgcaatcgggtaaaccagagtcttaaaatgccatatattgcattcctttatggcttgctacaaagcaagctaacaccatgtgctcttctcacaacctttgagcataacatggaagtcccatactaaccataaactagcttccatttactagtatctggacattagttgaaatgtatcacagcatgagttatgtgtttaccactattctgtaccgcttttgttttgagaaagtgctgctacaaatccagtagcctaagtttcggtcactgttaagaaggggtatttttgctattagttatgtattgtcactaattgttggtctttattgtcttccatgaattttatgttgcttcttcacccttttctgaagaacataaattcttacatctattttttttctcgaacacgcaggagagctgcgtatcatttcattaaaagaaggatgataattacaatgacctaacacaccactcacacatacacacacaaacaacactagtaataaccaccttttaaccggggttgaacacaaaagctaggtccgaaagacgggtcaaattcttacatctattatttttatttttctatatttgtcttgctaatacgtgatatgttgacctttgctggaatatagtggattttctctacttggttttattgcattctggttatccttccaatattttgcctaatgcttcaaaacttaaattagtgctcagagcatggtattaggtcaccttttagtccctagacctttccttctgcactctagttccaccatatttccacgacccttgaaccagttagtctatgtgaagtgcgaataatcttatttccgcatgccagctaccgtttccagtagttttgtttgctttttctgtatttgaggttataaattgttgagcagctcagtttgtaatgcacactgcttggatgccctatttcttgagttgatctcttgctcattttgcaggtatattctagtttaccctcaagg

SEQ ID NO: 320 - DNA, 454 bp, Zea mays
  Intron number 1 from transcript GRMZM2G335767_T01 (locus G RMZM2G335767) derived from phytozome v7.0 (chr-ID 8; pos 8 71196 to 871649)
ggttactgctgagctgctaaaacaagcgctaacaggtgcctgagctgcacttatataattggtttcatttcttcttgattttaaggcatccctcgacaaaatattggaaaaaaaataacaagaatgaggcttcctccaatgccataaaatattcgattaagcacgttatcaatctatgacatgtgcctgatttttttatgttctacttgactggtgttccagttttacagtactctatcaaggtttagttgtagttaaatcatctgttatgccttatgaaaaaaatgtgcactgtgacagtatgttctactacaaattaatatttgcatgacagttgtcattaacaaattttggaacttagtcgactaactcatacatttatagttttcctttacatcgaggattttcacatatgtgtgattattctctgtaattgtactttattacagggatt

SEQ ID NO: 321 - DNA, 3905 bp, Zea mays
  Intron number 10 from transcript GRMZM2G014400_T01 (locus GRMZM2G014400) derived from phytozome v7.0 (chr-ID 2; pos 207963174 to 207967078)
caactatactgttaataacaatcagacaagcagaggtcagttgctatttcaatattgtgctatgatctacacatggttctctttcttttaaaaaggaaataagttgcataaataagttagatgtttgaagtgctgaaaaatatatacaaagtgcagtccttgtttcctcagttctagaatgtagctattgattctgtaaaataaaatttaatatatttttgataaacagatagcagcattggcaacagacctttcttgtaggacaactacttctatgcacagtacttgtgttgtgaactctattaatttgcattaaccacttcttttttgtgttttaccacccatacttccaagtgatgtacttgactaacactcttgattctacatttattaccaaatacaagatttatcatctaattttggcatgtatcctattttcttttctgggacttacatctgataacagattgctgatacatgtctaccagtttgttatttgctgatgcatcttaattttttatggagtattgtggggttaagttacccagcggtccatacatcaaatatgttagttcgttgtagttagatgcatgcagttttttgatattcaacaatcactactgcaacgatagagaacgtgcacctagcgcagtggtaggggagcagaggcccaacctacaggtcgcgtgttatgagcggcagatggctgcgagggttagagggcgatgactagggttatagggcgacggctagggttaggggcgttggggaggccagacgcatgcctttgccacgaccgacaagagtgaagggattttcttctaatctcttgtttaccttcaattgatacaatccttctccttatagatggttacttgacccctatgcactagttctaatcttatcccaaactagtctatctttatctaaacaacttgagggctgtgctatagtgccgacgttactctagcggcactgtagcgggccctcttaggccctgatactacacccatcctggataaggaggtcgtcctcgagctgcaacctaacgatgactcttctagacacaaacctcacacctaaaaataagccttttacatctcggcttattttattagtccgaatctaaatgtgattgcgactctttatttttgaccccttaagataagacggacaccctccacacatcggatttgcatgtgtgcagccatctggatcccatagatgccatctggacgaaaggagagcacatggatggacacctggagcagatcgcaacaatgaccagcggaggcgcccttgtggcagccggtagcggaatgtggtggagctaagcagtgcacctttgtcgatgacgaggggagcaccttccctaccaccgctgtcgtagagttgatgtttgttgcctgtgggacacgcaccatgctcgcacttggagacaacaggctggcgcggttgctgatggccgtctgacagggcgagggtgcgcccctgtgtgccgaggtcaaccgccaccaaggttgccttgagcatttgccagcgcacccgctgcagccaccgacgcactaggaggccaagcgccaccactgtaatggaccctcttgggccctggcatcgagagttcaactccatgttctcacaaaaaaggcaattccttgtgctattttaagtgaaatgcatggtccactaatggttgcagccttttagtcccaaataaactgggtttagtggggtagcctagagacgaaacccaacatgagccaatgagaaattagaacttattataacagataaatacatcttcaacaagagtaatattacaagggatctaaagccttattcatgttcaggcatgtgataggttatcattcaacccttctagtctgttggtatataaaatacaaattcttttcagttctctctcgcttgataagttaataacttaagatatataaattattgatactagtaggtaccatattgtatttatgtaataacactgagactcacatgttacattagcctttgtatttagtattgggttgtgcactcgaatgaactagattatcaacttgaagaaacttgtagaactgtgaatgatgatcaataccaaaaaagtggcattcatgtttcccctaaaatagatggagggtttgctttgtttggttggagagccgtatgagtgtagagaggaggagagagggggggggggagcgctcgcatccggtcgtttttttgtagagcgggagcgttccaactacttatggtaaatttctataaggagatccaggagtcgctcggctccactcttattttgttggaaaccaaacatccatgaaaattggaatggagccactctatccccccaactcctcaaccaaacacaccctaaactaattctggatgttttctccttctgaaattttgtactgttttttctttgtagtgaacaaactaatgcccactaaagcaagggttgattaatattcagatttttttttatttctagcatatttctcatttggtcatttttatttatttagcatctgtaaaacattcttagctcgttttccccgtagaattgatgtgttcatttctctattctgcatacttgttaatcaaaacgcagatatgtagctgaatgtaacattcatccatttgtgacatttgaagagttacaaattttaacgggaaacagtttggacaagtttctgttgctaaaagctgtgaagctataccattgttcgtataatttatgttaaaaccctaccctgaattactgaaagaatatccatttcatatagttgattgatgaaatttgtaacaatttgttttgcagttgcatgtgttcaatactctggcaatagagtaatctgttttgtaaaagaataatttaatttgattaaggtccgaattctaatcatcttgcaaacacaagataacctattacagttacaatcaagaacaatggtccatttagtttagtttgtgcctgctcatctgacaaagattggaatatgtacaggggcatcctacatgttctttttagacctatcaagatcataataaggaatttgatttgtactgtcatgcacacttgtcaggctccatgtatagaccatgcgatcagtgtacatcttttttttaaatcttttttttcgaatacgcagtagagctacatatcattttattaagaagaagaataaaagaggtttaaagaaacctcatacaactgcacatgaccacactagacctgaatacataggaagaggtctaataaaacctcaaacaacaccacacgacccaacaagacctaatctgattacatagaaaataaaactagactcttgaccaactggacccaaaggaaatcactcattggactgttggatcgccaggatgttagccacgcaacgggctccagctaaagtccggaggttaatctcatccttgaccgaattgaggacctctgttatgctaggattaacaccactgaaaacatagcgattgtggtgtttccaaatgggccgagctcccaaaatgattatgaaattaagtcctttttgcattgatccgtgtaaatctcagtatgattttagcaggtgtttttgacatataagctacgcttcattcttaacattaacctttgctggttagtcagtgatgtaagacagatgtattaaatacaaaagtggatgagtgtgttatttgtatttgaattggaattgttgcactgtttaagtttgttgctggcaatgttattttttgtcaaccaatatatgcctgaaatacactctttatgttcttaaaacttacattgaggacagctatatgactttaaacttgactacgatttgtatccttttgcaggtatcacttcctagggagagtactattatattcat

SEQ ID NO: 322 - DNA, 4307 bp, Zea mays
  Intron number 1 from transcript GRMZM2G440005_T01 (locus G RMZM2G440005) derived from phytozome v7.0 (chr-ID 7; pos 1 38891961 to 138896267 reverse strand)
ttgaaggccacgaccaaacaaagctctacacacttgtaagtgaccataattgattgtaggatcctgatatgtagagtgcatgtgttttggcattgcattgggtaaggtgaaacactgaaacatgactttgcttgcaagaaaaggttcaactaagaaaaaatactatcatgtgacaggggtaacacgtagtatcaccagagttagtgacccgtcacccaaacactaatttattagtacttatgtattttctctttctgaaaaaaaatacaacatagacatgttgttctacttagaataagcgataaagttgcacaaatggtggtttacaaaagtacgtataactcttttttttcacggaaacgcaggaagactgcgtgtcattatattaagaagaaagaaaattaaggtcctatagtacgtgtcacacccggattttaggggcaccaagacccgggagcgaacataatcaccaggtgtgctgggaccaagtctcacacatatgatgaatcatggcacaggatcgaatgtcacatctttactatataacaggagttctatacaaaataaataattacattataaggagacaacggtccagcaacccaaagttgactgggagacgatggcctagatctctcacgaactcatcgcagcatcctccatgcgcctcatcctgtggtacctgttcttgacctgtgggggggtgtgagacagcaagagtgagctcacatacgttcatcgctcaacaagttgtggggaataatgtgcatgaactcgccaaaggtgggagctcacgtgaagtgtaaggcttaccaaagaggatggttagagctgagcattgcttttaaagttggtcaaaattttattagcaattactaagtataagtaaacaccaacccaattaagtagtagaacaaaagtaacaacctcacctgcgatgcaatgcatatgacaaattgagtttaagttccataatttaatcatgtgagggtccgagctgctcatgaccgtgagcacggctagtataccagttttacactatgcagaggtggcgcatctttacccacaagtcatgttacccatctgccaagggatcgcgacttcccatacacctctaccgaggaggcgaggcagggtaacactacgaggcctttacaaagttccactagcttcagaaaacccgctacagtttataggaagctccaatgcaggaatcccttgcaggaccgccatcgcagcaaaatcctcccgagggcctccctacactgaccactcccctactgcccttgcccctttcgggtaaggtagtcttccactagctttcctaattaatcagccaagggcgtcccattaaacccttgtggtagcactgttttcccgggtggtcgctccatgttccaattaacataatgatcttatcatgaacgataaataacaacggataacaaaagtataatcatgagtaatgtatcttcatacccaaaaccacataaagcactagcaagtactacccaaaaagttcagtggtaaacaaggtataaagataatcaaactagggtaacctattgggtcccatcaaaattaacctatgcagatcattatgattaatcagaacatggctgggtaaaagaagtgatcaagggcacaacttgcctgggacttgagattccaggtaccaggatgatcttcaggtgacacgtatcctcactgctaatcgtagcaaacaaacaggcaatgtataggcaatattaacatcacaccaaacatgtaaataaatacacagtaataatctagacattaaactaggatcacaggaactggaatcattaaatttggagttatagaattcaagttatgaatttcctaaggtttaatgtgattaaaataggattagttgagaaattaattttctaactgagttcatgtcaaaacagtgacacaaaatgataaacaatgattttataaaattataggaattggaatgaattaatttggaccaaatatacatttcctatgaattaaacaaattctagcatttatttttgcataaaaatcattttctaattcctttttctagattttataattctctggactgggccacaaattccagagaaatcaggggcaacggcgcaaaagtatctaagactcaaaactacctgtctatggactgcgggttggtttcaactatttacagggactcatacgcaaaaccaacagccgaaagggtatcggcccatcggagccgaccgatgaagaaaggatggcccagattagattcatcccgcggataactgatgcgagactagcacggtcagattccgatcctacggtccaaatggatccagcgcctatacgagtctcaaccgattgatccaagatcaacggctaacctagccccggccgaaacgttacggccagccaatctccaccacatagactctatccaatggctaaaatgcgtcccaccaaggatctaatctcagcccttcacggagatctaacggtcacgattttctctcctacctccgagctccgcacggcggcgacatcaggaagcgcggcggcgcacgccggtgagatgtacaaacgacgcattgatcgccctaaacttgaatcaaaacagagctaaacgctgcgcagtcagaggcggacgtccggggagccatcttaccggtgtttgtgtcgtgcagacccccggccgcgatggagtgcggacccgcggtattcacagaactccggcaagcaattccattgctcccgaccacccaagctgcacgaggaagcgcccggaccatgcggcatacaccgatgtagattcccgaccacaagctggggccgaagggacgaccggttcgcaaattcacggcagcggcggcagcccgattctctgccgcacactacgttgaggaaacgctcggtccaaaggtcccacacgccggtgataattccagagggttgggcgaagttcgcatttataccctgatgcgagatgagtccgacctgttgcttgtaacaacctagcgagcatcgcgcggaattcatggagcagggtgctcacaagcgcgaagaagaaggggatccgacatcccaggcccacacaactgagacacagcgaggcaaggacgcaggcccacatggcggcgagtgccggcgacgcgactgacccacgaggccgacaggcgcgtgcggtaatgggccagatgggccacaagcgcgggtgagggtaaaaggagcaggcaggtccggtttgcattttcttttcttcttattttagtattgttcctattttccttgttttgttttcaaaatttgatatttaaattcaaatttgtgacagaaatcaaatgcataattaaagtgctatcatgaataatcataattatatgtatatatttttctttgtattgtatattcttttccatttctattgcattctcttttcttgattccttttctatttttaaattctatttttttcaaacttaaacttatctcatacatttgattacaaatacaacatacaagaaaactttagcatgagatgtctattttatttatttatttatttgaccaatataattcctttgtttgaatatgcacagaatcaagaaatctccaatggttccataatcctaaaaccttacataatattattctatttatttatcttgtttttttatacaaattttgggctttacagtacgtatatctctcgacaatataactattatgaattattgattaggttgaacaaaatgttgttttgagaacaaaaacagagtatctcactagatggtatttgttggttgtagaaagaacacacggaatccttttgttgatccaagttcatgtaccctgcatactattttagaatatgcttctgcaccctatcttgcttctctgctacaaggatattgtacaggacaaggccttacaagtacattcattgcatggcaagctctgacgttgctgcctctgcctgtgaacattctccaaatccatcgtgaaaaagaaaagagaaaactaccgaaagtcacagataaattactcccacacccgtagcattctaccttgcacacaaacacattgtgcaccaacatatactgcacatgcacaacatggctgtaagtgcttaacttgtgctttatcacaactaatgaatgttttttgtgaaaaaaaatcaaaccttccagtaaggtgaccaaaagaactctgtttaacccctgttatttgctctctaagtctcggctcctttataacacaaaataaaaatgctaaagttcaaacttacctcttctaaggtt

SEQ ID NO: 323 - DNA, 12648 bp, Zea mays
  Intron number 6 from transcript GRMZM2G360688_T01 (locus G RMZM2G360688) derived from phytozome v7.0 (chr-ID 7; pos 5 0128809 to 50141456)
cctactattttgttgggtaagtagtagaaaagctgtatatttttgtatctggtcatgaatttttcctttttggtcattgtttccatatatgaaatggtggcaggcaatcaactggtaatgatgtgtcatgtagctcattatattgtaactatgcatttttaggcagctaaagtatgattagtgagccattagttggcctaattaatgctttgtgtcatttggtgtttttctagcagccacatcatttactagattactatacttaagccattgtcagcgtgtcctcattgtcacacccggatttacgggcaaatccagatgcatctcatatgtacgccattgttttcaagtcgttcgattaatcgtccaagtcggtttggaccaatcatgattaatcgcccacattgtccgactaatcgtgattaatcgccctagtcggccagccagaacgaccggcaagtcgtccgacttgaaagcattgatgtgcgccagaaacatgatccacacatacaatgactcagtgtataaagacgaatgtcataaacttaattacataacgagaatgtcttacaaaataactgataatagaataaatcgaactaagataattatctccacgacgccatagttgactgggagacaatgcctagatgttatgtatggccaagcctatgttaggcgcaacagggccaaggctggctagggcacgggccaggtggggccgaaggcccaatagatcagctctatctagataagctagttttccctataaatacttgtaagacaccatgggtttaattaagcagaataccaatttgttctgggcttctggcttccctgaggaagccagagtttgtgagatcagcccctgtgcgcggcccagcctgggtcacgacggcgcccccgcgccgccgcccttcccgcgcccaagctccaccttacaacctgcgcgatcttcccggtaggatccgtagtcctaccaatctggcatcagaggactcgacgatcatgagttcttctgccacctccaagccgccgtcgccaggacagcagccgccgccatccatgagcccgtccgcggcgccgatcacctccctgaccgcgacccctgcaccgtcggaggccatggcgctcggccctccaagcgcggtcgtcaactagcagcacgtccccgcgctcacctcggcccagatcacgacgtcgctggcggatctcagccacgccgtgcgcgacatgcagatcaccatgaacgccatgctaacagggcacctccccttccccaaccagcaagccgcccatctaccaccgtcgccgcacccgtccctgccggcgtaaccaccgccggccgcactgcctccacccacgcagccacctgcgccactccctccacttgcccggcaaccaatctcctatcagtacggcatgccgatcgaccacaggccttcatccaccgcatcaccgcagaccacaacccccattcatctgatccgcttcccaccatccccatcccccatcccatcttgggcgcagggcgcgtcgacggtttcaccaccagtgtactatgtggcgtctctgcgaccggcgctcaggacttccttaccgagcagcgccgtcggagggcctctcggggtgctgttaggaggcagcaacgacccccttttcccgggtcgggggcccttgcgccctcacgtgcccgcagcgatggcgacgtggtcaccgtaccacgtgctgcctcaggacgacgacgtggagaccgtagcctacgggggcgctgaggcgcgcacgcctccacgctactacaaattggagttcgccacgtacgatggctccgaggacccgctgaactggctaaatcattgtgagcagttcttccgggggcagcgcacgccagcctcggatcgcacgtggctggcctcgtaccatcttaaggggccggcacaaacgtggtactatgccctggaacaggacgaggtcatgccgccttgggatcgtttcgccgagttgtgccgacttcgcttcggtccagcagtgcgcggctctcgccttgcggaggtgggacgcctccccttcctgtccacggtccaggagtactcggaccgcttccaggcgttgctgtgtcgagctcgggacgtctcccccatgcagaagatagagctgttcgtaggcggcctacccgagtacttgtgggtggacgttgagctgcgcgacccgcaggatctatagactgccatgtacctggcgcgggcgttcgagcggcgcgcggcggcctggcctccatcacagcagcgcgggtcgcgaccaccgcaacgggcgcagggctcgggatgcgcgacaccagcaccgcccgcggctccaccgaccggtacgacgacttcaggtgacagtacgactccgacacgcccgtttcgccgcttgtccctggccgagcagcaggagcggcgccggcaggggctctgcttcaactgcgacgagccctacgtccggggacacgtgtgccagcggctgttctacctggaggtcgacgatttcctcaacgaggcggccggtgagggtgtggtcgatcccctggaggagccggccgccccagacatcaccagagccaacgcgctggtggtctcgttacacgcgctggcgggcattcggacggacaagacaatgctgctacctgtcaccatcaacggcgagcgactgctagcgctcatggatacagggtcgacacacaacttcctcaacagtgacatgatgagtcgcctcgggctagctatggcgggtggcgagcaccttcgagtcacggtgtccaacgatgatcgcctaccctgcgccggcatcacccgtgacgtccccgtcatcatcaacgctgagtccttctccatcacgtgtgtcgggatgcgactgggctgcttcgactttcccatgcacgagctcgagcctctccttggctcggaagctcgactgttggggaaaggggagccgtctctgctttgtcaacacgcagacatcgcagaattgctccacatggtcaaggcacgacaggcctcataccatctccttggcactgagccgcttcaggacctcgaagttaaggtgcccgaagcgctcgtgccactgccatgccccgtcgtctcgatgagcagcaagacaacaaggttgtgccaccttcacattgaggatgtatagccgatttggactcctgcgtaccttggcaagaaggcgacgagaggggtcccagatcctcatgactccgtgctcgacctccacgcgcgaaccgttctcatccagctgtcccaagctgatgatagagttcctcaacgcggggatgtagtagactccggtgagcagcctatgctcaccagacgcggcggtgaagacgactgagccgacacccttgatctctacgccggaggcgtccccaaacttgacggagcctcgaacgctagagtcaagctcggtgaagaactcccgtcggccggtcatgtgatgagtggcgccggtgtcgaggcaccgcccttcgatcatgtccttgttggagccgtcgccgaggaaagcgcgtgctttcgactcatcaaggtggagtgccgctgcgaccggtgccgctggagatgtctcgatgcttgcatgtgccaggagcagggcctcctcctctgcctccgcctgtgcgacgttggcctggccacgtcatggctgtcgacagtccctggctcagtggccaagcttgccgcagttgtgacagccgtcatcttgtgccgacttcttgttgccgacggcgccgccttggacacctccacgggcaccaccctcagcatgtcctcgcgccccggcctgggtgcctccacgcgccttgcgcggcttgccgcgtttgcggcctcgtgtcgaggaggactcccccttcttcttgtcaccctggcaggcctcccactgctcccgagtgagatgtagtttcccgccgatagcgataggcccagagggagcctgtggttcgtcgccgtcgaccaccttgagacgacctatcgcctcttcgattgtcatcgtggagaggtctagcagagactcgatcgagcgagcaatctgcttgtacttctcggggatgcaacagaaaagcttctcaacagctctctcctcatcgtaggtgtcgtcgccgaactgcaccatcttctgcaacagagtgttgaggcggagagcaaagtcatcaacatcctcacctggcttgaaagccaggttctcccactccttgcgaagtgcctgcagtgtggtcatgcgggcacggttgctgtcgatgcgggtcgcagcgatggcgtcccaggcctccttggcagtccgcttctgggaaagcgaaaactgcatctcggacgggactgcaacaatgagggcatccagcgcccgccgatcctcgtggtagtcgacgtcgccgtaccgaactgcttcccacatgtggcgaacctggagccgtaccctcatcaccgcggcccactcgacgtagttggtcttggtgagggtaggccacccaccgccgggaccgatgtccctgacaatggcctgggtcatgcggcgaccatggtaccgatccggggagggagagtcgcgctgcctgtagaggccgcgatctccgtcgactcggtcgccgccgccaggagcactgcctgcgcgtctacgcccgtctgggctgccgccgcgtgcgccctcgcccggagcgccgtcagcgcgtcgacgcctatctgggctgccgccacgcgcgccccatggggatgcgcggctgcccactgtgccgcctgctctcgcgctgcttccctcgccagcctgagctctttgtcggtgttgtcgtcgacagaagcagagctgccagctctactgccgcgcagaacctcaagctctactgccgccgcacgtgcagcatccgccgcctccgctgcttctacttccgctctcgctgctgccagttccgctgccgccagccgtgctgccgctgtcgctgctcgctcgcgttcttgtgctgcggcgacctcgtcttcctgctggcgccgcacactcgaagtgaccgagcgtagggacatggtgggctagtgaggggtcgctgcgtgtggaagaggctgtctcagacgaaaggttgctcgtctgagcaggagaggaaggtacagttggagctcttgctgccgactgagtgtggggagaggcgcgggaaggagatcagcaagagatgtttaggctgtaggatagtttggctccgataccaattgtaagtagagggactctaactctcatcaagaggatgacactatgagttggggcaatttttctgtttatttcctcaaacactacacaatgcataccctcagaagggtcggggacacatttatagccctaggggctgcactacactgcactacatactacactacacaccgcagcacacaaatgctgtcctctagatactaaagtgctaaagtgcagtcaaaactgcaactgctgtcttgctgctgtctccaactgctactgtcctgctggctgcagcagtcaaaagatgctgtctccaactgcactgctgctgttctgcagcagtcaaaaggtgctgtctccaactgcactgctgctgttctgcagcagtcaaaaggctgctgctgctgtgctgctgtcctgttcaccacaaaacaaaaatgttgttctccacacaagaccacatgacttattctatcacctgttgcccggtaccgctccggtggccgtacggccgtaccggtacgcgcaactgcagaaggacgagctggagcgacagtgtgaggccatgctcacacaaggcatcatacgaccaagcacgtcgccgttctccgctccggtgctcttagttcgcaaggcggaccgctcgtggcgtttctgcatcgactaccgcgccctcaacgccaagatgtccaaggacaagttcccgatcccggtagtggacgagctcctcgacgagctccatggagcccgtttcttctctaagctagacctacgctcaggataccaccaggtgcagatgtacaccgatgacatcgccaagacgtcgttccgcacccatcatggccactatgagttcctggtcatgccgttcggcctctcgaacgcgcctgctactttccaggccctgatgaacgacgtactccgcccatatcttcggaggtttgtgcttgttttctttgacgatatcctgatttacagtgcatcatgggcggagcacctcgagcatgtgggcatcgtcctcgaggcactgcgggcacaccacctccacctgaagcgctccaagtgttccttcggcgccacatcggtggcctatcttggccatgtcatctccgagggcggggtcgccatggacgcggacaaggtcgcggcagtggcctcctggccgcccctgcggtctgcacgaggcccacggggcttcttgggactggcagggtactattggaagttcatcaaagacttcggcctcattgcagccccactgacgcgtctcttgcgacgagacacgttcgcctgggacgatgatgcgacagcagccttccatgccctcaagcacgccctgacgacgggcctaatgctccagatgccggacttcgccaagctcttcgtcgtcgactgtgacgcgtcaggcgcggggtttggtgctgtccttcatcagggcgcgggacctctcacctacttcagcaagccatttgcagcccgccaccttaagctggcggcctacgagagggagctcatcggcctcgtgcaggccgtccgtcactggcgcccgtacctgtgggggcgccatttttctgttcgtactgaccattgcagtctaaaatttttgctggatcaacgcttgtccacagttcctcagcatcagtggaccagcaagctgttcggtttcgacttcttggtggaatacaggccggggcgcctgaacaccgtggccgacgccctgtcccaccgcgactcggaggctgccttggaggacacgactatggcggcacgggccatctcgggcccgacgttttccctgctggacgacatcatgtgggcgctggcagctgcgcctgacgggcagcacctcctccagtagctgcggcaggcgtactggctgcgccatggcgcctcgtcgacgagctactcctgcgcgacacacgcatcttcgtgccgaactacgacgacctgcgccaccaggtgctgacactggcgcactcggcaggtcatgagggcgtccagaagaccctccatcgactgtgggcagacttctacattccacgtgatcgcgcgctcgtccaggactgggtgcgcacctgcaccacgtgccagcagaacaagacactggcgcagcagccgggcggcctcctgcagccccttgaggtgccgtcccaggtgtgggccgacatctccatggatttcatcgaggggctgcccaaggtggcgggcaagtccgttatcctcacggtggtggatcgcttctccaagtacgcccatttcatcgccctcagccatccctacaccgcgtcgtccgtagcgcgggcattcttcgacggcatcgtacgactacacgggttcccgttgtctattgtcagtgaccgggatcccgtcttcaccgggcacgtgtggcgcgacctcttcaggatggcgggggtgacactaaagatgagcaccgccttccacccacaaacggatggacaatcggaagtggtcaacaagattattgcgatgtatcttcggtgtgtcaccggcgatcgaccgcgagcatgggtggagtggctgtcctgggcggaatattgctataatacctcctaccacacaactttgcgtgccactcctttcgaggtggtctatggcagatccccaccgcccatgctaccttacacgccagggacggcacgtacggaggccacagatgacatgctacgctccagagatgagatgctagccgacgtgcgccagcgccttttgcaggcccagcaactcgccaagaagtactacgatgctgggcatcgggaggtccagttccaggagggtgactgggtgtggctacgcctgctgcaccgcacctttcagtccctccatccgcgtgcgaaggggaagctaggacctcgctacgccggccctttccgtgtccatgaaaggattgggtcggtagcctaccgcctgcagttgccagaaggtgcccgcatccatgatgtcttccacgtcagcccgctgaagccgcaccgtggggatccgcctgcaactccggggacgcttgacccagtgatggatggtcggctgcttcctgtgccggccaaggtgcttcgcgctcaacttcggtggggcgtgtggcaggttctcgtacagtggcgtggactggctgaagatgacgccacatgggaaaagcttgacgagttccgtgctgcttaccctgacctacagctcgaggacgagctgtttgacaaggcagggagagatgttatgtatggccaagcctatgttaggcgcaacagggccaaggctggctagggcgcgcgccaggtggggcccaaggcccaatagatcagctctatctagataagctagttttccctataaatacttgtaagacaccatgggtttaattaagcagaataccaatttgttctggcttccctgaggaagccagagttcgtgagatcagcccctgcgcgcgacccagcttgggtcacgacggcgccctagcgccgccacccttcccgcgcccaagctccaccttacaacctgctcgatcttcctggtaggatccgtagtcctaccactagatctcatcgaactcatcgtagtagtccttctccggtggtacctgctcttcacctggtgtgattatagcaaaggtgagctcccatacggtcatcgctcagcacgtgtggggaaaagtgtgtatgagctcacttacggtgggggctcatgtgtagtgtaaggcttactagggaaaatgattaagactgagcattgcttttaatgaagttggtcaaaattgtattagcaattactaagtgtaagtagatactaacccaattaaatacgtgatcaatatagaagtatcatataaaaatcccacaatgcaatgcatggcagattaagtttacttccataaattactcatgtaagggttcgagccgctcttgatcgtgagcacggttgatataccacttttacactctacagaggttgcacatctttacccacaagccgtgttacccgtttgccaaagggtctcgactcccattcatctctaccgaggagacggaggcagggtagcactatgaggctttacaaagttccactagttcgagaaggcccactacgattttaggaagaagggagtataagaatcactcgtccgtaaagctatcacagacagtttgacccgagaacctccctgtactctgcagcgacgcctcctggcttgcccctttcggataaggtaatctttctctagcttttctaattaattggctaagggcgtcccattccacggttccacccttgtggtagcactgttttctcgggtggtcgatccatgttctaattaaccaaaatgatcttagcatgaacaataaataatttattgataattaaacagttagaagtggtaattaacgctcaaaggcggagcttccgacattgtagagaggctttgcatcaaaagtccagtgacgacgacaccgagctgccgagggtgtcgtagcaaaaggaaacatagactcatttaacacatgctccacagtctttctttcaaaaaaatgtggcagcggccaaggcttcagcccaataggttagaggcaggatcaatagggtgcaaactatgttgattgtgcggagcatgtgttcaacttttccattttgtggggtgtatgggcatggaagacgaacgacaaattcatggcaggagaggaatgtggtgatgacactgtttaaaaatttagtgtcgttatcactagggatgaaaacgggacgtctaccagatacgggtatgaaaatgagatgaattttcggatacatatacgagtatttttgttgtcggatggatacatgtactactcggataataaacactggatactggtaggatacaaaatcactgatacccggtaagtacccgtatatcccggtggctacagggtagcgtttgactgcagtccggcttgccgtcttgcgccgttgtgcgtgcgtcgtgcctgctggcccaagtgccgaaccaccctggcccattacgcatcacctggcccggcgtgaacgtgaaccgccgtgagtagaggacgtggagggttggtaggttggtgcgtgactttttattaggttttattacatgtccttcacataggtgtactaggaagttcgttagaagtgttggttgtgcggtcacgccctcactgaagtgaaattttgtctccataataaagcgtacaagtagtaccgattagtttcactcatttaaactaatccctattccaaaataattctctatatcgtgtattctgaggagttaatcaatcttaatttaactagctttttaaaaataatgtcagatttgtggattatgcctaaaagaggggatatgttgccgttttttttaaaaaaatatgttagtttctataatgaccttgtgattattgactttgaactgcatcatgtcaattctatcgatttgcttttctatatttgagctatcatgtacatgattatgtatcccttattttatttgtttgttggacggttgagcaattaatattatcaggacgaactacctgacaaatatccattatctacccgactaatattcgttatccgtttcttacccgttcgaattattatccgatcccgtcctgtatccgtctcgaatttttactactcgtatctgagagaaatgcattaaggtaggatacatgatgaccctgtattcggttgtatccgtcccgtcttcatccctagttattagcctggaaggacttcgagatggtaccaaactgcgtgtgggcataagcaagaaactcaacaatatggcggtgcacatcaggtttgtgttttaagggaaaagaccaacaaaagtgggagtaatcatgaagcaacatgagataatatttgaaaccaaagtactaagcatcgaagatgtccatacatcacaatgagttaaagcataaggaccagtagcgacagaggtggaactactaaaggggagccatgtttttttgccacgctggcagacatgaaatggcgaggttgcaactgcagggtggtggagaaatggtgtagaagtcccccactactattgcattgaagtatcacacacattagtggtgtcgaagaactgagtgggtgcgaaggtggtgtgcacatgagggaatgcgccaagtacactagaggcatcatcaacactaggtgggctgctacgtcaggggacaccactatgggcggactgatgacgaggtgatgtggtcaccgccctagtattggcccaatgctgcaatccttcgtcttgttgcggttgtcgccactattgtcgcctgggcagtgaccatggccattgtcgcactagaaccactgcattgttgccacgccctagttgtgggtgctcaagatggaggaggccatgcgacaggccatgctgcaagagggtgagcccatgtacaaggcgacctaggaggtgaccttaccctcgttgtcgagacagagttccttgagaatcaacttctcacggtccatggcgaagtcaggcaatagatcagagtcagtgatgttggcggtgttggagaagcaagggtttgaggctgtggagtaggttgaggaaggtgtggccgacatcatagagcgtatcagcggttgcctttgtcgtcttgcaatagtcatcgatggagaggtcaccctaagtcatggagtggaactcgtgactgaggaagatggcgcagggagccttgtttgtgtggaagagggccctcggtggctatccagagttgatgggtcttctggtccggctcgagggcgaggccaagaacgcaattcgcgacaaagctaaggagctagttgtggaggcaggagttggcgtccgcgaatcatccagatgtgccattgttgtgctgccgacgtgcgggtgaaggctaaatttgctacgcagggagaggaagaagaccgaccaatgggtgttagggcttttcaactcaagggtgatcgacatgtgggacttgacaggaatggtggcatacaacgagatgttgaacgctggcacgggatctgatttagaggaggcgttggttgtcgattccatcattgctaggggtggagaggtgatagtggcatggtggagtgccagtgtcgccagcttggtttagaggaagggtaggcacggcctggggaacggttgatgcgacattgtggaacgtgtcgtggcggggttttggcggtgatggggagatcgggtgcggcccattgacgggtgttgccggggttaggttgggtgggacaggatgtaggcccgagtctttgatatcatgtagaaaggtcttgagagaatcatcgcaagtctattgtggcggtgccttccatatatatagccatgtgcaagtgatatacagttgtggtgcaagaagttaggctatacaaccatcataatacttatgtgctaatgtttttatttatcttgcttgtcaggac

SEQ ID NO: 324 - DNA, 2877 bp, Zea mays
  Intron number 3 from transcript GRMZM2G056695_T02 (locus G RMZM2G056695) derived from phytozome v7.0 (chr-ID 2; pos 1 20652645 to 120655521)
gagggaggtgaacagtctctaggcctttcattcaagtatgttttctgcacgtccctcgctttttctttcttgtttacacatccttaagttaatcggtgtggataggtctgtatcatgatttatcaatatttagtttttatctcctggcaaattataatagataccatacctaacaacccaaaagactggtaaggcaccggtctttgacacacatggtttgtttgggctctcttatgtcgcctccagcagctcgcccatgtgcatccccaaataggcactgtgcattgcacatttagggtagcagtttctagcaggttgcgcattcggatgcgcatcccacatcgcgacaaatactacgcgttgctttgcctcccgctaggaatcgaaggagagaagtaaacatttcattaaacgatggtatgcacgatggggaggaacatgcggatatgcacgaccccttgcgaggcgaggctgtgcattttgtgcgacaacatgcgcaacctgctggcgtgaatagtgtgtttttgttgcgcatccctgagctgctggaggcagccttactagggggtgcaatggttgctagccatagttattaaggcggtaaggcgagcgcccccctttttaccttttaagcagtaaggcgtaaggcgaggcgatgccttaattatatataaaatatgtaaaatcagaccaaatattatttatatatcactaattccaagataataagcaagctagcatatctataagacctagcaggcccattttagcctagtaaaagagagaaatagaaaaaaataagcccactagtcagcccagtctagcccaacagttttaaggttacctcacccaacacccctcagttcctcagccgccgccagcaattccacccgtcgttctcttctccctctccctccccctccccatggctctcctccctgctcgccgccgccgccatgacctgcgcacctcagccgtcgcgccttgcacgctgccgccagcgggacctgcgcgcctcagccgccatgccctgttgtcggtgggacttgtgcgccgtcgtcgccacgctttgcccgccaccgtcgccacgctctgcacacggttgctacctcttcctcgcgccccacctcgccctcttccccacgccttacactcacggtaaagcgaccacgacgccttgccctccagccttgccttaccgctttaacgacgccttaataagcatgttgctagcccaaaaggttgtggtcgacccaggttatgttgtgttgtgtgaccccgtagggtgaagccggtttggttctgtttgttggtttgactaagagcttcttagtgcaatactgtggggacagtctttccccaccggccaagcttcttagtgcaatctaaattattttgaactgctgaatttagaaaattgtttaaatataaattactatttgcctatttggaatgtcggacaaacaaaatcatgtctttaggagttcctattgtgcttataaaagaagagcagcaatgagatttctagccaacttgattatactggagtactggacagtgtgcgactatgtgcctgtttgggagggttcccaggtggcttcggctcttttccggagccctcccaaatgcgatgcgaaaaatggctccataggtggagcaagagctgttttaacgtttgagagccggagccagaaaaactagctcccaactgctccgtgttgctcgcatgccctttcgcccgtggactgagcatgcgggtgcggcggtactatgtgaagatctcggtggcggcggcaggtcgcgcctcgacgctagcagtgatggtgacggcatggtgaagaggagcacggccgtgagcgtctccacactgacggtgcataagacatacttctgcttggcttccatgtagtcggacggagggcaacatgagtgtggccagggatggaatgcacattccagcttccgtgcctagccgtgctgtgtgaaggcgctgtcgaggaacgcggaggcccgggacatgacgacgagcatggttcatggtaggtgtagcgcgcaatacatgcacaaggtgttcgtccaaatgtctaaaatgggaggagctgttttgccaaatgatttgtacaaaagatgtggctcctatgaagaagctgcttctgtagaggagccggagtcggaactattttcaaaggagccggagctctaccaaacaggccctatatgtttaaggtttattttaaccaaatccagttgcttttttttggttcattgtccatgccaatgagaaacagttattatgtgcactgcataaattattcgagcctgctattttcttcaattaatctggtacatggactaagtgactgattgatacttttcctaacataaattagttgttcttactacacattggtatttggtagtggtgtattggggtgggactgaatcatctattctgttgaatcaatacacttaacacaaacccttgcaacatgttgttaccatgttttttttgggggggggggggcttgtcccgaagcatttccttggagaagttgaagtggccacaaatatgtttcttttgcataatacattttgatttcataaaggaaacaacactcaattgctagaagtaaaaacacacaatagaattgcttctcaaaagccaacaaatccataatgtagggaaccataagatcccataaactggatgttgtttttactactcttataagctcgcatactactttatatacataattcagaacacctcctattgtcattttgtgatattagtgtaataactcctaaagtgcaattatttgtggtttgtcttgttctgcagtggtacaattgaaataaactattcgaaagatatta

SEQ ID NO: 325 - DNA, 6934 bp, Zea mays
  Intron number 13 from transcript GRMZM2G049141_T02 (locus GRMZM2G049141) derived from phytozome v7.0 (chr-ID 2; pos 83540388 to 83547321 reverse strand)
attatctgatttgtggtcgctgtgaactttgggaggtattgcttttgtggtcattcttgatgttgtacttcctctgtcccagaatgataagcatagtttgtataggaaaaagtcaaatttagaattttatttcccagaaattgcttgtattatactagtttatgtggctttgtgtcccgctgccataggtcaatgttagctattgaaagctagttgctctagtctactgcttccctttttttcgggccgggggggggggtattctccctcctttgcacttcaccttttttctctcttaatgaaatgatacacaattctcttttgtgttcgagaattctttttacaaactttggccaacaattaatcaaattatatacatgttttggacaaacttgcatcaatagattcatattcagagtgcatttgagatgagattaattgtttagcaaacataaacatattgtacgagaaattaatggtcaatttttttaatagattatgtgagttattgtactcagtctaagtgttatggaccctggtcccgcccatgtaactccttttccaatatatgcaacgtagcccaccctgattggagttaacatggtatcaagcttggtcttttctctccctcccttccctagccgccacctcctggccgccatcactaccgtcgggtcgctattgtcgtctgcgcctccatctcctccctagcgcctttcttgctcatcggccacccatatttattaaggcggtgttaataaccatggggccaccaccttcactttagctttctaggcgcgactggtggccttgttggccctacggttggcgccttgcccaccggtgctttagtcccggtcacctcgattgctgccccagtcgctcccgtcgcccttgcctttgctgtggccatctatggcatgggtgccgccagccagggcccagacctagctgactctggcctagcttatctttcggtcgcgttacttccccctgatgtcgctttcgctcactccaccttggccatagcccccattgctgccaagacggtgtttgctgctgctcgggatcgggaacatgttgctgcccttgcttaggggcacaaacgcaccacgacggatgcactcgctcgatagcagaccaatgctgagggtcacctgctcggctcctcctgcatcgagaccctcccagcgctctagtggtcgcccctttgtcggagtacgaggtcgagatcatcaccaacctctatgccgaggtggcgtgtgtccagaacatttgctctatgattctcgtcatccttgatacaacttcctccaactacgccttctggcgggcgatcttgtctacactctccatcactacgccttggactaccacgtcctcaccaacactgtctccctcactaacctatcctggcggcagatggatagtgtggtcctctcgtggatccccaggaccgccatcgttgcgctgcatgacgtggtttgcgagcgtggtggcactatccgtcttggacgtcgtcgagtagttccttggcaatcgtgaggcttgcactctctaccttgatgtcgcctttcagacttttgtctaggggaacctctttgtcactgagtacttttgtcagaggaagggcatgccagcctccctctatgaccttggggagcccgtctcccatagcatgctcatcctcaacctcctgcatggccttcacctccacacttcgatcacttcctcagtcccgttccacaaggtcaaggtcaacaacgacctcatttccgaggagctcaccaaggggctgctaccaccctctacaactccaccactggggggccagcgcatgcaccctcttctactactatcttgggaggatcgtcgttgactcgttgcgctcgtctgttcatcaaatctcaagcattgcacatcctccccacttgccttggtctgaggggaggggtctagggtggcggtcgacgaaagggcggtcgtggtggtggccatggggacactccttggccttccatctacaacctgtggactgatcgcatctccatgtggcctggtccttctccgagagtcccttctcagcgtatcactccaccgtagccagctcacttgacattgctcggtctggggtatcaccttggccatcctacgccattagcacctgagtcaccacttctgtcaccgccaccccacctcgctttgtcctggaacccgtggccaggtgggtgggatcaacagtctcttgctagctccttcaacacgatgaccttgactcctcccactgtcacctactaggtggctgattcctggtgcctcctatcacaccactttggacgcgagtatgctatattcttatccacctcttcgtctactcctaccattgtgggtaacgagaacattctctcggtcacctctgtcagtgattcggttcttcctaggccctttcaccttcacaatgttcttgttgccccacatatcctttaatattttatccgttcacctattgagcatcggtaattcttgttccatagattttgatccttttggcttgtctgtgaaggatcttgctacctagagtcttcttgcttgttttgatagatctaggcccctgtacacccatgcaggcctgcgtctacctccccacatactggtttcgctacatcatcacattcgtcctcgctacagtcgcctgctttgactacttccactatttgtagtacttggcatcgtcgacttgtccatcccaaccttgtagcgtagtccaagctatgtagtactttagtaatttcttgtagtaggggcacccttgagcatctatgccagttgtgtaagttaggtcgtcattttcgacttcctttctctagcttctcacagcatacgctgtgatttgtggacctctcctgttaccaatgttttgggatataaatattatttggtgattcttgatgattgctatcattgtttgtggatttttccattgagtttaaagtctgacacctttacgactctgctcggttacttcgcttgggtttacactcagtttggttgcactatgaagatcgtccagtgtgacaatggtcgtgagtttgataacttctctcgatcctttacctcaattggagtctagcttcgaatgtcttgcccctacacttcccatcagagtggtaaggctgagtgtatgatttgcaccacgaataatgtaatgtgttccttgatatttcaatcatctgtttccgctcgctagtgggatgggagcctccacactgctacctacctccttaattgtcttcctacaacgacaactcttatgtcatgccccccaccccactttgctcgaatggcaaggcttagcgcatgaattaatgtcatgtttttcttgctattttactattttaggcatccgttccttctccttactggtctgagagcctccacaccaccacctacctctttaattgttttcctattacgacgactcgtgcccccacttcccactttgctctttttgtcaacactccaatgaccatcttcgtgttttgggtatgtgtgccaccctaacctttccaccactactctccatcttgttctttgttctgctcgctgtgtctttctcgggtactcatctgatcacaaagggtactggtgtcttggcctcaccactcctcgccatttgatctctcatcacgtcatattcgttgggatggatgtccccttctcaactaacacctagcccaccaccgcctcccctttcgagttgtattttcttcatgatcctgactccgtggtgccctttgtccaaccactgtttttctagttgctgttttcctctccactgtttcagccggtggcccctgtgtgcccatggtggatcatacgcccttgaattccttccgggttgcaccgttgcccctcgtcgacccgtgtgtcacctcgtcaacccatgttgggtccctaggccccggtggccccacttttgacattgccttcgttgctagggccctctttattgccctcgcctgtgccctcgccttgttgctatgcccaacctgtgcatttctatcagcgacatgcccgagtgggtacaccgcctcgctcttgcgacgagccgacaatgtatcaccccttcatcgtgactctcaccacatccacttgatggcgaattgccaggccactggggtccttagccctgttgattgcctcatcctctccgtgacctcctcattgtcggtttctcatgtgtcgtcttgcgttgattgcaccctttctaatactcattggcgccacgctatgaagaaagagtacctgactatccttgccaaccacacctgggttctggtattctggtgccccatctttcgtgcgacaatgtggtgattgacaagtgggtctggacacataagcggcaggcggctggctcgctgggctactcagtgtcgtgctgttgactacgatgagacgttaattctcgttgtgaagcctgctaccgaccgtgccatcctcactttggccctctcccatttttggccaattcatcacttggatgtcaaaaatgcttttctgcatgggactctcacttagacttgtctactgctgtcagcctactagctttgttgatcatgcacaccccgatatggtatgcaagctcaacaaagtatgcaaactcaacaagtccctctatggttcgaggcaagccccacgtttggtacaaccgcttcaccatatatctgctctctttgttttgttgaggccaagtcagacacatttctgttcatctatcggtgtggtagtgacactgtatacctactcctatatgttgatgacatcgtgctcactacctcctttctcatgcactagatcaccaccgctcttcagcatgagttcaccatgaaggatttaggcccccttcactttatggggattgctgttgagcatcgctttgatggcctcttttttcagcagcgacgatacaccctggacatcctcgagcgtgctggcattctggattgcaagccttgtgtggcgtcagtggacatgtaggccaagctctctggcgtcagtgctccagtcagtggccccatcacctaccatagcctcatcggtgctcttcaccatctcaccttcaccagacctgacatcgtgtatgccatccaacaagtatgtctttatatgcatgatccctgtgacctgtacttgggtgtggtcaagtggaatccttattgttgactatggtctcctcctttggcgctccttcatccatgagctaatcatctatactgacgccgatgggccgagtgtcctggacacctgtcggtatacctcggcgaacctcatctcctggtcctccaagcggtagccagtggtctcccgttccagtgctgacgttgagtactggctgttgctaatggggtggctgaggcgagcaagctgcaccaacttctccagtagcttcacaacccactcaccatgagtaccctggtctactacgacaacgtcagcatcgtctacctctctgtcaacccttttcaacaccaccgtattgaccgttttactattggggacgtccgcgtatgtttcaacgagctcgtagtttgatgacaccttcactaagggttttcccttgttcttggagtttcggttgttggggcaggagacagaaccggtcctcaactaccaattgtactcaccactcaccaagattcctaatgcagagtaaccgactaggaggtgcgaaggcctatggcagaaggggcaagccacggaggccgaccccaacttcggtccttcctaacaatcgcgaaggctacttgactacgcagggaccttggccaaacctcgacgagggacaaacacgttcagcgagggcaggcgggggctaggacgcgtcgaagacccccgaagcaccgaacgaagacccaactgctaccagccgatgttgaccgaggcgagatcgctcctctttggtaggccgtcgtgaggcagtttttctctaaggcccccacgcagaggccataagacgaggaatgttggattccgccaagcggcggctcagttgtgggcgtagactcgcctactccacacgtcagcctttgatgtgggtgagaaagatggtgtaatatggaatgtagccaggggacctgtaattaccccgttgcacacctgttgcacggtatatctatggcatgtagtaggtaaccaagggcattacgatattttaggccttgggcccttggccgccctatagatagccccatcctgtagctggatgggacacacttgacaagacatttgtgctcccagccaattgttttgtcgtgccacctgtaacaccactctcgagtgcttgggcacactgttctaagtcccaacatcggtccagtctcaacatctttcacgactagagtttcatctgcgggggtgggggtaggggtgttagattcttgtgcgttattgtactcaatttatgtgttatgggccttggcccagcccatgtaacccatgcaacacagtttaccctaatttgggttaggtttccaacaattttgtttgacttttccattatcaaaacacacttaggccttgtttgtttacgtcggattgcacccggaaacgttccagctaatcaaagtttatataaattagagaagcaatccggctaggaatcgttccgacccaccaatccgacacaaacgaacaagaccttaatatttcacgatgaatactcaatttaagtgttatgggccttggcccagcccatgtaacccatgcaacacagttcaccctaatttgggttaggtttccaacaattttgtttgacttttccattatcaaaacacacttaatatttcacgatgaatgtagttgttttggcttattctgaacaatttcacatcatgcagccggaaacactgcctgaacatataaaattcgacca

SEQ ID NO: 326 - DNA, 6284 bp, Zea mays
  Intron number 1 from transcript GRMZM2G364287_T01 (locus G RMZM2G364287) derived from phytozome v7.0 (chr-ID 7; pos 4 4725885 to 44732168)
caaaaagaagtgctttgaaaaacacctcttttcccgtatttccaaattattacaaatatcaattaactgagcgtttggattcttggagttatcgtgtcattagtctagggtttactcttttaaccgtgggtattctttgtggagcagtatgggctaatgaggcatggggatcctattggaattgggatcctaaggaaacttgggcatttattacctggaccatatttgcaatatatttacatagtagaaaaaatccaaattggaagggtacgaattccgcacttgtagcttcgataggatttcttataatttggatctgctattttggtatcaatctgttaggaataggtttacatagttacggttcatttacattaccatctaaataattacataacataaaaccttcggtttttttcctttttagtttgatttgagaaccctttgaaaagacgttcaaggggttctcaaaaattcgagatagatctaattctgaaaaagatggaacatgaaatagctaattctgaaagatacgaaaaagatctaattctgaaaaattcgagatagatctaattctgaaaattcgagatagatctattactggtaaaaagatacagattaaaagaaagagttcccgtggtccagaatctacaaaatttttgattggaacatgaaatagcttgtatccatagaacatctggcgtaacatagataataaataaataggagttaatatcattcctattgccattacaaaagtaattagcatttttggcattaacataaatttaggactagtaattagtccaaaaaatactactaattctgcaacaaaaccgctcattcccggcaaggcaagagaagccactgaaaagctactaaacatggtaaaaatttttggcattgggatagatattccctccagttcttcgagataaacaagacgcattctatcacaagtcgttcccgccaagaaaaaaagtgtagcaccgataaatccatgagataatatttgtaaaatagctccatttagtccaatgttggttatggaaccaattcctataattatgaaacccatgtgagatacggaggagtaggctattcttttttgaaatttcgttgaccaagagaagttgaagctgcatagattatttgcaccgctcctattattaccaaccaaggggaaaatagataatgagcatgcggtaacaattccatattgacccgaatcaatccgtatgctcccatctttaatagaattccggctaaaagcatacatgtactgtaatgcgcttccccatgggtatctggtaaccacgtatgtaaaggtataatcggcaatttgacagcataagcaataaggaagccaaaatacagtagtatttccaatgttgtagggtatgattgattaatcaatctttctaaatctaatccgggttcattggaaccatataatcccatacccagaactccaattaagaaaaaaatggaaccgcctgcagtatacaaaataaacttggtagctgaatacatacgcctctttccctccacatggataaaagtaagtaaacaggaattaattctaactcccacatgataaaaaagtaaaaggtctcatgaagaaaataatcctatttgaccactatacattgctagcatcaggaaatagaataattgcgaattccgagtaaccggccaagccgctaaagtagctaaagtagtgataaatcttgtcaataaaatagatcctaatgaaagtccatcgattcccaatctccagtggaaatcgaaaacatctatccatttagaatcctcctttaattggattaaaggatcctccaattggaaatgataacagaatgcataagtcattagaaggaattctaataaacaaatagctatagtatatgattttatttcctttatgaggtaaaaagaaaattaatgaacctgcaaatatcggcaaaacaacaagtattgttaaccaaggaaaataactcatgataaagtaataaatacaagatacgttttgatcagaaaagcccatgctcgattatttcgagcacaggcttcttcggtaaagaggaatcagacgattcaagtggagtttttttgtaacgtatcaataagatagagccatgctgcgggttgtttcaggccctaaataaaagcggacacttaaaaatccgttggacaggcggattcgcatctcttacaacccacacaatcttcggttctcggcgcggaagcaatttgcttggctttacatccatcccaaggtatcatttctaatacatctgttgggcaagctcgtacacattgagtgcatcctatacatgtatcataaatttttacagaatgtgacattggatctctaaattttccttttcaacataaaaattttcgatctggtaaaaatgaaattagtactatataaattagatgtattgtagacaccagacgaagcaatagtttatccaaactttaacaaataatgcaatatatttcgtaatctgtttgtgagaaagcgtgaaaagagccaagagacttgaatttaaggcttcaacagttataattatacaaattctacatactaattcgaattagccaataaattggctatcatcttttcaatataaattattgcaatattcaaattgcaatatcaatgaattgcaaaaatgcaatattcaataagtaaaaaacaatactctgaaataacctactcaaaaaaaggatattattaaacactaataagaaaataagattagatttctattcatcttaatgtttcttattattatatatgcccctttgtttaggggattctatgtctaattattcaaaaaattggattgattgatacgagttgatttcctgttacgatggatggaagaaagaatggatagtccaatagctgcttcagcagccgcaagggctataacaaaattgcgaaaatgtctccttttaattggcgactatcaaatagatcagaaaatgttacgagatttagattaattgaatttagtataagttcaagacatattagagctctaaccatgttttggcttgtgatcaatccatagataccaatcgaaaataaatagacactcaaaaaaagtacatgctcaaacatcattaactacctccttatcaatctcgattcatttcaatatgaggacaagaattgaactgattcaattaactagaatagaacaattacgcaacaaaagagaaaagaaggtatttgttgtattggcagtagatgggttttactaaatcaaaattgtgattctttagttatttattttatatttgaaattctaagaattttgactcattctaagtatttcttattgtcgagccatagtaattacctattaaagaaactacaagaattagggaaatgagttcaaatggaagataaaaatcggttgctaaatgaatcccaatttgttgaacgttatttatgagaccctgttctactatttggtttgatcttgtagtccaaagaattccatgccacgacgtatctgggatagtagtcattagtgaaaaaggaatagttatacaaaggagtaaagtaaacccatctccaatagtccaataattcttatctttagaccactctgagccgtttacaaacattacaacaaatatgatcaagacatttatggctcccacataaataagaagttgtgcgatagctacaaagtaggaatttaataaaaaatagaataaggatatacaaacaagaactaatcccagcgaaaaggcagaataaattgggttggtaagtaatactactcctagacctcctagtagaagaccaaatcccccaaatagcacaagaatctcatgtattggtccaggtaaatccattatggataaggagaaatttctagtataaaatttttcatgaactgactaaaactaaaagattcaaggaaggaaaaaggtattaggatatttttttgtatatacatataagttgttaatcagtagttattctttttcgttagagttagtaaaaatggatttttctaataaaaaaaatcctaatacctagtaatctgtaatcgttcttgaattccaagatttttcttcgtctattttactttgaggcaaatttctaattgtttgaattgtgtaatctcccattatggtaaccgactcaaagcaatctgattgtaattcaattcatgacgatcataagtagaaagttcatattcttcagtcgttgataaacaacttgtgggacagtattcaacacagttaccgcaaaatatacaaactccgaaatcaatactataattaagcaattgttttcttttaatatccttttcaaatctccaatccacaaagggtagatctatcgggcatacgcgaacacatacttcacaagcaatgcatttatcaaattcaaagtgtattcgccccaggaaacgctccaatgtaattgatttttcataagggtagtgaatcgttataggtaaacgatttgtgtgggataaggtaattatgaaactttgaccaatgtatcttgcggcgcgtattgtttgttgaccataagtaatgaacccagttagcatagggaacatattctaaatctatatatgaaaaaggtatgtttctttctcttgtttgagagaacgtttgtgttgaaaatattcttactgttattgtattcttatttatagtgaaactagttgggaagaagttgttaataagagattgcccagagaaataggtaaaagaaatttccatccaagatttaataactgatccattctcattatgggtaaagtccatcttattgtgatagaaatgaagagaaataaataagctttagttaatgtaataaagatacctattaccatttccaaaattccaattattttattcatttggaaaaatccaaaaaaggatatatagggaatagagaaattccacccgcctaagtatagaacagttacaaataaagaggaaactaataaatttaggtaagaaacaagataaaataaaccatatttaataccagaatattcggtttgataacctgctactaattcttcttctgcttctggtaaatcaaagggtaatctttcacattctgccaaagaagaaattagaaaaactagaaaacctataggctgacgccaaatattccatccaaaaaaaccatatttggactgtgcttcaactatatcaactgtacttgaactattagataatcatagtcgatgataacatcacagttctcaccgctattccaaaaccgtacatgaaaccttagcttcatacggctcctctatgatcagaaaaaaggaaaggattgtttcgtttcggtatcatcctctgggcatagatagaattagataagataaaattgattggaaagcccaaaattagaccaaagcaattacgtctgctagaataacaaaaaagcgcttccgaattgatctcatcctttatataatataattttgctttgttcggtaataacttaatattggaataaatcactcgttgtagcaattaataaatggaaagaatttggcattagttcatgaggaattctgtatgaatagggataaaggaaggaaagaataaataaagatcttttttgtattgtattccttatcttttgtcctactcttctttccctaggaggggtatacttaaaaaaagaataaagggttaattcgttcttgatagccatttccttaacaagtgaatgggaacatactctagaccggaatctgaagaaagtacggcttgatcatttccaccaatttcaagtccttattatgattccttttatgacgaaaaatgtctaatgatttagattctctcattactaatcttgtatgtactttagtgttcctaatccctcactaaattttgatcgattgccttgtggttataagtttaaattatagtaataactcaaaatattctagtaatggaattccatatcgcgaatcttttattcttgcccgcttcaagatatgatgactaatcaaacaatctcaaccttggggttaagagtttacactgcttatgtttacttgaacttttttcttgtacgtaggaaatgagattttttacttttactacaaattaataagctgttttgtttcactcatatagctatcgagtttaacttaccaacgcgaatacagaataagcaaaggaagataagcattcaatgtattttagaggaaaaaagatcctattttaacgaatcacacgtagagatattgctagtacacaaaaagtta

SEQ ID NO: 327 - DNA, 6501 bp, Zea mays
  Intron number 5 from transcript GRMZM2G142924_T01 (locus G RMZM2G142924) derived from phytozome v7.0 (chr-ID 7; pos 1 17675391 to 117681891)
tataatatgttagaaagttaggcatttttagttttaatttaatccagaaaaacagtgcgatatatgtgatgacatgtatgtgcatgtgtgtataactactcgcataagcagtaaatagcaataaaacatgcacgaatacgaagaatagagtgtacccagcggagggaccgatgctcaaggcatcagtggctccattcacacgagtcatctcgtgtgtttgttcgatgtagccgtacgaagtcgatgcaggaaggtgtacgcagtgcagtccctcgaacggtcgccgggaagaagacgaagcagatcacgcgagcagtcgcgaagacgctccccaaaaatctgatcgcccgcacacccgtgcaagtgtatctctacggtcggtgatttcggaggcctgctctcccactctctctgtgctcgcagaaggtgggacgggaatgtgttgcttgcaattcgcgtgaggcaattcgcgtgcctggaagagccctccctctccattcttataggcggtcagaaggagggagaagaccaacggacagaaacggtcgcgcattagaactggaaactgacgacagtaatgacgtccgttactagccataatgacgtccgttactagccataacgacgtccgttactagccataataacgtgaaaacggacggttattatgacgtccgttactagccataatgacgtgaaacggacggttattatgacggtcatcgctccaggcaaaatgcgcaaccgtttgaaaggaatattcggaccaaggtccgatctaccacgagccacgagccacggcccggcccggccggcggcggcggcggcggcgcgcgcgcgcgcgtgtggcagtccttcatccttttctcaacttctcaatagatgcaccaatagtccacctatttaagttgattgatttgtcttttgaacttccaatatggtactaaataattagtacaccatagcattaaagtgggccattagcattgactattattgaatattaatttgggccaagcccacattaatccaacaatccccaccaaatgctaagtcacactaaaaagctctcatcacctcaaacgtttgatatactggtgtttcgatggagactgttaagttgaacatccacctagaacttagactacacttgaccacaactgcacaatggactaggccttgaattggcagttttgcgtggaatgagtttcatctaaactctttaccagtactagattgctgaacgcattccctctggttggagcatataagtcaaactccatagcctttcatgggtatctagaaaccacccagatctcataaactgtgactagcagttaacccatataggtatgttcctctaaagatgttctgtaggacaacatctttgcttcacaaagccacttggaacatattaaggtgtaaacaccaacctaccttacagtaaggaaagatatgcatctgaaatgagccttattaagggtctttcctctcagtctaccactagcttgtttcaccattctaattcacgggatctccgatcacatagaacaggttaccactatgataaactttaggtgggtctcatgcccatctcacttgatgcactatctatcacactacgtgatagccccttagtaaattgatctgccagatttttagacgtatggacataatccaacgctattactccggagtttctcaatttcctgacagatttcaaacgcctctttatgtgccttgtcgacttcatattatccttagaactgtttatcttaattatcacagtctgattatcacagttcatggaaatagccggcacaggtttttcaaccaccggtaaatccataaggagttcacgaagccactcagcctcaactgaagcggtatctaatgctgtgagttctgcttccatagtcgacctcgttaagatggtctgcttgcaagacttccatgaaacagcaccacctccaagtgaaaacacatatccacttgtggcatatatctcatcagcatcagatatccagtttgcatcacaataaccctccagtactgttgggtacccggtataatggatgcctaaactcatagtaccctttagatagcgcaaaactctctcaagagcacgccagtgatcatctcccggatttgaaacaaatcgactaagtttgctcacagcaaatgagatgtcaggcctcgtagcgctagctaaatacatgagtgaaccaattatttgggaatatctcaattgatccctagctatccttcgatttttctttaatagcttactaggatcataaggcgttggagcaggttcacattcgctaaaaccaaagcgactcaaaaccttttccacataatgggattgcacaagtgtgatcccaccaatgccttctctcagtagcttaatgttaagaataacatcagcttctcccaaatctttcatttcaaaattattagatagaaagtcttttgtctctttaatcacatcaagactcgtccccaagattagaatgtcatcaacatataggcataaaattactccctcgcccccaccataccgatagtatacacacttgtctgcttcgttcacaacaaaaccggcagatgtcaaagttctatcgaacttttcatgccattgcttaggtgcttgttttaggccatataaagatttcaataatttacacaccatgccttcttgaccatttgctacaaacccagctggctgctccatgtaaatttcctcatctagctctccatttaggaatgatgtcttaacatccatttgatggacgagtagaccatgagaggcagccaaagaaagtagcacacgaattgtggtcaatcgagccacaggtgaataagtatcaaagaaatcctcaccttccttctgtgaatagcctttaattacaagcctcgccttgtacctttcaatagtaccatcaggcctaagttttttcttgaacacccatttacttccaatgggcttacacccatatggacgctcaactacctcccaagttgcattagacataatagaatccatctcactccttattgcttccttccaaaagtcagcatcaggagaggaatatgcctcttcaatggtacttggtgtgtcatccacaagatatacaatgtaatcatcaccaaaggactttgcaatccttggtctcttactctttcgagttgatacattgtcattttccacatgattatgtatatgggattcctcagtgtgttctaccggaataaaatgctcatggggtatcgttggttcatcattagacatatcatgtgtagctttcatgggaaattcgtcctcaaaaaacgtagcatctctggactccataattgtaccaaccaacatgtccggtactccagagtttataattaaaaacctatatccaatgctgtggaaagcatacccaaggaaaacacaatcaacagttttcggtcctaatttgcgcttcttgttaattggcacattcactttagccaaacaaccccaggtgcgcaaataggagatatttaatttcttcttttcccattcctcgaatggtgtgatttctttgttctttatgggaactttattcaggacatgacacgccgtcaagatcgcctcaccccaccattccttagatagccctgaagtctctaacatggcgttaaccaaatcagttagagtacggttctttctttcagcaaccccattggattgtggtgagtatggcggtgtcctctcatgaataataccatgttccacacagaaatcagaaaaatcacccgaaaaatattctccaccacgatcagaccttaaccgtttaattttcctctcgagttgattttcaacttcagctttgtaggtcttaaaataatgcaaagcttcatcttttgattttaagagatacacataacaaaatctagtagagtcatcgataaaagtaataaaatatcgcttgcctcctttagtcaatattccgttcatctcacataaatcggaatgtattaagtccagtggtgccaaattcctcgcctccgcagccttgtgaggcttgcgaggttgcttagattgcacgcacacctggcacttagaacctttgactaaatcaaatttcgggattaaatttaaatctgctaaccgcgagacacaaccaaaattgatatgacaaagtcgtgaatgccaaatatacgactcattcgaaacaacattgttcacagacttattacacgcatcatgcaaagataagcggaacaagcctccgctgtcatagcctttttccaacaaacgttccatacttagacagtatacatttattagactcaaagacaattttgtagccatctcgacacaattgagagccactaactagattctttttgatggaggggacatgctgcacgttcttcaatagcaccgtctttcccgaagtaaacttcagaatgactgtaccaacaccaagaacacgcgcatgtgatccgttccccatcagcaaggctccagtccctttgcactgataagaagaaaataaagaaatatcagcacacacatgaatattagcaccggtatcagcccaccactcaggggattgacacactgaaagaacagtaggtaaaagattaccataccccgatgttccttctgcagtctcgctaacaaccatgtttactgttttcttctcttgagctggttttttctcttgcttaaatttgcggtctggacaagcgcttgcccaatgatcagtactcccgcaaacaaagcaaccagctcctttgttcttctttttgaacgaggctgcctgcttgggcttcgtggcattctgttgcttgttcttctttttattattatgtgatgcattggagttcttcttttgtaccatattggcactagaagtctcaactccttttccacgagtgtcttttgctctcgccctctcctcaacatcaagagaaccaataagctcagccacgctaaactcttgtctcttatgttttagagtggtagcaaagtccgtccaagaaggtggcagtttagcgataataccgccggccacgaacttgtcaggcaagacacatgggaattgttcgagttctttagccagtgcctgtatttcatgagcctgttcaactacaggacggttttccaccatcttatagtcaaacagctgctccatgatgtacagctcgctaccagcatcagaaacaccaaacttctcatctaatgcatcccataactcttttgcagatgtgcacgttagataagaatcaacatacttgttggcaagagcgccaatcacggcgcctcgaaacaggttatcggcaacgtcgaacattctctcctcttcaggagtgaactgttcgggtttcccctgtgcggcgtgatagcagttcattgcggtcaaccacagtatcatcttactacgccatctcttgtaaaatgtcccatcaaaaggttcacttggttttaacgcagcagcaaaaccactaacagaaaaatgcctaatatcagatttttggattgttagaaagttaggcatttttagttttaatttaatccagaaaaacagtgcgatatatgtgatgacatgtatgtgcatgtgtgtataactactcgcataagcagtaaatagcaataaaacatgcacgaatacgaagaatagagtgtacccagcggagggaccgatgctcaaggcatcagtggctccattcacacgagtcatctcgtgtgtttgttcgatgtagccgtacgaagtcgatgcaggaaggtgtacgcagtgcagtccctcgaacggtcgccgggaagaagacgaagcagatcacgcgagcagtcgcgaagacgctccccaaaaatctgatcgcccgcacacccgtgcaagtgtatctctacggtcggtgatttcggaggcctgctctcccactctctctgtgctcgcagaaggtgggacgggaatgtgttgcttgcaattcgcgtgcctggaagagccctccctctccattcttataggcggtcagaaggagggagaagaccaacggacagaaacggtcgcgcattagaactggaaactgacgacagtaatgacgtccgttactagccataataacgtgaaacggacggttattatgacgtccgttactagccataatgacgtgaaacggacggttattatgacggtcatcgctccaggcaaaatgcgcaaccgtttgaaaggaatattcggaccaaggtccgatctaccacgagccacgagccacgagccacgagccacggcccggcccggccggcggcggcggcgcgcgcgcgcgcgtgtggcagtccttcatccttttctcaacttctcaatagatgcaccaatagtccacctatttaagttgattgatttgtcttttgaacttccaatatggtactaaataattagtacaccatagcattaaagtgggccattagcattgactattattgaatattaatttgggccaagcccacattaatccaacataata

SEQ ID NO: 328 - DNA, 17270 bp, Zea mays
  Intron number 4 from transcript GRMZM2G391511_T01 (locus G RMZM2G391511) derived from phytozome v7.0 (chr-ID 2; pos 5 1555702 to 51572971 reverse strand)
acgtgagttgttactttgttactttgtttgagctttaagcttttctcttgttgtttgtacttcaattcatgtctaagtgggtagggtcaagtctcttttcttgaggttgtgagtaggtctgaaaacctccctttgtcattgttaacttctataattttctgtttgtctttctgaacactcctttctttttgtgctgatattaagaaatcatgatcttttgttttactgtcaaacttgttactttacgcatagacatatatggacttttgtgtcctgagggtagactgctcggtgattgcatatgttgagcaccgttttgagctggcggacggtccgcgcatgagtagagcagtttagggttccgagttttgtgctacggttgttatctaaattcgctcggaaattagttcgtaaagtgtccagcccccctgctctatatatagagaggcatacgaccgatttgaaacaacgaatcgaaccttcaatcaatacaattcacattttatcctaggagtagttctagtctagtttaggtttagcctctcgatctccaaattctccgcttctcttcgactctacgccgattagaagagtctaggtcggcctgtcgagcctagacatcacctaggatctctcctccccgacggggtccctcccgggagcgagatccaggccgccggcggcgacttccgccgcccctgcgtacgcgcggaccgtccggccgtcaggcagaggaccctagccctgcgccaggtcgcggatcgtccgcgcctgaccagagagcaccaccacggttcttgttgagtgtttggcgctccgaaaaggcgtcaacatactttttggcgactccgctggggacaagaaatatagactcatcaaatcggccctcaatggctggttcaagagatagctctgatatttccccaagcaacatcatagaggcgacttgggagaccttgccggctgacgaacagcttcagttcgaggagcacaaggagcagatgatccaggaggcaaaagcaaaattcttggccaacttcaaagtggacaggaacaacaaggtcatccgacatcgggcgacggatccggcttcactgcgacccacgccagatatccccaatgtaagtaatacaaacgagctgcaatctcttaagaattatgtagatgaacaacgtgaacaaatgcaaaatatcataggggatatgcaaaacgattataagagactagtacgtgcatttgataaatctagtatagcaaattttccttcacacgaggttgaattaggggataacgcacgtaatacatcggctagaggttgtcacgaccagtcacaacccctttatgtgatgccgatggacacgtaccctgagcaaccgcaaatcggcagcaaaacagccgatctgcacatgtcacgtgagcgcggaccgtccgggccagccacggccgagcccatttttaatggggtacccagacacgcacccgagccaccacatatgacacggaatctgaactacctagtcggatcgtccgcatacaacgacggatggtccgcacataatcacggacggtccgggccaatgtccggacagtccgcacatgacctttttgaggaggattgttacttgaatcctcacccgtcccagcaacacttcccatcacactatgcaatgcaccagcccattaatttaagatccagagcccaggaaagctttccggccccacatagaaggccggaaagaaacgatcaaacctatgacccatatagggcaaatggaaatgcaccacgtagctcaaaccaatggggggaaagacaatatgctaacatccagccaaccccacctatgtttgaccagagagccggtggtctcgcaccggctgccattgatatagtgagggaagaaatagccggggtgttccgagataaactcggagtgagcatggtccctggggggcaatcgtatcggaaaccttatgacagccgatttgatcaccacccatatccacagggaaccaggatacccgaattcgcaaaatttttgggtgatcaaggaaagaacacgcgcggacacataggccagtttttagcacaattaggagaattggccgacacaggcatttcgcgtacgtttattttcattatctctaacaggaaccgcgtttgcatggtatgccactttacctccaaattacatttcatcatgggggatctagaacaaaaatttcatgatcattttttctccggtgactatgagttggatttggtagatttagtgtcattgtgacaggcaaaagatgaaacggttaatgattacatccggagattccgagatacaagaaaccgatgcttccaaattcatttagcagaaaaacagctagcaggattcggggaagatgtggagacgtatctctcatcagccttcctccaggggggagcgtctggggatagtccttcgcaggccagtgggaatgatgctgctggttgcatctccagtgctcccctgccggttggcgtccgccccaagagaaagcgggttaggaagcgtcgttccagagcaaagccttcaggtgtcccacccccatcttcctcggatcgtccaggctgcatggcggccactgctgcttcggttaccccagtgcaccacgttcctccgtgtatcctgggttggagccaccaaatgacgagagcagaggatgatcttcaatacgcggtaatggtgactgtgatcagcgatcggtcttcggttcgggcttcggagattgctgagctgcttgcccctaggctggaaatggatgctagttctctggtgttgcggcgggtttcagcgtcaaattatattcttgtcctccctggtcgtgataaggttgaggagttggttggcagatgggctactctcagagctgggtctttttctgtggtgtgtaagaaatggtctcgtctcatggagtccaagggcgccttactcccggtgttgatcaatcttgagatccaaggaatccctatacatgcttgggagacaagcactgtggatcatttgctaaatccttttgcgtggatacaccatgtccatcctgatactttgaacctgaaggatgtggctgttttccgctgctccgcgtggtgtttggacccttctgctattccttcttctaaagagctttggattgtagaacctccttttgctgttgagggtgatcctgcaggaaaacgtgtgctggtttacactgtgaatattgcggtctcgatcactctccggcaggatggctctgatccagttcttcgctctgaggatcctgatgatgaggatcactctccgcgtagaaggcgtctcatctcgccttcccatgagtttgctcaggggcatcatgttaggggtcagcgatcggagcgtcgttcagttcacgaccggattggcccaagagcaggtaatggggatcaaacgaatgattgttctaaggtcttaaccgatgaggctgtgctggtggaattcagcaacgtggagctcagagaagttgatgttgatgcccagatccagagtcacggtcctgtggtttcttcctgcgctgtctctgccgagtgctccagcttgcaagggggtggtcagttctctgcatgagtgccctggcagtgggcagttgattgagtgtcctgaggaactctgtcagtttggaagtcagcagggggttgggcagatttctgtgcttactggtcctggcaatgggcaattgaacggatgtcttgaagatcacaatcagattggctgtcagcaggtttgtgctctggctggaaatctgggctctgtggctgactgcgaggtgttgcttcccagggagtcccctgtggctgccacctcccctcccttgctcctccgcccaaaacctattcaagtttactttcggcgtcgccgaggagcgaggagggttgaggaaacagccttggggagctctccgtctcaaccaccggcttctgctgttgatgtttcaacctcaagggtgtccgagttcttgtccagtattaccaaagaggtcgatgctgtgttggagaaccctgcccccaacccccttagaaagaaaaaactgcctggggggcgggtggctactcctaggcgcagcaggcgtgttgctggcgtcggggttgagtgtcaccaacgcctttcctctttcaagaaaagcaagaagaccattatgaagacactgggagtgatccatgatggggattctctgagtcaggaggcgctggaggaatatagtagcattttcagcaattctctatcccaggtgcagatccaagcccttgcctctctctttgggtggtctctacctgaagagacgttggttgtggaggctactctttgaggaaggtttctcttccttgggttgcggtttggttggacgtcttaagctagttttttatggatccgtcaaaaattctcatatggaatgttagggggcttaatgcctcggctcgccaggatgctgtaagggctgaggtcgtttcatctggagtggatgtggtttgtttacaggaaactaaaatgcaggatatttctcgttttttggttatccggatgcttggaccagattttgccaactttgtctttcgcccttcgattggtgctagtggtggcattttggttgcttggaaagatcatataaactgggctagtgtttctagagtggatgatcattcagtgtcaattctttttcatccggttgatgatgtggagtggtggctgacttgtgtgtatggtccccagctcaaccaggacaaaattgcctttcttcaagaattgagagatattcgtgcttcctgctctgacccctggttggtccttggggattttaatttagtttataaagatgaggataagaataactccaatctggataggccaatgatgcataattttcggagatggattgatgacttggctcttaaggagttgcctttggttgggcgtaagttcacctggtcgaatgggcagcataatccaactcttgtcaaactggatcgtgttttctgctccttggattgggatgatcagtttccttgggccctgctgcaaagttcggcctctttcgattcagaccattgcccgcttcttctggggcttaaggatattgtgcatggaaagccacggtttcattttgaagctttttggacaaaattagatgggtttctggtagctgttgaggatgcatgggctgctgtccctgctagtcattgtccgttgctcactctctccaagaagctcaaggccacagctaaagctcttcaaggttggggcgagaaaaaggttggtcatattagatcacagcttggtctcgccaaggagctgctccaccaactcgacattgctcaggaaagtagaagtctttctctcgaagaattttggttgcgtaataatctaaaacagcacagtcttgctcttgcgtctctatggcgctctttggttcggatgcgatctcatatttgttggctgaaggatggggatgcaaatagtgctttatttcattctcatgcaaggtatcgcaaagctaagagcttcatccctagaattgtctcagaggatggaatggttttcactacccaggaggagaaggcggacttgttcacggatttctatttgaatctgcttggttctgcaattaatagaggggctgcggttgatttggaacagcttggagttcccacgtttgatttagaagctcttgacagccctttctcggcggatgaggtctggaatacaatcattagtcttcctctggataaggcgccagggccagacgggttcacaggtcgtttttacaaggtctgctggtccataatcaagattgatgtcatggctgcaatttcctgtgtatgggccagaaagtttgccaacatgaattgcctgaactctgcttacatcaccctcattccaaaattggaaggggccgacaaggtcaaagattttagacctatcagtctcattcatagttttgctaagctggtgtctaaacttatggctaataggttggcttgtaagctggagcatattgtctcgcctaatcaatctgctttcatcaagaaaaggtttattcaagataattttatgctggtacagcacactgcccgttttttgcagcaacaaaaacaaccccgtgtcatggtcaaactggatatttctaaggcttttgatagtgtttcctgggcttttttaattgaagtcctcatcaagctgggttttggacagatctggtgcaacgtagtttgcggcttgttgtcctcttcctcgactcaaattttgcttaacggatgcccgggagaagtcatttatcatcggcggggtttgcgtcagggggacccattgtctcctatgcttttcgtcttggttatggatgttcttaatattatggtgcagcgtgcctctgcggtaggggtcctccagcccctttcttcgagattccttcaccaccggatctctttgtatgcagatgatgtggttgttttccttcggccggatgtggttgatattgaggtatttaaggggattttgcatctttttggtgaagcctcgggtctgaagaccaacattcagaagagtaatgttttcccaattcattgtgatgaggaagttctggcttcagtgcaggcatctttaccttgccagttgtctaatttcccatgcaaatatcttgggcttccgttatccttaaaacgtctatctaggcctcaattgcaatctatcattgatcgtattgcagtcatgctccctggttggaaggcggtgcttatgaccaaggctggccgggctgtttatattcagtcggttatgacttccagatttgtgtatttggctatggccctggatctccctgcttgggcaatcaaggcaattgacagattaaggagagctttcctttggaaaggcaggaaagaaatcaagggagggcactgttccttggcttggagtaaagtcactcgtcctaaagaattgggtggtcttggtctttttgatttaaaactgtttggttgggcccttagagtcaggtggctttggttgcagaaatcagatccagggaggccgtgggctgcgtttccgcttcatttcacaaaggaagtggtgtgccttttcaattctgctgtgtacactgtaattggaaatggattaaacacgcttttttggactgataaatggctgcatgggcactgcatccaagagattgccccggctgtgtttgcctctattcctagaaaggttatcaaaagtagattggtgaaggaagccttgactaatctgaggtgggttcaagatgttcagggagctctttcctatgctttctgggtgcagtttttggatttggctgagattttggaaggatccttgctgcagcccaatgtgcaagatcgtcatgtttggaggttttctagttctggggattattcttcaaaatccgcttacagtgctatgttccatggctcggtgcttttcaagcaggctgatcgaatttggaagacttgggcccctggcaaatgtcggttttttctatggcttgtggctcacaacaaatgttggacagcagatagattggctaaacgaggattgactcagtcgcttctttgcccgctctgtgataagcatgaagagactatcaaccatctgctggtgggctgctcctttgcgcgacatttctggtttgagctgctaaggtcttttggtttgcaggacttccttccaggacaggatatagatgattttgatcattggtggtgcttcaatagtgctcggttgggtggaatgagtaaaaagggctttgactccttggttgctttaggcgcgtggatgttgtggaaacatagaaatggtgttgtcttcaatggctcccatccaaatttgatgggggtcgttcggttggccagggaggaagctttcttgtggtctttggctggggctaagggtttttcttacctcttagctcaaagacgggtggtttagtttttttctctgttttagttggggtgtttgtcagctgacaaacgctctgtccctgcccctgttccagttgttctttctggctaggtgggttcggtgtgtgtgtgtgtgtgtttgtgtgtgtatgtgtgtctgtctgtttcggggtattttccccttttcttcttaatatattgatgcgcagctctcctgcgtgttcgagaggattagcctttaatggtctacgatattatttaaaagaaagattagaaggcatccaattttttacactagcacagttacaccagagagctttggcttgtgaaagccgaagcaaagaaactgctaaaacaattcgtcacaacgtacatatagtagaatgcgaccaaagtagctcagatgacgaatcagcagaagtgtatgctgctgaaatggtttggccaaagcaggccaaatcttcggcttgttcctccttacagccggttcaaaagaaacggcaagaggaggttaagtttacgtttaatgttggtaagtgtgataaaatatttgacgaattactcaaaaatggcaacattaaaataaatcacactgtttcatccgccgacgagctaaaacgtcgtgcatactgcaagtggcataactcattttctcatgccactaatgattgtaatgtgtttcggcgacagattcaatcggccattaacgagggacgattgaaattttagaaaatgcaggtggatacagagccctttccgatgaacatgatcgacttcgagggcaagaaagtcctggttcggccaaacacagccgataaaggcaaaggcaaagaaacaaacatcggcaatgctaaaaaggccgatggggattgtaaagtttcttgcaggaaagtggtggccgagaagactcccgatggaggggagaccctaaaggtgaccatcacagcctctagcactggggggcgagcgtagacagggagacagttgcgggaacccgtgctgcgcatcgcggacagtccgccatccagacgcggatggtccgacgcttctccggacggtccggagaactccagcggacggtccggccatgctcaggactcgcagcgggcacgtaccttcaaaccacgacgaccagagataggtacgtggaaaacaaatacatttaaagcaactcgtaggcctttgattcagtctcatggcccttcctcctggaagtcttgcaacatttgggatttggccaagtctggagagatattattagtggcttgctatggacttcctcatctcaggtgttacttaatgggttacctggacaacctattcttcatcgtcgtggtctccggcagggggatcctctgtctccttttctgttcatcttggtcatggatactctgggcttcttgattaataaggccgcacaggatggactgctgcaaccccttgctcctcgggcattgcaacaccgggtttctctctatgcagatgatgtggtgatctttcttcggccggcagccatggatatcaatgttattctagattgtcttcagctgtttggagatgcttcgggtttacgtacgaatgttcagaaatgcagcgtgtaccctattagatgtggagatcaggaccttgctttgctgcagaatatgttgccttgtgagttagctgaattcccttgccgctatctgggtttaccgcttgccattaaaaagctttcaaaaatccaagtacaacccatcattgataagattgcaaatcaactctccggatggaaggctgagttattgactaaagctggtcgtaaggtgcacgtccagcatgtcctcacagggatggtgatctacttggccatggctgttgaccttccagcttgggcccttaaagccattgataagattcgtcgaggttttctgtggcgaggtcgaagagatgtaaaaggtggccactgtcacgtggcttggggaattgtttgtaggcctcgcgaattgggtggtctaggcatttccagcatgaaagaacttgcttggtctcttagaatgagatggctttggctggctaaaactgagccatctcgcccgtgggcctctcttgctatccaggtccctaaaaaggtaaaagatttcttctccatggctatgcaaactgagcttggtaatggggctacaacctatttctggactgataggtggttatcgggtcacagaattgcagagttagtcccttgattatttgggatcatccctaagagacgggttagcaagagaacagtggtggatgctatctctaatcagagctggatttctgacattcaaggagctctttcggttggaattatcaatgaatttctcattttgtgggatttaattgactcaattgttttaagacctcaagttgaagacaaacatttcttccgtctagctgcaaacggaaagttctcctcaaaggaagcatataggggtttctttttgggatcttctgagtttgagccttttcatagaatatagaaatcttgggctcctccgaaaaccaagttttttatgtggttggtcgctcacaggaaggtttggacagcagacaggctgcagaaaagaggtatggaccatccagagagatgtccactatgtgaccaggatcaagaaaccttggaccatatgttgatcggatgtgtctttgctcgagaattctggtttaaattgcttcttcaagtgaacctgcagtttcttgccccccaatctgaggatagtgcttttcttgaatggtggagaatgttatgtaccaaagtctctggaattgcaagggacgacctcaattctctagtcattctgggagtttggaccttatggaagcaacgcaatggctgtgtttttgacaataagaaccccagtattgctgatgctattagaagagttgagttggaggttcacctatgggagatggctggtgcaaaaaagttgtctttgctcaccgcccccattccgggcatccctgctagttagctagcattgtggtaatttgtgttagtttcttctttagacatggatgggtttctgtatgcctattactggccgccataggcgcctcttttgttttcttctgtaattgtccttcttctttaatataatatcgcgcagttctcctgcgctttcgagaaaaaaaatttaaagcagctcgtcggctggtcaattccggcccaactttcgatcaattgttgtctaaatacgtgaaaaagaaggccggccccagtgaccggccagcaaagcgaccccgctcacccattcatgagcaacgtcaggtcaggccgattggaccaccccaccaatcggaagaaatgaaaggtcatactgtacaattgagacctaacataccgacatggacacctccacctacttatccgtctatgccatatccatacacatacttacctccaccatatgtcccaaatcaaatgtggggcatgccaccatatccatttgggatgccacagtacccctcctggggggcaccccaaacatctgtttttgacaggttggcgccaccagtacaagaccgattgagcaccgctcaatccggtcaccaggcacagacccaacaggattgccggactactcggcctccaaggccgaccaatccggcagaggggcatatgcctgcggcaactgaaagaacgacaaaaaaggacattatcaaaataggtacaacagatatcgttatacaaaaagaaagtgaagggccgataatttttggtgaatcggccaatacaaccaaaaaagaagatacaactaccatcaaaatagccgatccaaaatactccatgcctcgatggtgcccagcgggattgacacggtcccaaaagagaaaattacagcgcctaagagcaaaggagatccaggagaaggaggcggaaaagatattcaatgacacacatccactatacccgccaccacaaaagaaatggagaacaaaggccgttgaggaaaaacaaacggccacaaaaatagaaaataaaacaacacttgtgcagcaccctgcaggtatggcagatagcctgaccaacaaggccggacaaactgcaccaggcgcggaccgtccgcaccacaccaggaagcctccaacgacatgccaacatcaatggaagaggacgacctgctgggagaagacctagtcgactacgaggcttctccagaacgcccaggtatggatgtaaatgttattacattttctgtcgattgtgctattatcggcgacgatgaacctgttgttgcccagtttgattttggtcctaaagaagccgcctttactaaaccaaaggaatcagtaaatcatttaaagccgctcttcgtgcgcggtcacattgatgggataccgattgctaagatgatggtagatggaggggcggctgtaaatctaatgtcttattcattgtacagaaaattaggtaaacaagatgacgaacttgtcaagaccaacatgaccctcagcggtgttggaactgatagtttgatcaaagccaggggagtcacgtccgttgaattaactatcgggactagacccttgctgctgcattcttcgtcgctgatgtagaaggaaattacagtttaatcataggcagagattggattcacgccaatcaatatataccttctacattacatcaaatgttaatacaattggtaggcgatgacatagaacaagtacatgctgatgtatcggcctgcatcgctgtggccgatgcccctgtactcttgacttatgggactgctacatgtctcacaggagtagatttttctgattatcaattcataagtatagataagaaaggtttcattcctgtaatgctagagccgatggagaatcggctaaatcctaaataaagtttaaatgatgaatacacacaaagttcatgagtctttggtcacggacagttcggcttccaaggccggatggtctggtctttcacaaaaagaccgaacatctatcgcagcgaaaagacagtattacggatgatccggtccccgagaccgaaaagtccgccgccacacaaagatcatctaattcctctgtggggaacatgatagaggaattcagagatcttgataaactaggataggggtttacattggccgatcctttggaggagattgacataggagatggtaaaactccaaggtcgacttttgtaaacaagaccctggagaccgatcctagagatgagatgatcggtctattgaaggaatattcaaattgctttgcttggaattacactgagatgcctggattaagccgagagatcgtagagcatcggctgcctattaaatctggtttcagacctttcaagcagagagctagtacatttcgtccagatcttctcccatgcatcaaggatgaaatccaccggctgctagaagctgattttatcagaccttgcagatacgcagagtgggtctccaatattgtgccggtggagaaggagtcaggtaagcttagagtatgcattgattttcgcaatttaaataaagcaactcctaaagatgaatatcccatgctcatagccgacacattaattaataatgcatcagtaaatagaattattagcttccttgatggtaatgccggatataatcagattttcatggccgaagaagatgcgtctaaaacggcctttatatgtccaggcttcattggtttatttgagtgtgttgtcatgacatttggtctgaaaaatgctggtgctacttatcagagggctatgaatttgatcttccatgaattgttaggaaacactgtggaagtttacattgatgatattgtagtcaaatcggctgagtttagttctcatatagctgatttgcgcaaagcctttgataaaatgcgtcggtatggtatgaaaatgaacccacgtaaatgtgcttttggagtgtcggctggtaagtttttaggatttgtcatccatgaacatggtatagagatagactctgaccgaatcaagtctattcggaatgtgggacctccgacctgtaaggtcgaggtacagaagtttctcggcaaggtgaattatttacgaaggtttatttctaacctagctgggaagattgatgcgttcacccctattcttcggcttaagaatgatgccgaattcgcttggggggcagaacagcaagaagcatttgatctcatcaaaaaatacttatcttcggctcccgtattaaaagcaccacgagcaggagtatcattccgattatacatttcagctgaagataaggtcattggggctgttctgacacaagaaactgaggggaaggaggatgtggtgacatatctaagccgaaggttggtggatgctgaaacaaggtacacttttattgagaagttatgcttatgcttgttttatgcatgcaccaaatgtagatgttatttactgtctagtcattgcactgtttctggtcaagccgatgtgatcaaatacatgttgcataacccaattatgagtggtagaattggtaagtgatgcactcatagaatatgacttggcttatgaaccattgaaatctatgaaaggccaagtcgtagcggatttcattgtagaacatcggattaatgatattcataaactagacatgtcatacctcactattactccttggactttatattttgatggatcggtttgcaatgaagagcaaggaattggcatcgtacttgtttcaccaagtaatgtctctttcgacttctctagccgattgaaaacttattgcactaataatcaagccgaatatgaggccctcttattcggcttggaacttttaaattgtatgggagtgaaacatgtgaaggcatttggtgattctcagttggtcgtccaacaagtgttagaagaatatcaatgctttgatggtactctgaatagttacctttaaaaatgttggagcataatccattcttttgatgaattcagtattcggcatatttcgagagttgagaatcatagagctaacaatctggcacaagatgcatcaggttatcggataaagcgagggagattccacgacactgaaaatctgataaccggtgtagggccaattccccaggtcgcggaccgtccgcgtcgagacgtcggaccgtccggggttaccagaaatgttctcttaattgaatcggctgataatgaagccgatgcaagtgattggaggacgcctatacttaattatttacgaaatcccaatatcaggacagataagaacatttggcgtacatctttcaagtatgtcttgatgagtgatgaactctaccgccgaacagtcaacgacgtcctgcttaagtgcttgggcctagatgatgctatattggccatggccgaagtacatgaaggaatttgtggtacccaccaatcggctccaaagatgaaatggctcttgcgaaggtctggtttttattggcctagcatgatagctaattgtttcaagtactacaagggttgccaagtgtgtcaaaaattcggcgacctacagttggttcctgcagccgaattacatcctatcatcaagccttggccgttcagaggatgggactagactttattgaaaaaattcatccttcatcatcaaaggggcatcggttcgtgttagttgccactgactatttcaccaaatggactgaggccgttgctctgaagaacatgacacacaaggaggtaattgagttcataactgagtatattattcatagattcggcattccccagaccttgactacagatcaagggacttcttttatgtcaaaggaggtacgtgaatttgctgaattatacagaattaagctgcttaattcatctccatattatgctcaggccaatcgacaggccgagtctagtaataggacattgattaatttgataaaaaagaaaatatctgataatcctaaacattgtcataagattttgtttgaagctttatgggctcatagaatatctaaacatagtgctactaaagtatctccttttgagcttgtctatgggcaggaagcatcaattccccaggaaataagtggtacatttttcaggctatctagccaaaatgattgaatgatgacagattattataattcaatgatggataatattgatgaggtgaccgacaagaggatgatagctttgggagcaatagaaaaggacaagatcatggtagccagggcctacaacaagaaggtcaaagcaaaatcatttcaagtaggagacctggtgtggaagaccattctgcatctaaggaataaagaccggaagttcgggaaatggtcgccaagctgggagggtccttataaagtaaaacaggtgatgtctggtaacgcctatttgctacaaacattacaaggcaaggatttgcccaaggctttgaatgggcgtttcctcaaacagtaccatcctagtatgtggcaagatgcctaaaagaaccgatgtaatcacatcgagttagttgcttttggtttgctcagctccaccaaaaggcagggggcatatgttgagcaccgttttgagctggcggacggtctggccctgaggccggacggtccgcggtccggacggtctgcgcctgtgggccggacggtctgcgcatgcgcagagcagtttagggttccgagttttgtgctacggttgttatctaaattcgcggaattcgctcggaaattagttcgtaaagggtccagcccccctgctctatatatagagaggcatacggtcgatttgaaacaacgaatcgaaccttcaatcaatacaattcacattttatcctaggagtagttctagtctagtttaggtttagcctctcgatctccaaattctccgcttctcttcgactctacgccgattagaagagtctaggtcggcctgccgagcctagacatcacctaggatctctcctccccgacggggtccctcccaggagcgagatccaggccgtcgcccctgcgtacgcgcgggccgtccggcccccagggcacggaccgtccggccgtcaggcagaggaccctagccctgcgccaggtcgcggactgtccggccctaggccgcggaccgtccgcgcctgaccagagagcaccgccacggttcttgttgagtgtttggcgctccgaaaaggcgtcaacagcataattccagaacagaatgtgttttcactattatcatcacctgtcatttattcagaaggcatagtcaattcctaactcattcatgtatatattttctgttttgtaacaattacggtccataagccatgctcactctctttgctgcctttcaggttatacgaagtggtattccgaatttctgtgcagt

SEQ ID NO: 329 - DNA, 30869 bp, Zea mays
  Intron number 11 from transcript GRMZM2G101250_T03 (locus GRMZM2G101250) derived from phytozome v7.0 (chr-ID 2; pos 94764389 to 94795257 reverse strand)
gtggagatgtatgttcttctgcacaatagattttcaatactttggtcattcttgttactaaccttgggattgacaattgataataggtccctaaggactgtaggtaatatatatagccagtaggcctgggcctaatgggccttaacacccctcctcaaactcaaggtggaaatggaggatctgaagctttgagtttgatcaagtgaaactgatgttgtgctattgtttgtgctttggtgaagaaatctgccaattgatattctgagggcacatattgaaggtcaatagtcttctgctaacaatgtaatcgagtaaaggatgcatcaacacctatgtgtttagcaagctcatgcttcactggatcatgagcaatctgtatagcgctcaagttatcacataacagaggtgtagaagtgtcacaagagacaccaagatcagccaagagccagcaaccaaataatttcagcagtggtagtagcaagtgcccgaagttcggcttcagcactagaacgagatatggccgcttgcttcttggatttccatgcaatgggagatgacccaaggagaatacagtaacctgtagaacagcggtcaacaggatcacttgcccaagtggtgtctgaatacgcatgaagctgaagtgggctatctgaagcatagagtaaacatctggatcttgtcccacgtaaatatcgaagcacacgaagcaaatgaccataatgaactgaagtaggtgttgatacaaattggctcaacatatgaacaacatgagcaatatcaggtctggtgatggtgagataaacaagactacccacaatatgatgataccgagttggatttgctagtggggtcccatccttcggacgaagttttaaatgaatatccatcggtgttgcaacagtgcgtgtatcagtaagtccagagcgatcaagatcttgtatatatttcgactgagacagataaaagcctttttgagtctgctgaacttcaatgcccaagaaatagctaagcggtctgaagtcagacatctgaaattccttactaagatgttgcttgacatgagaaatatgttctgagttgttacctgtaatcagcatatcatccacatataatagtagtaaggtacgaccttttggagagacatgaacaaacaatgcgggatcatgttcactagaagaaaaaccagcagctgtgatgacagagatgaatcgctcaaaccaagcacgaggagcttgtttcagcccatacaatgcgcgacgaagacgacaaacatgccctgagggagtatcaaccctgagggagtatcaacccctggaggaggatgcatataaacttcttcttgtagatcgccattaagaaaagcattcttgacatccatctgggatatagtccaagaagatgaggctgcaactgcaatcaaggttcgaacagtagtcatatgcgcaacaggtgcaaaagtctcatcataatcaagtccttgagtatgttgaaaaccacgggccacaagacgagttttatacctctcaatggaaccatctgattttgtcttaactttgaagacccatttacatgtaataggaacaacatgcgagggtaaaggaacaatatcccatgtaccagtgcgttcaagagcagccaattcatcaatcatagctagctgccactcaagaatcccagaagcttcctgatatgtagtggttcaacaattgccacaccagcccgtggaaaaccatagcgatctggaggttcaatggtaccacagtcacgaagacggtatccctgattaaaaacatcattaaactcattattgttagtacaagaatcaggtacatgatcagtatcaggactagccataggaatagagcgggaacgacgaatgtaggtttggatgataggtggtttgggagagtaagaggtggatgacgtggaggtggaaggtggtgttatgggaatgagaacatcagatgtggatgtagaagatgatggttcagatgcaggaatggaaggaagacacatgaaagaagtagattctgtgggataataggtggagtgagtagactggttgtgaaagaagggccgattttcattgaaactcacatctctagaaatccgaatacgacgagtagatggatcataacaacgatagcctttgtgttcaggactgtatccaaggaatacacactctacagattgagcggtcaatttagtccgctcacgtggtggtaacaagacataacatatacatccaaacatacgaagatgatcatatcgtgcagaagtcccaaaaagaacttcacccggtgatttaccagaaagttttgatgaaggttgtctattaatgagatacacggcagtggaaacagcttcactccaaaagtgtgaaggtacaaaagaagatatcaaaagagtacactcaataatatgacggtgtttgcgttcagcaacaccattttgggcatgagcaccaggacaagaaagttgagctagagtactctctatggtcaatatctggcgaaaattatcagataggaattcaccaccagaatctgaacgaaaatttttaatagtagcagaaaactgggtgtgaaccatgcgaatgaaggacttgtaaatagaaggcaattccgaacggcgtttcatgaagtaatccaagtataacgagaatgatcatcaataaaaatgacataatatttatgaccacctttagaaacaaacggagctggaccccaaacatcagagtgaattagatcaaaaggtttagcagaatgggaagtactagtaaaatatggaagctgtatttgttttccaagatgacaacctttacaatgaaaactagactcaacatgagtagagtctaaacatcctgactttattagagtagacagacgggatccacataagtgacccagacgatgatgccactggggaatgacgtcgtggggcccgaagcaacgagcacatgaggtgtagttgtaggggatgaagtaagacgcaaagtgtccaagatgtagaggcgaggcgaagatttacggcgacggtcaatcccaatcacatgccctgttttgcgatcctgtacaaaacaagatgagtcatcaaatccaacaaaacaattgtgatcggtaatttgaccaactgatagtagatccatggataactgaggtacaaaaaatatatttgggacattaaaagttggataagaaagagaacccttgtgggtgacatgacataatgtaccatcagcagtctgaacagaagtaccctcggtgaaggtgtagtagaagccagccgtgactgatcagatgtcacatgaaaggaagctccagaatcaaggacccaggatgatgacaaagcaccagcagatgaagtagcagcaatcgcaactgagcctctaggagatggtcctgcacgagcgaccacgagtagcacgacggacacgaaaatcagccagcttctctggaaacttagcaaagcagttctcagaccgatgagtggtctttttgtagtgttcacaaggctgaaaggaggtgttcctagacctctgagcagccaacacattgtgagaactcagaccagtaatagaggacatagacttcagacgagtctcttcagcaagcaattctgacaatgcctgagccatggtgagagtatccgaactgtgaagcagccttgcacgaagggaatcaaattcagatcgaactcccataacaaatctgtaggtaaagaatttctcaatgaacttgtgggctggacaaggcacaacagtacaagcaggcaccatggaagtcaatgcactcataagacgatcaaaggatgaatagtattcatcaatggacatatcatgttgcttaatgacatgagtctgttgcatgagggtatgtaaaagagcaccgctgtcctgaacaaaccggtccttcagatgtgaccagatagccttagcagtggtgaatttagacagactcataatcatagttggtttagtgctattgaccatagcagccattaccttgccatcattgatctgccaagtcttgattgcaacaacattgcttctatcggctgctaggactggtgaatcttcagtcaaatgaaatagtaaaccatgacctcgtaatgcagtctgaacacagaaagctcattcgggataattctgaccatcgagcacaatattgacaacaatagcattggtcaacatattgaagagcaagagaacagtcagagagtaccaaaatttctggcagctagactgactccaagcagatcaacacaagtggcaggcgaattcttgactgatcggagaggaccacgtcgccaaaacagatctgggcgaggtgaccgcgttggtgcagatgacagtaggtagacggcgtccctgttgttgaagaagcatagcagacagatctgcgcaaggacccagggacagcaggaacacagagcgcgcgacacctcacgcgcaggagcacaggggagcgcgctgcgcacagggagcggcaccttgcgcgcaggagcacaggggagcgcactgctcacagggccggatccgcgagcgcgccgcacacaggaacggtcgccgcacctcgcacagggaaggctggatccacggccgcgcgggacagggtggccggatccgcggcgtctcgcgcgtagggagtcgaggggcggccagatccgccgaatccgcgtcggcggtcagatccgcgacggagcagaggtaggggcagccggatccgcgactgcggcggctagatgaggacggcggccggatccgcgacgaagcagagacaggggcagccggatccgcgacggagcagaggcaggggcagccggatctctgtcggccatggagtccttccctgcttcgtttctaggcaaaaggtgtcagcaccggttaagggtcaggaggtctagggctctgctatccctgacgttcttggaatggctggggttgattcagggtcatggtcgatcagtgagcaagctgtgatagctgatggtggagctgctttggcttcgtctcttcctgcttgctctattgagcgatcgactgtgatggctagagttgaggttgatctccgaagggctctgtatgttacgatggttggttcaaggttggaggtttctgccgacctggtggcagatgaagttacaacagtgttagctgtcgaggtgggccgcatcttggtgcacaaatccgcgccagaggacttcctgatgttgcttccaagtgaggagatggcaaaaagtgtctacaacaatggtgcaatattgcatacattgcatacccccagttgttctctgaagttcaagttctggtcaagattggctcatgctatggcagtttccttctcatcgtgtttgcattgagatgaggggtattcctgtgtgcatgcttggacgctgtctattgctcaaggtttacttcgtgggttttgtacgtcggtggagctccactcagattctaagggtcgtcgggatctttcatgcttcaaagttttagcctcatgccggcggccagagctgatcccggttttgatagagttgctaatcccagaaccggaaaaatcttccttgtcaggacttgttggagaagcacatgctggcttatgaaatttcagtgctggtctgtcatcttcgtcgacctctggcgtcagatgatgttggtcccgttcctcggcgctcacgtgaccgttctcattcatcaagggcgcatggcggctccggtgacagaactgggggacgtcggccggtgcatgagcgtcttgggcgtaacttggcttcctgccgccacgtgacagccttccaatgtcctctgcatgccactcccgtgctttatccaaggcagtggttgatgctaatgggaaaaagataaaagccttgtccccaagcttcattcctcgccggagcagaagagtagctggtatgggggctaagcccctgcctcggcttcctgcctagaggcgtgccaagatgacggtgttgaagaccattgctaacctgccggttgatgaggaggcagtcctctcttctaggattttggatgattatgcaaagcttttccgcaatcctttgtccgactctcagatttctgctttggcagcgcaatttgggtgggcgattcctgctcccctggaggaacagccggccctagtgacttgagcgttcacttcccatgttggtagttgttcagtctctccatggatccttcaaaaattttagtatggaatgtaaggggtcttaatgccggtgctcgtcaggatgctgttaggattttagcaggttccatgatatgtgatgtcgtttgcttgcaagaaacaaaaatggctgaggtttctcgtttccttattgcccgaatgttaggccctgatttctgcgactttgttgtcttgccttcagtgggcgctagtggaggtattttagttgcttggcgggatcgtatcagccaccagggcaattacagaattgattctcactcagtgtcagtccagtttggcttagaggaaggttctccttggtggcttacatgtgtttatggcccttaaggaaatgaggcaaagattcagtttttgcaggaactcagggaagtcaggaatatatgttgtggtccttgggtggtggtgagagattttaacttgattcttgaaggtgaagataagaataattcaaatgtagaccgtgccatgatgggtagatatcgaagatggattaatgatcttgctctcaaagaagttcctcttcatggtaggaaatttacttggtctaatggtgtgctaatcccactttggtaagattggatagggtattttgttcggtggattgagaagagctctttcctaactgcctcctgcaaagttccggaagtctgtcctttgtgtgatcaagcagctgagactattcaacatatcttgatatgtagtgttttttccaagcaaatctggttttccatttttcagcccttgggcctggctgccattacgcctacggtcgaggacactacattctttatctggtggacacgatcggtcaagagagtgcagaaggaggctagaaaaagactcaatacgctgatcattttggtagctagggagatttggaagtttaggaattcctgtgtgtttgaaggatctaaggcagatgtccaacttctcctgcagaaaatatgggacgagtgtcgtttgtggtgtatggctggggttgctgatttgcagcagctcctgacacggcttcgaacttaaccagttaggtgctagggagtctggtctgctgctctattttgtctttttttgttttttctggctggtcctagtgttttttctggctggtgttcctcgcgggtttctcttctttcttaatgaaatgacatgcagctctcctgcgtcgttcgagaaaaaaaaacaagactcggaccattgcccccttgtgttggggatgaatgatgttaggcatggtaaaaagagattccatttcgaacctttctggcataagttggggggttttcaggaggctgttgctgctagctggtcctcagtcttgataggttcatgccccttagggatagtttgggagccacagaaccggaggggattggaggggctagaacccccttctagcccctctaatctcgtccggttttgtggctcccaaactagcccttagtgacattttctaccaagcttaaggccactgccaaaggcctccagagttgagtgacaaggtgggaattgtgcagagccaatggtggttggccaaggagattcttcatttactcgagaatgctcaagataacagtgttcttgtggaaaatgaagtctttgatcgcgaaagggcctctagctgagttggttaggtggtctaagtagcactcctcaggtcctgggttcgactccccgtgggagcgaatttcaggctgtggttaaaaaaatcctctcgtctgtcccacgccaaagcacaggtctaaggctcagccccggtcgtggtcgttctcacatgggcttcgatgccgctgtgtatgggtggggcaggggttcgggggttttctcgacctgtgcgaggtcttttcttaatacaatgcccgggggctgtcttaccccccgcaggtcgagtttttttagatcccgaattaactggatcaaggatggagatgcaaacacaaccttgttccatggccatgctaggtatataaagggcaagaatttgatcactaaaattaatgatgcggctgataacaccttcactgcccatgatgatattgcagatcagttcttcggtttctttaatgggctactaggatattatgaggagcgaatatttctactgatctggatgctctagatgtgccttactttgacttggctgccttggacgctcccttctctgaggaagaggtgtgggctactatcacgagcctcccttcagataaggctccggggccggatgggtttacaggccatttttataaagcatgctggtcgactattaaggacgacattatggctgccctatcctgggtgtgggctaggaaattcagaaacatgggtctgctcaatgctgcttacatcagtcttatgcctaaattggaaggggctcaggatgtgaaagacttcagaccaattagtctggtccacaactttgctaaactagtcacaaagctcctatccaacaggcttgctggaaagctgcaccttatggttactcaaacccaatctactttcatcaagaatcggtttatacaagacaacttcatgcttgttcaacaaacatcccgttttcttcaccaacagaagcagccctgcgttcttctcaaattggacattacaaaagcattcgattcagtttcttgggtcttcttgattgagataaagaagttaggttttgggcagatctggtgtgatattatcagtggcctcttggctacctcctctacccagattctagtcaatggtattccgggtgagcgtattacacgccagcgaggtctgcggcaaggcgatcccctctcgcctatgctctttattttagttatggatattttatcatggctggtgcaaagggctgttgaggaggatcttctgcaaccgttgtgctcaaaacctttgcaacaccgcatttcgctttatgcagatgatgttgtgatctttctgaggcctgaccctcctgatttaaatttaatgttgaatattctccagttatttggcacaacatcatgcctcatgactaatgtccataaaagcaaggtgttccctttccattgccctgatgaagttgtggaggtggctaaaagcttgctgcggtgtgaattttctacgttaccttgcacttatctaggccttcttttatctcttcataagttgtctcgcccccagatccgtgagctgattgataaggttgcttccaagctcccggggtggaaagcgcaaatgacgaaccgggctggcagggccatttacattcagtctgttatgactgcaaagctaatctacactgcaatggctattgatttgcataactgggacatcaaagaaattaataaacttcgaaaaggtttcttgtggaaggggatgaaagaagctaatgggggacattgtctactggcttggcctagagtcactagaccaaaggatatgggaggtttgggtctgcatgatttaaaatctctatgttgggctcttcgggttagatggccttggctgcaaaaaactgaacctagcagaccttgtgccttattctctattcactacagtaaagaggttcaaaagctgtttgaagcggctgtagtttcggtggtgggagatggttctaatacacttttgtggaacgacaaattttgtggaacgacagatggtgtcatgttcaaacaagtgtacaccaggcgccatagggcccgtgacgtgcgccgagcccaagaacgcgctgctgcgcgcacgacaagcacgcagggcacgacctctagcagtggctaggagggaaagtaggagatctttagctattttggttggtccttaattagtggagtttgttactccttttggttgagtcgaaggctataaatatgctgtaatcaaacacttgggaattaagaaagatattaccatctaatcctctctcttcctctacctaagccgacggcaggggggataacccaccgacgaagaatgacggcaagagggtataacccggccggccatcacggacaacgtctacgatctatgtagccgaggtccccctaccctcgggctcactgcccttgacaacctggtatctcagtctcgtcgatcctctcccaccacctccatccaatcttccaccgcagcctcacaaccattccagccgcctccatctccttcctcgtcgtccacggcaacgtccgcaccgtcaaccatgggcgatggcgatcaacaaaccctggccgaggtgatgacaatgctccagtccctgaccaccgccatgtcaaagatgcagaccgacatggcgggcatgaaggagaaggtcggctcgtcaaccgactccagcatccaccacgacgggccgcaccacacggatcgcccctcgcggttccagaagatggacttcccgcgctttgagggcaagtccgacccactcttgcccgaccccttgattttcatcaatcggtgcgagtcgtatttttgccagcaatgcaccatgccagaggagatggtgtggatggcgtcgtacaacctggaggatgtggtccaactgtggttcatccagctccaggagtacgagggtgatggaataagtcttgagcatctagaggacaacaggacaacaagagctttttgactgtcctctttagtctcttttgcatctagaggacaacattagctttttgactgtcctctttagtctcttttgcatctagaggacatcagtaggacaatagcttttgactgtcctctttagtctcttttagcttttagcatctagaggacaatcctgttgtgtagtgtgtgtgagaaagtgtggtagtgcaacctctaggcctataaatatgtgtctccaacccttagatgggtaatgacatttgagtagtgtgtgagaaataaacgaaaattgccccaactcgtggtgtcatcctctcgatgagagtccctttgcttacaattggtatcagaaccaaactatcctgcagcctaaacatctcttgctcatctccttcccacgcctctccccacactcagtcggcagcaagagcgccaactgttccttcctctcctactcagacaagcagcctttcgtctgagacaacctcttccacacgcagctacccctcactcgcccaccatgtccctacgctcggtcacttcgagtgcgcgacgccagcaggaggccgaggtcgccacggcacaagaacgcgagcgagcagcagcggctgcagcgacaacggcgtgggcagcacggctggcagcggcggaactggcagcagcgagagcgaaagtagaagcagcggaggcggcagatgctgcacgtgcggcggcagcagagctcgaggctctgcgcggcagtagagccgggaactctgcttctgtcgacgacaacaccgacgaagagctcaggctggcgagggaagcaccgcgagagcaggtggcacagtgggcagccgcgcatccccatgggggcgcgcgtggcggcaacccagataggtgtcgacgcgccgacggcgctccgggcgagggcgcacgcggaggtagcccagactggcgtagacacgccagcgatgctcccggtggcggcgaccgagtcgacggagatcgcagcctctacaggcggcgcggctctccctctcgggatcggtaccatggtcgccgcatggcccaggccattgtcagggacatcggtctcggcggtgggtggcctaccctcactaagaccaactacgttgagtgggccgcggtgatgagggtacgagtccaggttcgccatatgtgggaagcagttcggtacgacgacgtcgactaccacgaggatcgacggtcgctggatgccctcattgctgcagtcccgcccgagatgcaattttcgctttcccagaagcggactgccaaggaggcctgggacgccatcgctgcgacccgcatcggcagcgaccgtgcccgcaaggccacactgcaggcacttcacaaggagtgggagaacctgaccttcaagtcaggtgaggatgttgatgactttgctctccgcctcaacactctgttgcagaagatggcgcagttcgacaacgacacctacgatgaggagagagttgttgagaagctcttccgttgcatccccgagaagtacaagcagattgctcgcaatctctcgattgagtctctgctagacctctccacgatgacaatcgaataggcgataggtcgtctcaaggtggtcgacggcaacgaaccacaggctccctctgggcctatcactatcggcgggaagctacatctcactcgggagcaatgggaggcctgctagggtgacaagaagaagggggagtctttgacacgaggccgcaaacgcggcaagccacgcaaagcgcgtggaggcgcccaggtcggggcgtgaggacatgctgagggtggtgcccgtggaggtgcccaaggcggcgtcgtcgacaataagaagccgacacgagacgatggctgtcacaactgcggcaagcttggccactgggccagggattgtcgacagccacgacgtggccaggccaacgtcgcataggcggaggaggaggctctgctcctagcacatgcaagcatcgagctatctccagcggtaccggccgcagcgacactcctccaccttgatgagtcgaaagtacgcgctttccttggcgacggctccagcaaagacatgattgaaggatggtgcctcgacatcggcgccactcatcacatgaccggccgacgggggttcttcaccgagcatgactctagcgtccgaggttccgtcaagtttggggacgcctccggcgtagagatcaagggcgccggctcagttgtcttcatcgccgcgtctggtgagcacaggctgctcaccggagtctactacatccccgcgttgaggaactctatcatcagcttgggacagctggatgagaatggttcgcgcgtggaggtcgagcacagagtcatgaggatctgggatccctctcgtcgccttcttgccaaggtacgcaggagtccaaatcggctttacatcctcaacgtgaatgtggcacaaccttgttgccttgctgctcgtctggacgacggggcatggcagtggcacgagcgactcagtgccaaggagatggtacgaggcctgccgtgcctttaccatgtggagcaattctgcgatgtctgcgtgttgacaaagcagagacgactccccttttcccagcagtcgagcttccgagccaaggagaggctcgagctcgtgcatggggacttgtgtggcccggtgacaccagccacaccaggaggacgacactacttcttgctgctcgtcgacgatctctcccgctacatgtgggtgatgatccttggtagcaagggagaggctgcgaacgccatcaggcgtgtgtaggtcgctgtggaggcggagtgcggtcgcaagttgcgcgtgctgcgcaccgacaacggcgacgaattcacggcggctgagttcgtgtcgtactgcgcggatgagggcgttcaacgccactactccgcgccgtactgcccgcaacaaaacggcgtcgtcgagcggcgcaaccagacggttgtggggatggctcgggctctcctcaaacagaggggaatgccgactgtcttctggggagaggcggtggtgacagcggtctacatcctcaaccgctcgcccaccaaggcactcaacgggatgacaccgtacgaggcttgacatgggtgcaagccggcggtctctcacctacgggtcttcggctgcctcgcgttcactaaggagcttggcacatcggtaagctcgacgacaggagcaccccaggggtgttcattggctacgcggatggatcaaaggcctatcacatccttgacccaggaacactgcgtgtgcgcacggcgcgcgatgtagtgtttgacgaagggcgaggatgggcccgagacaaggcggtggacgacgtcacgactccgacgtacgacgacttcaccatcgagtacgtccactttgagggagccgggggagtaggcgacccttcttcgagtaggcctactctagtccccaagtctccaccgactacaatgccacgctctccagctccggctacaacgagctcttcgccatcacgccatccagcacgactccgactccagcgagctctctatcaccacgtactccaacaccgacggtaccctccccgggaacatcctctccgacgccagctcgtgtcgaacatgacccagtggagcttgtgatcccgctcccccacgacgaggagcgcgtcgacgcgtgctacgacggcgagccgttgcggtatcgaaaggtggagggccttctcatcgacccgtcggtgccggacgcggcgtctcgcattttggcaggagagttgcatcttacatgcgacgatggtgagcctcggtctttcgcggaggccgagaaacacgcggcttggcgtgccgcaatgcagtcagagagacgcggttgagacaaactgcacttgggagctcgctgatctccctcatggtcatcgcgcgatcacccttaaatggggtgttcaaactgaagagggatgaagccggcgtcatcgttaagcacaaggctcgcttggtggcacgcaatttcttacaacaggaggggatcaacttcgacgatgctttcgcccccgtggcacgtttggaatccgtgcgactcctccttgcgctgtctgcccaggagggctgacacgttcatcacatggacgtcaagtcggcgtttcttaacggcgacttaaaggaaaaggtctacgtacaccagccgccaggttttgtgatccctggcaaggagggcaaggtgttgcgcctgcgcaaggctctctatggcccacgacaggcaccgagggcgtggaatgccaagctggattccacgctcaaaggaatgggcttcacgccaagcccgcacgaggcggccatctatcggcggggcaatggaggaagtgccctgctggtaggtgtctacgtcgacgacttggtgatctccggcgccaaggatgcataggtggcagcattcaaggaagtgatgaaggccacctttcaaatgagtgacctagggcatctctcctactacctagggattgaggtgcatcagggagactccgggatcacactttgccagaccgcctacaccaagcgcattgttgagctggctgggctcatcgactgcaacccagctctcactctgatggaggagaggctgaagctgagtcgcgacagcacgacggaggaggtggacgctacacagtaccggcgtcttgtggggagccttcgctacctcgtccacacacgacctgacttggcatactctgtcgactacgttagtcggtttctgcagcgaccgacgacggagcatgaacatgctgtgaagaggatcatccgctatgttccggggactctcgaccactgtctctactacccgaggtgccctgggaggcacaccttgtcgggtacagcgacaacgaccacgccggtgacatcgacactagcaagagcacaagcggaatcctcttcttcctcggcaagtgcctcattagctcgcagtcggtcaagcagcaggtggtggccatgtccagctgcgaggccgagtacatagaggccttcgctgcttcggctcaggcgctctggctggctcgactgctcggtgatcttctcgggagagacactggagcggtggaactcagggtggacagctagtccgctctggcattagccaagaaccccgtgttccatgaacggagcaagcacatccgggtgagataccacttcatccgagactgcttggcagaagggagcatcaagacgcgctacatcagcaccaaggatcaggttgcagacctgctcaccaagctccttgggggatcaagtttcttgagctttgctccaggtccgggatggcccaactttcccacaagacgacggccaagacttagggggagaatgatggaataagtcttgagcatctagaggacaacaggagctttttgactgtcctctttagtctctttagcatctagaggacatcagtagctttttgactgtcctctttagtctttttagcatctagaggacatcagtagcttttgactgtcctctttagtctcttttagcttttagcatctagaggacaatcctgttgtgtagtgtgtgtgagaaagtgtggtagtgtagcctctagggatataaatatgtgtctccaacccttagatgggtatgacatttgagtagtgtgtgagaaataaacgaaaattgccccaactcctagtgtcatcctctcgatgaaagttagagtccctttgcttacagagggcacgccaccacgggggtgcttcagggaactcctgaaccagcacttcgggccggtgctacggtctgccccactgttcgagctctccgagtgccgccgcacggggacggtcaaggggtactccaatcgcttccaggcgcttctccctcgcgctggccgactcgaggaaggccagcgggtgcagctctacaccggcggcttgctgccaccgctcagccaccaggtgcgcatccacgcgtcagaaaccctcgcggcagccatgagtctggcacgagcgttggaactggtcgagctggatcgtcacaactccgttcccggcaaggctgcgccgcgcgcacttggcccaccgcccgcgccacacccaagcgtcttggcggccatccctacgccaatccagcaggcgcctgcggtccaggcgctgccagcaccctaggcgcagcaactggcaataccggcgccactaccaccacgaggcgggggcaagcgcctcttgacggaggagcaggtggaacggcgctgcctcggcctctgctataactgcaacgagccatactcccgcggccacaacagagtctgccgccgcatcttctataccgacgacgttgagctggttgaggacgagcccgctgaggaggcacccgtctactccctccatgccgtcgccgacgttccagtgggcggtactctccaaatcgaggtgcaggtgggcgcggccacgttgatcaccctcatcgacacgggctccacccactacttcaatggcgaggtggcagcacagcgggccggcatgcccatcgcgcctcggctgactgcgaccgtggccaacggggaacagatcgcctgcccgggcgttctgcgctaggcgcccatcgtcatcgacaaccggccattcgcggtcgacttatacatcatgcccctggccagctatgacctgttgctaggcactcaatggctggataccttgggtgatattatctggaacgtggtcgcagggatcatggagttcaaggtggcggaccagcagatctgctggcgcagcgtcgcaccgccgacaccgccgcgcatccacttggcctcgatgatggagcccctcctcgacgagctgcttgcatccttcgccgacgtgttcgccgagccgaagggcctgcctcccgcacgtggccgagcgcaccgcatcatcctcaaaccggacaccgcgccggtggcagtgtggccctatcgatatccagccgcccacaagactgagctggagaagcagtgcgataccatgatcgggaacgacatcatccggcgcagcgactccgcattctcctcgccagtccttctcgtcaagaagccggatggctcgtggagattctgcgtcgactaccgcgccctcaacgcggtgacggttaaggacgcattcacgattcccgtcgtcgacgagctcttggatgagccccatggcgccaagtacttcaccaagctcgacttgcgctcggggtaccaccaagtccgcatgaggccggaggatgttcaccaggcgttccgtacacacgacgacccctatgaattcctggtgatgctgttcggactcttcaatgccccggccacatttcaggcgctcatgcacgacgtcttgcgcccgtttcttcgccggtttgtacttgttttctttgacgacatcttaatctacaacaagtcatgggccgaccacttgtcacctccgcaccatccttagcgagcttcgtcggcacactctcttcgtcaagcgctccaaatgtgcgttcggtgtcgtctccgtcgcctacctcggccacgcgatctcggaggcgggggtggccatggactccgccaaggtgcaagccattcatgaatggaaagtacctcgctcggcgcgggaggtgcgcggcttccttgggctcgcgggatactaccgcaagttcatccacaactacgactccatcgccgcgccgctcacgacgctactcaaggagggcttcgcgtggggacctgaggctgcctcagccttcctcgccctcaaggaggcggttacctcggcgctggtgctcgctatgccggccttcgacaagccctttgtcgtcgaatgcgacgcgtcgtcccacgggtttggtgctgtcctcatccaggaggggcatccgatcgccttcttcagtaggccggtggcacctcgacatcaagccctggcagcctacgagcgtgagctcattggtttggtccaggcggtgtgctactggcggccatacctctaggggcgccgtttcacagtcaagacggatcactacaacttgaagtatctgctggacttgtgcttggccaccattccgtagcaccactaagttggcaagctgctgggcttcgacttctccgtcgagtacaagccgggcgcgacgaacgccgtcgccgacacgctgtccaggcgcgacaccgtggagggagaactccttgccctctctgttccgcgcttcgactttatcgacaagctccgacaagccgagcaggaccacccgtcccttgtcgctctccgtggcgagatcacagcgggcacccgactggctccctgggcgctggtggatggcatgttgcaattttccggacgactgtacatcccggccgactttccgctgctacaagagatcgtgggggccatacatgaggacggacacgaaggcgtaaagcggacgttccaccgtctatgtcgtgacttccattttcataacatgaagcaagttgtgtaggaacgagtgcgtatgtgtgaagtctgccaacgctacaagtccgagcaccagcacctggtgggtctccttccgctaccggttccccagggcgtatggactgatgtcgcactagactttgtggaggcgctgccacaggtctgcggcaagtcggtgatcctcactgtggtggataggttcatcgagtactgccatttcattccattggcacacccgtactccgctaaatctgtcgcatgtggggctgctcaagaagtaccaggggccgccacccatagagcctccaccactgccgctcctgcatcatggcgccattagcccggaactagagcgcgcggtgcggtaccgcctggctcgcggcgtacatcaagtgctcatccagtggaagggcaagccggcagcatcaacatcctgggaagacgtcgcgcctttccgcaccaagttcccccaattccagctcgaggacgagctggctctcgatggggagggagatgtcatgttcaaacaagtgtacaccaggcgccatagggcccgtgacgtgcgccgagcccaagaacgcgctgctgcgcgcacggcaaggagggaaagtaggagaccttagctattttggttagtccttaattagtggagtttgttactccttttggttgagccggaggctataaatatgctgtaatcaaacacttgaggattaagaaagatattaccatctgatcctctctcttcctctacctaagccggcggcaggggggataacccaccgacgaagaacgacggcaagggggtataacccgaccggccatcacggacagcggctaggaaatacgtagccaaggtccccctaccctcgggctcactgcccttgacagatggctggctggtaacagaagtgttggggatattgccccttctctagttaccaaggttcctaagaatcaacaaaagattggtcagcaaggctcttcttgaatcccaatggattaatgatctacagggaggcctgacttttagagtgttgctggaattttttgagttatatcaagtcttcgaggagattgttctgcaactgggagtgcctagttctcacttatggaattttgcttcttctggatcttattctacgaagtcggcttatgggaccttgatgcatggagttgtttattttgaaccggctgctagaatccggaaaagttgggctcctaacaaaggccgttttttcatttggttggtagaacataataggtgctggactacggataagctagctaggaggggtttgccacatccagaatgctaccccctctgtgatcagcagccagaatctatcaaccacttgcttgtctcttgtgtgttctctaggcaagtttggcttgaattgttgcagagagctaatctacaagtgctgataccgcagcccgaagagctgaattttgatgattggtgaaggaacaacaacctcaaagtgcttgaacagattaaaagagggttcaattcccttattattctaggagcctggttaatttggaagcatagaaatcaatgtgtttttcaaggcaatgctccaaatattgctgatgtgcttgtagctattttagatgagcgatgtggtttttagtcggggctaaggacttatccttcctccaaatcactggcccccagggctaactgtgttaaagtgttgtatggtgtgagtagggtgtgttgctgtaatggggttcttccccttcttttcttcttcttaatatgatgatacgtagttttcctgtgtgttcgagaaaaaaacacttatgattctacatttcccaaattaaggcccttctttgttgctcgatgtcctctttcgctctagaggccacttgtgctaccgtttcaaacgcaccagtgaagatccttctgttccattctttccagatgttccaaatagtgtaaatcactaccccattgaatcaccacctctcactttttggaatcttggcctgggatgcctcccaccaccggatcaacttgctaggttcttcagacggaaagattaaattttcgtcgaaatgcgcccaagcaagggcgactctccaaaccgatttggcaaaagggcaaagcaatgccaaatggatacatgtctccagtggcccattacatgagcgcaacgatcttggtgaggccaaccccttttttgtaatttgcctgcggtgagtattttctaccttgcccttgtccatgcgaaaaccttgcacttgttttcagcacgtgctctctagattaggccggactagaaaggcccgaatgagcctctaaactggacatggtatgctgagcgagtggaatatgttccgtctgtcgtctaaggtgggtgtcctcggttctgattcaaagggagacgaaatgttgtatctgggctacagtggtgatacggacgcgcagtgcattgatccagtgattatcttggagctccatgtagactgatctgtttttcatcctggacatcacaaagagactcggagctaagtggcgtggcgcctctccatcaagccaatcatcatgtcagaaacgacatttatggccgtctccaacgacgacccttgttgaggcagtgaaaagtacgcgatcagtgttgtctatcggtgtatccatgccaacccaagatttggtatcatccaaccattcctgccataaccatcgaaggcgtaaagccctaccaaatttcttaagataaggaatccctaacccgcccaagtccttcggtcttgtaactgttgtccaattcactaaacagtggcctccgttggtgttttctttccttttccaagggaatgatcttctgattctgtcgatttgttacgacccagaccgtgagcggaaacaccatcagatgataggttggaatggaagaggacatcaacagagtttaacagttagacaccttgatgaaggcactctgacaactggaaaccatagcatttaggtgtggggcgagtctgttggccagcagcttggcgaagattttagcgatactgtgaatatggctaataggcctgaaatctgtgatcttgatagcatcagctttctttgggagcaggacaatattagctgagtttaacagttagaaaccttgggagttgagttggtataaacagttgagggcggccgacagatcgttcccgatgatgttccagcatgttttaaaaaagccacccgtttagccatcaggacccagtgccttgtcagacgacatggagaagccggtacgccgaattttgttaagagtggatggcaattctagttgttggaggtccctcatttcatatcccaacgcctgccaatcaattttcatggtcctagtgaccgaagtgcccaggtgctcgctgaagtaattgtcggccaccttctctttctcatgctgcgagaaaaccatgccaccttgagactgtaagcagtggatgtagtttttccttcttgcgagcatttgctttcaaatgaaagagcttggtgttggcgtctccacatcggatgtaagtgagcttagatctctgccgcattcttgagttctcgatgcctgccaatctcatgctacggattttgaggtggcacttcagttccaactcttgggcggtgagagtcctggactcctgcgctaactccagctggaggatgatctctttggttatggccactacagtcttgtaattcctatcttctcctttttccaacttttgttggacggcagatcttgtatttcagctggtgtcaagtgtctcggctcccagagtcgccggaccgcgactacgtagctcgtagtcgcgctccagacctcaccgcgaagttatacccttctgctggtggcttgagatcggtagggaaaagaagactatgggtaaattcttgctgtccttctccagtcggctggcacaggcttttatagccaaatggccgaccactaggagggaaactactccctgattatagtaatagcaatcctactttccttcttatccctactgcagaaggatacctctttattctaggaaagggatatcctacctactttcctatttagctgctgtcaatcactttattctaggactgctttccctctgcgctgctgcctttccttctgcgctgctgtttccttctttagctgctggccgcgtccagctcgcgcgcgcgcccagctgcccggcgcgtaccacgggcgcgcttgtacgtgcgaccgtacatgacagctggacttctgccaatcttgtatttcaaggtcttttgtttatagttgtatggtttcatagttttcaccttagctagttataagtttgattcttggatggcattactgtaggttttcaaaacaaaatgtccatctccctggtaaatagctgtctacaattgcatgaattacttttaggctgctgaaggaaccatctacctgtgcagtccactttctttctcaacaatggtcctttattggcttgtaggacatctccagatgcttgctttgggttcaacgtcgccatggcacgtggccaaacttccaaactgatccaatgagcaatcctatagatatgctaatgctcaacaaaatcaaagagtcatatagccaaataaaggtaagtggcccgttgtaagcttgctcatccttaaaccggtgacaactaaggaaattttcctagttggagttttatatgtgctacagaagattgcatttatacagtaatgaacattttgttaagagaataaacatgtaagaattctgcacaatttcattatgctataattgaattgattaactcattggagaagctgaaaccagacacatgcaaatgaaaaagaccatgtgcatcaactgttttacgattgtactattatatgcatgctcactaataactagtaaatctggcatgttctactttatttctttttctttttcgtagttaaaaacttaaaatccacatccttccttttatggtatttgagctgtatctgattgacttctccagttcatgagtacatttgattgcctgatatatgcaatgaaattcaaatcctagtaattggccttgttgaggcatttagggccttttcatactttgtgtgggaaaccctaaaccctgagtggggttgggagttgtattaatagactcggtagttgggtcaggtccattacagtaggggcgagagggtaaatacacaggagacatccaaaaccctaacaggtactctaacacgccccgcagtcgcaactctatcctgtacagatgttgagactggactgaaagtctaggaatacactcgacgatagccgcttggtgaagatgtcggcgaactgcagcgttgtggggacgctgagaacccgaacatcgcttgcaggaacacgctcccagacgaagtgcaggtcgatctgcacatgcttcgtgcgttgatgctgcacgagattggtggagaggtagacggcgctgacgttgtcacagtagacgagggtgacgcgctgaagggggctgtgaagctcgtggaggagctggcgcatctaggaggcctctgccacgccgttggccacaacgtggtactcggcctctgcgctggagcgggagacgacgagctgccgcttggtggcccaggaacaaggcatagccggaggtggtccggcacatgtcgaggcagttggcccagtcagcgttggtgtaggccacaagttctgacgtcgaggatggttggaggaggccataatcgagggagccctagaggtagtgcaagatccgcttgagagcggtgagatggggctcccgtagagtgtgcatatggaggcacacctgctggacggtgtaggcgatgtcgggccgggagatggtgaggtactggagcgcgcctgtcaggccgggagaaggtgaggttgctccggtaagacgtcgcatcaacgatcgggggcccatcgtcctcagagagtttcgcctgagtgtcgacaggtgtggagcagggcttgcattcggacatgccagcccgctccagaatatcgatggcgtactggcgctggtgcaggaagagaccgtggggctgacgttcggtggtgatgccgaggaattgatggagatgtaagtagagggactctaactctcatcaagaggatgacactatgagttggggcaatttttcagtttattttttcaaactctacacaatgccatacccttagaagggttggggacacatatttatagccatcggggctgcactagaataacactacacactacaccacacactgcagcacagatgtgctgtcctttagatgctaaagtgcagtcaaaagactgcaccgaactgcctgcctgcctgctgccacagcgcagtcaaaaagactgcactgttgctgctgtgcactgcactgcctgctacactgtactgcttgactgctgctgccatagtgcagtaaaaaagactgcactgctgctgttgtgcactgcactgttgcagtgcgtgctgctgccccactacagcaaaagactgctgcttttgactgctgcagagatgttgtcctccaccatgttatctacacatgctgttgcagagttggtgccctccacacaaagaccacatgacttattccatcattctccccctaagacttgtgcgtcgtcttgtgggaaagtttagccatcccagacctggaacaaagctcaaggaacttaatcctctcaaggggcttggtgagcaagtccgcaagctgatccttggtgttgatgtagtgtgcatggatgctcccttctgccaaacagtcacggatgaagtggtatctcacccagatgtgcttgctccgttcatggaacacggggttcttggccaatgccaaggcggactggctgtccacccgaagttccactgctccaacgtctctcccgaggagatcactgagcaggcgagcaagccagatcacctgagttgaagcggtggaggccgctatgtactcggcctcgcagctggacatggccaccacctgctgcttgaccgactgccaactgatggggcacttgccgaggaagaagaggatcccgcttgtgctcttgctggtgtcaatgtcaccggcgtagtcgctatcgctgtacccgaaaaggtgtgcctccccagggcacctcgggttgtagagaccgtgatcaagagttcccgcaacatagcggacgatcctcttcacggcctgctcgtgctccgtcgtcggtcgctgcaggaaccgactaacgtagccgacagagtatgctagatccggccgtgtgtggacgaggtagcgaaggctccccacaagacgccggtactgtctagcgtccacctcctccgtcgtgctgttgcgactcagcttcagcttctcctccatcggagtgagagctgggttgcagtcggtgagcccagccagctcaacaatgcgcttggcgtaggcggtctggcgaagtgtgatcccggagtctccctggtgcacctcagggtgtgtttggtttgacttttggctttggcttttgcccccctaaaagccagaagccaaccaaagggctagatctaggaagcagcttttcctaaaacccgactttctcgtagtgcaaatctgaaagcacccctggacctacctgcttttagtggcttttcggatggaactatgaaaacatatatcgaagaatttttaatgacttttagtggtttccaccaaacggtttttagctttttaacagcttacagcctacaacagctttttccacagctcacagcccacaacaacttttttcacagccacagcccaaccaaacagaccctcaatccctaggtagaaggagagatgccctaggtcactcatttggaaggtggccttcatctcttccttgaacactgccacatctgcatccttggcgtcggtgatcaccaagtcgtcgacgtagacacccaccagcagggtattttctccattgccccgacgatagatggccgcctcgtgcgggcttggcatgaagcccatcctcttgagcgtggaatccagcttgacattccacgccctcggtgcctgtcgcaagccgtagagggccttgcgcaggcgcaacaccttgccctccttgccagggatcgcaaaacctggcggctggtgtacatagacctcctcctttaagtcgctgttaagaaacgccgacttgacatccatgtgatgaacatgccagccctcctgggctgccagcgcgaggagtcgcacagattccatccgtgccacaggggtgaaggcatcgtcgaagtcgatcccctcctcctgcaagaaaccacgtgccaccaagcgagccttatgcttgacaatggcgccgacttcatccctctttagtttgaacacccacttaagggtgatcgcgcgatgaccatgagggagatcagcgagctcccaagtgcggttcgtctcaaccgcgtccatttccgactgcatcgcggcacgccaagccacatgtttctcggcctccgcgaaagaccgaggctcaccatcgtcgcatgcaagatgcaactctcctgccagaatgcgagacgcagggcccgacaccgacgggtcgatgagaaagccctccacccttcgataccgcaacggctcgccgtcgtagcacgcgtcgacacgctcgtcgtcgcgggagagcggggtcacgagctccactgggtcgtgctcgacacgagctgatgtcggagaggacgttcccggagagggtactgtcggtgctgcaatacgtggtggcgaagagctcgctgtagccggagtcgtgcctgaagtgcgtggtggtgaagagcttgttgtagccggagctggagagcgtggcgttggagtcggtggagacttgggggctggggtagacctggtcggagaagagttgcctactcccctagctccctcaaagtggacgtactcgatggtgaagtcgtcgtacgtcggagtcgtgccgtcgtccaccgccttgtaccacgcccatcctcgcccttcgtcgaacactacgtcgcgcgccgtgcgcacatgctgtgttcctgggtcaaggatacggtaggccttcgagccctccgcgtagccaatgaacacccccggggtgctcctgtcgtcgagcttgccgatgtggccaagctccttggtgaacgcgaagcagccgaagacccgtaggtgagagaccgccggcttgcgcccatgccaagcctcgtacggtgtcatcccgttgagagccttggtgggcgagcggttgaggatgtaaaccgcgtcaccaccgcctctccccagaagacagccgacattcctctctgcttgaggagagcccgagccatccccacaaccgtctggttgcgctgctcgacgacgccgttctgctgcgggctgtacggcgcggagtagtggcgctgaacgccctcatccgcgcagtacgacgcaaactcagtcgccgtgaattcgccgccgttgtcggtgcgcagcacgcgcagcttgcggccgcactccgcctccgcagcgacctgcacacgcctgatggcgttcgcagcctctcccttgctgccaaggatcatcacccacatgtagcgggagagatcgtcgacgagtagcaagaagtagcgtcatcctcctggtgtggctggtgtcaccgggccacacaagtctccatgcacgagctcgagcctctccttggttcggaagctcgactgctggggaaaggggagccgtctctgctttgtcaacacgcagacatcgcagaattgctccacatggtcaaggcacggcaggcctcgtaccatctcctttgcgctgagccgcttcagggcctcgaagttaaggtgcccgaagtgctcgtgccactgccatgccccgtcgtctcgacgagcagcaaggcagcaaggtggtgcctccggggcgatcggaggatgcccgaggagacgctgcgggattgccatctcggctatcagagcggcgctcatgacatgctcttgctgcagggcaagggtcgcggcgcgctcgcggttgctagaagctgccacagccgcctggatggcggcgatggccgtgaccagtgccgatgaagccggtggggaagcagtgacgtaagctcaagtagtggttgcgtggcggggaagcctggaggagaaccgcggcgcggttgggcagcgagggtcgtatcggagagggccctgagaccggcgatgtaggggccccctccaacagcgaggtcgctgtgggggccgagtcccgcagctgcgagagtggcggtgagggcggttgtggctgcagcgctgcgcgcaggcgaggccacaacggcggcggctacgtccagggctacgcacgcctgctgagcagcagctgccgccgcgcgcggcggccgggtctgcccggaaaggggaagagggcggggccaccatggcaccacgcggcggctgggaagcccggcgtaggcgggggaggacgcggccgacgcaggggaaggggaacggaggccagcagcaggaggagggagggcggtcgacggctgggaaatggggagagaactggcagcggctgtaggggggcggccgacgactgagggaggagagggcagctggtggcggcggctgggcggggagggagaaaagaacttggctctataccttgtgggaaaccctaacccctgagtggggttgggagttgtattaatagacttggtagttgggtcagacccattacagtaggggcgagagggtaagtacacaagagacaaccaaaaccctaatgggtactaacactttgtaattgtaggttgggatccaaatccctaggatttagtatgaatgcgaaataatttctaaaattcgtcgagtaatccgcattttctaaacatgccttgcaacttggccttgggttgatgaatcatttgacatagcttgctaatttcttagtgcatcatgctttttaatgtattattctctctgttccaaattgtaaatagttttagtttcaccctaaagtaaaacttgtctaattataaccaaatttatgtaaaatatattaacatctacaatatcaaataagtgctctagcaaaatatcttctcatgtgagttggctggtatttccatggagtggtgacgagttggctgtccaggttcttggtgtggttagctgttcatttctctcttttggtacaacttgccttatgcaagaacgaaggaaaaaaatacagaggtcaaagtggattattttttccctgcaaaacaagcctctggctgcaggatttgggaagaatggaattggcatttactttgttgcaaatgctcattgtcactttctttcctctatttttcgattcctgtacctcctctttcaatttctacaatcgaaacggggtcttgagttcgggcaaagctaaaaacgacttttaatttggaacagagtaagcacagcagggaaagaaatccagtagcattgggtaatgtttagctgaagaaatgtactgcccttttaaatctggatctattttcttttctccatcagagtctgtactaccatgctctatgtgaaagtgatcaataaaataagaaaaacttgtattttttgccttaaaacttaatctggtcattcctgttgctttcacaaacaattgaggtcgaataattcccttattctagtacataatttttctctttcagactgggagcattg

SEQ ID NO: 330 - DNA, 7392 bp, Zea mays
  Intron number 23 from transcript GRMZM2G057402_T03 (locus GRMZM2G057402) derived from phytozome v7.0 (chr-ID 4; pos 218843975 to 218851366)
gcttcagataggacaaaggtttgagtctttatgttacaagattctgagtgtttacagtttacaagtacatattaactggatataaaatgattatagtcacaacttacaacaaatgttctgtgctccagttgcatattgtctgagttttttcagatgtcaatacattattagtatgttattttgtgtagttaggctatatgtggaaagtggaaaataataagaatcatggttattaaggtgtcgctaaagtggtaaggcgagcctcaccacgtaaggtgtcctatcgccttgccgcgggagtaaggcgagggcagagggcgctgcggcagcgcgcgcagtggcggtggcggcgcgcatggagctgcgacgaggatgtgcggccccagccagccagtcagaggaggaaggggacctcgcatggagctgcgacgaggatgtgcggccccagccagccagtcagaggaggaaggggacctgcggggagtgagagagaaggagctgtggggagggagagagatggaggtgcgggagagagattgctgcggccggcggctgcacgtgaggggaccagcggctgcacatgcactgcacgggtggggagggagctgtttgaacctaaaactgttgctgttgggctgggctagctagctgggcctttgggtttgtagacttttttttctttttctttttttttctatttctctcttctactagactgaaatagacctactaggccttatagttgtgctagcttacttattaattttgaattattgttatataaatcatatttggtctaatgttttatattactatataattaaggcaccgcctcgccttacgctttaccgcctaaaagataaaacgggcgaaagggcctctagcctagtggttaaggacttccgagtagcacctccaagtcctgggttcgattccccccgggagcgaattttcaggcttggttaaaaaaatcccctcgctgtgccccatccgctctcgggttacgatgtcctgtgcgccaccctccggttgggccgttgcagagtggacagttgacgccggcccgttagtgataaggggccagggttcggggattttctcggccgggaccattgtttcggtctcttcttaatatattaccgggagggcggtctttccctcccgaccgagttttttttaaaagataaaacgggggtcggtcgccttacaccgccttaccaccttaataactatgataaaaaatacataaagttgttctgctctgtattttgacccatttggtaatttagcccaagtgttagattctgttgttccctattgggtctagggcttgtatacaacccattatgggtgctactatatttatcctcccatattctggtgattactattctattctcctccaatatggtatcagcagccttctcctaaccctagctgccagctgctcctccaatatggtatcaactctgtttattttaggagcttggtgtatttggcgacatggcaacgagtgtgtttttgaaggtgttccgcctagtgtcgctagggccttgtctttagctgaggatgaatgtagtttgttgtgtcttgttggtgctaagggtttgtccttggctccttgctcttagtttatggtcatgacccacattgaggcacgttgttgcttctctggattagatgttttagtgtcgtgtttcttctttttttctttttcctttttttttgtttctgtaggcctttggcccttgtattgttctacttctatcttataatgtaatgatgatacatagctctcctgcgtgttcgagaaaaaaactgctcttccgagcaattagccgccgcatcatcctagcgtggtcttcccccacccctgtgctgcctaccccctttctcctcatctcggcccattgttgtctacccggtcgacaccgagccctaggcactcgcccttgatgttgttggctcggtcggcccttgcgtgggtctgcctgccaccgggatggacgtcggcgcctcccccccagccttgtatgccaccaggctgtgggcgactgtgctagatcccgtcttcgtcgccggtggctcggcgtgtttttcggccgctggcatgaacgttgccgccgccactcactctccccccatgactaccccccgtcgggtgccatggctatcgccccgcctctcccaagcgtcgctatcgctagccctgtttctattggcgctctcgcgccatcctatatggtatcacaacggcctcttccttggttgttactgccacctcggttatttttctcgactcggccggcttggccgtcgatgggccgactgaccttcccttgttgggcctctttgttggttgcgcccctcatgatgaggtggttgtggttcacttcacccttgttgctcttgccacatccaagtccgttgtcgccaccacgcgtatgcgtcagtggaccgtcaccctcatctgggagcaggagcgcgcctttgtggatgcctctaactgtcagcttgcggaagccgagtgtcagcttgaggtggtcgttgcagactgcacgccctttgcttctggcgatgttgaagccctctgcactaacgaggcctccatcgtcgccatccttcacgctcagacgactggtgtctagaacattcagcggttggcacgaccttgtcctcgctttgcagcgctatgtccttgacgatcgtatcctcattgatgaccgcatgtttatgccctcctggtgtcgtatggacagtgtgtgtcttggatcctcgacagtcggcattgtcattgtcgagctgaaggacgtcattcatgagcatggtggctcgtgccttcctgttggacgtgttgggttaggtttttatcgggttggatcgggttttttagttttgggccatgttttttcaggttgggtcgggtttttggtaaaaatcatggcttgtggattgttgcgggtcaaaaaaaactaagcctcgtacccgcatgttgcattggtcgggcagggtcgggttttttcgggcgggttggctggtccacgcttaggtctactcgacgtcaacacttgtcgccgacattgacattgactgggcgggttgcccggacacgtgttggcctacctttggttacatcagctttctaggcggcaacctcatctcttggtcgttgagcgacaacttgtgatctcctgatcgattgctgaggtcgagtaccatgttgtggctaacggtgtggctgagacgtcatggcgttggtagctccttttggagcatcatagtcctattttcaacagcactctcgtctactgtgacaacgtcggcgccatttatctccaccaacccaaccatcactagtgcataaagcatattgagatcgaccaccacttcgtccacgagcgtgttgccattggtgatgtttgcgtcctttatgttccaacgcctacttagttcactgcaatgatttcaagtcgttcgattagtcacgattaatcggcctggtcggtctttaggctcgattaggggtagcaaggcgactaggaggtctcgtcgtccaatcgtccgattaatcgtcacctaatcgcgactaatcgcccgactaggcgctatgagcgaccaggagcgggatctcgcggctggggcagggtgctaatgggctggctaccaatggcccattaggttttctaccgttgcatacaggtgccgcccgcgcccgtccgcttgttttaccgccttttcccgccgtctctgtgctcgtaacgtcgccacctccttggccggcagccggccttccacactctagagcccgatgccctctacacgacctcgacagtgcttatctgcctcgagccgcccatcctctgcttcttctctgctgcttgcttcccctcctcctctgctgccaactggccatcttcagcaggctgcaggcagcagaagccacataatgagttcctccgagtttgcccctcctctgccctttctctgctaccggctgccccttctcttctgctgctggatgccccttctcctctgctgctggctgcccctcctctaccgccagctggccatcttcagcaggctgcaggcagcagaagccacataatgagttcctctgagtattatctctcgtgttgactttcaaaacattgatagtgatatggctttgcattagcatatctacactttctgaaagttcacactccaggttctctcagtaggttttaacttctgagaggtttaatcattttggagctcagacatgtgtttcctgatcgatcccatacttaagcacgcccattgttttttgtaaaactaatgcaaacagttttgactgatcattctttttttttctaaaacgcgcaggagaaccgcgcattagatatattaagatagaagaaataccaatggtctaaagaagaccagagtacagaaaaacaacaaaaaagtaaaaaaataaaataaaataaaataaaaataaaaataaacatccatctagaagacagccaaagctgcccctaaactaaggccagatggtgcccagatcattggcacccgcgagacaccacctctgagcgtcgtctttgatattctgaataatctggttgccactaggagcatccccctcaaacacacatttattccgctgcttccaaagccaccatgccaccaacatcacaagggagttaatccctttgcgcagcgcataagggaccttggcctccaaattagcccaccaatcttggaaaaccaaatcatcccttgcgggggagaactgccgcagattaaccagggagaaaatcctaaaccacacttccctagagaagacacaagaaattaaaagatgatgcaccgtttcatcctcttgatcacaaagggggcattgaacaggatggtccaaacccctcttcgccaagcgatctgcagtccagcacctatctcgagtcgcgagccaaagaaagaacttgcatcttggaggggcccagtttctccaaataagctcagcaggcgcaaaacccacccttcccatcataaaacgatcatacgccgatttggacgagtaagagcctgagggggaaggtgtccatatgtgctgatctggaacatctgataacagttgaacctcccgaacaagatcccagatctggaagaatttggagaaagccatagaggagaaattgcccctaatgtcaagaacccagctgctaccattaattgcttcctggactgttcttgacctcacagccttcttgttaacagcagcaaacagcgaaggagcccaatctgcaaatcttttaccgtgcagccagcgatcagtccaaaatttggtgtcagttccactgcccacaactgactgaaccgatgcagcaaaaaatgcagcagcattgggatgaacttggacatccaagaaagcccacggccgctcaggttgtgttttcttcaaccataaccatctcaaattgagggaccagcccataacttcaagatttggaacacctaaaccacccaaagtcaatggtaaacacaccttctgccaacccactaaacagtgcccacctttgatatttttgcggcctttccagaggaaacctctcctaatcttgtcaatggctttgatgacccatttggggcattgaagtgcaataaggtggtaaactggaatagctgagaggacagatttgacaagagtagccctacccgccgggtgaataagagcagctttccaaccaggcaatctatctgcaaccttctcaactagagggagaaggtccctcctggagagctttctaatagacaaaggcaggcccaagtacttgcaaggaaaattcaccaaattacaagatagcgtctcttggattgccataacctcctggtcattgcagcaaatcggagtaaacgagctctttgctaaattagtaacaagtcctgaggcttcaccgaacaccttcaaaacttgtttgactgtctccaagtcactcctcaccggatgcataaacagaaccacatcatcggcgtataaggaaattctctgtccaattccccgacgaagcagcggctgtaacaaaccatagctctcagccttcaagattattgaatttagaacgtccataacacacacaaagagcataggagataaagggtctccctgacggagccccctttgatgataaatcaactctcccggttcaccgttaaccaaaactctagtagaaaaagagcgtagcaactttgccaacatatcacaccatcgagcaccaaaaccaagatgttgtaagacctccaaaaggaaaggccatgaaactgaatcaaaggccttggtgatgtcaagctttaggagcactctcggttccttttgcctgtgcaaaactcgggccatctgttgcacaagaacaatgttatccaaaatgtatctacctttcacgaacgcactttgattaggtgacacaagctgtgatagtttccctgataaccgattagccagcagcttagtgatgatcttggcgaaactatggatcagacttatagggcgaaaatcttttacctcctccacatcaactttcttgggcagcagggtaatataagcagaattgaggagaaaaactctactatcatcaccctgaaacagtatattcacagcagccataaaatctactttgataatttgccacgccatcttgtagaatctacctgtaaagccatctggcccgggagctttatctgaaggcatggatttgatggtgttccaaatttcttcctcgtcaataatccggtctaactcggtaagatcaacagctgatcgatgaaaggattgaagatcaagagtgaagttacgctgtcccgcagatcccaacaaattgctgtaaaaatcccagaccacctcaatcttatccttctgatcagtgaacaccctgtcctctgtcttcttgtccttttgttatcatagtccacttaatatcgattactcgagctcaattttaatacactcttatttggaaatcataggtttggtttttggtaatttgaatcttgatcaacttctgagaggtttaatcatttttttgagctcagacgtgtttcatgatagattctgtgcttaagcatgcctattgtttgtagtaaaactattgcgaacagtttttgactgatgattctggtccttttgttcacatggtccacttaatatccataacacgagctaagttttaatactcttatttgcaaatcaaaggtttgctttttggtaatttgaatcttgatcgatatgttttgttaattttctgtttgcataaggtttatgatgaagtgttgttatatttaactatatacttgaacttttctgaaattgctaacaatgcaggtggtaaatttactgccgagagcacttcttatcaa

SEQ ID NO: 331 - DNA, 3794 bp, Zea mays
  Intron number 6 from transcript GRMZM2G173989_T01 (locus G RMZM2G173989) derived from phytozome v7.0 (chr-ID 3; pos 2 11859616 to 211863409 reverse strand)
aaggcggtacaaggagaaacatacccaagttcgaggtaagacactggatcatttgaactttctagcattgtttagtttcatagttttgtcagcctttatactttaagtgtgaaatgtgtgtgtagttcttaacatgtattcagtagcatgtggattgcttcttatttttctgttccaaataggcaaatagtccttccattcttttatgtttgaggttttagtactttttatgctcaaattataaaaagtacagaataaccacatgcttcttttaaacctgtctttttctactttgtaatttaaattatttctcctaaactacatacatttgatggtagttactaatgactaagtagactgagtcttttagattgtacaatgtttaactttagtaggaacaatttaggaaagtaaattaggtgtgattcttcttaaaattctactaggtgtatgcccgtgcgttgctactgaatcaatatgataaaatatattgatatgcaaaacactaacagttattctatacttctgttagcatcactaaaagtgaatgtttatataacttcaaaaatatataagattgtactcatgctttgtcattaacatctcaaataaaacacgtaggattccataaaagaatagtttattatataagacagtaaagtgcatgtgccttactacggaatttacaatgatacaaattatgcatgcgactaaaaattgtgttatgaaatactgtcattttaccttattctacagtttgcatttactattggtgcctattgtatatatcatcatgtctgctgttttgtagtaacaacagaccaaataagcatgaaaccttttatctcccaaaggtaatatttggatgctagtacacagttgatgacaaataagaaacattgcatagctaagaataaaaatcaattgcaagaaagtcaacatgcaaccttaatatatctttgaataactgagctattgtatggtgtgcgagaaagaggctgaggcagagtcattcctttattactttggggtgtaagataattgggagaaccttgaaccgctgaaccaggctagcttacaaaagaatcaatagttattgttgggaaacttttgatgtcaaattgtctgcatgactcaaagctctgaatttccgctttttggactcttgtacaaaagctaaggtctatgcttgcacaaaatctttggcaatttcaattggcgaaaaaccaatatcatgcacctagaatggcaataaagcacaggataagaaaaatcaacaaatcaagcaaaaaaggaaggattattattgtattgcttaagcactgagcatatatataactctccagtctccagcacaacctctgttactatgggagggagggagattaaaatgtttgaattgtttttaaattacacatagttcacaaaactattactcagctacaagcatactttaacttcaaaagcatataggcaggattcatattacatagaaatataacaagcaacaagatcagtaggtatctaccaatatgttatgtatagataagtaatcatgagttgatattccacagttcagtcatccttacattggatgatgaaacgatatcagtcctccaagatggctaagccttaatcagtttggcaggtccgcaggtgtagaaaatgtggcttcaaaaccttttgcagtagatactggaggtctctggtcttcaatactaaaatcagaagtccttgaccacatgatctctatatccctgtataaaatataaaaggttcacaagcatctgaatttccaaacctaaatgcacaataaacacaagaaacactgagaaattgttgtccaatatagacagaaacctttctccacatattatcagggcacgagcatattttagttgatatggagtcaatatgttaataaaatatattgagatataggaacatcaattatcgttatatcttcaagtaaatagcaaatggcctaacacatttttagtgtttctattttcctatgatatctagctaggttttaggattgtaatagactttatatatacttccatttgactgcagtgacacacaaatactacaacttagaagaaggcaaaaaccaatttccagttttttattttatttctaaaagaagagtaattggtattgagtatctgaaagcatgagtgttcaggacaagaggatttacttaaacatacaatgtgattgccactgatgaatgaaaaaaatcaacattagttgggacttactttccaccacatgtaacaatagccaactgtcctagcagcaacagcaggtactatcaaagttgatacaactgcaaagaggtaaaaattacttaagaagggcttaatttatgtcgacacagcagcctaaataaaagaaatattgaatcaagtacatctccattttcattaccacgacaaacaaaaaataaattggtttagagtacttagaaagaaagaaaaacatgcctgaaagtgccatataaattttacacataaagatctgaaagaacattgcatttgtaggcttactttaacacaccttcgtagaggaattttaaaagatggtaccatatatattttagcagatggtggtaccatatatattttagcatatggtggtacacaaagtagcggaatttcaacacttaaatttgacaattactattatattgtcatagcagtagctgggaagaataaattaaagataacaaggaaaataacatcttcattcaccaacggcttaagaatataaccaacaagaaatcagtttgatggtatccacagaggagaaaagaaaatttgaccttaacttcaggcaacttccttaatattcttttttccttcagttgctctgcattgtttagctgaaatcgcagtcgtagaatgtgtattattgtcttctttctcagagatagatggctggcattattcttctcgaattatctttctcagagatagatggctgtggtgggactgggagcagcagtcggacagccacgccgggtatgggtacaagtatggccagggtagaggacattcaccaccttgggtgatgctggagccggcttctccttggatggtggttgtagatcccgtgggagcttcgagcggtgacgctgcacggagccgtcgtcgatgttgccttcagtgagatttctcggagaaggtgaccatcgccgccgccgatggccacttcagtgagtcagtggagcccgaagccaggaccttcgtgtcgtcctccgtgacgatccagatcagcctcttccggtgccatctgcaggcgcgcggggtgaggggaggagcgaggagggggggcgagagtatagagaagaagagaagcaggcaacacacggatgagggcgtcacacatagcaggcggcagctagggcgaggacgctgacaatccgggaggagccaggtcaaatcggctgaagtcttgggcggaagagggggaaggctgcggttttcttggcgggggcgaggacgccagcaatctaggagaggtaggccaaatcggcggaagtctcgggcctgcgaggagagaggggtgtcgggcgggggcacgtcgcacaaatgtggacgccctccttgtagccttatagagtagtagtagttaacatcaaataaaaaggaacagatatagtcaatgctatagtaaggaactgaacatgtctaataagttgattccagtgtttcgagctttatattctgtttattgattatatattcatcttaccattgggatgttcctgcagattggtacattaatat

SEQ ID NO: 332 - DNA, 2510 bp, Zea mays
  Intron number 3 from transcript GRMZM2G547542_T01 (locus G RMZM2G547542) derived from phytozome v7.0 (chr-ID 10; pos 106978819 to 106981328 reverse strand)
ttttaggttattttctatcaatcctctccttttattttccttttcaaatttagtttttattggtctcttatacaccttcccgatttcaagttttgattcttttttgcttaaattttgttttgaagctttcaaccaggcttctttcattttgttttcctgtaaatgattttactgagagcatcatctataactacatgtaatgatgtaactacctctgtttcaaaatgtaggatgcattaggatctggaaaagcaaacttcgtaaattttgaccaatgattactcaaattatatgtatgcttaggacatatagacattgtcacataggttgacacaacccctgtctcacccatgcagtggcactgtagcccatgtgagaactaccatgaccggggctggttttagacctatgctttggtgtgggacagacaagggatttttttaacccgagcctaaaattcgctctcatagggacgaactcaggacctaactaactcagctaaaggtctattcacaatatctatagattcacatatcttctaatacatattgttttccaacaattttatgatatattataagagtataatcgatgttcgaagtatacttctagacctttgtgattcttactatgccttataaaagaatcgaaagtagtagtataatttcaaaggttgtaaaatcattgaaccatttaagcaatgtttctggtgttttcatgctccccatcaagatccttcgatactagtgttcaagaagctttaaaagtttatacggagtcttgaacacaatactaattgaatagtggtacttaccgtgttttcgtttggatgactcttttggtgacaccattagaggttttatgcgtaggatccaagaatttgagggtagagaggcattgaaaagaatgaaagggggtaatacgatgggccatgatgacatctcaattgaggcgtggagatgttttgggaatatagctataatatggctaaccaaattgttcaaccatatcttcgggtcgaacgagttgtgtgacgagtggagaagtatatttgtaccgatctacaagaataaatgacatattcaaagttgtactaattatctgcgaattaagtagatgagccatactatgaagccgtgctagagagttattgagcatcgtctgagaggaatagcgaggatctctttgaaccaatttggtttcatgcccggaggtcaaccatggaagccattttcttaatatgacaagtgagtagcatatggtttagaggtaggacctatacatggttttcgatgacttggagaaggcttatgacaaaataccaagaaatgttgtgggctttggacaaacatataagttccaatgaagtacgctggacgcattaaggacatgtacaacaatgctgtaactagttcgaacaagcgatgtggacataaataacatctcaattagaataggacgacatcaaggatcagctttgagcccttaccttttttgccttggtgatggataaggtcacaagggacatacaaggtgatatctcttggcgtatgtttttttacagatgatgatgtactgctagttgataagagtcgggcaatagtaaataggaaactagagttgtgacgagaggactcaagagttcaaaggttttagactcagtagaactaaaaccgaatatatgagatgcgatttcggcactgctacacatgaggaagaatatgttagtttggaaggccaagtagtgtcaaggaaggaaacctttaggtatttaggatcaatgctacagagagacgggaatatctatgaagatgttagctatagaatcaaagcagggtggatgaagtggtgtcaaacatctgatgttctgtatgacaggagggtaccacaaaaactaaaaggcctattttatagggcaacaagtagacttgctatgttgtattgtgcagaatgttggcctacaaaaagatgacatgttcaatagataaatgttgctgaaatacaagaagataaattgctgaaatacaatagataaaagatgacaattgcaatggatttgtagctatacaagaagggaccgagtccagaacgatgatatatgtgataggctagggtagcactaattggagaaaagcttgtccaacgtcggttgagatggtttggatatgtccaatgaagacctccagaggcaccagtgcatagtgggatcctaaggcgcgatagcaatgggaagagaggaagaggaagaccgaagttgataacttgatatgaaaagaggcagtaaaaagagacctgaaaagatggaatatactcaaagacttaaccttgaataggagtgcatgcaaaacagctatccacgtgcccgaactttgacttgcggattttattgggttttaactctagcctacaccaacttgcttggaactaaaaggctttgttgttgttgttgtacttacgatgtttccgttttcccttcctgcagcgcttcttttgtctgagttcagatttgg

SEQ ID NO: 333 - DNA, 7523 bp, Zea mays
  Intron number 9 from transcript GRMZM2G414387_T04 (locus G RMZM2G414387) derived from phytozome v7.0 (chr-ID 5; pos 5 2277711 to 52285233 reverse strand)
tgcccttgaggtatttgtttcttcaatctcatgcatatcttgtttgtattcatcacaccgcatgtgttactctttatgcctcctatgcaccagttcttaaactgtctgtcgagtttcttctgttctgctaataagaggacaaaattagtacccaagatgatagcttgattagttgatttgatattcttgagatgctactatacttctcacggtgatctgcatcttgttttatgcatcctatctttctattggagggcaggcttgcagtggtgactggtgagagctgtctatcactgagtccgagacgccactatgtgggagcctctggcatcctatcttcctattccaggaattagatcttaacttggggggggggggggagcgagatgtcgcctccccccatcgccccctccgcagctattccggccacccaaaatccatcaggttttccgccgcatctccgcgaatccttcaccctgcctctcggatccggctacccttgctccagattctccgtgcgatgggtctatcggcgttcttaatggcggtcgctcgcaggggagcgtggttactcctcggcctgccgcgggatctcgtggatccgcggcggggggtctgggtagcctctcgggcggctcgccagcgtcagcggcaggggtactgttttcgtccttgcaagcgccgtcttcggcggtggcgcgtctgtccccagtagacctcagccttcaagtctcccaacctgaagatggccaccacgacgtaccagcattttcggagcccatcttcaatgccgcggcggaagcccgcacatcgagattcagcaagcatgagaaggggagaggaaaggcaagtgaagggcattcaagctcaccaaccatgctgtcagcgagatcttctccagcgaatcaaaaccagaagcaaccagatctctccgatgcgcgttttgctactgctacctaggctggggaggatttaactcatggctgggaggtagtctgccttccctactggtggcgtaggcaaaggacatcaaatcagtattcaagccagctccaatcggccgacagagaggagagaagaaggaaattcatcaggcatgcagatgggaggtgtcttaattgttttgcccaagaccatagagtggcggtgtgcaccaaccgaacaagatgctggcgctgctttggagatgagcatagagctcctctctgccccaagcttaaaaggacatcctctcctctcaattcttcatgctccttttagccaaggccagtacctccccacccacggccgtcaagcaagctcaaccccacctcctaccttcgtgcgctcacggggtggtcgccgcccatggcttaccctggggacccgagggcacgtccagatctggagacctgtgcagtttcagcatccggcgacatcaagcatagtcgcgactccctggtggggcgggcagggtgtgtcagcttaatggcaatagccatggcacctctccgctccatgtggaggcgactctctgggatcagttaggcattcacaaggagaggctgcaggtcttgaagcatcacccgaagtagtacttgataattttctcagattctagagatcggcagagggtggttcgtcagggggccattccgcataggggccgcaccttcaacttcgaagcgtggactgagcaaaggtatggatcgctggctcgttgggagtttagggtgcgccttcgcattgagggtgtgcctattcatgcttggaaggagtcgtcgtgtcccaagttattggaaagctttgctcaatccattatgtagacgggcacacctgtcgtcaggagcgcactaggacttatgacgtgtgggcttggagtatcaacccaagtggtattgctaaggaagtgtggctaaccattactgacccagatgaattcccttcgtctgatttccaagtgcaccactcagcgcctacggggcttaagtttggtctttcatataagctgctaattcacgttgatgttgtggaggacctatctttcattgaagggcgtaacattcaggatcgcaaaaggcggcgcgagttcgagtggaattatggggttcctgattctttgggagagaaaagagagaaggttgtttaccaggatgcagggaggaagggaagataccaccggagggatgaggatagggaggatccgggccgtggaggtcgccatcttcggagcaggtcttggtgggatgggagaggctctcattgtcggggggctgttgatgactgctactccaacaacaacaagcatctttttaggggcagttcctcctatcgcagccgcgatctttcccaaaattcttggggacatggctcttggctttccaaccaggtggctgcggtaaaaccgcagcacatgggcacgtactcgttaaagtcttcaagcatcggcaagaacgtctcttttgcctcccccatcgcaactgttctaggtgcggcaaacacaggagacctgagggggccctctgtttttatttctaacacccctagtactgtctcttgtgcttttcatgacccaatgttggatgaagcacttctctcttctggtgttgtaggggggcacaactcttcggtgatgtgctgggagctgcagaattctgtggctcgggaggggagcgcggcgtcccccccaaccatgatggaagtggatggctctgacaagaggaccaacactgctgttcctgaaccatctttgcttccttctgaggtacaaccttctccatgcctagtggatttcatcagttcgataacaagaccagtttcccctcccctaattgcacaaacacctcacacaaacccttatagaactggtctgaacctgttttctcaagaaagcaatcactctgctccccatcatatccctacagacagcttgaaccatataccctctgatattgttgttgaaccagccttaccacaacctcatgtacatgaaacaaatgggtacagtcctttgcatattttgggatcagtctcagaaccaaccacacccctccaagatcagctgacaaaaacagttccattttctggaccttccacctccacacaaattccaaataaaacatctgcctacgctgtaacacgccatagtacacgactagcaaacaaagcaaaaagacgagacggtaaaggggcgattcagattgcccaagaactgcttgctcataagttaaaagatttggcccctaacgttgttgactcacataatgatttggtccaacagcttgtgcagcattttgatcaaccactgtccaaaggaaagattaaggccatcaagaccttgctggaaaatgggaagcagttgaagaagaaggtcaggggctccaaagtcgcgccggctgttctggcatgcccaactgcgctggtctaatggtggagctggctctttagggtcgtcatcctgtttttatccatgttaccgtttgctggagtgttgacaatggtagtgtgtcagggtctgttcccttttggtggttcaaaaatcaggccttcctacaagtgtgtggaacgtagtaaggtgtcagctatgggggagcaaaatcagtttctcccacccttgttgtcttgtttctgcccctggctttgtacttggtcttctgcggccagcctcatgggaattgagtcagtctatttggccttgttgatgttgcaacgattatctagtagtcaatttttctttaatgtcacaatcaaattgtaatgtgctatgctggaatgtgagaggtctaaatgacgctgccaagcgggctagtgtacgcaatatgattttctcatctggtgcaacaattgtttgtctgcaagaaactaagatcgctaattggactactacactgctttgtcaaattttggggccgagtcttgctgcccaatcagtggcgctaccggccactgggacctctgggggcattttgctggcagcccatgatcgttttttccaactccactccccgcataccactgatcacatagtctctgctactattacattactggctgatggcacagattggtccattataggggtctatgggccacagtcggatcaggacaagattctctttctcaatgagatcacccatcttaaatagatcatacacccgaaatggctcctcctaggtgacttcaatttgatttaccgtatgagcgacaaaaacaacacaagagttaatattcaaatgatgaaccgtttcaaacgagtaatagatggcttgcaattagtggaacaatgaggggtcgtcaatacacttggtcaaatgaacaggacacgcctactatgtctcgcatcgaccatgtattctgctctacagaatggcaggaccttttccccaattccgatctccaggctttggcgtccatgacttcagatcatgcccctttgctcctaagggggatgttaccttggatttctacaagggttttcgttttgaatcatattggacctccatgcccggcttcaaggaaatagtgcgaagcacttgggaccaaccagttcattcagacgacgccattctacgtttccatgtcaaaacgcgtcggacgactaaggcacttaagatttggcggaggcaaaatataggtaacatcccgctgcagttggcaatggtgcaagtaactctgctacatcttgagcgggcacaagaagacagacaactctcaggggaggaactagagttccgccactatcttaaagcaaaagcccttggattagcagtcatccaaaaagccagggccaagcaacattccagactctcgtggattcgccaaggggacacaaacacctctttcttccaaatacatgctacggtcagacgtaaaaaaattatatcaggaacatcaacactagctcaagaatgacattcactcaaaaagaaaaagaagaggcagcattctcacatttccagcatgttctgggggagagctctgttaggaccatggcttttaactggtcaaccctcgactacataccctattacctttcacatttggaagccccattcactgaccaagagatcactgacttaattaaggctttaccagcgagccgctccccaggccctgatggcttcattgggatcttctacaaaaactgttgggaaattatcaaggtcgacttgattaaggcattacaagatttccataatcataaaacctcaaagttacatctcgcaaatgaggcgcacattgttctgcttccaaagaaagagggagctacagagttcagtgagtttcggccaatcagtctgatcaacagtctggctaaaattattactaaggtgttggctgaccgtctggccccaatgcttgataagctcgtatccacctcacaaaatgctttcataaagaaacgctgcattcatgacaatttcctttacgtgcaaaatgttattcgtagtctccacaagaacaaaaaggcaactctttttattaaattggatatatcgaaagcttttgactctttgagctggccttaccttctagatgtcttgaaggccctgggttttggccaaaagtggagggattgggttgcggccatcttggctacatcatcgtctagactctagagttctagtcaacggtcgtccaagcaataagtttaaacatgctcgagggctgcggcaaggcgatccgctttcgcctatgttattcatcttggccattgatccccttcaaaaaatgattgagcaagcaacaagactaggttttttaaagccggtgctacccaaatcagcttgtttgcgttgctcgctttatgctgatgatgctggaattttcgccgatctgggccatacggagctgcaaaatttacgacaactcttgtcaattttcactaatttctcaggcctcaagtttaacctagcaaaaacggaaatctttccaattcgttgtcaatctgccacggtcagctcactcattcatctttttcccgggaggatctcgaccttccctggaaaaatacttgggtctacctttacacactagaaaacttcgacggattgaggtgcagcctctaattgataagattggtgctagactagccggttggaagggcaagctcctatcaaaagctggtagagaaaccctagtaaagaatgttctatcatctcaacctatctaccacttaacagtgttcccaccgcaaaaatgggtcattcagaggattgatcgtatcctgcgaagttttctttggaagggtgatggcccagaaaattcgagtggtggtcattgtctaatcaaatggcaagtcacaacgaggcccaagtctctgggaggccttgggatcttagatttagaacgcttcgcacgggcactacgtttgtgttggatgtggtacagctggaaaaatgaggacagagcctaggtgggtctggacattccctgtgataaaactgatcaggacttatttcacgcctctacggtggtcacagtgggtaatggcaataaggcattgttttggaaatccaattggatctctgggagggcacctcatcacattgcaccatctcttttcaaaaaaacgagacataagaatatcacggtcaataggggactagaggataatagatggatatccaatatctggccgattcaggaaggtactgaaattcaagaattgatggcactttgggaagccatcaatgacgttgaaagagacgttgcaaatgaagatcaaatattatggcgctggactgccaatggcgaatactctacccgtagcgcctaccaagctcagtttaatggaagcatgtctagaattaaaattgaagcaatatggaaggcaaaagcggagcctaaatgtcattttttcgcgtgacgctcctgcatgaaaagatcctcacagctaacaatttgcagaagaggggatgggatcacaaccctatttgtcctctttgtcacatagatccagaaactccgagtcatctgtgcaaagattgtagttactcaaaaagcatttggtggactttgttacattggaccaatctcaactctttagcaaacctaaaccaagatggccagatacatacttggtggagaagatgtagactcagaattgataaaccaagacgaaggttatttgacgggctagcggtctatttttggtggaatatatggaaagaaagaaataggagaatttttcaaaattccgggaatgatcaacttgtcgtcgcccatcaaattaaggaggatgtcttacaatacagtgcggctttctctatcttttgatcagagagttctctagttgtggtttcttagggtttttttttgttttttctttctttctctctcttctttttttttgtaatggttgtagttggaactttgttggccagtagtccctgtatttggttattctccttctttaaatatattcggcaatcctcttgccgtccttttgaaaaaaagatcttaacttggtaaaacccacaaaaaaactctgtaatttttttctatgtactatcaggtgcaaaatcgttctggtgagtggatat

SEQ ID NO: 334 - DNA, 2495 bp, Zea mays
  Intron number 1 from transcript GRMZM2G470292_T02 (locus G RMZM2G470292) derived from phytozome v7.0 (chr-ID 8; pos 1 39878042 to 139880536)
accggcctctccgcggcctcgcccgtgagttccccctcctttgctcctcattacacactgttgcttctcaggttgggagcgtgggcgcgcggcgctgttgctgagagctgctggtgtggtttgtttgcttgtttcggattgggtcggtggattggattttggattcggctgttgggctgcaatgctcgcttattttgaatatttcccttggagcttcgtgctggaattagtgtacgagtgcgctgtggctgcgagatgtgtgattttgcatcgatgtacgtgtatgctgttcccgtggatttgagggtgccagtggggtcagagcttgtgctgctgaaaggaatgatacgccttggttctgattgggcttaggtttcggggaggactgaatcatttgtgtgtgacaggagattcattttatggcaaagaggaggctttgtttgttttgttatgctgaacctattatcttgtggcattctgtttcatgaacttttgtgatagacaattgtttgttatgcatagggcactgctgctgctgcagaaagtatttgcatttcacgctggaatagtgtaccattgcaatatgcccttgccaatatatttctttttagttatgctcatggaaatgccctcgttggatttactgggattaaattctgttttgttcactgcatagtcacataatatatacaatggaataaaaatgatgtgacacctgtaattttatgtacaagcttgcaacttaatatatatccgattttgtttttgaagtgattcttgaacttgatcactttcattgtaaaccattcttattctttcgatggtcagtttagtcactgcaaatagcttgatccatggaggccttgtgttttttactcatttactattaaagagagttattaattcagggccgtgtctgagactttaggggctctgggcagaaccatatataaaaacacattttgatagaccgaacgacaaaacacaatgagttagctattgcctatggtatatgtgtacatgcgaaggtcgattgtcgatggcgtgtcctggcgtttttgtagttctgtctggactctccagtcctttggagacgtggtggcggcaacacgacgggaattatgttttctagatgtattctgttctgagtactgacttgaaaactggcttacttgagcaggccaacagctgcttctggcttatgttagtgagcaagataacaaaggctggattgcccgcttagcataggatggttgagtcaaccaaacaaacactgtttggacaaattaaataattaagtactatacttaagtatatacttgaggggggcaatattttcggggccctgggcggccactcggctcgaccccccacaggtacggccctgtcttaattctgttaacttagtgctttattttttccaggtggatacaattcttgacaaagaaaattttacattggaagaacttcttgacgaggatgaaattattcaggagtgcaaagcacttaactcacgactcataaacttgtaatttcttattgatttctgtgatatgagcagcatgatcaatctactgatgcaacttaccttagtatttattttttgtgtgagctgtattaatataatttcacttgtaaattgtgagacatagagtggaggttgctgtggcaaatgaaatgcctattagagtagtaataacaataagtaatcaataagcatgtttatatgatatacttgtcttatttctgcacttattgttcctgcaaaggtacttgttgaagtgtataagtggattcactagtcactaccttctattaacgacttaatcttttggattgaactagctagtgcgtgcactctaacatggtagtaaagccagatgtcttgagttcgaatcctgccagaggctttatttgtgcctctgctcctttatttccacgtttgcacctttctctctagttgcacgtgagtgagggtgttgaaatgtataagtggattaactaccttctcctaacggcttaagcttttgggttgaactggctagtgctaacagtcctcatatgcacgtgaaattgtatttcatttaactatatatattgattattggtactattctatatatagtttgtattatctgcaaagaagtatgcttttgtctttgggccaaaatgtgttactatctctacttacatttacatgacatttcagacaacaaaagcatacagaatactccatgcagttcaataattctgtctgaaaagttatgtgcacactggtgggagtagttaattattactaaacctagtagaccacagcacattttcttgttggaggatattgctgtatgaattattatataccttatccggatttcctttattgagtctttcaacacgatgatgtttagtttacccaatagtactgatttctctgtatgtaacttgaattgttttgtgtagcttacgtgacaaggctcaggtggaacagttgcttc

SEQ ID NO: 335 - DNA, 2210 bp, Zea mays
  Intron number 4 from transcript GRMZM2G034773_T02 (locus G RMZM2G034773) derived from phytozome v7.0 (chr-ID 3; pos 4 587754 to 4589963 reverse strand)
tgcaatttagtttttgataagtcctccaagatttggttagttgcttcatgctttctctttttctctcttaatacttagctcaattttgttcatactggtatgtttgatctgtgctataatgctatgtgctattttatttcagtctaggaggttacgacagagtctcattcgattttcagtgattcagttttcagtgaaaatactactaaactgaattgtctattctcctccttgttctggtgcttgtttctagaatctctatttgcaaggatatcttttgagactatgtttctgctaaccccaggtttcttttcagcaccacaaattttcttattagtcttcttcactatattcttttttagcaatgctagatcatccttcaatatagagctaatgaagcacctggtttagtattattaagtttagatgagtgacccatattttgaaactattcttggaaaactgcaccaatagccagtctcgttaggagaaacatagaccgagtcttcataatctttgtttttcctctgccttatgtcaattttcacccaatatctaaaagcaaatgttttatcttgttactgagatcctacttatgtttgttcaggggtcctccccttggcttcttcatttcaaccttgttgagcacatggccagatgtggcttgcagatcaaccaccttagtgttcttcattgaaatcctatcgtccccagtgtcttcatccaccttgcaatcattactctccatcacaacgccattgttcttcggcaggagctttaaaacacctctttattggaatcctaccattaccagccttcccatccacctcagtttgacttgacagaatcttaccatcaccggtaataccccttttcccttgcaaccttaaaacctcctattggctagaatcagttgctttgccctgatcagtctcgaaaacatgctactgctaaactgaaacatgctactactaagcaacttgcttaactgatactgctaagccactactacttgctaattagaacttgttcaaacttgttaaactgctatttgctagctgaagccactggtaactaaaaactgctattgctaagccactgctacctactaactgaggtcaaccttagctgtttcttctcagttttggctgactcaattttctaaacccaacctttcattatctcaatttctcatgaggatattacctgatgttgtgcaaacatacactagagactaatcaatatcgctaaaaaagaatagattagtgtacggtcgtcaaaagagtctatattgattctttagaaataatttgtgcgatattgataatgtttgttcgacatcaattaagtctatttagattggcatatttataataatattatggcgcattttgtccaacaaattttgcatataatagtattgtttgtcgtaccatatatattttatactacaactgatatgattatttaacttgcagtattctagaatttgctaccctacaactcatatgattatttgactatgcacatgtctccaagaatattgtagggaaactacaacagatttgtgccatgttttactctgattttggagttttctgcttaactgaggcgaagcgcaaccaccaggttggctgttttagatctgtctcctagactgccctttgctcaagggaaatccctccttttcatttaacgcaaaagaaacttattctatttatttgtatctacgaaatctggcgtcaaatgttcagttgaactcagatgtgtgagactcaactgaagatcccaaatcatcacattatttccccgtcgaaatcatttgtgtttcttagagagaaaaaatgttttatgcttctgtctcctagactgacctttgctcaagggcaatccctccttttcatttaacgcaaaagaaatttattctgttgaacagtattttcatctttatacttatttggtactgcaacagcaatgagaggagcaatatccttgacaccttaattttgtattgccttacaaaggattttttagctgtcgcttgccaagtataggtcgtattgtgggtagtcacaccaaaactaaaactaatggcaattggtttgcaataggcagtgctctttctgttagctctggatgtcagggcaatgaacaaacacgttgagtatgatagtgatgctaaaattactgcaatgggttgaagccctacc

SEQ ID NO: 336 - DNA, 5552 bp, Zea mays
  Intron number 2 from transcript GRMZM2G065290_T01 (locus G RMZM2G065290) derived from phytozome v7.0 (chr-ID 3; pos 1 84932559 to 184938110 reverse strand)
ctgagtaccctaggtaatgtactgttttctagttttttttaaattgtattagttcatatggagaacttttaatattatatatccaaatcaaactgcttcatatatatacacatataacacttgttttgatatcatttgattattataacaatatatatagtcttgatacgcatgacaagtgattttaggcactctaataagtgaagcaacatgagcactatatatgtcagcttattttcgtttcaattgatcaagctagtcggtaatctagctagttgatcattatgatatttaagcaaaaacgaactcaatttggcaacatatataaatgcattaaatctgctaggataactataaaaccgtaaccacaagggataaatttcagaagttacaaaaagaagtgttttatataaacatcaacttatgtctatagatgtgcaaacgggtcgggctgcccagtaaacccgacacggttttagcccggcccgatgatcgggctatgcctgggcctaaggcgcgacacgacctagttttatgtttttaatagaaatatctatattacacatgattataaggtataaaacataaaaaatacatgtgtcttgttgtttaagtaggtgttggtttagcccgacccaacacgataaatagtctaatgggtcgtgcatgggcctcatccgtggcccgtgggccgacacgaaatgacccgtaaccaaaccaggtcgggtcagacttgctcgaaatcgtgatgggcttcagcgggctcgggtcggccaacccgtttggatatctatacttatatcttacttccccaaaagattaatagtagttgtctagttgatcatctagctgtctctattacttggtgcaaaaccacattttgaggtacatgcattcactatatatagaaatgtttttatggacgtcctgtccgtcacaattttaattttggaacagtgagaattaatcattcaatcaaggttgatatctctgtcatctttcatatttgttggacctacctttcatggttgggaaaaaaatctgttgcaagaaagagattacatgacactgtttgagctaaaaaaattatacaagatccctaatgtgcgggccaacgtacaccggatcatcctgcaagtagccgctcaaaatcttatttagcacggttaatgctgaatcaccatgtatggctctttacattacaatccttgagttattaaatataaacatgtaagactatctctggctgtttacctatcttatctcacgtctctatttcaaattcaactacataaacaatataatatagtctatatatgtaacctgttgaacatagtctagagtatgtttgatttgccttttcgctttgtttcttatcccctgagagccaaaaacaaaccaaaggactgtatgcagaaagccgtttttttcttcttctaaaaaccgactttctcggagtgcaatactgaagcagctctggacccgcttttagcggctttcagatggatcagtgataatatatatataagaatttttagcggcttttagtattttctactgaatagtttttagatttttaacagctcacaatccccaaacagttttttttcacagcttaaagcttacgggctacaacagtttttttacggccataatcaaatagaccgcttgtcgttgggtcacacaacgatagttatcttcttcctttgttccaccgtgaagactgagtcaaaagtagttctcgcgtgatccatacgcacgtgcatcagtctccgctcgcttcgtcagcaaacaaccatcctctccccatcactactgtcattccacttgcccagtcataattttttcttagatcttatttggctgcacactaatccactccaatatatatatatatatatatatatatatatatatatatatatataaagataaaaactatcgattttccattcaaatatatgtgaattgaggtggattgaaatacagacaaacacaaagccccactaatcccagcataaacattgtgtaagactatcttcaacagtattctctatatccatttgttatagtttatagtatactctaaaagattaactcctctatatctcattcctctccagcaacaccctttatatctcgtcctctatacgttaaatatctatattacaaacatgttttgctctagattttttttacgtacgtatttctcgtaccatcaaatatcttatgcatattttagttttacttaatccaatgtttaaattttaaaaatagatagataagaagcgactaagcgagaaagtgtctatacgtagaggacaaaggagcctcctctatatttagaggatactgttggagcatatagacgaggatttttttttctaaatatagggtaggagattgtttagagagtagttgaagacaacctaacattgcaccgccatctttgcgccacacacaatgctaggtcattagttagttaagcattgtgaaccatacagtagggattcaaggacaagaatgataagaatatagttgttatttgcactaagctcaaattgaggagaaagagaagcagaaaggaagatagtgttgccaccgcgaacgagaccttatttttgtaaaagtacacacacgcttgaaaaaatcattgataaaccaaaccaggatatgtgtgcattgcatgttgatatattgcatgatgatatgttcgatcagaaataactcctcatgatggcttgtgtgtgtatatatgtatactcacacatacatataaatctttagtaaattcgtcaaccacatgattctttgaagaaataaaatcaatctcaatcattctcttctaagaattctttctcaaaaaaaatgataatcaacttctatatgttttagttctagcattggacacatgactaggtgataaatcctttgctccaattgtttcacactatagtcttgtcgaaactgatataccttacctactaagagcataatatcaagtctagtcaaagttaagtcttgcaaagctcctactatactttaatagcttgtaacatcatttgtccctagaggtgatccttcacaaagtgataacttttcacttactgaaagtggtgtgccaaccggtttacaatttgccatcccaacttatttaacaagatcagatgtatactttttctaagtataatctcgtttgaagtttttgtaacttctataccaaaaaataaagatttcctaagtccttgagccaaattcttttcataagtcttacaataaaattgcgacggccttttctcatgaactattaacgacaatgccatctatatatacaagcaaaaaatgttatattctctttattataaaataataatgacatctatgcctttgatgcaagaaaaccaagagagatcaatttattacttagctaagagtactatagaggcttgtttcaatatatacttctttattaagtttatgaacatacctaggtttgacatatatatatggtccagaggttgttctatgtagacctcttcttctagacgcccatacaataatttattttgtacatcgagttgacgcaaacttcaacctctagagatggcaacatataaaataatacgaatagtagccattttaacaaccaaactaaatgtgtcatcataatcaatgtcatatctttatttaaaatctttcttcacaagtatagctttatattaatataaattatcatattgtttcagtttagttttataaatccacttacatccaataacattacatcctttcataggaggaattaaatgccatgctttattccaatacttaagaggcatagatgcacatgagagaaggggcaagccaactttaactatgtgatgatgtttgtgttctacaacaccattttgttgatgtgcatgaggacgtgaaacatggtgggagatgctaggcttagtaaggaatcaattaaccttttgatattatattcatatccctagtttgattttaaggctagagttttacatttaaactatcgctctacaagagtctaaaactcttgaattttttaaagaactcctgacctaaactttatgagatgtatccaagtaaacttactataatcattcataaagcttacataatattttgaactattgattatgatattggtccctagacatcagtatgcacaagttgtaacgaaaattgatacacactagtcgatttgggatatgacaactaatgattattagattgctagcaagcagtgcatactgactcactcaaatgctcttgtgaacataacaagtttttattgctaacaacttacttgacaatactaaaagatgggtggccaagatgactatgctatatgtttattgacactttcctagcactataaacttcttttattgttgatgttggaagcagatattacactcctatgcatctcgctctaaaaagaattaattgttttggttttttatctttaatgagaaagaaagtaggatatagttcaataatggttgaattattagatgttagtcaacgagtagagataagattttaatatcttttagtatgaaactgtgttaagggatagttcatgaaatatgacaagtatagctaatattcatacttgatccactagcggtgtggatttaatctcctccttgatacttgtttccaataacgagtttttgagctctctaacgatgcgatcagtggcactagaatccacgtactagtttgagcagtctaataagaacctatggtagaagcaacaagtttaatatctaagacacaattttcatcaaacatgtactagcacttagaaacttgtgtgatctttcttgaagaaaacttggcaacagagttgcttttttgatctaccacggttctggttaaagctgccagggtccccaaaaccacacacctgccatatccaccaagcatccatggatcccacctcatcctcgagtagcaccatgtccttggctcatgatgttaacagacctgctattatagatgagaccagcatgggtctcgaaattcagaagttgaccaaataggtcgctaactatgatcagctccttcctaggacattgacaatataggatagtgggagatattcatcatcgaggcatgatagaatgtacaccaattctttcttctagaggtcgaccaactattatcatctcatcatctagggattttgtcttcccaaggtattcaaaaataaatagatttatgtttttcaatatttgctaagggaaccatacattgacagttcttgctattgtttatgaggcaaaggtgccttggatctctaaccaggtttcagctgcagtttcgatcaaatgtgtattgattaggtttaatagattcattttaggaattacccatgagttatgtaattggttttctaattagcatatgtttaatcctcctaatcgacattcaaaacagggattaaactttagtcctaggaatccaaacatgtataactgaatctgaaatatttgctcatgttgtaggctatacttcag

SEQ ID NO: 337 - DNA, 750 bp, Zea mays
  Intron number 8 from transcript GRMZM2G459373_T01 (locus G RMZM2G459373) derived from phytozome v7.0 (chr-ID 8; pos 1 42659730 to 142660479 reverse strand)
ctgcattctcccaatgagccttgttttgagttctcgtgtcccaaactctagggtgatgaagtttttttgtagctaaccatctcgattagttgggtaacttgggttccaggagaagtgatgaacttgcttcattgcaatgcatgcttatttgctctgattgccaaataaaatgcctgcttccccgcccatttttgtacattgttttggctctggaatttagtttgccttctgggtgagtcaaccaaactaaacttcatagaatcacgattcacgcttggtgaaagtcgcctagaggggggggtgaatagggcgaatctgaaatttataaacttaagcacaactacaagctggggttagcgatagaaatataatcgagtccgaaagagagggtgaaaaacaaatcacaagcaaatagtgagagtgacacgatgatttgttttacagaggttcggttcttgcaaacctactccccgttgaggtggtcacaaagaccgggtctctttcaaccctttccctctctcaaacggtcacttagaccgagtgagctttctccttaatcaaatgggtcacttagaccccacaaggaccactacaaacttagtgtctcttgctttgattacaagtgccttgagaataagaatgggaaggaagaaagcacgattgcaaaagccaagcgacaagagcgacaaataacacacggaacactctctctctcaagtcactaatcactaatgatcacttgtctcaatt

SEQ ID NO: 338 - DNA, 12527 bp, Zea mays
  Intron number 9 from transcript GRMZM2G053514_T02 (locus G RMZM2G053514) derived from phytozome v7.0 (chr-ID 7; pos 1 00959172 to 100971698 reverse strand)
gttctgcatctacgggaacctggtaaaattgtccccaattcatccttgatttacgtttagtagtagttattgcttttttaatgtcaatcatttctttagaatgcaacgtcattgtggctgcatggtttcttttttctttaatgtacttagctatgggatagagttatcaatcatcttctgagaggaataatgagtatctctttgaaccaatttgggttcatgcctggaaggtcaaccatggaagctattttcttaataagacaagtgagtggagcagtatagagaacaaaagaaggatcttgataggaatcggggctgattcccggattgatcgcaggttgtagtggtgggtgattggtggccggggtttggggcgcgatgcacagcggcgggtcgccgtgttcaccgcgcgtgagaggagagaggcgcgaggaaaggggcagctaggtcacagtaatctcccggctccctctgggaagccggaacaatcttgtttctgcttgatctatagagtggtgcttacaattatttatactcccttctaatccttatctaatgagatagatctcctattttctctctaacaaatcttatcttctaatccttatctgcatgcaaccttatcttctaatccttatctgcatgcaatcttatcttctaatccttatctgcatgctttatgctgttgcccggcgcctatagtggcggccggtcataacagatctacacatggttttcgtggacttaagaaggcttatgataaaataccaagaaatgttatgttgtgagctttggacaaacataaaattccaacgaagtatgttggactcattaaggttaaggacatatataacaatgttgtgattagtgttcgagcaagtgatgtggacatagatgacttcccgattagaataggactacattaaggatcattttttgagcccttacatttttgccttggtgatggataaggtcacaagggacatacaaggggatatcccttggtatatgctttttgtggacgatgtagtgctagttgatgaaagtcgggtaggactaaataggaaactagacttttggcggatactctagaatccaaaggttttagactccgtagaactaaaacagagtatatgatatgagatgtgatttcgtgtcacacccgggtttcggggcaccaagactcgggcgcgaacataatcaccagatgtgctgggaccaagtctcacacatatgatgaatcatgacacaagatcgaatgtcacatttttactatataataggagttatgtacaaaataactaaataattacattataaggagacaacggtccagcaacccaaagttgactgtgagacgacggcctagacctctcacgaacacatcgcagcatcctccatgcgcctcatccagtggtacctgttcttgacctgtggggggtgtgagacagcaagagtgagctcacatacgttcatagctcaacaacttgtggggaataatgtgcatgaactcgccaaaggtgggagctcacgtgaagtttaaggcttaccaaagaggatggttgcatctgagcattgcttttaaagttggtcaaaattttattagcaattactaaatataagtaaataccaaacccaattaagtagtagaacaaaagtaacaacaacacctgcgatgcaatgcatgtgacaaattgaatttaagttccataaattaatcatgtgagtgtccgagctgctcatgaccgtgagcacggctagtaaaccagttttacactctgcagaggttgcacatctttacccacaagtcatgttacccatctgccaagagacggccaatcccatacacctctaccgaggaggtgaagcagggtaacactacgaggcctttacaaagtttcactagcttcagaaaacccgctacagtttataggaagctctagtgcaggaatctctcgcctgaccgccatcgcagcaaaatcaacccgaggacctccctacactgaccactcccctactgcccttgcccctttcgggtaaggtagtcctccactagctttcgtaattagtcagccaaggacgtctcatagcacccttgtggtagcactgttttttcgggtggttctccatgttccaattaacataatgatctttacatgaacagtaaataacaactgataataaaagtataatcatgaataatgtgtatctctatacccaaaacaacataaagcaatagcaggtactaccaaaaaattcagtggtaaacaaggtataaagttagtcaaattagggtaacctatcaggtcccatcaaaattaacctatgcagatcattatgattaatcagaacatgactgggtaaaaagaagtgatcaagggcacaacttgcctgtgacttgagattccaggtaccaacttgctcttcaggtgacacgtgttttcactgctaaacgtagcaatacagacaaacatgtataggcaaaattaacatcacaccaaacataagaataaattgtgtaataatattctacgctgtgtaacgagatcgtgggaataagaaccactaaattcggagttacggttaacaagttatgaatttctgaagttattaagcacctagaatagattaattcaaatgaacaattttgatccaagtttcatggttaaacagtgttactagttgatagacaatactaatacaaaattattgcaactggaatgggttaaaaaggagctaagatgaattttctatgaattatacaagttctggaattattttgcactagaaatcaatttcctaaatcctttttcctattttatcagacttcaggactgcgcgcacaataaccagagagttcagggttctgtttataagtttacatgacttgcctgtaattactttacataacctgtggactgcgggttgatttgacaaaagggcaggggctcttttagaaaagcgaccagggccgaaggggtacgagcgcggcacagccgagcgatcaagatctaacggctcaaattaaatcgtagcttatatgaaccggtacgcaaccgagaccgcaggatctaggattgaccgtctagattttgaacaccaagatctgctccaaaccgtccgatcctatacctatggctcagatcttatgcccgaagggttataactctgatctaatctcccacgtccgttcacaatcaaatggaagggagcctttctccacgcacccgacgcagccgacgacggcgccgcccctgccgcgacggaggtctcgccagaggaggggcattgccacccttgtcgctccaaacaccaatccaaagcacaacggtggagggcggttccacggtaacagaagagctccgatgagcaattcgccggcagccggttgttctccaggcttcaatcctgcccagacacaacccacgagcacgccccttcttccaaaccggttaccgtgcccagattggaggtcagacggggatcgaccacggcggagcgcccgcgctggtgccctggtcaccgcttaattcggccacggtgcacacaggcgcgcgatttgctgatggctataactaagggaggaagagagggggaataataggagccttatatatcctagagtccgagcaagcaacccccacgagatctccgggtgaacatccatggcggccatggtgccatcgttcgcggggttctgttactacgaggagaaggagttgtccactggaacccaccacccagctacccggttcacatggaagcggtgcgagagggtgataagtacagcggcaatcgattcctaagaacccacggcggagacggcgagatcctcgggaacgatgcacggacacggagcagcgacggggctggccacggggtcccacgcagcagagacaccgggatgacaaccatgagagccagcagtggctggccatagggccccgcgcggcagtgactgcaagcgacgacgaaaggctggcacgcgggcccgcattgtcggcgtgagtaggtgcggcagggaagaaaaggtttgggccgcgggactggtggcggggaaaggtgcgagtgggccgatctggccaaaaacggctcagcgaggcatagagtgaaatcttcacttttcatttttatttttctgatttatcctaatttcaaaacaagctttaaatttcaattttcgaattagatttaaatagagttcaatcttaaaacaatttacagacaaaactccgatatgaattctaaagtataattttagttatttatttattattatttttttagcaaatgttctcaacatacaagccctaaaaaattacttttaggaaaataatttttaatgtgtaacattcattaaaaggtgattttacttaccctcctcaagaatgtccctcaaccatattaaaaagaaatatataacctaattcatatgaagatatttccacttttcatttagtttctttaattaattaattaattaattttatttttttctttataccaattttgggctttacatttcggcactacacatgaggaaggggatgttagtttggaaggtcaaatgttgcctaggaaggacacctttagggttgatttggtgataaggggatcacgaggggattggaggggattgaggggggaaattagttcagggtagcccttaggtagttaggatcaatgctatagagagacatggatattgatgaagatgctagcaatagaatcatagcagggtgggtgaagtgtcgtcaagcatctagagttctatatgagaagaggataccataggagctaaatggcaagttttttaggacgacgataagaccagctaatatgctatgttctatggtgtagaatgttgccctacaaaaagttgacatgctaagtgttgcggaactgcgtaggttatgttggatttatggtcatacaagaagggaccgagcctggaatgatgatatacgtgataggctaagggtggcaccaattgaagaaaaacttgtctgacatcggttgatatggtttggatatgtctaatggagactgtcgggtacctaggaatggagtacccaaggtaaggcccataaccattgttttcagatcgtccgactaattgcgattagtcgcgattagtcgggctgatcggtactcagtgctcgataagtgggttcgattcggtcaggtgatctgatcgttcgactagtcggcgatatgtagcgattaatgtctggttagcgatcagtcacgttaattactcaggttcagagtttcagaatttatttaagacttaagacttcagttgtatgatgatctcatataggtgttgccttcttggtcatggtctagtaagttgtagaattacagtttcatatagaattgttgctggagatgtactgctgttttggactattcaagtattcatactgctgttttggactatttaagtatttatactgctgttttggactatttatactgctgtcttgtctatacttgtgcttgtcctaagtaagtctctatactatataagtatatatctatatatagtgctatgtatgtcctggaaatacataggacgaccagggacgattagggtcgatcaggggcgactgatcgtcgcctaatcgcgactaatcgcccagtggcatcgattagacgatctgaaaacaatgcccataacctctttccggcccatttgttgagtaagtctgcgaggtgagacgaacgaccaagtccccgctgagcaagtctgcgaggcgagacagacgaccaagcccccgccgagaaagtctacgaggcgaggcggatgaccatgtccccgccaagcaagtccgcaaggcggagcagacgaccaagtctccgccgagcaagtccgtgaggcagagcagacgaccaagaccccgccgagcaagtccgcgaggcggggcgaacgatcgagttcccaccgagtggacccgcgaggaaggagcccatcccaatgctgctggcccacgttggctacgacgggacacgccatccttaggccacacccgggtaaatgtgtggcgcaccgaaggcgcgtcgagtggtcgtcatcagaacacgaaccgtacacccccgcgtacgaactcaggcgcgccaccactacgatgtggggctagtcaagcccggtcgtcggatgacctcggtactagaatcccaacagtgacccgaacacccagaaggactggacagtatgccatactttggtgattacctgacaaagtcttaggatttgtatcccattaccccccctcctttcacttgcaaaccctttcagttgattagccactgaccattgcttgtcaggcattttaacacaaggggttctgttaaaccttccttgatgtgtttcttttcaactgttccaacaagaaattttagtaggtattggcttagatgaccaagttagtaatgtgagcattgttgtgtattatctggacatcattgatgtggtctggtccttttggttggtttgcataggggagaatagagcaacatagaggattgtgggtgagaacaccgagaatatggcagacgaacagagggtcggatctcttcatcggtcgctctggcgtgagactccgccagggtgcccaaggaatcacccctctaggagattcttatttcttccggtgctctccctataacatcgtactgcgcttatatagaggtatgcacccttgactcaattgaaaaaccaactaaccaaactaggaaacagcaaactggcacacaccaggaagcaacaaaccgactcctaaacgaactatttgaggatacttttgcttctaaacttatgtaattgccaaatcttagccacttttgttgctattttcttcgtggtttggctgtcctgcatgtttgcgtcttctctggtgttggcggccaaaggagtccataacattctccccttcccaacaaacaactcgtctgcatgttgtacatctagaaatcttcacttaaattcttccaattgttcccatgaggagtctgtagctggtctgcctacctgatgcatcaagacttcccacactccacaattcagtcgagctttaatctctttttcaggggcagggatgatatatccatgtagtatctcgggtaaaggactgattaccttaggagcctgtccttcatacttcttgagcaacaccacatggaaaacatcatgaatgtgggcccctgagggcagctgtaatcgataagaaacttcaccaatcctttgaacactatatgggccattaaacataggactcaacttagagtgagaagtgtcatgactcacgattgtccgtttctgcagcctcagccaaactcaatcacctattacaaaacatgtctcttcatgacttgtcttgaaagtgcttcattgttacttgggcgtctagtgaaaattctaaccaattacaaaagcggaagtcatttgcagtttaactctagcaacacagaacaattctaaccaaaaagagctagtgaaaattgtatctcggtcacccaatatggagcaaagaaactcatgtagtttgacaatctcttcaaaaaatgcatttggtactgaggcggctgtctaagggtggcccaacgaaatagtaagaaaatttggagaacctatcttccactgtaagcattagctttgccacctaccataggaaacccttcaataaaatccatggctatatcactctatacctcatatggaacgagaaggggctgcaataacccaataggatgtaggtgttctaatttgtgtcattgacagatggagcagccccacacaaattccctgactcatgccttagtacgggggttataaaaagatgctcgtagtctgtgtatttggaacaaaaatctttcctttgaacaacatatcatccatctcggtccattcttccggtgctgtactgtcagtcatcttgaccctcttgcagctacttgtgaattggaagtgtatttagtctgcaatgtatccaatagctagaaggttggggatgaaatactatggacgattgctccttccttctcgctgtgacaacgcatctgcaactccattgagtttgcccggttgatattctaccagtaaaccattcctgaataacttgctcacccatgtatgctgcaaaatagtaaatatacaaccgatcaacgatgaacttgatgttgtagtggttggtccttactgtgaagaggcacccctagagatagggaaccagggacgcaacgccttgacgagcccaatcaactcctcgtaagacaaaagcttctggttgaagaaagacatggcgtcatcaccctagtgaagcaccacgacgaagcctatatcaaatgagtcacaatctacgatgaagtgcttgaagatatgcgacgtttcagtagaggtgtcgtcattagcgcctgcttgagttggtcaaatgcaagttcggtctcattcgtccacacgaaggtgttgtgaactgcgatgcactcgcaagatagtcccggtactcagccctcccgtaggaggccctaggagtaaaccagatctattcttcctccccctctactaacaccctgcccctccttatatagagaggtaaccctaacttaatagctaagcaacataacaaaccctatctggccggcactgttcacgcgctatagtaaccgcacgtgaacagtagccgcagctaacctagccataatgacatagctaatgggctaaggcccataacattccatccctccttaaaaacagctcgtccgcgagctgtagtcaagaagaattgacccatactaaactagcacttaatggctcaatactaagtcttttacatcttgacttagtattttattcacctagaaaaaaattgaaccacgtcagtggtcggatctatcgaaggaggacgtgtcggcgaccagattgactgatgacagatgtggctgcggtggcgcagagggctccctgcgcctggcgaaggtcggtggcaccctccggtgttgtagctcaggtgaccacgccgcggcggtggccaaggtggctgacgtcgaccacagctgcgacgacgcagcagatggctgtccgtggtgcagaagattgatggccacgacgcgaaggattggtagctgtggcatggagggttatcccgcagcaacacctctacaggttgggccaccatggtggccgattgttgcagattaggcgagcagatccgcgcacagtcaggccacgcctggacctccacgagcacgaaggcgggctgcagcagtggcacgaccaccacaacgtagaatgccgcctccacctcctccctgggtgtgtcgggttgcagcccatcgtcctcgacccggccgccttcgcccgcgcccaagctgccctcgctcgcgcccaagcagcccgcggtagaagcagaggggctgacccacgcctgctcgagcttggctagacgagcgtcgtgggaatccaaacgggcattgatggtggcgagttgcgtgaggatgaggtccatcttggcggagtaggtcacaagatcgtcgtgcgcgctggccatggtggcgatgcgcgcgtagtggctctgataccaatttgttgtgaactgcgatgcactcgcaagatagtcccggtactcagccctcccgtagaaggccctaggagtaaaccagatctattcttcctccccctctactaacaccctgcccctccttatatagagaggtaaccctaacttaatagctaagcaacataacaaaccctatctggccgacactgttcacgcgctacagtaaccgcagctaacctagccataatgacatagctaatgggctaaggcccataacagaaggcctctcacttcaagagcgtcgcaagatgcataactgcctccccatagcctgcaattaacttgtggttgtattcagtgaacctgaggaagcctcacaatacttgcaatgatcgagggcgtggccaagcttttacgactgatattttcatcggatccatggccatgccaattgctgaaataatgtgaccaagagaggtcactgattatgtgttgaaagaacacttgtatttctttagaaataagtgatgctcttgcaatctctagagaacctatttcacgtgttgcaagtactctgactaggatatgctaaacatcaatatgtcgtcaaaaaacacaagcacaaatttttcgatgaaaggcttgagcatgctattcatcaaggactggaatgtggatggcgcattggtaagaccgaatggcttcactaggaactcaaagtggtcctgatgtgtcctgaatgttgtcttgtcgatatcgtctaggtgcatgcacacttggtggtagcagttgcggaggtcgagcttggtgaagaacatcacaccacagcccatccaacaactcgttgaccattgaagttagaaacttatctgatgcaatgattgcgtcgatgaggtggaggcaacctgcgcagatctgtgaaatgtcgttgaaggactctagtagtgcctccagcagatcacgtgatgctgagagtggcacatatgtgttgtgccgttgacccctatggccttgcccgccgcatcgtgtgaccctggtaccagaacgccatagatggctctttgaagttccagagaattggcccaagggagcgcaaccattggacccccagaacgacatcaaggtcatctagcggtagtatgtaacaattgatggagaatctctcaacatcgatgttgacatggatcttggggtagaccccacggctggtgaccttttcgccattggtcaccttaacggagaggcctagatgttgcttcactagtagatcgaggctcgatgccactacctcccagatggtgtgtgtcgagtcggtgtctaggagtgccaccaatggtgtgtcgttgatgatgacacacaacttcatggtgttgttgatgtagatgttgtccagggcatgctaggagatgcctaggtcattcgtcgctgcatgttcctccatatcatcttccagcttgagcaagaacacacctttggaggcacagttgtggtcgacgatatacttctctgagtagtgattagcactcctcgtcgtgcttggtcgccaattcctcaatcgtcgaccatttaaatcgtgaccttgcagggcctgctatctccgacttagctttggtgttggtgccatgacctgttgaacaagaaaccgtgttcttgctagtaggtgtcgtctctgattggtgcttgcatgcccatgcaaggctcatggttgtatgcaaattggagggacattggagcttgacattggtccagaatggctcactgagacttgtagtgaataaattgacttgtttttgaagcataagtccttgtagcagcacagtagcaaggagaaatgccacacctatttgtccattgtacccgtgcaatacaaggtccttgagcttgaccaagccgttggttcagggacgaggcctgaacttcatgttgatgaagttcgcaaagctagcctaggagaggatactatggtcgtggtcgatggagtagtaccactcggctattgcgccatctatgagccaaaccttctcctcagcgagcttacgcataccatgaaagtaaatttcatacttggtgagccgagggagtgtgtcagactcgccatcatagttggggaatgtcagcttgtggcaatgagggtcgaagttttcgtgcaagctccggtcgaagaaaccatcgccaccagcacttggaacacgaccgctacctttgctgccaccaatggagaggggatcagttggaggcatctcagatgtagaattatccgtgggtcgcttctctagtcacgccaactcgcgatcctcggaggccattcaattgttgagggttgtaagctgcggcaagatctggtccaattttgcaatgtcggaagtcgctatgttaggatctttgacaatgccggacatggttgtcgatgtgtcggttgttcctgataccaattgatgtgttctagtttttctaggaggtgtacgcatgggagaatagagcaacaaagaggattatggtagagaacgcagagaacacggtggacgaatagagggtcggattccttcgtcggccgctctggcatgaaactccactagggtggtgaaggaacaaactgactctcgcaataagtagcaaaccaactcctaaacaaattctttgaggatatctttgtttctaaacttatctgattgctaaatcttagccacttctgttgttattttcttttcggcttggctgtcctgtctgattatgcgttctctggtattggtggccatggtaagagtacataactatcacttgcattgcaatagcattaatcccttttagctgactgaggttgaaggtgtgctgattttgcactttgtatgcgtcgcaataactgaatacttgtattagttttttttgctgctgcttttgttagaaaagttgtcgactctataggcctcagtttctgtgcttatgtctacaatctgcacaggtattcatacg

SEQ ID NO: 339 - DNA, 3383 bp, Zea mays
  Intron number 5 from transcript GRMZM2G123660_T02 (locus G RMZM2G123660) derived from phytozome v7.0 (chr-ID 2; pos 1 47318782 to 147322164 reverse strand)
ctgaggttgctcaagctgcccgacgttcgttcgaggtgcgttctattaatattccttctctgattaatgttaataggtgcaagtcacttcagctggacagctatctagatttgctgcagccatttttcctggaatactagattagaagtactaaactcactgagggcttgtttggatagaatattgatagggagaatccatctccatccaagtaagtccttgttttggaaatgggttctcaataaaaaaaggatagacccagtgctagtggctcccacatgtatggagtccagggaaggaataatgccttacccctgcatttttgcagagatgatgcatcaagcctaggacttttgactcagtggaaaaggtttttcaccactgcaccaggtctgtccttctttgaaatgggttctcaaaacaatgaaacaaaaaaaaaactattgacaattaactgcaatgaatggagttatggaccattgatatgcattaaatgttcagatccggttagggcacgcactagcgattgatttttcctgtatacctgtctcatatggcattcgttggaaatgaaataaaaaatatttttgattccttgtaagttgggtagatacattccatattttttgaggtaaacatccttgcattgagggaccccctttggaacataggaattgtataggaatttcacgggaatcgattaatcttcacatgaaaatgctggaaatggggaaaaaaattccgcgttcaaaagtcacgtcattgaattcagtaattaagcaagaatgatggattaatctttatctctactaatataaagcagtagtttcttccttcgtgtgtcatccttctccctgctcccccacttttaaatggtaaaaaagctaaaattatgcacaaatgggattcgaactatggttgttggctacaaacccatattcacacccacctagccaacataatacacatctctgaattatactctatactcaagcataatataggtactaaaagtcggctagaggggggtgaatagacgaaacctgtaaattataaactttgaacacgaacttcacctgaggttaggattagaaataagtaataacgaaatcggagtgcggaagagagttcttcttgctatgagttgttcaatcaatgcggatgaccttgggagctaactcgaaagattgtgagcaagagaacttagagagaagggagaggaaaaatcaaatcgtaaggtgaagatcaacacaaaagaacacaacgatttgtttcctgaggttcggttccaatgaacctactctccgtcgaggaggccacgaaggccgggtctttttcaatcctttccttccctcaatcgatcactcagaccgattgagtgcttctttttaatctcaaggatcacaaagaccccacaaggatcaccacacacttaggtgtctctcactagctttacaagttactagagagtttagaaggagatgaagaaaacacgattaaaagccaagcaacaagagcaacaaacgaaacacgaatcacactctctcaagtcacttaacgctaatgatcacttgtcttaattgagggacttggagagattggaagctttgaatgtgtcttggaatggattgctagctcttgtattgaatgtatatgagtagagtgcttggatgttttaatggaggtggttggggttgtatttatagccaccaaccacttcctagccgttgctccttttctgattgcccctggtccggaggtccgcccctgtacatcaacggctgaaattgcaacgatcaacagtaacggctatatcatcggctacaagtgcatttaatgcgtcttcagattgtcagacagagcagtcgcggatggtccggtcgtgcacccaggacgataaaaatgcattttaccgaacccatcaccttcgggtttttctggtttttcaacggtcggacggtccgcgcctgaggcctgacggtccgcacttggtcccagacggtgctcgcttctccttcggacagtccgtagtgttaacttgtgtttttgcagtgttcttgtccgaggctcaccctggtgtcgcggacggtctgccgcaagggcccggacggtccgcgcataggtgattttccaaaaagcttcggacagtcgacttagaatagttgtatatgaacttatgcacctgagaaatgatcaactagacaaactagttagtccataagatttgtgatgggcgtcaaacaccaaaatcaattatggaaaatggttaagcccgttttcctttcaggtactctaacaatggttgttggttccaaatacatttacacccacctagccaatagaacacacatgtttttatgttttgtatactcaaacataatatatatatttttatgaaaaaatagataaaaaataaaatcgggccatgccgggcctaacccgtcgtgtcgcacataaggcctaggcatgacacggtgatcaggccgggcccggtggccggtggacaacgagctgggccgtgcttgggccgggccacgcgaggacccgccgccgccatcctcgcaatccgcttgagatcgagacttggtgcttactctggtggcggcaaggcagagaggggaggaggaaggggctagcgacagctagggtttgttgccacttgaggcacctcacgggagacggcgttggattggaatttggtttctcactcgtcatatgaaatgcatttatgccggttacatggtagacatgttgagattaggcacaccgactagttcaaatagatcatagatcattgtaaaggcttgtaacgtttttgaacaactatcccatttaaacaaggtctacctagatgatatatgaaaaccgtagcaacatactgacacctaactagtaaatgtctaaaactctcttattgtgaacctcattgctatcgaccaaagagaattgctggaacctggaatagtattgcacagaactgagctaccatgtacaacatgttgccctagcttatgcaaatgaacataaccaacctttatcaaaagaaaaaatggcttaatgagtttacttaaaacataagtcctagtagatgtttccgtaaactcatttattttgaagggtcaggtactcaggttgaatctcaattatataagcattgggccaaggcagctatttagccttgtcgattagcttatatttattccattgaaccttgttcaaactggctgtgattctttgtatttctgtttttttgtatgaaactgttgaaaaggaatatttctaaccagaatcttcctctatcctttgttatgagtttaattggtttgttcatacatttcacttctttctgtaggcagcattcccacagtcagatagaagactgg

SEQ ID NO: 340 - DNA, 7330 bp, Zea mays
  Intron number 2 from transcript GRMZM2G445059_T01 (locus G RMZM2G445059) derived from phytozome v7.0 (chr-ID 7; pos 1 27569466 to 127576795 reverse strand)
ccgtctctgaacaaacacaacgtggtttcctgtcagtaaggttcgatgtgttacaagataaatacagaatggttgattggccatttatgttcaccaggtctaatgtttagagcgttgtgcaggataaaggtttgttgtcttttttctaggatagcctcatttattatggcaagaagtttttggatatcagattggtctggtcacacatatgcatcaagcaaccgagggcaaactggttgtggctgcaatctattttttattacatattccactctgctcacttcattttcatctgctctagtactcacaatccggaagagcttttccgtgagatgttcagtcagggaacagatgacgagtctgaagttgtgcccgaacctatagagcagcccctgatggtgttgtcatcttcagcatggtctggcactgcgacagctaccacatggcatttacaagatcaaattcagcatcaagatattctgactactcggcctggtcagggacaacttgtcatcagaccttgaaacttaaagggagaatacaggagcagtctctgaataccttactggacagtggtagtacacacacatttgtccctggaaccaatggtatagtgtggtcgcatgttctgcttggtggtaagccgactggatcctcaaatacctccacgaactgatccagaactgcttggacttttggatcgaccgattgtccagcgggtgtagcctgtgattccactgacaagagcaaaagttcggtgacagcgccggctggtaatgtcacctgcacaccttgcaagtatgctggcgatccattatatggaatgactgcccacttgttcgcccaatccaccttcatcggactgtattgctggatccagttcatgcccaatactacataaaacaccgtaagaggaaaaaatttcatgttagtgacaaattggcaatcagacatactccactcagctgctgggagatgataacggcatggaagcacttgactgttggctacttgcacagatatggttctaggcaactcttgaacaccagacaactgtggccgtaagcggtcactgacaaaagtgtgagaagaccctgagtcaactaatatgaggatgtcgtgttgctgcatgcgaccagcaaatcgcatagtggttcctttgtctattccttcccatgctgctggtgatagagatagtgccatcatgatttgttccggctggtcaggtgctgtgaacaacacccgtggttcacgccaggaatttctctggtatctattcctttcttgccgactcggcaataacatgttccagactgagtttagaaacgattacaatattatttataccggcacacctgccctcatcaatacgtataactccgtatacctatacgcgccactctgcaccgatgtacttggtatttggctttggtacacgacggctgcgcgggctctgattgtcttccttgactccctctgtctgtgccttctgttgcactgcttgagtccgctcctctgcatggtccatgtgatctgctctgctgacatttcccccttctttaacgacagcttgaccccaagctggtgcttgtggaaatttctgcttaatggcctcttcatcctcccaggttgacagtgacaccggccaattggaccacttaatgagcaactgcgaaatcaccttaccccctttacgaagaagcctggactccagaacttcctccggcacctgcaacccagtaaagatatctggaagagagtcagtgctaggaacccgcacgccgttggccgattttaactgcgatacatgaaagaccgggtggatagcactcccagatggtaacgctagttcataggccacaggattgatctgcttaatcacctcaaagggaccaaaaaaccgaaatgccagtttagaaactggtctgtcagccactaatcgttgacagaagggctgaagtttcagaaaaacttgatcgcccacagtataagtacgttccactcgacccttatcagcctgtttcttcattctgtcctgagcacgctgaagatggaactttacttgctgtagcatctgttggtgaccaagcaaccaagtttgtaaatcaggaaccgaacactgatccacggtgtctaatccaagctgagaaggagcatgaccgtataacacttcgaaaggagatttacccagagcggtatgatagcaagtgttataccaaaattcagccagcgagagccaagaataccactgtttggggcaagaatgaacgaagcatctcagataagcttccaaacactgattaaccctttctgtctgaccatcagactgtggatgataggcactactcatgcacagctttgtcccagccaatctgaacagttcttgccataacttgctagtgaatatgggatcccgatcagacacaatcgacgatggcagtccatgcaacttatatatgtctgacagataaagcttagctacggttaaagctgtgaacggatgggctagtgctaggaaatgtgcatacttcgaaaacttatccaccacaaccatgatacaattgtacttgtgggacacaggcagcccagaaataaagtccatcgtcacgacttgccaagcatgatctgggatgggtaggggtaacagaagtccaggatatttgctcctatccggcttggcctgctgacagattgagcaagtgccaacaaactcacgaatctgatttttcattccaggccaactaaatattgctttaattcttctgtatgttaccggaaaacctgagtgtccccctatggcactgtcatgcagtgaagacataaccttcgtctgcaaatcttgattgtgacccagccacaccctgcctttatgcttgatcaccccggccaccaacgtataatgctccaacggatgtcctgtagataaagcactaagaattttctgagcaacttcatcattttcatatcctttcgtgacctcagtcagccagctagggatcatagaggaactactcaggacatgcagctgcagggtagtgtcatcggattgtaaatctgcccttctggataaggcatcagctaccttgttctctacccccttcttgtagataatttgaaaattaaggcccattaatttagtcaaagccttttgttgccaaggtgttgtgaccctttgatcatccaggtgagtcaaactttgctggtcggttttaatgagaaactgagcatgttgcaaataaggtctccaatgatcaactgcaaaaagtatcgccaagcactccttctcatatgttgacaaagcagcattcctgggacccagagctttactaatataggcgataggatgtccatcttgctgtaatatagctccaatgcctaccccactagcatcagtttcaatcacaaaggttttagcaaaatctggaattaccagaactggtgccttgactagagcatctttcaacgcctcaaaagatttttgtgtggtgtcagtccaaacaaacatttgatctttcttcagcaggttggtcagaggtttacttatgatgccaaaccctgccacaaaacgtcggtaataccccgccatacccaaaaaacttctcacctccttgacagatttcggaattggccaattttttatcacttccaccttggctggttcagtcgaaataccagcagcactgattacatggcccaaaaattccaatttgtcttgggcaaacttacacttggattgttttagtttcaactgattttgggtcagaataccaaaaacctgttccaaatgtccaacgtgatcttctaaagtagtactataaaccaaaatatcatccaagaataccacaacacactttctcaaaaggggagctaagatgtgattcataaaatcttgaaaggtagccggtgctcctgtcagaccgaacggcatgaccttatattcatagtgtccattatgcgtatggaaggccgttttatactcctctccctctttaatcctgatttgatggtaaccagctctatggtccaactttgtgaatacggtggctccactcagctcatctgcaatctcatcaaaaactggcatgggaaacctattcttcaccgtataagcattgagtttcctgtagtccacgcataacctccactctccatccttcttctttactaacagcaccggtgaagcgaagggactggaactctgctggataattccaccttccaacatttccttaatctgtttctcaatctcatttttttgttgaggagtgtatcgataaggcctgagtcggaaaggatttacaccaggcaacaaaggaatgtcatgatcaaacaacctctttggaggcaggccttttggggctgcaaacaattcctggtatttgttcaccaactcaacaatctgatcgggaacagtgtttgtctcagtctccatggtgatcctcaactcgattacttgttccaccgcttccttcctgagcaaacccttcaattgcacactagacatgggagtacaagcttttaatttaggagttacgccttgtaactgcactttcttacccttgtacacgaactccatccattttgtagcccagtctatagacataggactaagatcctccaaccagtccatccctagtataagatcataaccgtccaatggcaagaacttgaaatcagtataaaaagttattccctcacatagccattgacagcttggtacccatttttcacaccacaaatagtacccgtcagcaactttgactttaacaggtctgaccaaattctgcacccctttcactacttccatcagatgggtacccataaaactagccgagctaccagaatccaccaatacgagcacctgttgacagtgaatcgaggcccataaccgaatagtcctgttgttttcactaccatttactgccgccgtagacaacgccaacactgcctcctcgttctcagtttcataatgctcatcctttggatcagtgtccccttcctcctttccctggtcagtcacagcccacatctcctccaccacatgaagaggaacactgttagagcaatggtgattataattccacttttcaccacatttaaaacataagcccttggctcttctgtaggacttcaaggcagcaagtttctgatcctccgtccttccatcgctcccagacggcctacgacgatcttctgacaagggatggatccgacttgtggtaactgatacttgatgtccagccatggtcgcagtcttcatggagggattggagggtctagtataaccacccaattccactctcctgccttccttccgattgggttgtgtcaacatatcctcctgtaatagagctagcgaacaggctgtgtccagatcggctgggcgttgaatggccaccacagcccgtataccatcctttaaaccatccacaaatctggaagtgatcatcattggcgtcaactggctttcatgggctagtagttgatgtaacagcatgtcaaactgttccacatattccaccactgagttctgctggtatatgtgatagaagtgtcgaatcaaggtaccatgttgatcccttccaaatctgttatacaatccagaacagaattcatcccacttcatgtatctaagccgatgttctacagattgtaaccagaataaacccgcaccctcaaaatgcatgatggccaaccgaatccacatgggacgagcaacagaatagaaatcaaagtaggtttcacaccgcgttctccacagcttagggttggatccatcaaaaacagggaaactcatactaggtatacccgatccggacccatgtgaccagtcgccaaaggaatggtttccagcagcctcgaatctgaaagagttggagttccagggcgagttcatacctccatgcgagaattgggtccgcccttcttcacgacgaaactccaaattcgaagaatcagatggtggcggcttcagaaatccgtcttctccttcttcttcctgtctcgacccgaaaccgagcggcttcttctccatctttcccatctggatctggatcgcctttagagcatcagaaatctccgtcactttcgcttccacctccggtttccacttctgaagatctccctgctccgtcatcaccaccttgaccgccgcctccatatttcccaccgccccctgaatcgcctccatgcgtcggtgagtctccttgtttccctcctcgatcttcgccagaagctgggacaaaggatcgtccgtcttcgctggcgccatgccgcccaacttcgattgcgatctcgtccagtacccgtgtggaggatccagtattggctctggtaccaaatgtgaacaacacccgtggttcacgccaggaatttctctggtatctattcctttcttgccgactcgacaataacatgttccagactgagtttagaaacgattacaatattatttataccggcacacctgccctcatcaatacgtataactccgtatacctatacgcgccactctgcaccgatgtacttggtatttggctttggtacacgacggctgcgcgggctctgattgtcttccttgactccctctgtctgtgccttctgttgcactgcttgagtccgctcctctgcatggtccatgtgatctgctctgctgacaggtgcgccttcgacactttctggtactgccagtagatcccatacctcctcgatggcatgtaactgtaccgtgctggcacatttgtgaccgggaaaccatttctccgcacagcggtcgcacaaactgcgagcacgatgatagcttttgagcgatgctacacgatcagctggtgaagatgcacgactgaagtcaccagtcgttttgtcagtggattgattttgtccgcctggttgttccttcttgctgaattcagacgacgccatatgcggccaagccatccggttggagaaaggctcagcacgctgacgccgagatgactccagcgcctcttcctgcacaagggcgagtgcacaagcagcatcgagatttggaggtctttgtaccattataacaattttaatatcatgtttgagaccatcgataaatcgcattgtgtagtacaagggatcagtatgcgactcatatgcagctaactcatctatcaaggatgcaaactgttcaacgtagtctgaaacagaccctgtctaactaatatggaagagctgacgaatcaaggattcatgttgttcacgagctggatgggcttggccagcatcgcctttgacccctcccccattgttgtcgctcggggttgcaggcgaattttgggcggagaacgtgctacgtctggac

SEQ ID NO: 341 - DNA, 7506 bp, Zea mays
  Intron number 17 from transcript GRMZM2G420865_T01 (locus GRMZM2G420865) derived from phytozome v7.0 (chr-ID 2; pos 193055758 to 193063263)
acgagaaaacaaaggttcagttctttgagttattttgttatctgcgtctgccgattcctaattatccctatggctttgatgcaagtaactactgaatttttaattgaactatgacattgatgttatatcagtctggatcacatatgccccatgagcatacacgaataggtgtatgtgtacacttgtgcgtataagcccctacatagtgaagataatgcaaacaagtacatgtacattggttatgctacacctaactttggtattctgatccagtttgtagttgctgtggagtctagttgtttaaatctttgctaatttcagtaagacatggctgctgaggctttgaaaaagatcctttcaactttcacttttcgtgtcaccactacaaaataagtcctaactttataaagcaaatgtggagcgcttgtaataaattcatgcgtgaaagtatgtcttttaactgtacatagaaacctaattgcctgtgaagtaataacatatgaagtttctcttttcacaaggtctggtttgggcttctgcatgagcttcatattgcatttcccataatctgaagacttagtcatttttgatagaggattggacaaggtcatatttcattcattgggagtacaccagagtacagggatataattagaagctagactaacatgagagagaaaaggaagcacacgggtgacaaccaaggaaggaagattctcaggcatcgtctgactagtgataaccattgtttaaaaggcgacgcctaggcgtccaggcggcaggttttgctaggcgtccgcgccgcccaagtaaatatcatggcgtccgccttggcgaggtaggccacgccttggcgcggtaggcgtctgggcgacaccttctcccttgtggacgacgcctaacctagggtttgctgggcttagttagtcacgcggagcccaaattggcgctggcttttggcgtgcgttccccctgtgcgctggcttttggtccatattggcgcgcgttctccgattcccctctgcgcgcggcggctgctcctccctgcacgcggctgctgctcgtcgctcgctgggcgcgcggctggccagctgctccccctccctgggcgcccctcactggtagagtggtagactggtaggtcctcccctgctttctctcaggtgtcaagtggagtgtcgagggcttagtagggctgacaatgggctataaattttacactataagatttaaggatcgaatcgggttaggatcgggctctatttctattcatttttgaactataatttatttagggccttgacattttgtgaagaaccatttggatcacgatccattaccacccctaggggctagggctcagacacctagcctagtatcagtatataccacaagtctggaaggagtatagagctgaaggtggaggctgtggctgagagtttcttgaagataccagagaatcctcttaacaacagactagtgagctctcgaggattgtgcatatgaagggacacttggaacaacataaactatgtgtggcctaaaaagtgaggtactgtagggctacagtggtctagtcggagtagagcgcgggagtaggttgcgacgtaggctgatacgctacgcatgtaggagtgctcaggcggcgttgtccagtattctctacctgtcacccttcgcctcggtaccgcgcgagctacggtgggagtcatgatgacagtagcccacacgtagcagagagtcaatggtcctgcctcggtaacgcgcaagttactgtgcggcctgcatactgcggacgcactgcctgccactagggcgggcaagtatacgtcttgtccgcagttaacgcataggcacactacacttagaggctgacgtcgggcttcccccgatgtcttacgtcacgcgacgtagaacacgtcatacgtggcagcactgggcctcgcatggagtggagagtagtgattgggaccgcccttccttgcggctgctctggactgcccttggttgggggtccggatggcgctcaggggaggtcctgtctcctccggtgttggccatcacgtggcagcactgggccccttaggccagaggtccgggtggcctgtcatgagggtcagagccgttcccggaggtctggccatcgagcataggtttcgagagccctcgtcttcaagacacgtggttgacccggaccccctctactggggttctagggcgctgatcacaactaccggtcttcacccgagctcagtgggcttactgggtaggtcgagccattgggctaggacggaccaccgttagcatggtggctaagggtagtgccggagggttcgccttgacccagcagtagtgggtacactaatcttgaagtaccgacataactgttacagaaagagtggaaccatttccagcaacaatggagaaggacaagcaaaatgaggtgtccggaagagaaatattagggccactttggcaaggttttagcttttggaaaaacaattttgactctgacttcttcgtgcgagggagctaaagccatcttaaagaaccatttggcaacatgacttttacgttgtttttgtaaaataaacatcgtacctttcctatttattttcagacattttttgacatggcatgagggaacaaatacagaaatatgcaaagctcactttcgttcatacctaagaagttaaacatgcctgtataataattcgatcacgtcgaaataggcaaagctcacgtacataggatgaatttgttgtacgtagcatgaatgtacattattatcggcacatggataatacattatataacacattattattatccatgtgacgaaatcaaattcattctacgtaatgcattcttatccatgtgaacacattattttcctacgtaatgtcgccatcgtccatccctccagcctgccgccgctaccgacaacgacgatctggttgatctccttcggtgccggggctggtgccgcgcccaaccattgatggcgagaagcctggcacttgtggcgacgaacgggaacaatgacacaattcttatctgtgttgggatcgaaggcgacaaacaaggcggcgcgactgcgttcttcatgacggaactgtctcgaagacgacgaaagtggcggctgtgttcttcacgacagaagtggcatctgccaggagatttggttgtgatctgattgtgttgggaggggtttcgtgcaaaaataacataagccaaagcaagaaaagccacttttttggcttcaccatttcaatacaaaggagagaagtgctttttagcaaaagccattttctaaaagacagtttggtacggcttatgcgaaaaaggtgatgccagagcagaagttggtgcccagaagccctgccaaatgggccttactagcatcaaccgttatatgattgaaggcgttggaatccatgaggtcatggcccagacgaccatagacaactcgatcctaggagtcggtcctgggagacacggtggtctggtgcacctgctgttgatgttggtggtgctgctgcagagggataggcaatgtcagtggaaatcttagtgtcacaggaacacgtggtctgaggattgtggggctgttgctgctggttgcaagtgggccacatgaaggagcctttctaggggttgtaggagggccagggagagccacccttgttgtcattaacacgacaccgacaccagttaccattactggcagaactagcaccaacaccatggtgtctggagctagtatctggagctcggttataggggtcgtgggtggataattggcagcagatggggtttgttgttggtggtggacttccgtagagggtccaacatgggatcattataggatttcgttgaacgtcagggatagacggattcacttcagaagggcatatgtgtggtcgtacttggtgtcgagaaatgaatgaattaaggatgagggtgtggttagggatgacctcgctaagattgctcgaaacatcgaccataccttagatcttgtggcggtagttgtggatggataagtcgccttggatgaatatgcggaactcaatgttggggtgtggagcgtgaatcttgtggttgaccaagaattgttcctcgatgctgatccaagcatcacacattgagctgtcgtgtcaatgaacggtgttgtcaatgagtcactgttcatgcggttactgtagcgcgtgaataatattgtgattagatcagattagaatagttggtttgttaggcaaaagataaggatggataagatttgttagggaagatatactgattatattggatttggttgacaaggatggattagattagtcagggaagagataaggattagatcatatttgattagttcgaaagagataaatcagtcatctctataaaagagactattatatcagttaagggtaagcaatagttagaaacaaaacttcttgcttggccgtggacatagcccccgactgacgttcctgcaactacaactcactctctcatgctctagtgccataaatgttatgcataatctcttttgtcttatggtcaccaaatatagtgttgaccttatcacgttctttctcgatggcgaactcgatgccatacacaaatcccacaacccctatagtgacgagctacaagaagtttctccactcctttcagcacctcctcagtctccttgttctacgcttggatgatcttgtaaatggtggggtggtcgcagggcacctggagctcgtcgtagggtggggtcgctggagtgcttggcgaggagtcgcctgtgtggcccttgttggcgagctcagaagccgccgccgacgaggacccaaataaccagccgagctcggcaacaagggccttgtgacctccccaccattctcaagaccccagttgcaaataatgcccctgcgatctcccggtgccctgtgacctcaccattctcaagaccatccaagcacagagcaaggagactgggaaggaggtgatcaaaggagtggagaaacttctctagcgcgagagctccatccatatggagcacactaggatccaacgctggaaccaaactatcaccatcgttgctaacgtcttcctgtagctcgccactttagggtatcatggactttgtttgcgatatcgagaaagttcgtgataaggtccacgctatatctgatgaccagaagacgaaggggattatgcataacatttatgacactggtgaattggagagggagttgttgcaggaacgccaacaagggcctctgcctatggccagacaagaaggcttacttttaactgagtgtcgaaggctgtaggagcttgtccctgatcgagcgcgggagaaggtgcttggtgaatctcggagccatgtgcaaagtaaaagtcatgttgttgtggaacgccatgtcgtggaccgaggacgccggatataggcacgaggaatggcatgggcgaagcctgcaccatgccagtctaggggttgtagttggtcgtcagaacgtgtctgcgcgagatggtggcagcgcgacagaggggtgccgccggaacccttggagttggagggcattatagagctacagtctcggccgcgcttgcgacgaggattggaaccgccacgagtggacgaagtagcaccaggactggcgttggtgtgggtattgtttgtaccttttttggcgagtagggcttgaatggcgatcgtcgtagagcgttgtgtgtcgaacatctccatcaagagatgcgagcgcgcggagaggaaggtgtggggaggttggcaggaagtgatcgccgaaatcgcgtgccgatatttgggattgaggccgcgcaacaggttcaaaacttggttgggttcagatacaggttggccgacgtcacgcagattgttggccaacatcttcagcttggcgccgtagtctgagacgatcacgtctccttggtagaggttgtgaaattcagcttcatagaaggtgcgctagagctcgttgtcgcggtagaggttggcgatggcgttctagaggctgtgcgcatccgtcttgcgttgggggacaatgcgaaggatgtccttggagcaggtggtgtagatctaattgacaatgcaccgatctacttggtactagcctgcgtcgtggacgagaacgagagttgcagaagaaacatgagcgtcgagaccaaatttaccgaaggcagattcgaagaacatgcgctagtcggagttctaagattacagggacgtgcgagcgaatgttaattgtctgaatcgcgttgatggtggcagtgggtggtgggaagcgagctgcattcgtagcatcggaagggggagaggagggaggcgatgtagcatgggagaacacaggattgtgatccatggctgcagaagccagaaatcagcgaggaaaaagagtgaggaaaagattagctggtcgttgatatgatgtagaagagtattttgggctaaccacaaaaaatttattaagcatcatagtatatatagaagtacacgatgtggatcctattgatgtggagccataggacgtggttgtgggcgcgcagagcgtctcgatcgtggatgacgctgaagagcctgcatggccgttggccatgatctgaagaaccggcatggtcgttggtcacacactcagcgtagaggagtcctgagccgcgacagcctcacgctcagggtggcagccacagcgcgctcagctgccagggttgcaaggtctgcactgcatgggtatcgtggtggccttgtctaaagcagcctgctccttggctgtggcagccatgggttcggtcgcaggggcttgcatgccctcagcctgggcagcaagggtgccgcagccaaggtaggtgctcaggggccatggaggaagagagtgcgaaaggaggccacagatcttaagagtatcttgacaccatgatagaggttgaacaagctcgtgtatttcattcattgggagtaaactagagtacagggatataaataggaatcagactaacacgagagagaaagggaagcacacaggcggacatccagggaagattgccaggcatcagccgactagcaataactagagaagtaaatactagcagtcaaggagcccaaacaggggaggttgcttggcaacagctggttactaagcagtaaacatgctaacaaatttattatcatctgtatgcagaggtgggttattgtaacttctttttcttttataacgagaattggatgttatgttcaaaagctatgttcaaaagctatatttcggaacgcgcattctactattctagaggttgattcatttcttggaagcgcctcttttactaccttacataacgaaactagatttgcctgaatgatgtcatttttattatttagtctttagtgatatgaaaagaaactatgtgcttgtagatgtggttcactgcttacctatgtcattgttattagtgggctgtattcagctctaagcttgaagaatctcctacaggaaa

SEQ ID NO: 342 - DNA, 1184 bp, Zea mays
  Intron number 4 from transcript GRMZM2G119640_T05 (locus G RMZM2G119640) derived from phytozome v7.0 (chr-ID 4; pos 2 36892016 to 236893199 reverse strand)
ataaagaggatcacgaaatacaggtgtgatgcattatacattttgtagctccacatcaccttttagcacacccttctgtgtaattgaaagcaagatttttctgcagctcaaacaaataagacaggacatggaacttttgcgtgatgataaatctctcttggaggttagttttgacagtctctattacactatcatatattgcatgctggtaaaccatgtcagtttttaggtgatgtttctatgggtaattcgtggtgtgcgtgtgtgtgtggttgggggggggggagggctctggatttcatgcatcggaacaatctaatatctttggtcagatttaggtgttctattttgttttgcactactatactggctaaaaaatggtgtatatagaacttggtaattgtaattgataacaattgtcttgtctattttttgttgtaagcttaaccattctgttcatattgtgggacaccgaccattcatcatcaatcatgctgtaattgcttagtttgatgatttcatttttgtgcttcactctccgtgctgattgaacggtagggcctggtgtagtggtgagagctgtctcactgagtcaccaggtcatgggttcgaagcagcctctccgcatttacggtgggaaggcttgcctcggtttatccttctctaggccactcatgtgggagctttcggcactgggtctgcttttctactctcagtgctgattgcaataactattctgtttgtatctttgttttaaacattttgatggagcaaggagcagtaatttgtagaagtttctgtgtgttccttgcttcgcaatgcctattgcctattatttcctccattccaaattgttagtcgttttggcttttctaggtacatggttttttatatccatttagatatacaacacatagtaaaacttatgaatctagaaaagccaaaacgacttacaatttggaacggagtactaggttatatcattagcataagcatttcttcttagtgtctttatttacatgctttatatgctgataatgtttcttttagtttctaattccttaaagtcatcattgacacatactcttttaactctgaatctgcacaattgaacatttatccgtattctgtgtaaattcagactcgatggtcgtattaactattccttctgtagataattttgg

SEQ ID NO: 343 - DNA, 18685 bp, Zea mays
  Intron number 3 from transcript GRMZM2G020920_T03 (locus G RMZM2G020920) derived from phytozome v7.0 (chr-ID 4; pos 4 9092014 to 49110698)
ttcaagtgattccaaatcaaaaccctcctggtccaggtactatacacagcaaatgcaacaccatgcttctttttttgtgctatcaatgtatttatttctcaaaaaatgagtgcaggcatgatattcggggcataggtaagttttccatgttaggagtgtttacttatcaatggtggaatgcatgtttttttattttcacttgcttcctaatatgtttgtaatgatggagtagtatagggatcataataagggcctacacatgtttttcattgatttggagaaggcttacaacaattacaaaggaatgttatgtggtgggctttggataaacacaaagtttcaacgaagtatgttggactcattaaggacatgaacaacaatgctgtagtgttcgaacaagcgacagagacacatatgactttccaataccaaagatcgacttagacgccttacctttttgccttagtgatagataaggtcacaagggacatacaaggagaaatcccttggtgcatgctttttgcggatgatatagtgttagttgatgaaagtcgggcatgagtaaatataaaactagagttgtggcaggagactctaaagtccaaagggtttagactttagacttagtagagctaaaatcgaatatatgagatgtaactttggcactactacacacgatgaaggagatgttagtttggaaggtcaagtagttcccaagaagggtaccttttgatatttaggatcaataatgcagagagatgatgatattgatgaagattttagccatagaattaaagagggtggatggagtggcgtcacacatttggcattgcagaagttgaaatcaaggttttaaagtcggctagtcgactctagtcgcctgagcaccgataaggtgattaatcgcgattagtcgacgatttgctcgattagtcgagcctagtcgtcctatagccgttcacctataacaagaccatatttgtgtgtatatatcgatcattgttattaaaacatcgcttaaacatcgtttaagcgtcgtttaaacgacaaaacatgattaagagttgaaacgtccaaacgttttaccaaaatggagtagaacgcccgtttcacgcatttaaacgccgcttaaacgtcctctgagcattttaaggcgttttacttgcatttaggacgttctactcgtcgtgggcttttcctttcctaggccaaaagatggaaaaccctaagttcctaacgcctaagccttccaggcggtccatcccaacagccagttcctatgttttaggctctatttttatgttgctcacaatcactgagtcacagtgaatcattcttttaggtcttgatattgatgagttggatgatggttactgatcatagatacaagttataacttgtgtggttgaacttgttgaacttgatctgtttccttttatgctatttggtttgtgaactcaagtactcaacttatgtatgaacttattctatatttgaagtgctatgtcaagtctgaaaagacgtttcaacgtttaaatgttaaaaggtggttcataacgttttaacgttttaccgctttaataaccatgatatcaatatatatgaatatatatagctacagctgcctagctagactgcaaaactgcatgaattgtacccgtgtgactgccatcgttctggggttggggcaacacaaattctaggaaggtgacttcaacattattacgccacctcctattctcatctgcagtggcacaataatcaagtgaagaacaactcaagaggaggccaaggcgggcacaatactgctcagtaagtgaacaaagaacattgaacaaccaaaatatcagagcaattactgtctgaagaggtcctcaatcctcttctcgatctctgaattctaaacagaggagtggtcggctacttgcctgttcagtcgctgaacagacaacagaggaggacgagagtgcgctggagggggccctctgcagactacaaccgccgcgtgatggagggggcgctgctgctgctcgaacagagggtcgccagagcacaacagggcgacaggagaggagggcggcatcgctggagaaggggtggcgacgctggagaaggggtggctgcgttggggaagagcgcacacacaacagtgcgtaccatattggtacaggcaagggcgtaggacaaaacaatgtttgtggtgtatacagatggtgggctgacgcacataatataagccggattagtggcccaaaacaggtataactagtcgaccataacccctagtcggatgactaatcgcgattagtcggcgactaggacgactaatcgctacctagtcgctctagtcgagtatgagaccctaatcgagctcggactagcgataaggccgactaatcgcgattaggcggacgcctttaaaaccttggttgaaagacaagttttataagatgataattagacatgctatgttgtatggtgcacaatgttggcatataaaaagacgacatatccaatagataagtgttgcaggaatacatatgttgtgttggatttgtggtcacataagaaggcaaccagaatgattttatatgtgataggctaggggtagcatcaattgaaaaaacttgtccaacaccatttgagaatggttggacatgcgaaaggggctctaactgagttggttaggtggtataagtagcactcctcaggtcttgcgtttggctccctatgggagcgaattcaggtgggggttaaaaagtcccttcgtctgtcccatgccaaagcactggtctaatggccgaccctcgtcgcagtcattctcacatgggctacagtgtcgctgtgtatgggtgggcaggggtttgggcattttctttacctgcgtgagaaggtcttcttaatgtaatgcttggggggtgtcttactccccgcaggtcgagttttttgatgggttggacatggccaacagagacctagaggcaccagtgtatagtgggattttaaggctgtgtctagcagatcgtgtatatggccgtgtaaacactgttttgtacttgtagataacactttttatagagtagactttgaaataggggatgggagatgagataggagagctgctggagacagcataaggcacaaagagcggcaggggaaggccgaagttgacataagagtagtaaaaggagacatgaacgatggaatattattggacaatgaaaccctaattcattgatagacttcatgattacaagtatgacctatattctacccctaatgggctaggctttaggtccataacacacacacaagtagtctaacaccgtccataatcaaaactttagccacaacagatgctgagactggaccgaaagtccgagaacgaggagggaagaccattagtgaaaatgttgacaaactgcgggctcgttgggacagatgaacacaaacatccccgatagccacgcgttgaaggacgaattaaagatcaatctcaacattctttgtgcattggtcctagatggggttgacagagaggtaaacgacgctgatgttgacaagcatactcgtggagagagggttgtgaagatcctggaggagctggcatagccaactcacctcagccaccccattagcaatagtccagcctcatcaatagagcgggagaccacgagctgacgcttggaggaccaatagatgaagttgtctccaaggaacattgcatagccggagtgtggtaggaagggaatgagacatatcgagtgaatgtccgaaggtgatcatagcattcgttaaggcctcgaataaggttgaggacaagcgtgccatcaaaaatgacctccctaaggtcacaaagggagttccccatgccctttatctggcggcagtacttggtgacagagaggtctttctggaggaaggtcttgaaggcgacgttgaggtggagagcatgaacctcgcggttgtcgaggaactactacttgatggcaacctaggcttggcgggaagtaccaccacacttgtgaatgatgtcctggagctcaatagtgaccatctcgaggatctacgagaggaccacactatccatccattgtcaggaggggatagtgagggacaccgtgttggtggggacgtggtcatcaaggacttagcgctgtagcgtgatgaggatgaggttgtgctagcaggtgtaggtggaggaagccaggttaaggaggactgggacgagggagtggatgttctaaacacctgtcgcttcgtacaccgaaggggagtcgaccattgagtactccagggggatcaaggcagggagagttaattaaatggcgctcaacctcgacaagttgctgggcgtgagcatttgctgtggtgtgtctgtgctcttaggcgagggttgtgacccgttcttgctcccgggtagttgccacagcggccttaacattcgtgagggccgcgaacatgactgagggctgcatccatggtggagtgggtagttgcgacatcggaatggggaggagcagttgacggaggcgcataaggcgaggagggccaatatggggtgttcgggacgatgggaatgtcgcccaggccactagtgtcatcgaggctgtgcctaggacagtcgcgcctaggccagaggcgaccaggctgacgacgcctaggccagttgcgaccaggcccatgacagtgagccttgtgcctaggccggcccctcgcctggtgggatccaggccaacacccgtaggggcagggatgggtgacctggtggttggatgagcagggggagtcgacggcggcagttgcccaggccctagcggtggtgacaccgtggtgatggggtcgacgacggggaagagaggagcagcggccacgaaagcccaacaacgtgggagaggagaggggagccagtagggggaggagctttggcaatgggggtttgactggttgtggcgggcgccagtccctggccgcggtcgctaggggaggagggggagacctttggctagaataacatattggacaatgaaaccctaatttattgataggccacaagattgctagtattagtatggcatatattctacccttaacgggctgggcgttaagtccataacacatacagtctaacaaatataaccaaagatttcacattgaataggagtgcatggaaaatagatatcaatgtgtctaaaccttgacttgtggtttttgttgggtttcaactctagcctacgccaacttgcttgggacaaaaggctttgttgttgttgttgtttattggtctcaacatcaacattgccttttagtcccaagcaagttggggtaggctagagttgaaacccaacaagaagtcaccaaaaagagaaagagagagaaagtggaggggaaaagcttttgagagcactaaaagggaaaaggcctaatcacggttcggacatgtggataacttctttccaagcacttctatccaaacacaactcctttgggatattccagtccttcaagtcccttttgattgcctcctcccatgtcaagtttggtcgccctctacctctcttcacattattgtcccgtcttatgatgcctctgtgcaccggtgcctctgagggtctccggtggacatgcctaaaccatctcaaccggtgttgaataaacttttcttcaattggcgctacttctagccgattgtgtatgccatcgtttctcactcggttcaatcttgtgtgcccacataaccaacgcaacatacgcatctctgcgacacttagttgttggatatgctgtctcttagtaggccaacactcagccccatataacatagtaggcctaatcgtcgtcctgtagaacttgcctttcaacttttgtggcactctcttgtcacataggactcccatgcttgatgccatttcatccaccccgctttgatcctatggctaacatcttcatcaatatcactatctctctgtagcatcgatccgaaattatggaaggtgtcctttggtactacctggtctcccaagcttacatctctatcctcactaattgtagtaccaaagtcacatctcatatactcgattttggtcctgctaattctaaatccttgactctagggtctgacgccataaatccaactttctatttactccttctcggctttcatctactagaattacatcgtcagcgaaaagcatacaccaagggatattttcttgtgtatccctcgtgacctcatctatcactaaggcaaatagataagggctcaaagctgaacctagatgtagtcctatgttaatcgggaaaacatttgtatcaccatcagttgttcggacgctagtcacaaccttgtcatacatgtccttgatgagcgtaacatactttgttgggactttatgcttatctaatgcccaccacatgagatccctaggtattttatcgtaggcctttttcaagttgataaaaaccatgtgcaagtccttctgctccttataccgctccatgacctttcttattaagaaaattgcttccatggttgaccttccaggtatgaatccaaattggttcatggtgatatgcgtcattcctctcaggcgatgctcaataactctctcccatagcttcatattgtggcaaatgagcttaatccctcgatagttggtacatctttgaatatctcccttgttcttgaagagtggtactaatgtacttttccactctgtttgatgtcttgtcctttcaccaagagttgatccatctcatccttaatgcatttaacttggttgaggtccttcgtcttccttttccgaatcctagtcattttatagacatccttatccctttcctttgtacttagtcttcggtaaaaggtcatcataggcttgaccctttgcctcactcacagctcgctttgcagttttctttgccaccttatacttctctatgttgaccgcgctcctgtaacactctttcttctttattgccttttgaacgtcctcggtccaccaccaagtatctttaggttcacctctgctccctttggttattcgaaacacctctgacgccaccttcctaatacaagttgccatcttcacccacatgttctttgctttttcgggccaagcgccctccacaaaaactctttccttaaaaacttcggatgtctcccctttgagtttcttttttttttctcgaaagcgcaggagagctacgcatcattatattaagtagaaggaaaagagggtccaaaatagaccatagtacaaaagacctccccagaggggataaaaaaaccaaagaaaaaagaagagaaaaaacaaaaacaaacagttcctgataaacaaaaccagcccatcagcgataaaccaggcagctaggtgcccctctgatggttgcggcaagaaaggagagacccttagctcctgccatttcccacaattgatgttcctcccttgcctgacaaagagctgcagaaacactaggggagattccatcaaagacaattcgattccgatgattccaaataatccaggctcccaaggcaataagggagttgacacccttcataatcatatctccagagccattgtcaatcatctcccaccaacccgtaaaagacaccgtactaggtgtaggagctagattttgtagtctgaaaatgcacatcagccggaaccagaattctctcgcaaaaacacgagaaaccaaaatgtgatccaaaatttcagactcttggtcacaaagtggacatttctccggatgatcaagtcctctctttgccaacctatctgctgtccagcatttatttagcaccgatagccagaggaagaagtggcatttagagaaggcccaagttttccaaactctttcatagtgaccgaaatgcacagacccgatgaacaacccatcatatgcagccttagcagaataagtcccatttgcaacaatactaaaagtatgtttatcttctatgtctggcagcagctcaaaatctgaaattaaattccaaagatgaagataatccaataatactcccaccgagagtgatcctgtgatatcaacaatccatcttctatctgtcaatgcttcctgaaccgtccttctgttagtgatttttttcggaatgatatcaaataatctaggaaccaaatctgcaattttctgcccatgaatccatttatcagtccagaacaaagtattagccccattaccaacctttgaagtcaacaccatcgagaagaaagcccttgctttatctggaacctggataggaaggctgcaccaaggtcggttaggctcagtcttttggagccaaagccatctcatgcgcagggcccagataagttctttaagactagaaatgccaagactgcctagctgtaggggtctttagactctgccctaggccaccaggcagtgaccacctctggcctccttgcgccctctccaaaggaaacttcttctaattttatcaatggccttgatagcccaagggggaatattttaccgccatagcaagataaataagcattccggtaagcacatgctgaacttgcactttacggcctgctcttgtcgtcaaatctactttccagcccggtagttgatcagtaattctatccacaataggctgcacctgatccttggtgagatttttcagggacagaggcagccccaggtatttacacggaaaggttgagatgccacaagggagaagatcctgaaccatttccaactccacacccccacactgaatgggataaacattagacttttgttcgttgttgcggagacctgaagcttccccaaatagatgtaagatatctagagttatagcaatatccgctgccgaagggtgtaagaaaagtgccacatcatctgcatacatagatacccgatgcagaggttttctgggggaaagatccaagagcagaccagcgtgttcagctttagaaaacagtagaccaagaacatccataactagaataccctttgagtttccaccacttcatcctcgcaattttggcttgtttatccctatgggcacggatccgaaaatggaagtcaaccaccacaagattatgttggggcacaacatcctctccaggtatcaccttacaatccaaacatgcttgtttatcttctctccttgtgagaatgaagttaatctagctcgaacaatggccactgctaaaagtcaccaaatgagaatctctctttctgaagaaagtgttggctatcactaggttgtaggctacaacgaagtccaaaatatcttcttgattcctaccaccatacccgaaactgatggaataagtcttgagcatctagaggacagcctgcttttgactgtcctctgtagtcctttagcatctagaggacagcttgactgtcctctgtagtctctttagcatctagaggacaacagtcgctttttgactgtcctctgtagtcgctttagcatctagaggacagcagtcgcttttgactgtcctctgtagtctctttagcatctagaggacaatcctgttgtatagtgtgtgtgagaaggtgtggtagtgcagcccctagggttataaatatgtgtccccaacccctctaagggtatggcattgtgtagagtttgaggaaataaacagaaaattgccccaactcatagtgtcatcctcttgatgagagttagagtccctctacttacagaaacctccatgagccagctcataacctgcatttgttgaacctacatgaccattgagatctcctcctatgaaaagcttctcattggtgggtattgctctgaccatgccatctaagtcttcccagaacttactcttctcgctcttttttttctcgaaaaacacatgactgcatttcagatatatattaagaagagggaaacaagggtctaaagtgtcccaaaaaacaacgcactccttatggaggctagtaacacccgtacatggaaggatccataaaaaaacacactccctacaacaacctatgcagggggaagccaaaaaggagagccctttggctccagcaatttcccagcttctttcctcatctgcttgctccagaattagaggaaggctgatacctccataaaaatggctctattgcgatgcttccaaatcatccaagatcttaaaatgacgagggagtcaagacctttcttgaccagaccatttactcctcgctctcactgagaccaacctgaggggcatatgcacttataatgttcaagactacatccccaaaacaagtttgagtaggataatcctatctccctgtcttttgatatccaccactccatccttgaggctcttatcaatcaatatacctactccatttttgtttgccactgttcctgaggacaaagcttgaaactagtgttctccacctccttcgctttttgccccttccattttgtctcctggacacataggatattaacacacctcctgcttgctgtatcgactatctctcttagcttacctgtaagggaccctgcgttccaactatctacacggatcctagtcggctcaactagcttccttacccctcgcacccgttgggacagatgtgaagacccttgcacatttgtcactacactcgggcgccgatgtagcgcgccactaaggaagcgatgacccggttcttgctcacttgacatagcgcgccaccaagggggtggcggcccggcccttgcccatttaacaccatactcgggttccgatatggcgcatcactaagagggctatgccccaacggttttctattgggtttcatctctatttgagtggctaagttttttttatagctggctcgccatgcctaacgcaaccctccttgtacctggacttgggaccagactatgctaacatatgctgagcaaaattattattgctaaagttcattggccatcataatatattgcatgcttggatgccataattttaggaaagttctgtgtgaagtaactgtagttttaaataagacaggcatgcaaagccgtcgtttacaaaaggggaacatatcaggtgtacatagccctttggtgcacatggtccacatattaacacaactatccatcccagatccaacatcatctcacatcttttccttcgtgcacagagcgaggtggtggtggagggtgttctttgcaaaacatacatgacaacaagggaaggtgtggaagattgttagatctatgatggatggtcgtgattgaatatgtaaaggtccatgtacacctttttttttatcgaacgcgcaggagaactgcgcatcttatatattaagaaaaaggagatagaggtctaaaatagacccagtacaagctgccaaaacatacattaaaaaagaagaaaaaataataggggggtgggtatccagacaacccccagccccaccagcacctaaggccacagtctcctaagatctcttgcccctgccaagccccaccgaacagcatcctcatgaatatgctgcatgataatgctgatgttgggggatgcaccatcaaacacacattcatttctatgcttccatagccaccaagccaccagaatcactagggaattaaatcctcttttctgattttttggcacctggcactcagcttctctccaccagtcttggaaagccgttgttgtcaatcctggagtcaggcgatgcagccctaccttgtgcaaagtctgccaccaagtgtctctggcaaacacacaagccaccaagatatgctgaactgtttcctcctgctggtcacaaagggggcaccttacaggatgcacgagacctcgtctgcttaatctatccgctgtccagcaacgatttagagaagccaaccaaatgaagaatttacaccttgggggggcccaacttttccaaattctagtagccggctcaaaagagactgaaccagccataaaacgatcatatgccgatttagtggaataatctccagatgcagacggggaccatctatgcacatcaggaatccccggatgtaactgaaaaccttgcactaggtcccaaattactagaaagtcgatgataatctgggctgacaggctgccagatatgtcattaacccatctattgtttaccaaggcttcttgcacagatctgcttttcttgattctcactgtaatatggctgaccaaagtgggggcaagggcagatattgattgcccatgaatccagcgatcagtccagaacagggttcgagagccatcacctacagtagtgtggaccgaggcagagaaaagagctttgacattggaatgaaccttgaacaagaaatctgcccagggcctttctggttgagtttttttgagccaaagccatcttagatttagagcccatccaagaacttcaaggttatggatacccaggccacccatgcttagtggtctgcaaactcttgcccaaccaacagagcagtgaccacctctgatatcttttctgcctttccacaagaagcccctccgaattttgtcaatagccttgatcacccatttagggcattgaagcactataaggtgatggataggaatggctgtgagcactgatttaaccaaggtcaaccggcctgctgtgtgaatgagggcagatttccatccagatagtttatcagctatcttgtcaatgagttctagaaaagtatttttgggaagtttcttgactgaaaggggtaaacccaggtatttgaatggaaaagccacctcagtacaaggaaaaaactcctgcgcagccaccatgtcttgttcctcacaatgaatgggcgtcatactgcatttgctcacatttgtaacaagtcctgaagcatctccaaagattcgcagaatttctttgaccacactgagttcttctctacttggctgcaagaacatcaccacgtcatcagcatatagagagatacgttgcccatttcctcttcttaacactggttgtaaaagactcaattcctgggctcttaaaacaagagaattcagcacatccataacaataataaataacattggggatagaggatccccctgccttagccccctatgatgatgaatgatttcccctggctctccattaaccagcaccctagttgaggaagaaaggagcatcttggaaatgatattacaccatacagaaccaaaaccaaggtgcgttaacacctcaaggaggaaaggccacgaaaccgaatcaaaggcttttccaatatccaatttcagaagaattctaggaacccgctgcttctgaacagccttggccgtctgctgaaccagaatgaaattgtcatggatgcatcttccttttataaaagcgctttgatttgctgacactatctcaggaagtctggaggccaatctgttagccagaatctttgtaacaatttttgcaaagctgtgaattaaactgatgggcctgaaatctttgacttccaatgcttcagctttcttgggcagtagagtcacataagctgtgttaagaagatgaagtttggatacatcaccttgtagcaccctatttaacgcctccataacatcatctttgatgattggccaagatattttataaaattttccggtgtatccatccggccctggagctttgtcagcagggagagttttaattgctgcccagacctcctccatagagaaattttgatcaagagcagaaaggtccagggtaggacgatgaaattcttccaaatttaaagttgactccctgggggctgctgtcccaagtaacttgttatagaaatcccagattacctctttcttttcctgctgctcagaaattactctgttatcaaccatcagttttccaatgaagtttttctttttcctgtgtctggcgtggtgatgaaaataggcagtgttggcatctccttctttcagccagtgcagtccacttcttactcgggcaacagttctttccaaggaggctaatgccaaagagtggtgcttaagggagcgacggagccattcctcagagggagacaaatttcttacgtcacgagcgatttccagcctgtgaaggatctcatttgccatcagaatctgctgcttaatgttgcccacttttttctgactccaggcttgaaggtgcctagcaagcctttttagcttgtcatggaaccgctgcaaggggcagcagacttccagaggttgtgaccaagaattttccacctcttccatgaacccctctaatctgatccagaaactttcaaaatgaaatcttctttttccttggacgagatcatgtagccccaatagtaatggacaatgatcagaaatctgggatgcagagctctgcaggagacaattcggaaacatgtcctcccattctgctgtacagaaaatccgatccaggcgaaccaaagtaggtgaggcccgttcattggaccaggtgaacttcctacctgaaaggggcagttcctttagaagcaagtcattaagcagccgcctaaaccttcccatcatagctctatcaagattgtcattgctcttgtcctcagctctatatattaggttgaagtccccaccaatcatccacggaccgaggcactgtgatcgaatcaggcgcagctcattaagaaattgaattttatgctcatcgagttggggaccataaacacccgtaaaccaccaagccacaccatcctgctgctggaattgagcagagactgaaaaattgtctattctagtttggagcatcttgcacaccaaaatcctccaagccaaaataattcccccccgcgtaccagccgccggaagaacaacatactcttcaaaatcagaacctaacagagagagaatcatatgccgagaaatggacgctttctttgtttcttgcaaacagacaatatcaggcttagtgttatcaatcgcaacacgcactgagtctcttcttgccttattgttcagaccccttacattccaaaacaaaacctttgaaggatccatcggaaaaaaccaaataaaaccactaggtgctgtaagagcagcaaccttactcaaggtcttctgggccttgcccggcgatacacaacacattaacaggttcaaagacatctgggactgtccatccaaagagggctgacagtgctttgatatgagcttcagagagtgaatttttgaacaagttgccataagcttcaagggctttaggactaaacaactctccatcgcaaggcacatccaggcttcttatcaggtcagcttgaatctgtctgtgtgcagcatttgttttattatctcgctttgccaggcgactgcttctgcgtgggatgaagtcagatggaagttgcttggatcgtcttctgtgggggagtggtggagggagcagaccatccaccttcctggttactttgtcaacaaaagcttggactgcatttccaatatcattctgttcttgaggagaagaggcttgatttggctgaagggcttgaatgagtggggaatcctgagaatcatacttttgcctcctgttatcagctgtcctcctagtataaacttttagggacgtactgccctggccagttaaatttttattctgggctgcaactaaactgagggcccaagcaggctctggaggggacgaaatttggacgctcagttccagcgacccagcaatggtatgctggggcgaaaccaacgcaccagattccagcggcccatccaaaacagaaatgtccagcagataattacgcaggagtgagtggggcgaaaccggcccaggaaccatcagcggcccagacagctggggcgaggtttgcctggcccattccagcggcccaaccacttcaactgccaggagtgcctcattactgttgggcggctgtacgcgtgccccagacgtgaggcccgaggcagcctcgggacggaaacggttttttgcttcggcttcacccccgtagctctttaccccaacagccgccggccagaacccgtcccccgagagagccggcaactcaggaacaggaaggggcgctgaaaagacttcatcgtccaaagcagaaacctggaccgtcgctgcctcttcggatcttgttgcccttggaacctgaaccgtcactgtcacagcagatcttggcgcctcgggtgcaacgcttgtgccgtgattagcagagcccctaccacagtcattcacaggagcaagagggcccagacgttggtggatgggtcccctctgaaggtcttctcgccggcgtcgagggggtggagcctcaggacggcgacgatcgccatcttcgtgcctgttgtcgttgccaggaggaggaggtggaggggtcccatcagacagtggcttctcgactggggtgacagtcacttcaatactgtaggataaacaccgtttcacatgatccgctggcgttggctcaacaatgaccagattcatggcacgttgaagcttttctaactcgcaacaccaagcccgaagcctgaaggatgaaaaatctcttttcatggaagaatccgggtgcacatctgtgatccaacaggaattaccaagtagcagttcagctgtggaccgcccccaagcgtgcaacggaatcccttgtatctcgatgtcgaccagcgacggcaatgcggctgccgttgcatgagccagccttgtccagcgcttgaactgaatatgaaactgaggccctctgagaactcttcctccattgagcacctttgttgcagcctcctcatccgaaagaatcaggatgaagtcctccgggaaggtctgatgaatggacatggaatctgcctcgatctcaaaacttcgtgccacttcttcaatgacttcagagcctaacacctctggccttgtaccaatgatcgtgacaaacaaagcacggcaaaacgccgcctcttctcgtgccatgtcggaggaaaaatccaacacacaagaaggcctggcaaccaagttgtgagtggccgttgccggacgaacgtcgtcttctccaactgaaccggagggatgcttcacttgcgggtctgcccgacccccttttccgcgacgccttttcctcttatggggtatgtcactgccatccgccatggccagaggaggaggtacctctgaagacactggaggggagagacgacgccagaccggaagcttcgttggattcaactgagttgaattcgcctgagttggagccaaggcccgaccaccgccttccatggcaatacgctgccaaaccgaggtgcgaggcgtccgcgaacccagtctctccttgagcggcttcttctctttcttgaagtgagtaggacactgtgccacgcgatggcccagatgtaggcacccaaaacagcgagggggtctacgacacgccgccacgaagtgagaggtcgacaggcacttatagcacttgcctcggagatccacaggggacctacgacgaagctcacgctcaacctgccgagaccgcctgcgttccacgagctgccacccttcttcgtccctgctgtgttgagtagcaggacagcgctctgctactggagcagaggactgacgtaaagcctctagctttaggtcgtgaaccaccgggaatttctgcaccgccgggggacaggccgccttgatgggtcccttgataaccgcctcaagaaaggttgtcggagcctgggtaggtgaagaggagcagcgagtgccaaggcctccctgacaggacccccccgacgacgaggcaggggaggtgtcaatccaccgccgaagcttcggacgtcccgcctgaggaaggtagagtgacgccccacctgagggagctgctgctggagtggacaccggctccggagtggacaccggcagagggctgttggagacgccgtgagggcgggagatggggaggggctgggaggggtggggaggctccatagtcgcttggtccatgtacacctgatatgctcccttacaaaagtggagtatctaaaacttcaaaagactgtatttttagcaagtcatgagtggagtatctcagatttcaacaaggctaaaattttaactataccatgtcttggaaaactagaagattcattccatttgaacacccaatagctttccaatattttttcacaaaaccacagtagttttgcaatactcagaaatcacttcgcagcaagggctttagatgtttttatcgtaaaagggcattatatcattatatgttattcttcacccaaaaatgtaggcctttttagctttctcataagtcaaaatagaaaaatgcaccaacatctgcaacatcaaatcaaattaattcaccatgagatatgtctctagtgcatttattttgtattatagattgtatatgttaatatatttttatctaaactggatcaaagttatagaagttctaggacaaaagtacaaaactaaaaaccatacattttggaacgggggaatgtttattaattattggggtgtaaagtgatgcacatgcattataaattaccactgtagttcagatgtgaatcaatcacttagtttcttattggttgcagtatacttgccattttctctctttacttcagaatgcagaatctcactgtcaattttatgtgtaatatgctgcattgagtgcttctgcatcttttttacaattaaagtaagcattccttgccttaacattcatacggtaatattttctaataaaacagcacctggccttcctccacaagttagtaatccagca

SEQ ID NO: 344 - DNA, 1618 bp, Zea mays
  Intron number 1 from transcript GRMZM2G452523_T02 (locus G RMZM2G452523) derived from phytozome v7.0 (chr-ID 1; pos 1 96263910 to 196265527)
acgactcaccgctcctcgacctcctctttcacggggtacgtacacggttcacccgcctgtcgcacgtgacacgccatcccaaaatccacctctaaccctctgcttatgctcgggttttgtactggattaatggcctcgccgggaattcagtggaagattatgactttgaacttctggcagttgaaggtcgtagatggcaaggttatgtttaggtctttgggctgtcaatgctagatttgttgcattagatgaggtgctagtgctggttgaatgtcatttttttgccacatagtgtcgtcggttgggcaaatggcaaaaaatgtttcatttttgggatttttttcttgttgttctggatagcgattgcgattgacatttcagctcactgtggctttgtatgaggacacctggtattttatttgctttcccagatatcggaatatattaaacatcactccatgttcagctaacacttgatggatttagtacatagatagtattggcatctatgctacccaagttttgttaaatgttggtgatgagcatgtgggttctgtcaatttaggtcttaggacttttaaccagtggaaaaccccaattttcaacacttcaatagtgatgatgtcaacttccttgggttctttttgaacattgctacaaagtatctagctttgaaccccaaagacagacttttcatttcgtaatttttttgacctttttgcctgtgcaagaaaagactattcatacggacttggtgtcaattgtcaagcttatgtgttcataagttcgtaaaaaaagtgagctatttataagtccatctgtagtgttggtaggaaggtactgcccccaaggcactagggcatttagcaggttctctgtatagcctatagcgtggaaattcagatctagcatttccctcctagtcctagggtctttctgccgggttaacaaactttggcactgcagttaatgaaaagtttcacttttaggagtaggaatgggatgtttttgacaagttttcctaagatccacctcgagaaggctgtatggttgttggttcttctcatacctattgggcaagtgttggagcatcacataattcggtagagggagtctatagacaagtttttactactaggaatttccagagtttacctatcaaaaggctagttattgttgtaaaccatggagcgaagatcagtgatgacgatttgttggatttcatgatagcctgataaatgcaggccaataacaaattttgcatgagcgggactaatgtactattcaatatatttggtcaaagtaacatattcttttgatgtagaactattacatccatgagtgtcttgacccatcatggattttaagcattccttggagtaactccacagattgcctgtttgtaagatggaatagagatgggacaattcaaatggtccattgttcttttgacgaaaacaatgttcttttacaatatgagtttacctgtgatggaccatttagcattcatgtaactatgttacaatgcacaattgatagggtagcaacatctctgacatgccatttgttcttctaattgctgagcaactactttattttcaggctcaggtccacagaa

SEQ ID NO: 345 - DNA, 4074 bp, Zea mays
  Intron number 32 from transcript GRMZM2G439339_T06 (locus GRMZM2G439339) derived from phytozome v7.0 (chr-ID 4; pos 182583360 to 182587433)
aaaatgtaacttgccctaccactcttactatgtaactattttttgggctattttttttcagaatctatgtcatattttagtcacacaaatataccttttgactttttgagtttttgtcggctgtgtgcatgccacttacatagctcctggtcttcataaacaccttccttatcgaaacatgaagcctgagtttggatgaaatggtggtctattcactgtttcattatttggtagccgtggtgggcctgctgctgataagtcgaatatttatggaaaaagtccaatttactccccccaccgatggacaatgttcatgtaacccctaaggttttgttactcagtattcaccccaatccacgtgtattgaggtggattggggtgtaaatacacgtggattggggtgaatactagagtacccaaacaaagcctaaagtattttttagttcattttaccctccactcctttgagttggttcactttaccccttaacaaaacttgtttttttcatttctttttgtgcaaactgagttttcagttcagattttgttggttagtagataatagcataatataatctaggaaaatatattatgatttttacaattattttgataggttagggatttttttcttgaaaatgcaggaggataggttagggattagataaggtaataacttcaatggtactaaactaaatatgaaatcatgataaaaaaattaacatatttttctaacataggttatgatgtcctcgatcaccttagaaaatatgaacttgaattttaaattgtgcatggagaaacgaaaaggcaaattttcttaaggggtaagccgaaccaattcaaaggaatggaggggtaaattgaaccaaaaacattatgtgaacatttgtccatgggagaggggagtaatttggactttttcctatatttattgtcaatatatagatgtaattgtttttgcaaaattactttttgattacccatgttctcaaacaatattgttgctgattttaatattaaatgtgaacatctatttttatcattctcgtacaagtattttggataaccaaatccatgattgctattgttgctggttttaacaagcaatgaggctgattggttgcttgcattagccttagcctgcattaaaatatatgtagcataacctgagctaacataaaaatatccaatgagttgctgcacaggcaaacaacatttgataaatttgtatttggttgtttacattttgctgcctatattcacctccatgttctagttgaagtctcatatttctagtagcactattggggtaagaatatttcattttttgtgtgcgactggcttgtgcaaacctgcattgtgtaatatgaccaaatctagcgtactagctattgcagagaactgtgaaagcctgcataagagcctatgcaggcgaccgaacatgagcaaactgcactgtactgtacaagcctggataaaggctaatacaggcaaccaatcaaccagtcaaacccaatgtgatcaaagcttggttatgttaattttgcatttcttgtccgacttattgttattcctatttcatcttttatactcaacttcttgcttttgtggttttatggctgttttgggttattaagttgacgtgccacactatgaagtatgaactatgaagctatatgagagaatcatctgagagaaatagaggatttcggtttcatgcccagaaggttaaccctggaagcattttttttaataagacaagtgatggagcggtatagggatgagaaggtcatgcacatagttttcattgctttggagaagacgtatatgataaaataccaaggaatgttacatgttgggttttgaacaaacgtaaagttgttataatgaaatacgttggaatcaaaggcttatgacaaaatatcaaagaatgttacgtggtgagctttggacaaacataaagttgttataatgaagtatgttggagttggactcattaaagacgtacaacaatgttgttactagtgtgatggggacacatatgacttcctgaatagaatatgactacatcaagggttagctttgagcccttaccttttgtcctagcgatggatgaagtcacatgtgacatacaatagatatcccttggtatatgctttctgcggatgatgtagtgctagttgatgaaagctgggcaagagtaaattggaaactagagttgtggctagagactctagagtccaaatgttttagatttagtagaattaaaaccaaatacattttattttttgacttcggcactactacaaatgaggaaggagatgttactttggagggttaagtagtggttaagaaggataactttcaatatttcggatcagtgctacagagagatggagatattttttatgatgttagccctagaatcaaagctgagtggaggaagtgatgccaatcatctagtttcctatgcgacaagagggtaccacgtaagctaaaaagcaatttttataggatgatgattatacctgctatgttgtatggtggagaatgttggcctacaaaaagacgttatgttcaacagataagtattgcgggttgcgttggttttgtggccatgcaagaagggatcgagtttttttttggaacgacgcaagagagctgcatgtcattttattaagcaagggaaaacatgtgggggacgatgccaacaccatacagacacagtctcagtcttacaaacacaggcgcgccacactcaggaggaaaaaagacctaaacacaaccagggggactgctcaagaacccagccccaccaacatcgcacacagaaggctaagcgctgaattaccagcaagacaccacaggttgtcttcctgcacaattttacgacagactaaagccctcaaacacacactcattcctgtgtttccagactttccaggctaccaaaatgatcgaggaattcatgcccttgacctccttaggaacttgattgattaccccaaaccaccagcctgaaaaactccttccactgggctgcgggatatgtgtaggcagccccaagcaagtgaataccatggcccaaacttcacgtgggaaaacacaggagataagaagatgctgcatggtctcctgctcctggtcgcaaagaggactgataatagaatgcgggagcccacgtctagccaagcgatccgccgtccaacatttattctttaacagcagccagatgaagaatttgcaccggaggggtggccagcttttccagatccttttccaaggcccaaatttaattgtccctaagaagaaaacccgataagcagattcagattgataagagtactcagatattctcagatattcgaccaaacgaattgatcaagaactcctggttgcagaataacagcatcaaccaactccaaaattctcagatattcgaccagaacttggacagtaagccccccgcacggatatcggtaacccatgtatgattagatatatacgtggtaggctaggggtaacaccaattgaagaaaaacttgtccaatgccgtttgatcgaatggaatatacccaaagatttagccttgaattggagcgaatggaaaacaactatccatgtgcctgaacttgatttgtggcttgtgttgggtctcagctctagcctaacctaacttgcttgggacgaaaagatttcgcttgtgttgttgtatgcctggcttgggttcccagaatgccacctctgttttctttggtggactttgagtttatctatattctgtggttttctaatgctataatatacttttaatgctgggtatatcgttagcacatgtgttatttttgttaaattttgattatatatggttccttattttgcgagaagtgagcaaagcaatcagaaataaaatcaaatttggcctcttcgtgcattttttttgagaaaaaatgtatcgatttcttgatgtgctaccgcctaccggtgtacattatcaatgttgcattgaattttgtagtttccattgttctgtttcttacgtaactaattcatactgcaatcatttcagga

SEQ ID NO: 346 - DNA, 1459 bp, Zea mays
  Intron number 1 from transcript GRMZM2G470292_T01 (locus G RMZM2G470292) derived from phytozome v7.0 (chr-ID 8; pos 1 39878042 to 139879500)
accggcctctccgcggcctcgcccgtgagttccccctcctttgctcctcattacacactgttgcttctcaggttgggagcgtgggcgcgcggcgctgttgctgagagctgctggtgtggtttgtttgcttgtttcggattgggtcggtggattggattttggattcggctgttgggctgcaatgctcgcttattttgaatatttcccttggagcttcgtgctggaattagtgtacgagtgcgctgtggctgcgagatgtgtgattttgcatcgatgtacgtgtatgctgttcccgtggatttgagggtgccagtggggtcagagcttgtgctgctgaaaggaatgatacgccttggttctgattgggcttaggtttcggggaggactgaatcatttgtgtgtgacaggagattcattttatggcaaagaggaggctttgtttgttttgttatgctgaacctattatcttgtggcattctgtttcatgaacttttgtgatagacaattgtttgttatgcatagggcactgctgctgctgcagaaagtatttgcatttcacgctggaatagtgtaccattgcaatatgcccttgccaatatatttctttttagttatgctcatggaaatgccctcgttggatttactgggattaaattctgttttgttcactgcatagtcacataatatatacaatggaataaaaatgatgtgacacctgtaattttatgtacaagcttgcaacttaatatatatccgattttgtttttgaagtgattcttgaacttgatcactttcattgtaaaccattcttattctttcgatggtcagtttagtcactgcaaatagcttgatccatggaggccttgtgttttttactcatttactattaaagagagttattaattcagggccgtgtctgagactttaggggctctgggcagaaccatatataaaaacacattttgatagaccgaacgacaaaacacaatgagttagctattgcctatggtatatgtgtacatgcgaaggtcgattgtcgatggcgtgtcctggcgtttttgtagttctgtctggactctccagtcctttggagacgtggtggcggcaacacgacgggaattatgttttctagatgtattctgttctgagtactgacttgaaaactggcttacttgagcaggccaacagctgcttctggcttatgttagtgagcaagataacaaaggctggattgcccgcttagcataggatggttgagtcaaccaaacaaacactgtttggacaaattaaataattaagtactatacttaagtatatacttgaggggggcaatattttcggggccctgggcggccactcggctcgaccccccacaggtacggccctgtcttaattctgttaacttagtgctttattttttccaggtggatacaattcttgacaaagaaaattttacatt

SEQ ID NO: 347 - DNA, 19525 bp, Zea mays
  Intron number 1 from transcript GRMZM2G011590_T01 (locus G RMZM2G011590) derived from phytozome v7.0 (chr-ID 10; pos 149370465 to 149389989)
cgctcgtcgttgccgaggttagtggccgggtgaggctccctcttcttctccctttatccctcttcttctctggctgctccctccctccccacgcattcttcccctcccctgcagcgcggccaagcctggcaacctggcacggtgtcgcggctttgcccgtggtaaggcacctcctcccagcgagaacccgcgtggcgcccctgtcctgttgccccaacaagcgacgtcgtctgcccattctagccatggccgaccagcccgcccagtccctgctccctccctaatcccgcgcggcggcgtgctcggcgcccagctggtagcttgccttgcgcctcgtgcctcccctgaccgagcggcctgcttgccgcagaagagagatccaggacgcgtccggcccacagccccgcccctgcgcagaaatcccagagccggttgttcccctgtgtgtgtgtgcgtggtgagaggttgaagaaagggagcagccacattagatcctactccctttcatcctatgtggttgtgtccccatgtgacccttcatgtggcttcggttcaaccaactagttcgtgacacgtcacctataatccgcggaatattattcattcagtatatgttgcgattataaatacgttttggaccattctaattacgctaattccataaccacgtcatctgcatattaaaatattattttgtcatatcgtatattttaaatagttatttaatctcttgtctattcaatgattattaaagtagtgttgcaattaaaattaatctatattcttactttgcgattttaaaatacatgttaatattattatatcaaatcaaatgtttctgaataggtacttacttagtatagacgcaatatatgcaatgctcgcgtgtcgcgtgtgtccacacgacgttcgtgcgtgctgttcacgtgtcatcgttcgcgcgagtcgcgattcgcgcgctttaataaaattgtttattacctatgaattgttagctattccatatataatgcgccataatcctgtttctattcgtttcagtggctttaacttcgtaacctcgtcgtcaacctgctagtaacgttatttcctcgcgcgtgtcgtcgcgcgtgctattcgcacgcgttgccgcgggttgttttcgcacattgtcgcttgtcgcgcgctgtccgcgcgtaatattaaatcaacggttcagtaaatacacgtgaacttttatggtcgtccgatttactctattctaattgtttcaccttcacaataatattatgtacacgttaaaatattattttatcgtacctcatgctttagttaattaattaattaattgtcggccatgctttagcataaatcgataaatgtagtgattctcgtgtcgtcgctgtctgtgggcgtcgtcgcgcgctattcgcgatgttgttcacgcgcgtcgtcgcgtgccgtccacgtgctgctcgccctaccacgcgtcgttagcgcgtatctcacgtgtgtcacgtggcgtccacgcgtcataatatattgttttcgttaaatactcatgagtataacacattcatctggtcgcatattctaatgaatttgtttaatgtttgctcgtctaatgtttattagattagtagttcaattaaattaaatattaaatatatatagttgtcaacttgcgtttttataataaacattaacatgactaatatcaacttaactaccttttatttatttaatattcatttagtataaacgtctcacctattttgtttttttgcctgtcgcgcgtgtttttccgcgtgtggtggcgttctcgttcgcgctggtcgcgtgctgtttcgtgtgtcgtcggcgtgctatgtcgagcgtgtccgcgcgtctttcgcacgttgtcatgttgtttcgctcgtcgtaaattcgcctcgcttagaatctctcgccttaattaaattactggtttaactgatagccgctaatgtaacaagttaatcaaaactaaatggtagatattatttatatttgataatgtcgaattaaacgttttagttaatatttatttagtgtaaacgttacgacttctcgaatgtaactttgaccgtcacgtttctcatccccgcgtaaccgtagaagcgctctctattttatgctgcatgtttttataacatcttatctcgtatggtgtaatgttcttatgtatatgtttatttgcttgtgcctgttcatctttgcttcgcgtgcgattagatcgcgattcgtttatgagcttcgaggaatcgatgatcaagcatggcgacagagtgatcgaactcttcgagttctacgtgattgaagaccctgagcatctgtttggtgaaggcaagtgtcctctgacccattatgtcccatttactttataatacactgtcccacatactatgaacaacctaaggatttactagctttctatttaccttgtccttgatttaccttttgggttactatggttagctacatgctagcgctttactttaatcaatgaacatgatgagatacaatgatgatgctatgattttattctggatatgatgatatacttgtggcatttaggggactcgggttgtttcccgagtacctctccgtaaggacctgttcgttgagagaccacccgggataacagtgcaaccatgagggtgaaatggggcgcccttagctaattaattagaggaactagaggtgtggttgcttcaccgtcgtgccgtcaatggggtccaggcacagtgcttgctctgccgaggctgggtgccgaggttctttcgttttgcttttgttagtcacccccctgcggggagtggtactgtgtttatcaaactggagaaacctaacgggcggctagtacctctagggaatctttgtaaaagctacgtagtgataccctgccggaccacctaggaagtgatcaatggggagtcatgatccccgggcaaaacgggaatcacggctcatgggtaaagtgtgcgacctctgcagagggtaatgaaactgatatatcagccgtgctcacagttatgagcggccttgggatcctctttgattagaaatacagatggttcgagatacaatggttctatttatgattttggttcgatgatgataatgatgttcctcgaggaggaaatggttcacgggttggctattactaaaacttggcttccactaataataaatacatgaccaactaaaagcaactgcttgagcttaaccccacataaagctagcccacttgagccaaacgggacacttgctgagtacgttgatgtgtactcacccttgctttcataagacaccaggtgccttcggtgcaatctatgcttaggtaaagaagaatgcgtcgaggcggatctccaggagttccaagacttcgacgagttcgaggattaggctagcgacctcccccagtcagctgcctgtggtgggtttatttacgttggctacgtttctattctgtgtactttgattatattatgtaaatgactctagtctttaatattattactcattctatattgttattcgaagcattgtgctatgatgagtcatttatgtaattgttgtgtacgtgaatttctgatcctggcacgtacatggttcgcattcggtttaccttccaaaaccgggtgtgacagcgatggctcaggcgcagtgctgacatcttcctttgaggtggagatccttcccccgtgtcgacgtccgaggccgggtcagattccaccgaaggtggagacgatgccgagggtgctgctgctccccctattgatgtctgaacctgcaagaacaatttgtctgtagtgtgcgtatgttttttgcggccgccgaggtccaaacatatcatggtcgtgttataaagttgtgtttcttttcgctcccgtttcaagtatccggacttgttcgtcagtagcagaatcgcttatccgagcgagagttacttttcacagaaggtgatgagtgaggtatccatatcctggaggcgtaggagttcctcgactcggtcggccttgccgcttacgtgtactccgtcattttcaggattccactatcgaagtagtcgaaaagcgcgaaagacgttctgacagaaagactttttccgaggaaaattttgacgcagagggggttccccccttctagccccgagggagggtcgggctttgccgaggcaaggctgacccttccttgacggttagactctttttgcgtatgtaaagagaacgaggtatgtgaacgacttgaaaacatcttaagggtaaaagcgacgtagctgtcggatgttccaagcgttgttgtagacctcgccttgactgttggccagcttgtatgttccgggcttcaaaatcttagcgatgatgaacggcccttcccagggaggtgtgagcttatgacgccctcgggcgtcttgtcgtagccgaagcaccaagtcccccacctggaggtctcggggccgaacccctcgggcgtggtagcgtcgcagagactgctgataccttgccgagtgtagtaaggccatgtctcgagcctcttccagctggtccagtgagtcttctcggctggcctggttgcttcggtcgtcgtacgcccttgtcctcggggagccgtattctaagtctgtgggcaagatagcctcggccccatagactagaaagaacggcgtgaagcccatggctcggcttggcgtcgtcctcagactccagaccaccgaggggagttccttcatccatcgcctgccgaacttgttgaggtcgttgtagatcctcgacttgagtccctgcagaatcatgccattggcacgctctacctgcccattcgtcatggggtgagctacggtggcccagtccacccggatgtggtggtcctcgcagaagtccaggaactttctgccagtgaactgggtgccgttgtcggtgatgatggagttcgggaccccaaagcgatggatgatgttggtgaagaacgccaccgcctgttcggacctgatgctgtttaggggtcggacctcaatccacttggagaatttgtcgatagcgaccagcaggtgcgtgaagcccccgggtgccttctacaagggaccgacgaggtccagaccccacacagcaaacgaccaggtgatgggtattgtttgcagggcctgagcgggcaggtgcgtctgccttgcgaagaactgacacccttggcaggtgcgtacaatcctagtggcgtcggccaacgcggttggccagtagaaaccttgtcggaaggcgtttccaacgagggctcgaggtgctgcgtgatgaccgcaagcccccgagtgtatttcttgcaatagctcctgaccttcggcgatggatatgcatcgctggaggatacctgaggggctgcggtggtagagctctcttttcttcacccagcaagacgaacgacctggcgcaccgcgccagtcgctgagcttcgactctatcgaggggtagctctcctcggtggagatattgcaggtacggggtctgccagtttcgattaggcgtgacctcattccgctcttcctcgacgcgcagtgcctcatcctcggtggccgagggtgcctcgggctgagccaagggtgcctcgggctgggccgaggcctcctcgggctcgggcgtgtcgtcggtcttgacggagggttgatgtaggtctcgggagaagatgtccgggggaaccgttgtccgccccgaggctattttagccagctcgtccgcggtctcgttgtatcgtcgagcgacgtggttgagctcgagcccgtagaacttgtcttccaggcgccgaacctcatcgcagtaggcttccatcttcgggtcgcggcaatggaagttcttcatgacttggtcgatgacaagctgcgagtcgccacgagcatcgaggcgccgaacccctagctcaatggcgatgtgcaacccgttaacgagagcctcgtactcggccacgttgtttgacgccgggaaatggaggcgcaacacgtagcggaggtgcttcccgaggggtgagatgaagagcaggcccgtgcccgctcctgttttcatcagcgacccgtcgaaaaacatggtccagagttccggttggatcggagctgctggaagctgggtgtcgacccattcagccacaaagtccgccaagacttgggacttgatggccttccgaggagcgaacgagattgtctcgcccatgatctccaccgcccactttgcgatcctacctgaggcctctcggcactggatgatctcccccagggggaaggatgacaccacagtcaccggatgagactcgaagtagtgtcgcaactttcgctgcatcagaattaccacgtacagtagcttctgaatttgtgggtagcagattttggtctcggacagtacctcactgatgaagtagaccggcctctagacgggcaatacatgcccttcttctcatctctcgactacgatcgcggcgctgaccacctgagtggttgcggctacgtagatcaagagggcttctccggcagcggggggcaccaatatgggcgcgcttgtaaggagcgcctttaagttcccgagggcttcctcggcctcgggtgtccaagtgaagcgctcggtcttccttaagaggcggtacaggggtaggcctctttcgccgaggcgcgagatgaagcggctcagagccgcaaggcatcccatgaccctcagtactcctttcaagtccttgatgggccccatgttggtgatggccgcgattttctccgggttggcctcgatgcctcgctcggagacgatgaaccccaggagcatgcctcagggtactccgaagacacacttctcgggattgagttttccgcctttcgccttgagacacttgaatgtcgtttcaaggtcagcgaggaggtcggaggctttcctcgtcttgactacgatgtcatcgatgtaagcctcgaccgttcagccaatgtgctctccgaacacgtggttcatgcacctttggtatgtcgcacctctttgatgaaccctgcagccatcagcttgtggatttccttgcctatggctctgcgcttttcttcgtcgaattggtgcagagtgctcggcgacatcccttggtatgccaggcatgtccgagggactccacgcaaaaacctcggcgttcgcgcggagaaagtcgacgagcactgcttcctatttggggtcgagctcggagctgatccggacctgcttggaggcgtcgttgctggggtcgagagggacggacttaaccgcctcagctggctcaaagttgccggcgtggcgcttcgcatctggcacctccttggagaggctctccaggtcggcgatgagggtctcggattcggcgagggcctcagcgtactccacgcactccacatcgcattcgtacgcgtgttggtacgtgggtccgacggtgatgaccccgtgggggcctggcatcttgagcttgagataggtgtagttagggacgaccatgaacttggcgtagcatggtctccccagcactgcgtggtaggttcctcggaacccgaccacctcgaacgtgagggtttcctttcggaagttggagggagtcccgaagcagacggacagatcgagttgcccaaggggttggacgcgcttcccggggatgatcccatgaaagggcgccgcactggcctggatcgcggacaggtcgatctgcaagagctcgagggtctcggcgtagacgatgttgaggctgctgcctccgtccatgagggccttggtaagcttgacgttgccgacgacgggatcgacaacgagcgggtacttccccaggctcggcacgcggtcggggtggtcgccttggtcgaaggtgatgggcttgtcggaccagtctaggtagactggcgccgccaccttcaccgagcagacctcccggcgctcttgcttgcggtgccgagccgaggcgttcgccacttgcccaccgtagatcatgaagcaatcgtggacctcggggaactcctctgccttgtggccctccttcttgtcgttgtcatggcttctgtcaccttccgccgggggcccggccttgtggaagtagcgccgaagcatgacgcactcctcaagggtgtgcttgacggggccctaatgataggggcacgactccttgaggatcttgtcgaacaggttggcgcctccgggaggcttccgagggttcatgtgctcggcggcggcgataaggtctgcgtcggcggtgtcgcgtttcgcttgcgacttcttcttgcccttcttcttggtgtctcgctgagcggacacctcagggacgtcttcctgctggcgcccctgaggctgcttgcccttccggaaatggcctcgaccgcctcctgaccagaggcgaacttggtggcgatgtccatcagctcgctcgccctggtgggagtcttgcgacccagcttgctcaccaggtcgcggcaagtagtgccagcgaggaacgcgccgatgacatctgagtcggtgatgttgggcagctcggtgcgctgtttcgaaaatcgccggatgtagtcccgcagggattctcccggctgctagcggcagcttcagagatcccaggagttcccagggcgcacgtatgtgccctggaagttgccggcgaaggctttgaccagtcgtcccagttggagatctgcgcaggaggaagatgctccagccaggctcgggcggcgtcggagaggaacagggggaggttgcggatgatgaggttgtcatcgtccgttccacccagctggcaggccagccggtagtccgcgagccacagttccggccttgtttcccccagtacttggtgatggtagtcggggttcggaaccgggtcgggaacggtgcccgtcgtatggcccgactgaaagcttgcggaccgggtggttcgggcgaggggctccgatcctccccgctgtcatagcgtccctacgcctggggtggtagcctcggcgcaccttctcgtcgaggtgggctcaacggtcgcggcggcggtgctcgttgccgaggcgacctggggctgcaggcgttgcatcccgcgtgcgcccggtgtggaccgaggcttcccgcatgaatcgggaagtcgcggcgcgatgctccggggggtacccctgccttcgggaggcagagcttttggcccgtcggaccgcggcatcctccaggagattcttgagctctccctggatacgccgcccctcggtggtggatggttccagcatcgctcggagtagtattgctgctgcagccaggttctggccgaccccactggaagccgggggcagccttgccctggcatcgtcagcgatgcggtgctggacgccctgggccagatgacgcgcttctccggctggtgctcggtctgcccactcctgcccgatgttctgccggagctgcacaagttgtcctgcttcctcgtcgagcctggcctgcatctcgtggatttgctcgagctgtgcgtcctgaccccccgcagggactgggaccacaactagctcccgaaggatgtcaacgcgaggcgcaggcctagggggatcgctgtcctccggcataccaagatggttgccttcatcaagaccccctagatcgacgtggaaacattcgcgacttgggccacagtcctcgtcgtcaaggctgtggccatcattggagtaatcggagaggcagtagtcatatgcggtcatgaagtcccgcatggcactggggttatcgatcccggagaaatcccaaccatagtcgggctcgtcatcttcctcggaacccaggggcccgtaggtcgagacggtcgtcagtcggtcccaggttgaccacatatggtacctcggaaggttaggatacgcctttatgaaagcgtcaaccgaagcggggtcgctcggtgggtcgaagctgaatctaaaaggcacagggtggaaaacggacggtacctcttgatcgacggatgttgacggagtcgcgtcggggacggactgcaccgtgatctcaggtacgaggctaacgcccagcaagtccttcgcgagcgtgctggcatcatccgtccgcttggggttggtgtgttgcggggaaacgatgcttgtcttcgtctcaaacgcgaggtcaacgcccgacgtgtcccccgctggggcgccggcgtcgtcgactcgctcgacagccaacgaggtgccgcctcctgcttggccatggctgtcccgcctcctcctcctgcggcggagaaggtgatgggacaggcctggatgctgctcttccgccatggagggaagacgtcgtcgattccgccgccggcgggcgggctgacggccgccattgtcgttgtcgcgcggcggaggaaggagtaccatgtcgtagctgccgtcgagggacatgaactcgagactcccgaaacggaacatcgtcccgggctggagaggttgctagagactacccatctggagcttgacgggaagctgttcgtcaacacgcagcaggcccctaccttgcgcgccaactgtcggcgtttcgaccccggggggtccctggaccgacgagtaaactgtcgctgcgtgtcccagcccagatgggtcggcgcgagatggaacacaagggggaaaaccgcggctcgtgttatcctgcgcccagggcggatgcacttgcagtagggggttacaagcgttcgcgagggagagagagagactgtccgtcggcccgtcctcccgcgcggccaccttctcgtacgagggccctggaccttccttttatagatgtaaggagagggcccaggtgtacaatggggggtgtagcaatgtgctaacgtgtctagcagagaggagccagagccctatgtacatgccgacgtggctatcggagaggtgttgctgccatgttcatgtgatgtcgtggccatcggaggagcgcttaaaccctgtagaagtacagctgtcgaggctgtcggatccttgctgacgtctccttgcttctgtagggggctgagaaccgccgtcgtcatggagcacgcggggtgccatcattacttgtttaccggggcgagccagatgggacgccggtcttattccccgtagcctgagctagctaggggtagggtaatgatgtaccccctgcggcgtggtcggtccgagcccgaggtcgggcgaggcggtgactcctccgaggtcgaggttgagtccgagccctggggtcgggcgaggcggagaccgtcttccgaggtcgaggttgagtccgagccttggggtcgggcgaggcggagaccgtcttccgaggtcaaggttgagtccgtgccctggggtcgggcgaggcggagaccgtcttccgaggtcgaggtggagtccgagccctggggtcgggcgaggtggagcttcctatggcgcctgaggctggacttggctgctgtcagcctcaccctggcgggtgacacagcagtcggagcagggcaggcggcgatgttttcctgtcaggtcagtcagtggaggggcaaaatgactgcggtcacttcggccctgtcgaatgaggaacgcgcgtcaggataaggtgtcgggtgatccttgcattgaatgctactgcgatatggtcggttggcgtggcgatctggccaaggttgcttcactgcgaagcctgcccgagctgggcctcggacgagtcggaggtgcgcccgttgcttgaggaggccctcgggcgatgcgtgaatccgcctgggtctactgttcctgcccgaggcaaggctcggacgaagcgagatcgtgtcccttgagtggacggagccttgacctgaatcgcgtccatcaggcctttgcagcttgtgctgatggtgattaccagccgagtttaggagtcttggggtacccctaattatggccctcgacaaaatcattccaaagtttaggtaatataaatattaagtaattttaagtaacattaagttattatggcgtccaaacattaagtcattttattaaaaatttaggcaacattaagtaattttagttttcagacactttttatgttttctgagacattttttgtttttaagtcggtcattcctgtcaagtcaattttagaaaaacattaagttatttttcgatttcagtcattctttagatattgttgtttttttgtcattctagagtatatacaatattaagccattctttattttttagttatttttcggttggctcgatcgaacgggctggcgcacgacggctcgatcggctggctaggcaggctcggggccagccgcgggggcggctcggtcagcaggctggctcggacgactatagggatggcaatgggtacccgaaacccgaaacccgatgggtaaaaaccctattagggcacgggtatggcggattttgatactcatgggtattttattgggtcatttgttatgcccatcgggtatggtgggtgtgggtatgttctctgttgccccatacccgctacccgatggggaacccgctaatatatgacacgtgggtccgaatttatatgtctcatataaaatgactatgttttgtccacaattttgtagaatcaatgctatgttttgtgtgatttggaggcatgatattgccatttaatgttgaatattgttgaacatgtgataaaattatgttgggttcgatacatttgttatgcaggtacttatttttgcgattcaaatgatcatgtctatcgtaatgttaatgggtacccgctacccaaggtgggtatgggtatggcgtaattttgtatccatgatgggtagtgggtatgagtatgggtatgacgtaattttgtatccatgatgggtagtgggtatgagtatggatcaattttttcctagtgagtatgggtatggcttcgtgtgcccactgggtatcttacccactgtcatccctatacggctagctggacgtgtgcgcgtcggttgggcgggtcaggcgtgtctggtggtactcatcagcggataaatagatgtgccaccaatttccgaaaagatctgtcagccgagccaagttccgaatgggggtggcttggcttggctggctacaagtcactcaaattgaaataagactgaaacggacaaaggcaaacacagcaagcaaagcaggaatcggaggtagacgacgaccaccacggggataacaaccaaacctcccaaataccatccacgaacgaaagggaagggaaggtcgtttaggcggcgcgccgaggccgtggctatggaccccaacggcggcggcgacaccatcctcggcgatcccctccttcccctctcgcagtccagcaagcagcagcaggatcctctcgccggcgtctccgactaccttgggcggtccgtgcaccgcggaagctccgggggatggagatccgcgctcttcgtcgtgggtacagtatttgcttgctcttgtttgtttgaaactggatatccaatcggccataataatcccccgccccgcctccaaattaatcaggcgtcgagatcgccggtagcttcgcctacttcggcatctctgccaacctaatcacgtacctgactggtccgctacgacagtccaacgcctccgccgccgcctccgtcaacgcctggtccggcacggcctgcatcatgcccctgctcggcgccttcctcgccgacgcctacctgggccgctaccgatccgtcatcatcgcctgcaccctctacgtcctggttagtaatcatcacctgtctgtctttttgattttttttgtttgtgctactgctcttaattactgttgctgctgctactactatattcatattctgctctatgaaacgaatggtgtgcttctccgtcgtcttctccatcgtcactgcataatacccgccttctgcaatgtaactgaacacggcactctgctccccggtctcaagctcagctagctcagtagctctacctaaacacgcacgtcgttcgcaattataagtatcataaggaaaggatccctcgatatattacccggaactcaaaccaatcactcctactagtactactgtacctatcgattttttttttctgcaaacaaaaaagaaaagaaaagaaaaagaaaagactctgaccttactgctaccgtgtgccgttattactgctgctgtccacggattgattgcgattttgtcgaatcaaaatatctttatatgtttcagtccacactggtcttggccagtcgttgtcggccatcacgtttgcccgctcatcctcatccatccaccaaaccagatgcgaatagtcccctctccatccattccttctttcatcactagtaccctgtctttctctcggttcatcaattgaatgccctcattttcatcaaggcgactgatgtactcctcacatgcggtgtcacgatcaggaacacggattcttgtgacctcataattctaaaactatgccatgcctttttttcttctttttttaagacacaagggaacaaagttcagccaaatctgtcatacctaatggtacatcggtatgcatggcctatttaagttataattaaaatgttttcaaaattataactaaaacattgtcaaattcaatttattttcatcgattttgaaatactccatcagctcacaaatatgatgtcgttgagtttttttctaaatctttgaccacttattgtattcaaaatatttattcgaaaatataaaattttaagccacgcttaaactactttaagtgataaaacaaagtacaacaaaataaatgataactcacaaattttttaatgagacgagtggtaaaatttttggtcaacaatgccatatatttgtgaaccgagctagtatttttagatgcaaagttgaagtattgttttttgagatttatggtcagatttatgtcgcagttatatttcaaactttcatattaaagtgtggataagttacaacaaaaaatgataaaaagagtgcaacggtgcaaaagtatcagggccggccctgagggggtgccgtgggtgcggccgcatcgggcccccaaaaacagaagaccccctagccactggatgttagcattttttttgttaaatctatctattctagacacaaatacgtaaaaagcgatgcactatcaagttatcgactagtctcatttatattgttaaactaatgcctcaattacttatcgaatacttcatccgtttcaaaataatatttggtttagctcttaatttttatgtttatattgatgatgataaatccactaaagaagcaaaacaaattctatttcgatatagagagagtattataaactatacatatgatggttgcttcggtagagagaagctttttaaaattaaaaaaatgaactatttatggtcaacaataactcaagagaggttaaatggcttggcaattctatatatcgaaaaaaagttgttggatgagattgatctcgatgatataagcgattactttgtatcacaaaatgttagaagatatttttaataatatcatataacaagtaagtgttttttgctatattttatatttgttatcttataaactttaaaacagtgcataataatttttatacgtcaaatattcggtgatatatgtataattatatatatttgtgtgtggatggggcctctatatcgaattttgcattgggcccctgaaaagccaggaacggccctgaaaagtatgaatggcttttttcaagctctgataacacaataggggaaaattgtctcttcatttcaagaaagaagcagtatacatgtaaactttaaaaaataaggataaaagtagagttgcaccctgactagggacaaccatacaattccctagggctggacgaaatactcgtggctcgataactcgcttgactcggctcattagtagctcggctcgactcggctcgttttaattttgtagcgagccaagctagcattctagctcggtcctctaatgagccagcttgggttagctcgtgagctagctcgcgagccaaacgagctaagccacaacacaagtttgtctagtcgttggtgtcgtctcatctctcataatcttgttttctcattgttatgatatgtgatatggacatgtgtggatgtgccatgtgcttaaatatttgtattattgcatggctacatgtttgtagtgttaaacacttaaaatatgattttttggttatacatatatttatgtatatagatctttatatttagttgtgtggctcgcgagcctaatgagctggctcgagcttcctaacgagccgagccgagccaactgtttagctcgttagtataacgagccgagccgagccgagctggctcgttacaataacgagctataacgagccgagccataacgagccgagctggctcgatatccacccctacaattccccatttaaatttttaggaccgctctcgccgtgttatggtttgaaacaaataaattggtatatctttctttttctttaaattggtatatcttaagaagaacaaaggctactagtacaaaagacgggcaacaagaacgacatgaatgtgttacatctccggctagaccttgtcatcatagtatgacactaggtaagtattgttggagcgaaggcgaagacgttatccttcgcgcgaagccttcgtcgcgtcgccacaccaacaaacgcgtgacggctggcgcggtcacccttcgtcctctccatcgcaagacgaaggccaggatggctggcgcggtcgcccttcgtcctctccatcgaaagacgaaggccagaccccgacgaagtccgccggtcccgcgtccctcatctcgcccggaggcccacgtggaattcagcccactgtaacgggccccgcgtggacaggcaagttacgggcctcatttgtaatagcttttctgtaatgacggtctgtaaccctcctttatgggaatattctgggataatccgggtacccgaggacataaccgtccttgccttgggacgttcgacgctcgggtacctataaatacccccgtacagtgcccttgagaggccagattaacggagctattgcctttcatcgtcaaaccttgcgttcactctcaccactctcccgttggatctacttgcccaggagagcaagttccaacaagtatattaccatttaccaaaaagatgagagatttggaaataacaaggacgtaagtgagcagtatacaaccgggtaccaacatgtgggtagtttagataggttcaggttcccgtgtgcgtaattatttgcatcctattatgaacgatgaaatgatgaacacaaattgaagaagattataaacttaataatcaactaaacattgtaactttctagctctcttaccacttggttgtagtgagagttctagtctatcgatctctagttcacctatacctactcttagatgttgcactctcttagatcatatgaagtgatgtggcctttatcatagtcttttaggttaaaagttaaagagagattgtgcgttcgtgagagactgacaaagtccccataaacgttactctgttcccctttataggccaaaggaagagcagtcgtaccacgaatttggtcaactaagacccaataatcataaatcttatcctagtcgtgtggtcttacgtagaaccatgccttcggtcgtggcataggttgtgtcctactttagtggtagtcatactgttgtaggtgtagatatgttatgttcttttatcgaatagtagagtccacgccatcaaatacgacgtagttggtaaccaatgaaacaatctatacttgataagagcaagtataataaggtgacgtggacgggctgcaagagatggcacatggaatttatggtgacatagaagaaagagaaatagagagagaagagaagtcgactgcttgctagtagccatcagaaagtggggttgctcatgaacttcattcaaatcattttgtgagaggaagaggtgaaagaagtgttaaatgtataacttatattatgagagatttattatatgactagacttttatttggttatatgtgacatcataaaacccattatgagccatattattaaccttgctctaatgcttccgcccgtgtctacatgattgatgcatgtatgatatagtggtctcgagcagtgtgatgtttgagttatggcgacagtgtgtctgttagactctaattacgcatatcatatttaatgtatgaaaaccttatctgaagcaccagcgttatgagaccgttaggagtagatttttgacgtggcatcctatctttggggttgtcatgcctttggtgggggacaactatatttctttgacttgcaattgccttttatattttatccgctataatgttgtctccatcattcttacatatccgcactttctatttcaaacttcactatgtaaacagtacaatctacaatgtaaagcactgttttgcatggtctgctgagtatagtctaagtcttttctccctaagggatgtcttgggacccgaagggctcgagcctagaggttgaagttatccgaggttgaggacctttagggcatgttcgggagaagatgattgagggggctaaaatccactttctattcaaatgaatagaaaggttcaaatgaatagaaaggggattttagccccttaatcctcttcctcctaaggattttgtagcatttgaggtccgaagggcccgagacttgtatcattctcggtagaatcacctcatggccatggcgctgtggagtcttagacttcatgccattagattagaagtccctagggaccttgggccccccggtcttaggccattcttgtgaacgatggtggtttatgaaagaacttgcgtgggagcgctaacgatggtggtttatgaaagaaacttatgtgggagcgccccaaggtcccgaggcattttggggagagccgcgtgcaaagatcggggagttaggtgaagctacgttttttcgattcccgtggtagatcgacagacaccatttgttcacgggagctttggaactgcacctggagcttatccaattccactgcgcatgctatataataatctggcaggattttgtagctgaactggtgtctaaggctggaaaaaagctcgagtttcacgagccgagcctgtttttgagctcgccgaaggagtgagccaaaccgttcaagcttgcgagctgtgctaaattaattaatttataaacaacaatggacatgggataattctatggataataggatcgtttcttagcttttgatgatgaatttatgacatttcgtaatttatattactcataatactgaatgatgattttatattccacatttatatatttttaattattttataatacaataatattaattaggacatagctcgcaaaccaacttcgagtcgagtcgagcctaattcttgaactcgtgccatgggcgagccgagctcgaacagccattacagccctactggtgtccagcgatttgcctgaacagtactgttaatcgggagtaatacttatataataatacaattacagtgcgtgcatatgtgctaacaatcgttaatggtggcagggtt

SEQ ID NO: 348 - DNA, 1310 bp, Zea mays
  Intron number 4 from transcript GRMZM2G027875_T01 (locus G RMZM2G027875) derived from phytozome v7.0 (chr-ID 5; pos 1 55952702 to 155954011)
agcctgctttcaaggtttgctgctttgatttttttctcaaatccttttgttcttttaggcacaaagatatgagtgcttttatttgcattacatgaagagctagaaccttttgtgtggcttacggggagggcatcattcaagcttcacactttgttttctgtctactccctttgattttttggtgttgtcttatgtttgcttttgcttctattgcattagataagatgtgtatagctaagagtcttgtgtgctaattgtgaacaagttcaattaatagcttcatgatagtgttaatgataaaacaaaacaagggttttattctctacatggacatatctgttctcatgcacattgagattctttgtagttgtccgttcttggatcatgcaatgattatctaaactcagtccctttgatctcgtgtgagatttgtttatgcaaccatataaattatgattacatttatatcacttacatttgatttatacttcacagagcatagcatttatgcacataatatcactggcatggaagcatatcaatttctaagatatatgccagccttttgatttctcgattgtctatcacactctgaagtcataattcatgcatgttagaagactgtaactataatctagtagtctagaacctctctcacatactcctctgtccatatataaaagtatttttccaccttatggttggtgttttctatctctttagttcttgtcatcaggaaggcgtacaccaaatggttgaggccaatgtgtctaatttttttaaaatggtcacaaatgggcgactcatatgtgtctaattctcaaggcataccactaaactgtgaagccaatataattatactgcaaagtacaactatctaatctcaccaaagtccaaaaggttgttttgatgatgtgggtgatgatcaagcaccacgtgtagagggagatgactgtctagttcacaattgcaacactttatagatggttttagtatggaaaaaacattggaggcccctttatatgtgttctccaatcttgtgaattacttaaatatacaacaatgttagcgtcatattgctatcacccctcatataaaattcctagctctatctctaatattctcattcattttaccctgatttcattgttaggatttaattccactggtttaactggcgtttataatgtgtaattagcacagaagaaacattagtggctttatattacatgacgaacaatattgtatgtctgactgttccttctctccctacaggctgttttcaaaattactctagaagttccttctga

SEQ ID NO: 349 - DNA, 2085 bp, Zea mays
  Intron number 4 from transcript GRMZM2G009021_T01 (locus G RMZM2G009021) derived from phytozome v7.0 (chr-ID 7; pos 1 71182391 to 171184475)
gacactgtattgacctgctcacgtggtttcgacaagtaagctctttccctcatgtggccgtttttcttgtcttctgctgctgctgcttcctgatcatttcatagttgtttatggtggtctatcttttacaagattgattactgtcatgtttatcaacttattgtaaatttgttaactttagtacaccttaaaaatgcaatgattatgaggcttcctgtagatttatctcagcagcatgttggctaggtttatttatgtcaagtgacacaatgatcagtataagtgtataacataactgaatctatacaatcttgatttatgcggtgcagtagtgaaaagttaagtttctcataatttattgttgtatgctttcctttttgccttggtaatggatgatgtcacaagggatatacatggggatatatcttggtatatgtttttttttgcggaggatgcagtgctagactgctagttgatgaaagccgtgcaagagtaaataggaaattagagtttgtggtgcgagactctaaaatttaaatgttttagactcagtagaactaaaactgaatatataagttgtgacttcggcactactacaaaggaggaaggatgttagtttggaggtcagtggtgcataggaaggatatttttttggtatttaggattaatgctatagagagacagtgatattgatgaagattttagccctagaaccaaagcagggtgggtgaagtggcgccaaacatctggctcctatgtgacaagaggtaccacaaaagccaaaaatcaagttttataggacgacgattatacctattttgtatgatgcataatgttggtctacaaaaacacaacgtgttcaacagataagtgttgcgaaaatgcgtatgttgcattggatttgtggtcatacgagaagggatcgagtctggaacaatgatatacatgatagactagggataacatcaattgaagaaaagcttgtccaacaccggttgaaatggtttggacaggttcaacgaagacttccagagacaccagtgcctagtgggatcctaaggcacaatagtaatggaaagagaggcatgtgcaggatgaagttgacatgggaagataccgtaaaaagaagacttaagggctagtttggaaacttaaatctccttcgggattctcggggattgaagggaaaattaagctaattttctcttcaatccccgggaataagtttctaaactagccctaaaaggtggaatataccgaaagatttggcattcaataggagtgcattgaaaaaaactattcacgtgcctgaaccttgatttgtggcttatgttgggtttcaactctagccggccccatcttgtttgagactaaaaggctttgttttttttttgttatgcttgcgttaaaccttgtgtggtagcttttatttctgggagcctgtccttatggaaacatcgtaatagatgcatgtttcatggtgcatctccaagtttagctagagtttcattactttttttagggcaactagagcttttatattactcgctagtgaggagttgtaccctgtgggaaatagctggagcaagaggtattcttacctcttcgctgtacagccagtagacaactgaggcctactgctggtcgtggctgttctctctctctctctcttgttacaggcacatatgtgtatctagaatattgcatgtgtgctctcctctttcttctttttaatataatgatgcacagctgtcctacgggtttgaggagaaaaaaacttttattcctgggtatgcccccttttctgttttatgcttgacttaaggttattaattcaactatattctattgttagtagtttatgtctgtctgatagttgagaggatacaatttattgatctattgtcttttttcccatggaattgagttggtaaatggtaatgtaagttctgtctacttcagaaagcaatgaacttgcacactggtacatggttctgtttatcttgctgtttctgtcaatgtctcagtcttacctaggtttccattgattggcctatcaaacagcgcactggagtttctatcaac

SEQ ID NO: 350 - DNA, 5800 bp, Zea mays
  Intron number 1 from transcript GRMZM2G096509_T01 (locus G RMZM2G096509) derived from phytozome v7.0 (chr-ID 6; pos 1 61989678 to 161995477)
gtcgctggtctcttcgcgtctgcttcccctctcgggtgagtcgcctcgtctgttgtcttctccgcccgcaaaaccctctccctcgctagggtttcctctggattttgttggtgcgcattcttttcctcactgtgccgctttcctctcgcacctctggtctctcccgtcttcggtgaggtctagttttggtgggggttggtgcgtttcgtcttttcgtcctccggtggttgaggaggagtggccgcgtctgggttctggtgttcttcgttgccctgcgaaaatcgctgctatggatccgaaaggagagaacccccagaactcccaatgggatcgttggggtccgtcggagaaaccgcaaggttctcatccttggaacagaccaagaaaccttagctggaagcttaagcctaatatcggcaaatctgagcagcagaagggtgtcctgtctcctcatcctggtgagggaaatcaaacaggtaacccttctgtctctcctgttcctttgaagaaagatctcgatcttgttcgccctgcgttctgtcaaaaatgtggtgttgaaggacatcatgccagaaattgttttaacgctttgtggtgtgatatttgccgcaaggagacacatgtcacttcgcgttgtgttcttcctaagcaaaacaaacccaccatgcccattgttggtttggctgctgatggtttagggttttatctgtctcacttcgctaaacctttgatcaaaaagccaaaaagggttttcatcggtctggttaaagtggttgagggacttgtctcagctgaagatcttgagagagatttcgggtttcacttcccttggaacaaaaggtggaaagctaccaaatgccattcaggatttctgatgcagtttccctcccaagaacgtcttgatgaaatgataagcttcccggagctgaaaatgaagatgtctggggccaagatcgctgttgtgccttggagttctagggccaaacctaaatctagactccatactgtgtgggttattgctgaaaatgtccctgaggaattgcagaattaccaatctatctgtgaaattggttctatgataggcgctgtggaggaggttgaccttatgtctctggattctgatgatatagtgagatttaaaatccacattaaaagtgtggctatgatccctcctgtggtggaagtggctgtcaagccttttctttatgatatcttctttagaattgagtctatttgtgatgaaggatggaatgatgattctgtgaatttgggtaagagagcctcggttcaaattcatggatctaatgatccgctttttgataaatctgggaaaaaacccaagaatctggatgatgatgtccctgaagaggagcctaatcctattctcaaaattggggagtctttttctcaaggcaaagagtttgccaaaatgtctgaccctaatcttgtgccttctaaagatgtgtctgatgatgaacagaaactcgataacctttctgatgagaaggtggattttgatccaaatgaagatgatctgcttagctcgcaagaattggaagaattcgctaaggatatggaggaagatccaactgattttcagtcaaaaattggtgctatgatctcgattccccccaatgatgagatggttattgaagggaagaacaaaaagcctctgaacttgcctaccaacacggctgaaggcgtcaggaaaagctctaggttggagaagaatgatgaggtgaaggtggttgataaagcgatatacagagcagaagccaaggatgctttcctcaataaaggtatgtgttctaattccttttctttgcttgattctaataatgatgatttgatagatttagcttgtaaacttggagtttctttgggcccctctgactccgatgtgattgataatttggagttgatcaaagatctggaacgttccagaaaaattttggccttccaagcttgcaaaaatagtatgaccccaaatgtggaggtcccttcccttgttgatcacataaacatggatagtagtgtccatgatgattctgacctgaatattgatcaggacttacttgatgtgatggttttacgaaaaggtaggaaaattaagcatcggaaaaaaacgattaaaaaaaaggcttcccctaaaagtagaggtccatctacgaaaaaaagggagtctatctgttctgacctccctcctgatccgttttaaatcatgagaggccttatttggaattgtcagggtttgggtcgtgattctaagtttgatttcctgagggaaatcattaaggaagaaaaaattgatttcattggtttacaagaaactaaaaaagatcattttaatgattctcttctgtcctcgctcgcgggtagcaagctttttgcctggttctcctctcctcccaatgggagatcgggaggtcttttagtgggttttaattctgaggtgtttgatgttagagaatttgatgcgggtgaattcttaactcgctcccttgtcctccacagagaaaaaaattttatctggaatttcgttaacgtttatggggctgcccaaaatgagcacaaatctcgctttctcagtgaattgtctgctgtttgctcgagaagccaggtccccatgcttattggtggtgatttcaatattctcaggaaagctgaggaaaaaaataaacctggtaccctcagcaaatggagttttctgttcaatagcattatagatcatcatggtctagttgaacttgatctgaaaaatagactatacacgtggtctaacaatcgtaatgatcctacttttgaaaaacttgacagatttttggccagtcctgactgggatcttgcttataataatattagtgttatcgggttaaatagatccttttcggatcatgttcccctttgccttcacactgattccctgcccatggtgcgtaaggattttcgttatgagctgtgttggaagattaggcctgattttcacaaattagtggaaaatgtttggactcttctggttggtgtgtccaacagtcttgatgtttggaaaataaaattgaaacgtttgcgtcagaagcttaaaggttggaacagtaatgtggtaggtcactacaaaaagttgaagaaaaacttgattgaaaaaattgatattctggataaggccagtgagtcgtctggcctttcggaggctgacagatatatgaaattagatttggaatctaatctcaggaagattgtggatgaggaaaacattagccttagacaaaaagctagggataaattcttattagagggtgatgagaattccaagtattttcatttgatggctagacacaaaaaaggaagttgaaaatcttgactctttctcacggtgatattgtggctcatgatgaccatggcattaatcagctggcgacttccttttacaaaaatctctttggtccttcccgtgattcgaatatttctctgaataacctggacatgaaacagctgggggagggtgatagaattctgctcaccaaccccttttctttggaagagatcaaggatgtggtgtttgctttgaaacacaatagtgctccgggccccgatggcttcccttctgaattttttcaggaattttgggatgtgatcaaaagtgatctgttcaatctctttaaagattttcatgatggctctctcaacattgaaagacttaattttggtattgtcactcttattcctaaggtccctgatgcgactgatattaaagcttttcgcccaatttgcttgcttaatgtttgctacaaaatcattaccaaagttcttactaacagattggctcgttgcattacttctgtgattagtgaccttcaatatgggtttataaaaggtagatatattatggatggtgttctttctttgcatgagattattcatgaagttaaacggaagaaacagaatggggttattttcaaagtcgattttgaaaaagcttatgacaaggttaattggaattttcttcataaaatgatgataaaaaaagggtttggagatttatggagtgattgggttttgaagactgtgaaaggtggcaaagttgctatccgaactaatgatgtggttgggccctactttaaaactcataaaggtgttcgccaaggtgatcctttctcccctctcctttttaatgtggctgctgatggtcttgcttgtctgatccaaaaagccaaggatgaaggtgttatcaaaggccttattcctcatattgtcactggtggctgctgttgtcttcaatatgcagatgacaccatttttctgtttcaggatgatttggaaaatgctagaaatttgaagtttattctttgcatctttgaacagatttctggcttaaaaattaattttcataaaagtgaaattatttgcctgggaaatgcctgcaatagagaacatctatatgctgatatcttcacttgtcctcccagtggtcttcctatgaaatacttaggggttcctattgataacaaaaaattgtgcaaatctttgtgggatcccattgttggaaaggttgagaataaattgggctcctggcaaggtcggttccttagtttgggtggccggttagtcttgcttaacaacagtctcaccaacgttcccttgtatatgctttctctatataaatgccccaaagctgtgttaaaaaaatggatatcttcaggaaaagattattatggcagggagggcatgatcagaaaaaatttcatttggctgcctggaacttagtctgctcccctaaaaatatgggcggtcttggtgttttggatttgcaaaaaatgaatgaagctttgttggctaaatggatttggagactagaaaatactagtggtttgtggcaatccattataaaaagcaaatacattaagaataaacctattatttcggtgaaggatagaccttcagattctcatttctggaaaggtattctctcggttcgagacaaatattataaatactgtaaaattaagattggtgatggtaagagttccagtttttggaaaaatatttggtgtggcaatatgacgctggctgacaaataccctaatttgtttgaggtggcttatgacaaagatatcactgttcataaggttgtctcctctaattttcagttgctgactttcagaagaagacttattggtgctttaggtgaggcctatagtgaccttatggatcagtgtagccaggcctcgctttctggaaatgctgattcttcaaattggttgttgggttgcaaaggttattcggtaaaatctttttacaaaatgttaaataattccagaattgtggttcctgtgaattttatgtggaaaaccagacttccgcaaaaaattaaagtgttcttatggttggtcagaaataataagattttgaccaaagacaatttggtaaaaaggcactagcatgggaatacggcctgtaacttttgtggattattagaatccatagatcacctattttttcattgtcctgtggccagattcatttggagaatcatccaaattgctttcaaattgtcttctaccccaaaaaactcagctgacctctttggtccctggattgacagttttcataatcctgaaaagaagctgattctttttggatgtggtgctgttatttgggctatttggcgtactcgtaatgattgctgcttcaatgctaggctgattgatgatccatctaatgtgattttctcctgctgttattagattgatgattggtctattcgacagacaaagaagggaaaaagactggtggaacaaggaag

SEQ ID NO: 351 - DNA, 2515 bp, Zea mays
  Intron number 4 from transcript GRMZM2G129451_T02 (locus G RMZM2G129451) derived from phytozome v7.0 (chr-ID 9; pos 1 7636744 to 17639258)
ccagtctagtgccagtgtatgttgtggatttactcatctgaatcctacatgcctacttttattttgcaagtgcataccacattattttaatattctttgatttgttttcatgtatgttcattctttgatactttttcatgtatgctcaacttcatctgcgtatatatttatggaatctaagaaaacattacagttggtaattccaaggagcttatcagttctttaacacttagtcaacttattcttgtgattctagtttttagtccatcagcacatactctgaaccatccttttattttaaaacaggaacacatgttgcattaaagcatgcacgtgagtgatgtgaaatggcaatctgttagtttctagaaactgatttattcaataaaaccttgtcctttatgttgtcctgataaagactggcacatcaccaaacatacccaatgaacagaagagctcagtagtcagtagtagtcttgcatcacattgttgccatgcaacaagctagaatacctttgaacttccttacaatgcttcatgttgtgcacgtctccgtcgccactgccggtgcccgcgggtgccaagcccgacggcgttagccggcattggctctggcgcacgactgtgtgacacacgcggcaaggttttgcccggttcagtgtgcccagccggagagggtggtggccgacgtagctttgtggctgcggcggcagatgcctctctggagggttttgtgtgggatgccagggcagtggcgatgatgaaggttgcattctttgacctagggtcctgtcgtcctggcctaacgatgtgttggggacatcttgggcgaaagccttcgcgacgatgacgtctgtggccgtcgcttcccctgttgagggcgctgtattccccagcactgtcttccatagattaaagtctgattcatctcggacaagtgatggtggcatcccagacgtcactcccttcctgaatgtgtcgctattgaagttcgtctcggcctcgatgttgccttcggttgttgctttcgcttctcggtgtctggtatgcgggtggaggtggggttttataacgtgaagtcgaagctgctacatcccctgacgtagctcgacaatgatgacttgaggcaaaaccccccttcttcaggagctagattgtttcatatgttgggcaaataccggaggtgggacggaggattaagctcgttggtgaagaatcggagctgcctcgcgtgaggtgttgaggcttggcaacgacggcgcaccgcggtcttcctcctgtgtcggattttgggtgtaggcgtcgtcgagttcctttggtcatgtgcggcccgtcttttggagttggagctgctcgtaccgtcttttggagtcggtcttgtgtcggattttgggtgtaggttgtcgttgcctgggtggtttgtgcactctgtgtagattttgggcccggttttccttaaaactgggtcaattctattcttcttaattgaaaggcaaagctcctgccattacgtttaaaaaatgttgtgcatgtcttgaatcctgaaaactatccttattcgtactcagtgtttctggactagctttgccaaacacatatctttgtttctgtatctcaaacagcactttgtagttcagatatgttatttgagttctcctttaacttgaatttatcactccaagagtgttccttggtaagttggtattactacagatggtatttcccatgttctgggtgttgacatggttttacttctaaccttttatctgtcatagatgtaaggatacttatttcgcacaacaattactgctgtggactcattccattttgcaatgcaatcttgtgttatttctctcataatgtatgttcttcgaagaaatcaacattgtgatcactgtagatttcattctcttccctgttttactgttttaacaaatgttaagtagttctactatgctgctttagtaaaggtatagtcctgcatcattggcctgttcttagacttgtcccttgctgccatggtctttgtggctgtgcatgttgtgcttgtacttaacttttgacagttagtacataagtatgatggtcaagcaggcatgatgtaggtgtcttacggattcggaacattagtacaattaatggactaatgagcttcatctttatcgttttgtcatgaatacgattttaccagttcagataaatatttctctctcttgacatgtttcacatgttttgcttcttgctgtcagttagctgtttcacttcgaattgaagtgcaattttagacatgtactccctccgttcttttttatttgtcacgttttagttcaaaaatgaactagcgggcgacaaatattcgagaacggaggtagtactctttattttctgacgttttcctttttgttgtttacttcctttggcttcccaatgctaaattacttttcattatgtaatcagtttcatcctaaccttgattttgtttgtttcagccttcttgctgcaaaatatagaccat

SEQ ID NO: 352 - DNA, 17753 bp, Zea mays
  Intron number 1 from transcript GRMZM2G169766_T01 (locus G RMZM2G169766) derived from phytozome v7.0 (chr-ID 4; pos 8 1452663 to 81470415)
gatttccaacgtgaggtagagaggagagaggaagaggacgatggcattttcgtaaataagtacgcgcgaattacagtatggtttaaaacattcataacttttgcgttttaaacccgattcgatccattcaagttgcgttagattcgtattattattatcttaatttagaaatatttatccctgctgttgcacattttatttaatttagttaaacatttgtttaaccagtggctaatagaacgacatttcaatttaaaaatctaatttaggaattcgatttgcgcatttataattagtcaccaatatgattaaccttaactgaaatgttatttattaataattatttagtttaattacgttgtttaattattagtttcgcatgtcggtccgcgcgtgtctcggtgctgtttcgcgcacgtcgtcgcgtgtcgttcgcgagtgttgcgcgtgttgttcgcacgcgttgtcgtgtgccgttcacgtgtgttgcgcgccttgccgcgtgtcgttcgcgcgtatcgcgcgttgtccgcgcgctaagtcgtttgtgtccgcgcgttgcgcacatcgtgtttgcacgtcgtgcgtcgttaattcgtctcgcttagaatcgctcatattaattaagttacttgcttaactgtcaactattaagatagtaagttagtcaaaactaagtagtattaatttacatttgattaatatcaattaatataattatgttgaattggatgttctaattagtacttgtttaacataacgcgctaacccctcgaccgtagcttcgactatcgtggttcttttcctcacgtaaccgtagaggcgctctctattttatattgctcgcttttataacattttatcttgtatggtgtaatgttcttatgcatatgtatatgtttgtttgcttgtgcctgttcgtcttcgcgtcgcgttgcgattagatcgcggttcgtttctgagcttcgaggattcgacggtcaagcttcggcgaccaaatgacccagctcttcgagttctacaaggctgaagattcttagcatctgtttggtgaaggcaagtgtcctctgacctattatgtcccatttactttataattcatcaacccgcataccatgatcaacctaaggattgactagctttgtatttaccttgtccttgattaccttttgggttatcattctttagctttatgctattgctcaactctaatcaatgaacatgatgagatttatcaatgatacgcggtttcccttatttattatgatgttatacttgtgtcattcaagggggctcgagcggtttctcgagtgcctctccgtaaggacctgttcgttggatgaccgcccgggaaaaacagcgcaaccatgagggtggaatgggatgcccttagctgaataattagaggaaccggggtgtagttcgcttagccgtcgtgccgttaatggggctcggtgtatgcggctcgctctgccaagtttggttcgcccccttggggaggagtgcggtgcatttaggaaacctaacgggcggctacagcctcggggaatctttgtaaaggctacgtagtgaaaccctgcctattcaccttggtagtgtttaagggtttgatcggcccgaggcaagagggaatcacgacttgtgggtaaagtgcgcaacctctgcagagtgttatgaaactgatatatcagccgtgctcgcggttatgagcggccaagggagctccattgattagtgatacttgatcagagatgtttggtttacagatgatgatgaggatggttatgatcatgcttatggtaatggtaagtggtattctttccatttggaaagggtactttgggttaagaacttgggttaatgctaaaacctggctttctactagtaataataacctgaccaactaaaagcaactgcttgacttaaccccacataaagctagtccactacagccaaacgagacatttgctgagtacgttgatgtgtactcacccttgctttcacaaaacaccaggttgcctttggtgcaatctatgctcaggtaaagaaggcgtcgaggcagatctccaggagttccaggacgtcgacgagttcgaggattaggctagcgacctcccccagtcagctgcccgtggtgggttgtttacgttggctacatttcgattctgtgtactttgattcatattatgtaaatggctctagtctgtaatattattacttactctttattgtaattcgaagcattgtgctatgatgagtcatttatgtaatcgctgtgtacgtgaataactgatcctggcacgtacatggttcgcattcggtttaccttctaaaaccgggtgtgacatttttaccttagcatcaccctttgccatgagacaatgaggagatgagaagagtgaaggagtgtaacaccctgaatttgggggtataaaatttcttctctaatatctaccaaattcaggtgttactccttttctcatctctatagatttcctttctctactttttaatagaattttaggtatttatttgagaggtgtatcatttctttacaatattaaaacctaggggagaaatgaaatgttgcatcatgctgagcttaaactttaattttggttgatgcacatgtttgaaatatttaaatttgaatttgtggtttggatggatttgaattctaaagagaaaataaaataaaatgggattagaaattagaaaataaaagaaaaaccaaagaagcccgagagccccctccacccaccctttcggcccaagcagcccatttcccccttctcctgcgcgcaccctctctctaccatctgggccctgcttgtaggcaccgtcccccctcgaccgcgcgcgcccgttgcattttccctctctgccatcccggtcccgcctgtcggcgctgcccgctcgctcgcgcgctttctcccattgacccatgggccccgcctatcagtcctgtcctccccaaccgtccgcgcgcatgacccccacgcacgtcatggactccgtgcccacaacgcacaccaaggccgcacccgccccaccctggccatttctagtggcccgcaccccactccctcttccccttcctcactcgcaccgcctgcagagctcccgcactcacctcacaccgcgcgcgccataggagatatcatcgccgtctgccgtggtctcgtgcttgttccgcggtcgctgtctagccctcaccgtattcgttgtcccggtgagcttcgcctcgacatcagcaacccgggacacccctcggttcgcccctcctcctctatttctctatgtccatgttcaccagcccttcctccgcgtagcagcagcagctccaccgccatcgacccgaggcctcaccgtgtccctgccgcagttcaagggtcctagagtcctctctcgaggtaaccaaccaaccccgtccctattttccccttgtctgccctcggttgtgcgtgattgctcgccgaagtagagctgcgcagcgctaagtcacctcgtcgtggaccgccaccctccagcgcccctgtgccggtgctgtgcccatggtcgcgttcgcaacattcccccgaacctccctgagcccttcctgtcactttagaacccccagcgtgcccacgccctcgtctccgatggagctccaccatggactcgggcggtgtcaccgctgccgtccagggagcccccgctcgggctggccgttaaatccccgacgttcatctcagattggatagtccagatttaaatagatcaaacctaatcctaatcgtccgctcgggatccggccgctcgggtttgtccctcacccacgcccctgccatcgagccaggcctatcagccccctgacccaaggccgccgccctccctgccccacctatcagccgtgcgcgcccgccctcgcgctcgcccaccgatctaatctcgaccgttgatccgagatccaacggctaagggagcccgataccccttcggttggctgttttgtaacagaatccctcatttccctggaattagaacctgtcccgttttctttcagtcgagcccctggtttcttgtagagaggtccctggtctttattttaatcaaaaaaatgggtttaatttagtgtttttgaatcctaaaacttgtaaatttcatatcttttgtatatgaactccaaattagtgtggcaggaccgcccgaattattctagcttaagtgcctgagtcacgccttagaggcagcaacacacttaaatcggaataacccgttagtccctcggatctagtccgataaagccacttaccaaggatcgaataccattagctcacacgatggtgagacctagagagcgtacaataaacatgaaaccacaaattaaagtactggagctattacataaatcggagttttaataaaagatagcaagttcgtaattaaatgcagcggataatcgataacgtcgatactgaggaatagggcaaggcctagcccactactcctcctggtcctctcctgtcgaggcagcatcccactcgacctccaacccggtggcagggtggaaggccaagtcacaccatcaaccatatcctgtagcgtacctaaaaaacatatgccataagcaaggctgagtatactaatactcacctagacttacccggtgtgaggagtctactcctctacctctagaccatgaagttgtttggctgaggggtttggtttgccaaaagcactagctgagtctaaaaacaattttagcttttccagttctagcatattaaattaagctaggtttgctcctttctaagcatacatggtaacaaccatttagtacaatcaacatgttatctcaagtaaaacctcatttcactttttactcaatgcgatacaagggtcaagcagtctcattaggtgcgagaagcgattcgaatcgagtttttaaccttgcaaggtaaacctaaacatacgacatgtaagggcactctgtccccacacacacgtcaattgtccccatcgattccatggcaacagaatagggctcacgaccttggcgtataatgctccaattgtccccggctgtcgccgtgcaactaccgcacttgtacccaccatagctagcatgggagaacccgtctcaggtccagtgaggagtaaagtctgcgggcaggttcaatcaggtactaggcttatcggttaccatatttcccgacatgtgtctagtacgttcaaacacttgactcaggtatccacacattaatccttaattccatttctgtctcatagacaaggcatccaccctggatccaagtccatagaccatcatagatcctgttatcaagatgaatacaatcaatttctgacctcgcgcgagtgctagaaaaatcactcgatttctaccgagatccctaattagcaaagcagctactcgacctagtatactagtatccatctcaaaaaggactcctgagtttatgcacctagggtttcaagcaactcctacacttaagtgcacattacaaagctacaaccattaagtggagtaaagtagcatatataaatggttatgcataaaaccggggcttgccttcaaaagttggggctgcggggagatcctcggtggcaggctctggagctggctcgtggacttcctctcgggcaactccttgctcaaggatgagcacgtactctccatcagcgaggttgcaatctaaattaatgtaatgaatgagatacatgtatgctatggtatgcaagtttaataattaaaatgcaaggtgaagtactcaagttagcaggacaggtcttagttccactatttaagattttaggggtattcttggtaattagaagtaggtgtagccagtctaggaagttggattaaggttgtactcaacaatttttcaatgtcttagtgaggattaaataaggttcttggctgaagttatttatgacttgatttagtacttcgttaatcctttcttcccttttcttacttgggcttttagagtgcctttgaactacaacactgatttagaaatttacaaaaattatgtaaaaattacagtggcttctcactggtttgtataactcagtctcaaaaattgagtcttaaaatgagaatggttttctctacacaaaaaatattaaaatttagggcagagggggtgctttgaactacaactctcctctaggagtggattttaccctaaggtttatttttgctggtatctaggtgtaacaatatgacttcatgccaatttttagccagagatacctactggttattttatggtgattttctaaactttgggggcttagtgatgctttccactactactatatttgaaaatatcaaacaacagatttcttaatttttctatcttctttgcgcaagagcaatcattttttaagttggttaattttgatcatagggaaaggggttgtaaaatttcttggaatatatggtcgttttcatggggcagggggtgtagtgtatttcatcacttactgtgatggtttggggtggttaccatttttgcagtggtatgttagtggtcaggggtttactgattttttcttgccattattgcatgtgctcttatatttttaatcatggcctttattgacttcttaatacctaaataaaataataaccttagattagcactagaccagggttccatatatttttcctatggtctacatcacttaggcatactaggacaaatgtggtcaccctctggtttatatcttctatcccctttttcattttcctaaagtttgggcaaaaatagactttaatggatatatctgacttagtcttgtatactgtggtgtttattatttgtaaacagtgtatctactaggtgagtgtccccacaatttttctcaagcccagtatagaagtatttctgtttttctctgtattattaagatttgggcagttttctaatttaattcaaaactctaaaaattagtacaaaaaaacatagggtttactatttttgtttgacaattcatatttttacaaagttcagcaaaattaatttgaccaaattgggatgaatactttttaagttatgcatttatcaagtttgctgcagatttaataactgagatattcggaaaggaaaagaaattcacatttgcgctgaagtccctggttctattttccactttctctcatagttaagccctcggtatactattcatgtgagtcactgacatcgcagaaaaccccctagggttaacctaaatctaacttgcgctcctatcctcactggaacagtaaccacggcggagagaaaggcagcgaggcttaccggcggcgatctagctccggtgaggtgtccaaggaggccgaggaggtcacgacggtcacgtcgatggtgggctcgttgctggcggtggtcggagtcgatcggtcctcgtgcgtaggcgggcgagctcatcggcggtgagtgttccggcctagccacggcggtagggttaaattaaaccgtgcagcgagattcgctgagtgtcagggaaggcatgggcgcaagtaatcgaactatggcttactggtgagtcgtgaccacgcgtgccggtggaagaaacactccggcgagggtggaacgacatctccagtgaggatgtgttcggtttcttgcttcgagaagctttacagggctcttgggaagctagtcgatgcactagatcggttggagatggccgggaagaggtctgaccatgctggccgagctttggcggtggtggcgggtcatggggaggtcgccggagctacgggctggctctagggagttgggcgcggtgcggagggagtacggccgaggtcgtgctgctcttataggtgtgcgcgcggtgcacggtcgggcgtggaccggtgcggcgcgcgggcgcgcgggcaggcgtttgctttgtcgtggcacatcgcttctactcctgttctaacgccgataggcttcaaatcttcatgaatttgggcaagattgttgtgtaagatatgttccccagggtttgctttgtcgtttatgtgtaggagccgaggggttttcagccgcgtacagtgagttgtcgcatcgccaagttgccagtgtctagctggtgcgtcccgaggcaaaaccatgccaaatcatgtcaaacagctgagatttgtctccaaatttttccagggcgtggctaaggtaatttggcgccaatttgatatttggaccttgcaggtttgggccttggaactaggtgaacacggttgattatgaagagaaggtcaaatttcagaattctgaatttctgaatttccaattgagtcttcacttaagtggttgttttgagaattttgcaaaacccttttgattaaacttccttactatattttgtatcttatttagtgtactacaactttgttaattggtccaaattatgattttatgtttttcatagtcttttcactaaattccctttttatgctcaaattgcttaattagggtagttctagggttttgaatatttttctcacttgaggtgcatgatgtggttatgatatggttcttgagatgaaaaatacatgtttaagtttttgctttccaatttggtgccttttgctcaattacattcacatgtgataatgttcgcaaatgtgggcgtggagggaaaatcctgagtaacacctggggtgttacaattaggtggttcaaatcgcaaaatgttcataatgttattctctatctgtttaaatgatattcacccattatttgcatgtcttaattttgtggctaaactctaggttaatttaaagtgatataatagttattaaaggtaagataaaagtgaaaccctaataaatgagcaaatgcttaattttgtagatttttatttcaattaatgtatggtcccatccttggaataactttatctaaataagtagttcactaagatagatataattaagtagttaatctactgagataggcaatagttggagaacaacaaaccactaggtatattaatctaccctagaacctagggttcacttgtgtgtttgtgcttttccactgaacctatttttactctgttgcatatgattggtgtactattcctttgtcatttcccaagtgtgttgaatgaatgattgttttgcgtagacaacgagcagtccggggtttccgagtgtgttgctagagacttccctaagcagcaacatggtgaaggcaagtgtcctctgacccattatgtcgtatttactttatgattcattgtcccgcataccatgattaacctaaggattgactagtgttctgtttttcttgtccttggttatcctttgggaatcagttactatgattagtatcatgctattgctatactttaatcaatgaacatgatgtgaaaatttatgatacgttgatgatatcttgattatgatgatgaactagtgattctttaggggactcggggttgtttcccgagtacctctcagtaaggacctgttcgttcgatgaccacccgggaaaataatacaaccatgggggtggaatgggacgcccttagctgattaattagaggaacttgggggtgtagttggcttcgccgttttgtcgtcaatggggaccggggcatagtgctttctctgctaagggtgggtgccgaggttcatttgttttggttttgttagtcacccaccttagggaggagtactatgtttgtacgactggcgaaaccttacgggcgactacaaactaggggaatctttgtaaaggctatgtactgtatccatggctattcacctcggtagagaagatcgggtctgtacaacccatgctaggaagggatcatgactcgtgggtaaagtgtgcaacctctgcagagtgttagaaactggtatatcagtcatgctcatggttatgagcagccttgggagctccttggattagagtaactctagatacttttatgttgatgcttaatgatgttgattatgtctatggttcttgttatttcctattggagggactgccatttgggtaataacttggaattattgttaaaacctggccttctactagtaataaatacccgaccaactaaaagcaactggtttgagcttaaccccacatacagctagtccactttagccaaatgggacatttgctaagtacgttgatttgtactcacccttgcttcaaaacaccaaaccctaggttgttctcattgcaaccagtgcttaggagaagatgaaggcaacatgtaggacttttaggagttttaggacttcgatgagttctagattagattagtggcaaacccctagtcagctgcctgcgtaggccttatcgtactacgtttcgtattcacactttgattttgattatgacttaagttaatgtctctttggatgtcttggacatcttgatgtaataaagtactatttccgctattattttgagcaatgtatgatgatgtccaacaatgtaatcgttgtgatcctggcacttacgtggttcgcattcgggttgccttccaaaactgggtgtgacataagtggtatcaaagccttgctgactgtaggaccgtaacctagactagaatggtcgccttaaggactatagacctttattctcaccttgacctttggtgtcccttcaaaagttggtcatctcgaccaattctatgttatactactacatatatactcaccatacaaaatctttatcttattctgcttttggtttacttgctggtcatatagttctgttctcacgcttgtgcttacgacatcttttgtagatggcccgtcttagatgcattgcacgtaagtcggtgatccctttcctgccctctcgccttgcggagcgtccactgcaccgcacgatgataggacagtcgagtcacctagagagactgcaccgttgcctgcacgaggagcaggagcatcgacgccaggagcggaagtagcaggactcctccacctcgcctcagtaagaggtggagtctaggaggcagccctcctctatcctcagctagaggtgtcgcctgcaccaccatagggcaccctagctactggaggagaccccaacggagacaacgacggtggcagttcgagccacaacatggagccttcagagcagtaggacccagaaggatggatcacccaacctatgactcgtgacgccactcacggttgtcatttccacgacgctctcgacaccttgctatgttgggccttcaaccgacacacttggtcaatcgagtaccactgtgtagtctaccatcatagtcacgggttatactcggaccaatgggaggctacctgcttggtgcgccattcggacgatgatctctagggtgcagaggcctactaagagcattattctatcactagcgggacactgccgaggtagtcttgcaggatgctgcacgacgtgcactttcatagtactatttgttgttcagtggggtggctgtcgatctcgacctgaagtactacccccgccgctcgagtggcagtaccggaggtgtgattgtctactcagttggtgagggcaatcccagattgagcagcatggtcaacctggtcgccgtgctcaacactgagttggaccatgcccttgacgagttgggcaaggctcgagcggagagtgcagaactgcgtgatgagcgcaagaggcgccaccattaggaggatgtttccctcgcccctattgggactcagcacccttaacgctcgccaccccgtggttgttatgcttatggcacccctgactgcaggacctggatcaacttggatccctagatcgctagtgtcgagtttgtaataaatgtttaagccatctgtcttagtcttagttagccatagttagtcaggatagtttgcttatcatgtgtctctatgtttgtcgtgatgaacttatgatggatttggctctttgtaatgattgtcatcaaagtgtgagtgtccccctgcaatttggtgtagttattaataaagttagttatttagttgggcaaacttttacttccactttcctctttatctaagaagctgtgtttaaatgttttgaaagttagtgaagtgctcatttgttcagcattatgaagacttctatgaacctttccttatgctgaaagactgcaaggtcagttttgatgtgtgaatgctttctaaagatgtctaaaacaggcgctgaggtggaaggcgtgcccagcaagagcagcataccccacaagatgaggcaccccagcagcagttgcctccaccaccacccccaatgacaatagagcagatgtttctcatgcagactcaagcagctcaaacaattggcagaccctggcagccatgcagcaagtgcagcaacaacctcaacctcagccgcaagtgcagatgccgcagatgccaagagacaagcatgcagagtttatgagaggtcatttctctgtgttttcccactctgtagaccccatggatgccgaagactggctgcgcacggtggagcgggagctgcatacctcttagtgcaatgactaagagaaggttttgtatggtccccgtctgttaaggggagcaacacagtcctggtgggagtcctacctcgccacccatgtcgaccctgaagccatcacccggtaggagtttagggataacttccgtcggtaccacgttcttgaatgtttgatgacatcgaggaaggaataatttttggcattgaagcaaggacccatgtctgtcagtgagtacatggacaaatttctacaactatctcactatgcacctaaggatttcaacactaatgccaacaggcagtacagattcttgagaggtttggttgaccccctacactaccagttgatgaaccataccttccctacctttcaacatctgatcggtagagctataattactgagagcaagcatcggtagaaggaagatcggaagcgcaaaattggtggatcgcagacgaggagcagcaaccgtccccgtttctcaagcaatccaccccagcagttcaagcagagtcaccctcagagatatcagcaccagcactagaatcagtgtccgcatcaacaacaatttcagaggcaattccctcaacagcagcaacagcagtaccgccacaacaaccaactgggaggaaaccaataccagaggcagaacaaccatgcatctcgccttcctgtcccagcaaccaatcagagcaactagacagccccagcgcaaggaggagaccgaggatgttttcactgtggggaacagggccactaggcgtgcattgcccaaagaaagcagctcagcagcagtcagctcccaatgccccagcaagacaaaatgcaccccaacaaggggcaaacaaccgtggacagccgcatgctcagtatggaaagctgaaccacctggaggctgacacagttcaggagaccacagaagtggcactaggtatgttcttagtcgaatctgattctgcaaatgtgttatttgatactggtcacattcttgtgtgaatgcatcatgggtagaaacacacaacatgccagtagcacctatgtacccacctatgagggttagttcagttggtgggaggccccaaacagataaatttttcccaagtgcaagagttcaaataacagggatagcgttccccgctgatttgatagtaatgggtacccaggatgtagacatagatgtcatcctagggatgaattggttgaccaagtaccaagaaggccttagttgtgataagaggactgtgaatttagtgtccttgtcaagataagaagtgttggtggagttggtcttgtctggaccaagaaaagtaagatgtcaccagatcactgcccatagtgaggcagtcaatccactcgaagccatcaaagtagtatcagaattcccggatgtgtgttggggcgaaggcaaagacgccacccttcgctcgagagccttcgctgatatcgttggtccaacggaaacaaaacgggcagggacacccttcgccccatacgacatcagacgaaggcctccgacgaggtcatcccaccgtgcggcctcgtcgtagctcgaggcccacgtgtgatctggcccattgtaacgggccctgcgtggccgctgcgtgttacgggcctgatttgtaaaggtatccctgtaattacagtctgtaaccctgctttatgggaatattctggggataacctaggtgtctgagggcacatgcgtccttaacacaagacgctgggcgcccagacacctataaatacccccgcacagtgcccgtgagaggccagaataatagagctattgccatcgagcgcgagaaccctgttaacgccattgttcacccttgttggatccccttgcaactgagagcaagttccaacatttggcgcccaccgttcgtgctacgagaaaaccacccgcgatggcacccaagagagctaactcgaaggctgacgaggctgcgaaggcagcactgcttgccgcaagaaagggcaaggccctcgccctcacccaatccacccaccaagaggccactgaagacgacgttccccgcacctgcgaagacgacactctccgcacctgcggccctgaaggacaatcgcagccacccccaggcttcgccccactggagggagcggacctcaccgaggacggtgaagtcctcggcgtctcagcggaagaacagctacagctgcgcgtcctgcgcctcaagaaccgcaatctccagaggcagaaagagatactggaggccaagcgccagcgcgtgtccgcactagccaaagtgcggcaaatgatacgcgacgaagagcagaaggcccaggacctcgagcgggagattgcgctgatgcagcgcgaaggccaccttggcctgcagcacgggccacccctccagcagcgcgcacaactggaagacacgcgcgaaggccacctcggcctgcagcatgggccacccctgcaacagcgcgcacaaccggaagacccgcatttcccccagcgcgaccacaccttcccccacgccgccactacaagaaactgataaaagttcgtgggttttgttaagaacgtgggcaccgacgttcttacaatagttaagttcatgggtttctttaaaaacgtgggtacccacgttcttagtttaaattcgtgcgtcctagctaaaaccgtcgaacttatcgtattaggaacgtgggtacccacgttcttatattaaattcgtgggccacgtgaacaccgtcgaacttaaacaaaaaccaaaatccccaacccgccccacacgactctcttctttctcgcccactgcacgtaccgcgcacactccaccgcgccgcccccagccaccacgctcgctacgcttccaccaccgctcctccacctcgcgcgctgccgccaccgcgcccaaccgcgcccaccgagccgccaccagacccgtgcccaaccgcgtccgtcgcgcccaaccgcgcccaaccgcggccgccgtgccaccgccagacccaccgctcctccaccgtgctcagcacaaggcaggctgcatcgccaaagactatctcactcccctcctctcgttcctcccactctcgcatggcgagcccgctccaccccgtctcccgcggcaaccgagcgctccgtcttctagtcgcgcttcgctccccgtccacgtcgcggccgcggctgagacgtaggcctagcctccctcccgcccgcgcggggctcaccgccgcggtggcggcaatgccagcgccggagcccaaggcgcgcgtcctggcggcctgatccagctgcagagcaacgcgctcgccgcgctcgaggctcgggtgcgcctccccgctcgccgccctcgtgcctctggcttccgcaccgccgttggccaggcagacacatccgacctccctctccgccaggtggcctgccgcgcccatgtgtccctggggaacccgtggccacagatttttgctgcttagttctctgcactgctgccggcagcgtccaaagagaggggaaagaactgctagttcagcattttcttgttggtgaaaaggatggcaggcttctggttgatctcgaaaagaatatcattgcaggaggtgccatctgattctcaaacttcttttgtatgtactttttgcgtggtattccaatcttgtttggaccgtgtatttaatatatgcattttcttgttaggcttctggttgatctcaaaaagaatatatgcatttgcaatggaaatgacactattgaacatctcaggagcagacttgagtgatttagccgtggagcactccttatgtccatccaaagaaaatggtggtatgcttgggtgggttcgaaggggacagtccggacagatggtacaacattaacttgttttttctagcatactgatagagtagatgatattcttctagcctttacatacctttattacctgctttacctcggcagtgttgatgaaatctatacagtcaatttaaaattttttatgcttcatagcacattgcgttggcctaacattccattggcttgtgtaatgtaatcagtatttactcattccttcaacatgtcaagactagagctggcaaccaaatgataatcaagaaaatattattattttttgtacggccacttcatcttccgtatgccaaaatagatggtactagtctattgcaactcctgagaattttactctcaaggcagccagtcctggaggcacacatcaattgttggtgattttgacgtggaagcttactgtttcttgttgtggtattgcttctaaaatctctcactaaatcagctagaactgtggtcgcatgttctcagcttgtttaatgtttgcagcagctttccattccttccattgtatttgaaattattttactaagcaatgatgaatcgccctttgaattagatgtagatcactccatgtccctgcgtttcagggagaacctacttggggtcctacattggaatgatatatatgggctttaactgagctttctgaacattactttgagcaatgcatgtgttttttccggtggctattgttgaatgaaaatgtcaatatttatttgttggcagaacatagatggatcaatgtgcttagaaatttcttgctttcgatgatgatttgcctaattgtgaggtgtagacaactccaagttcctgcttgccagggagaacctacttggagtcctacattcaaatgagttctatgggcactttctgaggtttaaatgtttgcctatgttatgttcagctcgatcttatctttcactgttatatttggaagcttatgaatcaaatgcgtccaatttttaccttcacagtaacctatgatgaattgtccaacatgtgaggtgtaggtaactgcagccctgtttagtcagtttagggttctttaggtgcatgttattcgtcatgtaatgattgttcattggtttgatgtttataccttttcttctgcctagtgatttaccatcaaaataaattactttgtgtgacgccagtgatgattagtctgcaaaatggatgtcctatggactcaagtccctgtttcaggaagaacctacttgaggaaacatggtacataatacgacatcatttgataacactgaggcattacagaagaaccctatgtccgttcagtttttgcttcgtactattttcttttattctgaaagttgaacttgatcataaagcttgttaacatttgatcgagtgattaatttgtgagcatttgcatgttaaagttctaagcttctccattgcctttataggaatctcattg

SEQ ID NO: 353 - DNA, 3219 bp, Zea mays
  Intron number 7 from transcript GRMZM2G390160_T01 (locus G RMZM2G390160) derived from phytozome v7.0 (chr-ID 3; pos 1 94928291 to 194931509)
ctagggagagggaacgacgtacacttcttcgtattgtgagtactgtttttcaacttttcacactgaacaaacttttgttcgtatgcacttgcctctataattagtagtcttcgtgatgcagaaactgaattaacataagactttggagccacgaatctgaaaaggaaattgtttttttcattgttactgtttgataaactttgggtcctttacctatagttccctcttaagactatggagatggatctgaaaaggaaattgtgttttttattactgtttgataaactctgggtcctttacttatttcatggatatctgatacttacagttgtgtttccgaattttgcatctatatttttcattcttgttttttttttgcaaaatctgctggtatttatatcttgagaaaattccaaacatttgtatcacccttggttgtacaaaatatatataacctttgctccagagctacactgtggaatttgagctagggtcctgttttggcaaggttccagttccatccagtgaaaccttacgatacaatgaaaactgaaaagccaatgcaacaatgctatatcgacctaggctatatggaatattgatactgacttgttggtggagaccggagaattaacagttatgtttgatctgacctttgatctgctatatcttagtttaaaacttcagtattttctcactgttgccaattgaataatttttctcaagtgtattctgatacacaatcaattcccattgtttgggcaattttatctgtactcttctaagactgtctccagcagcgtcccctaaatttcatccactaaaggaatattctctgtcctttacagaacactctaaaagattctgtcctctatatattctccgtctctagcagcgtcctctaaattccgtccctaaagctacagtgttaacagattcacattttccatttctttttcatttttctatgttttctcggcattcaacgctgcaaaaatgatacgtaaaaattgtatttattaattttgaaattaataaattcgaatccttgcttacggtattccggctgatgccgttgacgaatacgtacgcattggtgaatctactgctcatgaggcattgaaacacttttgcacggccgtccaaaccgcgtttgctccgtattatctccgtgcaccaaatgcagaagatatcgcacgccttctccaagttggcgagtcacgtgggtttcctggtatgcttggtagtgttgattgcatgcactgggagtggcgtaactgcccaagttcatggaagggcatgtttacagggcgtggtaaacatcctaccatgatcttggaagttgttgcgtcgtatgacctgtggatatggcatgcatattttggtctgccaggtagttgcaacgacataaacgttcttcacctttcaaaccttttcgaaagacatctgatccatgcttaagatcattatctcctcttccttgtcctcctttagtttctgcctttcaagccttaatttctgtaggttcaacttcttcttttctaggagcaatttctgcctctcatttctgttcattgaatccaacttcttttcctcagttgtaacaactgttttgtacactgacaggcgctccaaagaaagatctcccatgcgtgtcatgaactcagaatctgacgaagttgtgtccacagatttagtcctctttgccttttccttagaagaatctcgacccagtggcctcttcgatgtgaagctagatggtacagattcttctgcatccacatcgacagtgttagaatgtgtgggattagcgttggcttgctgattttgttgacccatgtggttgtccatccattttggttggtccttaagaatggcccaacagtgtaaaaagtggaaaggcttcttctcaattgctgcaaacctagaagctgccagtgatgtctgccacataaaacaactggttacaacagggacatacttacaaacctacaatagtgatgtcaaaatgttacattaaagatgtaccttgtctgtgtcactgagtccactaggattctgtcggaggactgccatcatgtatccagcaaaagtggaacactgtgttttgatagtatcccatctgctcatcaaagattttgtggacctttcgggcaatgttcctcgtcttgagttgtatgcttcagtaattctactccaaaatccttgacgtttctgccctgtgttaataatgggatcacaactaacagcaagccatgcatggcatacccttgtgtcctcttcagcagtgaagtttgctagcttagttctttgagttggctttttagtaacagctggtgttcttgagccctcgggttgcccatcaactggaaattcagaatgttgtgttgcgataggctgctcgtcaatctggctaaggaagcttccatattgagacatcacctggttccaatcactcccattctatgcaatagaggcagatcaaacatgatataaatgagcatgtagtgaacatgtaacaaaatctgtgtttccgaattttgcatctatattttttattcttgttttttttttgcaaaatctgctggtatttatatcttgagaaattttcaaacatttgtatcacccttggttgtacaaaatatatataacctttgctccagagctacactggaattcgagctagggtcctgttttggcaaggttccatccagtgaaaccttacgatacaatgaaaactgaaaagccaatgcaacaatgctatatcgacctaggctcattaatatggaatattgatactgacttgttggtggagactggagaattaacagttatgtttgatctgacctttgatctgctatatcttattttaaaacatcagtattttctcactgttgccaattgaataatttttctcaagtgtattctcatgcacaatcaaatattcaaatcccattgtttgggcaattttatctgtactcttctaatatctgtatctcatatgtagcgttgctagatactgaattctgcttaatgtaacattaacgaatagtatattaagtgtcttcataaaaaaacttttaagctacataaaagaataatggcaatggttgtatttaacaaccatagagcatgagatctggtacgttttcttttgaaacgaatactcaagtacatgtaaatgcaatatactgacattttctactcaaggttattgag

SEQ ID NO: 354 - DNA, 27196 bp, Zea mays
  Intron number 2 from transcript GRMZM2G167584_T01 (locus G RMZM2G167584) derived from phytozome v7.0 (chr-ID 1; pos 1 39791208 to 139818403)
aggaggcacaccttgcacagaacatcatccacaaggtacacaccagcttgcagtgtcatatgtttgcttgcggagcatagaaacaactcccgttcagaaaattgataggattacacatcctcatctctgtctcagacctctaaatgacaaacaaacaaataaataaataaacaatggatcgtaaaacagagcaaacagagggcatctatcaacaacagcagagcggctcaggtgcagctgcagctcctcagatccacttccggatgtctagaacacgacggcggcggctgccacagcgccggcgatggcgacgaagctgatggcggaggcagatgcggctgtgctcttctccgtgacgggcgcggcggccggagtcagagcggaggctcccgccggggccatcgcgtcgccaaatcccgcaccggcggggctcgtggctggagcgtcggcggagggggcggacgccggcgacatcgtgggaggcgagggcggggaggccatgggggccctggtcggcggcggcgggagaggggccatcttgggtggcgcaggggctggggcgcgcttgggcgacgcggcaggggcctgcgccgtggccgcgacggcaaagagggcgaggagagcaacgaggacggcggcgacgcgggccatcgatctcaccaagtgacagtgacttccttcctggattgtatagttaaaaaaacttggcgatgagagaaggccgcacgcgacgccgtatttataggcgaggcggcagtggccgctgggttcgttttcaaatactttcgggtacttattagccgttggccctggttgcttgtgtccagtgcaacggcggcacacgacgggccaccggaagcagctcgtgaatcgtgataggacatgggaccgtgacgtcgtgcgcaacggctagttgtgcgtgagccagggcggccggatcctcgacggacggcgaagatggccctcttcgcagtcggccgtggctaaggccagctagccgttgcgtgtcgtgcataaaaaagccgctgtccctggccggctttcaagcgaggaggccaacctgctagactggcaacggaagccaaatgatgcctgccacgacgccgccgcaccgaagcgcgcccccggtgaatgcatagtgttgtgttcaaaagcaatcgtgtcgccagtcacgcaatgctctttgtttggaagtaagataattgaagggctataataatttcctaaacacgtccttagagaggacacgtttttggtaggctgcatatagagatggcaacgggtacaaacccgatgggttttgccgtcccaaacccgtacccgtgaaaaatatctatgcccattaaaaaacccgtacccatgacgggtttgagatttttcccaaacccgtacccatcgggttagcgggtacccatgggttacccgcgggtttcatctccaatatacttgttcttctcataatcaataagtatcataatgattaatgatatcatgatccaaaatatatgtaatgaacaacaagttcatgatttggtataaatattattagtatagagaataaaatacaaataataagttgtataattaagtgaccttgcactaagttatccatccaccacatatataacactagtaaaaactataatagcaagcaagcaacactctaaccgactactgatatattcaccaattgataaaaattatgaagtaaataaggaataacaagtttgttgttcgtttataaaataaaatgacaatatgcactaggtttggtcgggtttaaaaaacccacgggttcacgggtttgggtactataggaacaaacccgtacccataaacccgccgggtatagatttatgcccattaacaaacccatgggtatgaaaattgacccaaacccgtaccctaatggggtaaaaacctatcgggtttcgggtttcgggtacccattgccatctctagctgcatatggccggtcaggccggtgagataacgtatgcttgtttagttacttgtctatgtatctggacactgacagacggtatttgattggttatatgtcagtggtcacctacactgcgggatgaagtatctagccccgagccagctacggagaaacgagtttatttttttatctcgggaaccaggctcaggctagcctgtttggagcggccagactccactatgaaacaaccaaatgtgcctagattgtctccagcagtaaatgtagaatatgggacgtggaattgtagatacgctgtttgaaaatgtttgcagagtgaagtttaaaatatgggatgagataggaaatgtgatagaggatctaccggagattgtcttaaatcgtatgtttggttcctggttcaaaccttgatgtaggccaagcctagtctgaacaaatggatgcaagtaataattagctcggttgtttggttgtctgcattaaatgagccaggattcgctagacgtgtttggttgatcggacatgactatatctactgctgggtgtgtgttactatcaagtttgacatgaaaagagatagtaaaagctaaacagcttgaaaatttacataatttaccatttaaacatggacaacttgatcataacagatgaattcttgaaaattttacacaatttactagctaaacatcttaaaagatttacacaatttaccagctaaacatggacaaagatagcaatatggacagagatagtaacatggacagcttgattcaagcttgacaacttacataatttaccagcttgacagagtagaaacaacttgttaggttacaaaatttaacatgaatagtagtaacaccttgacagagtaagcttgatagtagttgtggaagatagatatcccctacatccttatgaacgtagaaacgcctcatgggccgcctgatggcctcccaaaggttgcctagcaagataggccctcgggtcacaaccagggtggacgagctcgacccagggaaacggagaccggacgtccgagttatgcgcagaccggaacattaatgtctcacgtgaagaggttgcgcacacctaaagggctaaatacttggtgttaactcggctgaagaagcgaccaggctccggataagcacaaatgcattctgcgttaaaaggggattcaggtagagtgagatattgatcacaactagtaaaggggtaaccctctggttatctatataaggatgagggggtacccctatgaaagcatctcatcttgtcacatctaagcaccacctcatagctcattagctttctcatagcaaccacacaccactagatcagaaggagaactcatcctccaccgcccacatctcacatgtaatccgtgtacaccagtgaaatttcaatacacagcctcgacaggaagtatggtgttacgcattatagcggcccggacatgtataaactctcgtgtgacccgacatgctcccgcagtaccatcgagtcacaatcaacgacgttgtgctactcaaaagcatcacgtggggaaccccgtggtgcgtagtcgggccataaacatcgacaaatggtgcgccaggtaggggtgcaacgttgatccacgacgagtccatggctattatcttcaacaccctggtcaccttcaatgctggggaggtgttccgctttggatccctctcctacaatgcagatcaagaaggcatcttgaccacatcacagatccatccgagataagatcttctccgatggcaccaattgcggggtgggttcgtcccatttgactccagcgagaactatgacgacgaactccaaggtgcgaaaacctcaactaacttctaccccgcacaggattgcgcccacgtcggacggtctcagggccaaaacaatacatgtggctcgatcggctaaggctacacccctgtcacggcgaacctctctatccacgccacccacccgggtgtggatccggatgactcggcgaaaaggagtggatagccctggccccagcgtggctgtgggagcaagaccaacaactgtctcgatcgatccgctcacatgggagacagccggagcgcaggacacaaccctaagctctttcttcctggatgtcctctttatccaaggaagagttgaggatgctcccatctccgacgactagcccactatacaaggggaggatccccgcagactgaggcacactaacgttggaacaggcgccgtaacatgcggcgtaaccatgaggaaggggaatgggatcctgcttagcctgtttccctgaacgaggcgtctgaagcaggagagactcctgacgacagggcgctccacgaacgccgcaattcatgacatcgcgatcgttgccacacctagaagagcgagtgggaacaagcggagcatgatgccaagctccgacgcgaaaacccactccttccccaatttctgctgcccgacttcgctcgagccctgaacacgttgagtgaagtcaacggagttcaggctcaaatcgccaaggataccgactgatgcacacctaggcgcagaagcctatcgactgatgcacacctaggcgatgaaccatcttcttccccccgcccatccggcactagacatgcgctacgtcatcaacagtcggcgagacgcgtagagcaacatcaatgctttcacgcgattgccgacatgaaagtgagatgaggcagcgggaagagtacgatcaagaccatggtgcactagcacgcatccgcgtgaccaggacagagtcggtggtagcttctacgaacagcccagcaccaggccgatcggcttaggagaggcggcatgatgcccagcgtcagtcgcctcctagggaccgccaccgcgaccacgcccgagaagatcgccatgagaaccaagagacgtgcagagtctcagccatttcccccggctccaggcaattcaatgcccgcctgacttcaaggtcttgaatgtgacaagtacgagcccagaaagatctaggcggctggttggccatctatacgatccatcgcccaggccgccggggcaatagaggacatcataacagcgtacttgcccattgttcttggttaggatgtgctgcagtggctccgacatcttcctcgccattgcatctacgactaggctgacttcttccaccggttgtagaaagggaatggaaattcacgacaaaccggtggcagaagttggcctagtcgtagatgcaatggcgaggaagatgtcggtgccactgcagcacatcctgaccaagaacaatctgaatacttctccgtaaggaaacagcctgagtcccctaaaatagatgcaaattcacgacaaacaggtccttacggagaggtactcaggaaacaacctgagtccactaaagtaacacaagttcatcatcataatctagataacatcatcgtatgataaatgttctcatcatgttcattgattaaagtaaagcaatgtcatgaagctaaccataataacccaaaaggtaatcaaggaaaaggtaaatacaaagctagtcaatccttaggtttcaattatgtaatgaagaacagtgaattataaagtaaataggacataatgggtcagaggacacttttcttcaccaggttgatgctcaagaaagtatccggcaacacactcgggaaccacagactgctcgttgtccacacaaagcaatcattcattcgacacacttggggaataacaaagaacattataccaaacatatgcaacagatcaaacataggttctagggtagattactatgtttgagggtctactgttctctaactaagtttatctcaattaattactttcctaactagttctatcttaataaattacttaagtaaagttattccaaggatggagttacactgaatgaatttgagtttacaaaattacacacttgaacatccattagggctttacccttttattttattctttaataaagactgtattacttaaattaatcgagagtagccatggaattaggacatgtaggtgaatataatttaaacagatagagaataacattatgaacattttgcaatttgaaccatccaatttggagttcatatgcaaaagatatgaaattcacaagttttagaattcaaaaacactaaattagacccaattctgtgataaaaataaaggccaggggcttctctgcaagaaactaggggcctgagcgctagaaacaggactgcgggttatagtacctgaaaaccgagagttctttttacaaaacgacaaatcgaaggggtatcagatctttgaagttgttagatctcggatcgacggccaggatcaacactggcggccgggcgcgcgggcgcgtggacatgagcacctgacaagtggcgctcagggcaggacacaacgctgatgcgcggggcccacaggacagcggcgcgctgagagggcggggcgctctggccaccagatctcggatcaatgaccctagttcaacgaaccatgcaaaccattatccgaacaattgggccatcggatcaggggtgagtggccaggatcaggcgtacaaggattcaacagtccctggccggccaagggcagtgctgcttgcgctcgcggcggtgttgccgctggaggcgaggcaggctggggttctaggggtgctggggtggtctggtaggtcgaggaggttagggagggcccaatgaccactatggtgaagcttgggtcaggaggacaaaaccgaggtgggcagacaacggaggaggaccttgggcagactggagaccactccaacgagcaatacccaccgcggtgggggataatccggcgcaccgaggccggcatgagcttttgcgaggggggtaggagtgctctatgcctaggtttgggcacggggaggggctgtaccggccgaatgccatgaaggcacaacggttcgatgaggagtggcgtcggcaagcccaaattcctcatggtgagacaaaattagtgcagaggaaaggcgagggaatgttccttacccagaggcgacgctcgggcagcttggcatggcgcggggggacttcagttggccaaacgaagaggaattgtggcggcggtgaactccatcctgtgcaggggagatgttaagcgcagacggggtaggggggttggtgaaaggggaaccaccgtagattttcggtgcgcagagctcaggcaaagctcaccgtggtcgaggcgatggcagaggcccgacgacgactgcggaatgatagggcaatggaaggggcggcgatgcgagctgggtgagagcgagggcagggagagagcgaatgagatgtaggggtgagctgaggggggcatggggtctttacctaggcgctcgggtgacgtgtgtgggcgagtcgtggggtgtgggcgtagtttgactgcatggagctcacgtcatgggcgcaggcgcggcggttgcggggaggagacaggtctgacgagcaaggcccgcgagtcagcaagggggcgaacggcgctgacagggcggccccattgggcgatcgatcatactcggaggaggccttctctgagtactctgagtcgccaaaatctttagaaggaggacttggggcgctcttgcgtttgccgtcggtgcggcgaggccaacctctgcccctcctacccctgcccatggtcgggtggaaagtgagggagtgaggaagaagaaagcaagtgttcaaagaacaagtgaagaaaacaaccagggcaagcgggctatttaaagaggccgggggtgactatccacttcctaccccgctcgccaaacagtcgcaagaattcaataagcaattcaagccgcttgaaaagaagtcaggcaactggcgccgtttcgcgtaacacggtaccggttggacccaagtcaactgcttaggcaaatgattacacatctccgtcacatcaagttactacttcaggacaacacgataaacactctgcgtaccaagacacccattgggcacacccattgggtgtgtcgcctagaattttcaaagattttctgaataagtgatatccacaaaatatacgcaaagaatgtaccacgacaaaaggaggagatcggctgagatggaaggaagtccaaatgtggttactgaagcgcaagtccaatcaacagaagcattgaagcatagagcaggttgatgtccagctgagggtcatctgcctcaactagccagatgtccaatctatcaccgatcaaattgatttcagacctaacaaggcatggacatatggcatcgcctggttattcagaaaatgtcaatttcaaaagcataagatgaagacatttcaatggattatttctaaaatccactcaaagctcgggggctacacccattgggtgcaccttcgatgcacccaatagaactacattaccttgaagccaaaatgttgatttcaaaagcataagatgaagacctttgaatggattatttctaaaatccactcaaagctcgggggctacacccaatagaactacagtaccttgaagccaaaatgctgatttcaaaagcataagatgaagacctttgaatggattatttctaaaatccactcaaagctcgggggctacatccattgggtgcacctttggtgcacccaacagaactacagtaccttgaagccaaaatgcttatttcaaaagcataagatgaatacctttgaatggattatttctaaaattcactcaaagctcgggggctacaaccaatgagtgcactacagcagaacagaaattaggccaaacagcaaatccataggccaaaccaagaatctttgggccgattatttcaaaatcaactcaaagattgggggtttgtgggggacagatatcccccgggtccactagaaggagaaagatccttgcatggggcctcgagccagttactccgcaaggccatctcttcgtgggccgaacgaagactgctagcaaaatgggccggcccgagaaggcgttgggttccagccagatagtccatcgaatcgagcattatctcgagagaccgttcgactttcccgcgcctaacaccctcgaatgtcggagtgggtcagggatgagtcggcgggattttcgggagattggttaggtatgttcactattagttaggagatatgtaatcatcatgtacgtaaagagtgccccctggtcgtgtatataaggcccagggggaccccatcattttcatctcaattagcctttctccgttcaggagacgccacttgtaacacgccacatatacaaactctccctaggaagtagggtattacgcctcttaaagcggcccgaacctgtagaaaatcgtctgtctctctttctctcgtgctcctagaacgaaccattgagctacaatcaacaacactgtcctacccaaaagcatcgcaagggtaaccctaggtgtgcggtcggacactaaacaccgacagtgagcgagcgagcgtctcctacaggtgggacccacctgtcagcgggagagggcgcttgggcacgcgggggcggactgggcctgatgggccaaaaggccgagaagggaagggatttggcttctttacctttttcttttattctgtatttcctaattcctttttcttttgtttttctcttttggattcaaattcaaacatgcccaaaattcaaattcaaataattcaaacatgtgcatcaaacaaaagagtaatctaggtttagcatgatgcaacatttcatgactctcgtaggttttcatatagtaaagaaataattaatctcccacctaatagacataactctaataaaaagaagagagaagaaaactagagagagaaacaagaggtaacacctgaatttggtaggcattagagaagaaattttatacccccaaattcaggatgttccaaacctttcccccttaaaaagaatctcgccctcaagattcagggttggctagcaaagagctcgggatatttagctttcagatcatcttctctttcccaagttgcttcttcctctgaatgatggccctacttgactttgcacgttttgatggtgcttcttcgagtgactctgtttgctgtttccagaatctgagttggcttctcaatatatgttaggtcttcttgaacttcgagatcctcagttggcagttgttcttctagtactcgcaaaaacttcttcagctgagacacatggaacacatcatgcactgctgataggctctctggcaggttaagctgatatgccacttctccacatcttgcctgaatctggtatgagagtgggttcaagctcaatcgtcactccttgggtgctgtttagaaatccgagactcagcctgtcgaattcctttgctagttcatatggcattggatgagcgaccatcatgttgactagacttttttgctcaaagcatctgcaacaacattagctttgcctgagtgataatgtatctccagctcatagtctttgattaattctagccatcttcgcttcctcatgttcaactctgacttggtgaatatgtacttaagactcttgtggtctgtgtaaacatcacacttctacccatataaatagtgcctccaggtcttcattgcatgaaccacttctgctaattccaggtcatgtgtggggtaattactctcatgaatcttcaactgtcgggacgagtacgccactactctcccttcttgcattagcacacatcttagtccagtgtacgaagcatcacaatacactgagaatgacttatgaacatttggtaggatcaacacaggggttgtagtcaacttctttttcaatgcttcaaaggactcttggcactctggggtccacttgaattcaactttcttcgctagtagggctatcattggtctggcaatcttggagaaaccttcaatgaaacaccgatagtatcctgccattccaatgaaactcttgattctacggatgtctcttggtgctttccagtctagaatgtctgccaccttcgaatacatagctaatccgtctcagtttatgatgtgaccaaagaacatgactttgctgatccagaactcacatttgctcagcttagcatacaactgatgctcccgtaatcgttgcaataccatccttaaatgctccttgtgttcttcctcattctgagagtatatgagaatatcatcgatgaacaccactacgaacttgtcgagatagtccatgaatacaccattcatcaggtacttaaagaaagtgggtgcatttgtcaatccaaaggacataactgtatactcatatagcccatacttggtgataaatgttgtcttcggtatatccgaaggttggatcctgagctgatgatatcctgacctcagatctatctttgataacactccagctcctctcaactgatcaaacaaatctttgattcttggcagagggtacttgttcttgatagtgacttcattcaaggctctgtagtcaatgcacatcctctttgtcccatctttcttctccacgaatagaactagagtggcccaaggcaaagtacttggtctgatgtaacctttctctaatagctcgttgatctacttctttatttccaccaattctggtccagacactatataagctctcttggaaatagggcggtgctaggttcaagcttgtcacacccagattttaggggttcaaaacctgggcgcgaaataatcaccaagtgtgctaggatcaggtctcacacatatgatgactcatggtacagaaatgaatgtcacatcattaatatataacagagttctgtacaaaatagatacataattacatcatatgaagacaacgatccagcaacgcaaagttgaccgggagacaacaacctagaccactcatggactcatcactgcatccttcatgcacctcatcatgtggtacctattcttgacctagggggatgtgagtacaacaagggtgagctcacatacgttcatcgctcaacaagttgtggggaataatgtgcatgaactcaccataggtgggagctcatgtgaagtgtaaggcttaccaaatgagatggttaaagctgagcattgcttttaaagctgaaggtggcttcggcgatcctttgtatcattttgccgaaggtgttttttccttgaggacctttggtggagaagaagacccccaacactaggttatttgtttgactctgcaaccccttaggaacaacttttgagtgttttcacctttactatgtgatttttatgatgttgcattccttagaaacgacttttaagccttcaacaccttttctaggtgcagtgtgtaacatctctggtgttacgataactacaaccttggcatgtcatcatatggattgacattaacttgtttagtatacctagaatgcattcactaggttaaaaatccaaaccaaatgtggtgtgttgtttgttgagtaagagaggtttgaaaaccttgtttgaaattgtatattaacaaagcaactcctaatctaaagatgttttggccatgagatctaaataccaaagttggatctaagagaaaagaacaactttgcttttatgtgatgaattagagtggatagatcgcttggagaaaaggaccacacttgaaaccctaaactagcccaaaagttgtcacacccgggctttaagggacaaacccgggtgcatctcatacatgcgccaagaagacaacatatataataacagagtgtatagagatgaatgtcataataacatcagagtatttattacatagcggaagtcttattacaaaataaaagataaaatataaaacgaactaaggatcatccttggcgcaaaaatcgactggggaaacgccacctagatcagatcaaactcctcgctttgtggctcctcctgaaccacctgttcttctcctatggggggtgtgagatagcaagggtgagctcacacatgatcatagctcaacaagttgtggagaaccagtggcatgaactcaccaaaggtgggagttcatgtgatgtgtaaggctaatcaacaacaggggttaaagctgagcattgcttttaagtagttggtcaaaattttattagcagttactaaatgtaagtaaataccaaaccttaataaaaataatagaataaaattaataaataatcccatgcaatgcaaatgacaaattgaatttaagttccataaattaatcattagagagtcctgagctgctcatgaccgcgagcacgactagtataccagttttacactttgcagaggttgtaccctgtacccacaagtcgtgtatcccatgtcaccagggttagctagacccttagacactaccgaggtgaatggctagggatccactacgaggcctttacaaagttctagtagcttccgaaaacccactatagtttatgggaagagcacttgcaagaatcccccgtctgaccgccatcgcagcaaaatcaacccgagaacctccttgcatgcaattccctactgcccttgccccttttgggtaaggtagtcttccactacctttcctagttagttggccaagggcgtcccattaaaccctcgtggtggcacgtgtttctcaagttaagctccatgttccaattaacatttaatgatcttgacatgaacataaataacataacagaataattggaacatggatataatgaaatattatcccaaaaccatataaagcaatagcaaaactacccaagtgatttaggggtaaacaaggtaaaaaggataaacatactaggatgacctattgggtcccatcaaaattaaacctatgcattgaatagtgataataaagaatattattgggtaaatgaaggtgatcaagggcacaacttgcctggcacttgagattccagttaccagtatgatccttcagatcctcgtaacctcaccactagtcgtagcaatacaaacaaatagtgtatagacaaaattaacatcacaccaaacataagaatatactgcataataatgatctacatgttgctatgagatcgtgggttcgagaactactacgatcagaattacggttaaggagttatgaatttatagaggatttgtgtgattaaaatattaaactatattataaattggttaatataaatcatatgagagattattctataaataattatctcaactttaatctaagttatgaattgaccatagattattttctagtagtccataatgataagcagtttaacgagactaaccaacatcaattaaatacagatctaattataaaataatgagacatggtataataaatgttgttattgcatagtaaatattcgtactagactaacgcaacttgaacggatcaaatcgaattataacggaggagttatgattttctgaagattttatgtatttgatatgggattaatttggagatcaattttattattgtttcatgtcaaaatagtggtactatatgatgaacaatattattacaaaattataagaattggaacggattaatttggacttcaaatgaattttctatgaattaataaagtttctgaatttattttggcactaaaattcaattcttataattatttatgtgattttccctgccctctggacttcgcgcacaaaaaagataagcacaggggctaatttgaataattcaccagactcagtccaacccaagggtggacggcgggtttattctataaaaacacaggggccaatgtgtaaatttgcgcccgcgaagaggtatggttctctctgaaccgttggattagaaaccaagggtccagataaaatcctcactttaccgaaccggtacacgcctagagccgcctgatctagatccgatggctccgagattaaaatgtcgcgatctaatccgagccgcaaacaacaagatcaacggcgcggatctcaggaacgactgggcatgcctgtgcctactctccaccgtccatcgtcagattaacgacacatgtgtttagcaaccgtcgcgcaacaatggtgcggctgacaccgttatatcccgcatgcaatccatagagaaaggaggagctactcgttcaaggaccccacttggtcgtggcgcggcttcacgtgcggagtgcgcacgagtccggtcaccaccagcaggattctcgtgggatttggttgagtcggggtggagcacaaccgagtattccggcaaagttgttagtagtgcacgcgagctgaccgcggaggagatgacgaccgcgtccctgaccagatggccccacccacagagaccggcgagggcggcatcaagaactgggtcgatgcgcgcggcggtcaactgaccaatgggtccctgtggtcagcgagggtccacgagtgcgcgtgtgatgaatgactgacctaggggatccacgtgaagccacgctaattcagccgggccgcacagggatggccggaatgggtcgagtctggtaaggtaagcccattcgccaattcccccttcttctctcctttttctttttgattttattttctattctttctattttgaattcccaatttgaatttggatatttttatgagttgcacctttgagtaaatgtacaaattcaaatcttaatgtagaaataatatattttattatatattttattctattttttgtcacatagtattccctttcttcttttccaaactctagaatttcttttaggatttaatttccctttggagtattaacatacttattattatatttttttctatatttttatatcatcacaaaaatgcacacaaagtaaaatccagcataatgcacatgttaattatgtgttctttgttctatttatccacttttaaccagtgttgatcacatgtaatgaatagtagaggccacaaactattgagattatatctagtctctttattacacttttgagtattacaaatcctaccccccttaaaaagaatctcgtcctcgagattaggaaggactagggaaaagttggggaaaatctatgcgaagctcttcctctctctctcccaagtagcttcatcttctccatgatagctccattgtactttgctcatcttttatcaccttatttcttgtaactcgagtcaaggtgtcaagaatcttgataggatactccgtgtaagtcaaatcaccctgaacaatgagctcttccattggtaactgttcttcagggacacggagacacttcttaagttgagacacatggaatacattatgcacattagatagattatcagatagctcgagttgataggccatctctccaactcgcctaaaaactctgaatggtccaataaagcgaggggacaatttgcccttgactttaaatctcctcattccacgaagtggtgacaccttgaggtacacatgatcaccttcctcaaactccagtggtcttcttctattatcagcgcaactcttttgcctggtctgagctaccctcaaattctcccgaattatacggacttgttcttctgcctcttgtataagttcaagtccaaagaactgtctttctctagtctggtcccagtatagaggagtcctgcacttcctaccatatagagcctcgaacggtgacatctttagactggcctggtaactattattatatgagaactcggcataaggtagactcttgtcctaactactaccatgctgaagggcacaagctctcaacatgtcctccaatacttgattagtcctttcagtctgtccatcagtctgaggatggtaggccaaactaaaattcaaattcgtatccatattctcatgaatacttttccaaaatctggaggtaaactgtgatcctctatccaaaatgatcttctttggtacaacatgtagagactcaatccgagccatatataactctgccaattgagataccttataagtagtcttgaccggaatgaaatgagccactttggctagtctatccacaataacccatatagaatcatatcctttcgagatgcgaggcaattcagtaatgaagtccataccaatcccttcccacttcccttcgggtatctttagtggatgcagtagtccagctggcctctggtgttcagccttaactctttgacacacatcgcacatagccacatgtgtagccatatctctcttcaatccataccaccagtatttctgcttcaaatcctgatacatcttggtactaccaggatgaatagaataatccaagtcacgtgcttcctttaaaatagtctcacgaaggctttcaatctccggaacacatatccgatccttgaaccacacaatgccttgttcatcttccgtgacttccgaacctcgaccttcagtaataagatccttgatctcttgtatcttagcatcactaatttgtcctttgcagatttcttgctccaaggtaggttccacatcaatagtaactccttcagtgtgagcaactatccctaggttaagtctcctgaaatcctctacaatctcatcgggtagctgggcaacaatagctgaatgaacgtgctcctttcgactcaaggcatctgtaaccaaattcgccttgctcgggtgatagtgaatctccaaatcataatccttaataagctccaaccaacggcgttgcctaaggttgagatccttctgagtgaatatgtacttcaaactcttatgatctgtgtatacttgacacttggttcccataatataatgtctccaaatcctaagcgcatgtacaacgactgccaattccaagtcatgagtggggtagttcaattcatgtttctgtaactgacgagacgcgtaggcgatcacatgtccttcttgcatgagcacacatcctaagccttagccacatgcatcacaataaatgtcaaatcccttctgtagatctggcataaccaacactggggtgacatcaatctcaactttagttggttaaaactatcttggtacttctcgtcccacttaaactctcttcccttctccagaagtgaggtcatagactgagcaatcttagaaaatctttcaataaatctccgataatatcctgcaagtcccaagaaactctaaatctccgataatatcctgcaagtcccaagaaactccgaatctctgtaactgtagtaggtatgctccacaccactatccccttgactttagcaggatccactgatatccttccatgatatgttcaaggaatggcatctcgtcaatccagaacttgcatttgctatacttggcgtagagttgattatctcgtagcttctgtagcaccaatctcagatgttcctcatgatcactatcactcttggaataaataaaaatatcgtcgatgaaaccacgatgaatctgtccagatcatgaacaccttattctctggatccataaaataggctggtgtattagttagtccaaatgacataacagtgaactcatataaaccatatcgggtcgataaaatcgtcttggtaatatccgatggcctaatcttcatttggtgataacccgatcggagatcaatcttcgagaatacccttgcacctctcatctgatcaaataaatcttcaatgcggggtaatggatacttgttcttcacggtgacatcattaagggtcctataatccacacacatcccttgcgatacatctttcttctgtacaaatagaactggcgctcccccaaggtgagggactcagacgaatgtacccagcctcttgtaactctgttaactacttcttaagttcttttaactcctctacagacatcctgtatgcccgtttagatataggtgcagtcctaggtagaagatcaatcacaaactcaacttccctatctggtggcatccctagtaactcctctagaaagacatatggaaaatctctaactgcacggatgttgccacccacaaacttctcatctactaagaatgccactaatctggtggtggtagttactgcaatctcaacttcaaatctttctcctttggaactggcgagttctacggtttccttagcacagtgtatatactgcctttgtctttcttaaccatgacataccaaggatcaagtctatacagctctcttctaacaatataggggtagcccatatgggttagaaatacagggtaagaaaggaagaattgtagacaaggcgagtaattacgagaaatgttactgcaaggatttattaactaagcagattagtgtgtcacctactaaagttaattcattatattatggtggtacatggtaagatgcccgtctatactatttcaatcaatcaaagaagcaaatcatgcattgatcatcagaacaatcaaccaacatttttaatagagaaaataattttaatttcgtcttaggttccctgtctctgaaaaagttcatagttgtaggattccaaggtgtgaaatccatcttgtcttagagtaggaaagatacgaatattcagagtagaacaacaagaggtgagacaggatcaagatgagataagtatagaatgaatcagagtaaggtaagcaggtaagggtttgtccatttctatctaggtttcgtcctacagtcaacatttcctctgataccacttctgtcacactagggctttaagggacaaagtcggatgcatctcatacatgcgccaagaagacagcatatataatagcagagtgtatagagatgaatgtcacaataacatcagagtatttattacatagcggaagtcttattacaaaataaaagataaaatataaaacgaactaaggattatccttggcgcaaaagtcgactgggaaacgccacctagatcagatcaaactcctcgctttgtggcacctcctgaaccacctgttcttctcctatgggggggtgtgagaaatcaagggtgagctcacacatgatcatagctcaacaagttgtggggaaccagtggcatgaactcaccaatggtgagagttcatgtgatgtgtaaggctaatcaacaataggggttaaagctgagcattgcttttaagtagttggtcaaaattttattagcagttactaaatgtaagtaaataccaaaccttaataaaaataatagaacaaaattaataaataatctcatgcaatgcaaatgacaaattgaatttaagttccataaattaatcatcagagagtcctgagctgctcatgaccgcaagcacagctagtataccagttttacactctgcagaggttgtaccctgtacccacaagtcgtgtatcccatgtcgccagggttagctagacccttagacactactgaggtgaatggctagggatccactacgaggcctttacaaagttccagtagcttccgaaaacccgctatagtttatgggaagagcacttgcaagaatcccccgtctgaccgctattgcagcaaaatcaacccgagaacctccttgcatgcaatcccctactgcccttgcccctttcgggtaaggtagtcttccactagctttcctagttagttggccaagggcgtcccattaaacccttatggtggcatgtgtttctcaagttaagctccatgttccaattaacatttaatgatcttgacatgaacataaataacataacagaataattggaacatggatataatgaaatattataccaaaaccatataaagcgatagcaaaactacccaagtgatttaggggtaaacaaggtaaaaaggataaatagactaggatgacctattgggtcccagcaaaattaaacatatgcattgaatagtgataataaagaatattattgggtaaatgaaggtgattaagggcacaacttgcctggcacttgagattccagttaccagtatgatccttcagatcctcgttacctcaccactagtcgtagcaatacaaacatatagtgtatagataaaattaacatcacaccaaacataagaatatactgcataataatgatctacgtgttgctacgagatcgtgggttcgagaactactacgatcggaattacggttaaggagttatgattagaggatttgtgtgattaaaatattaaacaatattataaattggttaatataaatcatatgagaaattattctataaataattatctcaactttaatctaagttatgcattgaccatagatcattttctagtagtccataatgataaccagtttaacgagactaaccaacatcagttaaatacagatctaattataaaataatgagacatggtataataaatgctgttattgcatagtaaatattcgtacgagactaacgcaacttgaacggatcaaatcggaattataacggaggagttatgattttctgaagattttatgtatttgatatgggattaatttggagatcaattttattattgttttcatgtcaaaatagtggtactatatgatgaacaataatattacaaaattataagaattggaacggattaatttggacttcaaatgaattttctatgaattaataaagtttctgaatttattttggcactaaaattcaattcttataattatttatgtgattttccctgccctctggacttcacgcacaaaacaaataagcacaggggctaatttgaataattcaccagactcagtccaaccctagggtggacgacgggtttattctataaaaacacaggggccaatgcgtaaatctgcgcccgcgaagaggtatggttctctctgagctattggattagaaaccacgggcccagataaaatcctcactttaccgaaccggtacgcgcccagagccgcccgatctagatctgatggcttcgagattaaaatgtcgcgatctaatccgagccgcaaacaacaagatcaacgacgcggatctcaggaatgactgggcatgcctgcgcctactctccaccgtccatcgtcagattaacgacacatgggtcatcttccatcccgcgcctacaagtcacggcggcgcgcccaacctacggcggcggcgcccaccggagaacccccagccgactaccagcgcccgcaaactttctacagtatggcctacgcctatggggccaaaattgaacaggtcacaaggttacttacccatggtggggctgcggcatactgtgaccacgaaaggaaatggcatcgcccaacagtgagaaattcccgacatcttggtccaagatttcccccacggcgaggtattaaaccttcacagcgcttcggcggactcccgcaaaacttcgccgacgatcccgtgcagaggctggcggtagtctggccacggcgcggcaacgcaaacctggcggcgcaaatcctctcgacgccgagccgccaaacagtgatggtagagaaggtaaaaggaggggaagaaaggaacaagcctaggtccacaactcactttacagacgcgagggtggcaggggcgcaacaaccatcgcgcgacaatggcgcggccatcaccgttacatcccgcatgcaatccgcagagaaaggagaagctactcgttcaaggaccccacttggtcgtggcgcggcttcacgtgcggagtgcgcacgagtccggtctccaccagtaggattctcgcgggatttggttgagtcggggtggagcacaactgagtattccggcgaagttgttagtagtgcgcgcgagctgaccgtggaggagatgacgaccgcgtccctgaccagatggccccaccagcagagaccagcgagggtggtgtcaagaactgggccgatgcgcgcggcggtcaactgaccaatgggtccctgtggtcagcgagggtccacgagggcgcgtgcgatgaatgactaacctaggggacccacgtgaagccacgctaattcagccgggccgcacagggatggccgaaatgggccgagtctggtaaggtaagcccattcgccaattcccccttcttctctcctttttctttttgattttattttctattccttctattttgaattcccaatttaaatttggatatttttatgagttgcgcctttgagtaaatgtacaaattcaaatcttaatgtagaaataatatattttattatatattttattctatttttttgtcacatagtattccctttcttcttttccaaactctagaatttcttttaggatttaatttcccattggagtattaacatacttattattatattttttctatacttttatatcatcacaaaaatgcacacaaagtaaaatccagcatgatgcacaggttaattatgtgttctttgttctatttatccacttttaaccagtgttgatcacatgtaatgaatagtagaggccacaaactattgagattatctctattctctttattacacttttgagtattacaaattgaaacttaaaatataatgtgagtttgctaaaagtccatataacaaagatgtagagcttgcaaaactgaacaacttttatatgtggagctttccaagttgtgtagaataattttaagtaatttgcaaaaattaagaattagtcggcttttggatttctgaaaattgtgaaaattagttgattttagaccccctatatcttttaacccatgggcttttgacagaagatcactatagcaaaattgtagagttactgtattaagcattgtgaccctaaaaccatttggaactgggagaaaaagaggctcaaaaccttgctttcagattctgatgttctaaaatttgttcagttaattgaagtgcagttttagcgttgtttaccaaattttagagttttattatgactaatccatgatgttatggtaggtactctctatagaaaagtgttagagggtagtgtggtgagtaatttccattaaggtggatcccctggccttgcttaaaaagggcagaaaatgctgctcctagtcactctgtcatacattgctgtgctgaacctatttcagctaggctgaatagttgcagttcgctggtttggtgctcgataacttgaggtttgttgagctttagctagtaaccattaaaacaaagttgaagaccgaatatcagtgacttaccccaaaagtggaatttaaaatctagacaagattgtttaaaagttcatataccaaagttgtagagcttggaaaagtgaataagtttattatttggaaatttccttattttatagagaaatttggagtaatttacgacaattcagttttgggttcatattggaattgctgaaaattatatcaactaatcaactttggatctttatagcttttgatctttaaacatttggaaggtcattgtgacaaagttatagagctatattaggagtgtaagtttggttaagtcacctagccccaaaggcatttggaacttggagaaaagctggtccaaattagagtttcaagaattgtgaatctcagacaatataaatttggggtctgatttttatatttgatgcaaattttgggcccttttagtttgaaatccagcaggttttagttaagggccactatatcaaatgtgtaaagaaactataggagtttaaagtttgctaaggtgctagccctaaaatcatatgctactaggagaaaagggggaccaaactagggctgtcagatttcagacttcgtgccaattcaaggactgaagtttcgtgttttggtccaacttttgagctctctgctgctctatccatatagttatggattatggccactataacaaagttgaagatctacaataggggtactaacgtacttacgacactttaccatagaagcatttggaactgagtgaaaagtctgtcagaaatggagctgacaggtttcctagttttcaaacctgtaacagtagtctaagtctgaattcagtgttgtgtgactgaagttggaccatctttgtgggaaatctacatagctttgggccatggtgtctgtataggagtttaagcccatatgatggtgaataagtctccttaagtgactttggtttgatcctacacaaaagatggagaaaaagttggctcaagttggactgtcagactgtctctaactgagtttgattcagtaactgaatactgtatctcagtgaaggatgtctagtttggagctcatttgtgatgaatgcaagtggttttggactgaagttgctatagctaagtgagagaccatagtaatgagtacatgtttcctagagtgagttggacttggttccacataaacctgggagtaaagcatctccaaatttcctctgtcagatttgagaggtgttgatttagttgactgtagctgagagaatttgtgtgtttttacctacctttggagccctatggtaattagtacagggagaattgagttaggaactctatgtcaagatgaaagaaaatgtcaaggaaaacaagtttcatacaaggagttggccttgctgctgtgtctaacttcgagaatagttcattacaaaaccttctgtcagacttagtgagggctgttgcagaaagctgaaactggcatttcagtaggggtgtctgatcttggaacactgtagtttgggatccatgcatctttgcctaaaggatgctatagaaactttgaagagctatgtattgttaacaagtttattatggagtgttgagtctggtgctgtgcaaaaactctagtaaaatgtccccaaatatgtgctgtaagaatgtgctaatctgtctcagattcagactactgaattgggtttcagtgatttggtgtcaactttgaggcatggtaagttgtgatccatgtgtctttggccctggaagtctatagcaaccttgaagatctataattagtgaacaaatctatttaagtgggtttgacttgattccacacaaaaagtggagtaaaacttgcttgaggttggactgacagatagtgctttaactgcatttggttcagttctgaaatatgaaattgttgtatggtgccaagtttggagcccttttgtgatcaatccataaggttttggactaagaatcttatattaaagttaaagataatttaaagtagtacaagtttattataaggtgttagtcttgttgttgtgtagaattgggagaagagtgggttccaatttggctatcagggttggtgttatgctattgtagataactcaagcagaaaattcagtgagtttggaataagtttggggcactgtaacttttgatccttgcattctaggtcttgggtgattaaaacaagttaatagaactatgtgtggagagtaatgtgtattaagggagatgggtctgttgccatatgtaattatgagttaacagggactgaacatgagggtgatgaatagggcagcaggactagggaactggattcagagtgggctgagtaaactaaagaagatcacatattccctactggtgtcacttatgcatttggatgaagataagcatgtggtgcataatagaaggcctagagacttccatctcccctaaaaatatcaggatggactgagttgcgcagtgaagtagtagtgactggttcagtgtactagtgtttgtggaattgagataagtttggacagaaaggatattagtgatttcacttcagcagagaatatcaaattggaaccatttaagcctgtccacgagggaggccttatcggctccctcccctatttgttttgttgaacaaaggatgatattttggctatggaggctgaccaggtttagtgttcttgggctggtgtggtgcgtgtgcatgtttgccatgtgtgtgtagctcctgttgtgttggcaccctgggagtccttccccaatgtgtttgtgtgcaaggtcagtttcacttgcccatgttcagctaccttgagatcctggttcagtgaaagtttcttctctgccctcgagttctatccaaggatagctacacaggtgttgtggtccttgtgctcctgctagtattaataccctccctatcaagtttgtatggttctttgcaagagaaggttaatccctaagtaaagatttggttaagtgtgtgaatagaggagcaagagtatcaagtgtactatagtctttggatgatgttacttaatagttttggggttcttggttgtggtattagagtgcttagcctcttgtagttctgatagttttggtgtgcacctttagattggagtagtcttgtaatgctttatgttatcctttttgcaattgcataagcataagcatccatgatcatgtcatttcatgtagatctcccaacataagtagtgaagattcaag

SEQ ID NO: 355 - DNA, 16899 bp, Zea mays
  Intron number 1 from transcript GRMZM2G701803_T01 (locus G RMZM2G701803) derived from phytozome v7.0 (chr-ID 3; pos 1 48323088 to 148339986)
gaagggcaggacgcgtggacatcgcgcggcggcaggttctataggacggaggaggccacggcggccgcagaagcgggtggtggtggtggtggaccagagctccggtgccaagcacgccatgatgtgggcgctcactgaaagggaaatagggtcaaaccttttcttaaatgattttggtggttgaaatgcccaacacaaataattggactaactagtttgctctagttgatcatttcacaggtgcataagttcatctacaactattctaaatcgactatccggaataccgtagattattccggacaagagaagttttttggaaaaacagaccaagcgcggaccgtccgcgacaccaaagtgagcctcggacaggaacactgcataaacgcaagtcaacactgcggaccgtccgatggaaaagcaagcaccgtccgagaccaggcgcggaccgtccggtcggcatagaaccgaaaaaccagaaggtgacgggttcggtaaaataaattatagcgtccttgcggaccgtccggggtgcacgaccggaccgtccgtgactgcctttatctgacatctgacgacacatttaatgcattatagccgttgatatagtcgttaccgctgaccgtttggatttcagtcgttgatgtacaggggcaaaccatccagaccaggagcgcggaccgtccgcggttggcagaaatgaagcaacagctaggaagtggttgggggctataaatacaaccccaaccacctccattcacttcacccaagcattccaatcctctacattcaatacaagagctagcaatccattcaaagacacaatcaaagcttcaaatctctccaagttccacaattaatacaagtgatcattagtgattagtgacttgagagagagagagactgatctatgtgttatttgtcgctcttgtcgcttggcttttgcaatcgtgctttcttcttcctccactcttgttctcaagacatttgtaatcaacgcaagagacaccaagttgtggtggtccttgtgaggggtctaagtgacccgttgattaaggagaaagctcactcggtctaagtgaccgtttgagagagggaaagggttgaaagagacccggtttttgtgaccacctcaacggggagtaggtttgcaagaaccaaacctcggtaaaacaaatcaccgtgtcatccgctctatttctttggttgatttgttttcgccctctctttcggtctcgactctatttctaacgctaaccccggcttgtagttgtgtttaaagtttataaatttcagatttgcctattcacccccctctaggcaactttcaattggtatcagagcccgttacttcattagagtctaaccactcgaagtaatgtcgggagcatccgccaagagggagattgggaccggcggcgacaagtccgcaagctcggggagaacccactcaagggagtccggccacaagcacaaggaggaatcctcttcctccatcaagacacaacggaaaggtgacaagaagaagaagatgaagaaagtggtctactacgagaccgactcttcgtcaccttccaccttcggctccgaatcggcatccgccacttctaagcgccatgagcgcaagaagtatagtaagatgcccctccgctatcctcgcatttccaaacacactccattactttccgtcccattaggcaaaccaccggtttttgacggtgaagattattctatgtggagtgataaaatgaggtatcacctaacctcactctacaaaagcatatgggatattgttgagtatggagcaaaggtatcgaaggaaggggacaaggactatgattcggaggaggtcgaccaaatccagcacttcaactcccaagccactactatactcctcacctctctaagtcgagaggagtataataaagtgcaagggttgaagagtgccaaagagatttgggacgtgctcaagaccgtgcacaaaggagatgaggtgaccaagatcaccaagcgggaaacgatcgagggggagctcggtcgattcatgctcaaccaaggggaggagccacaagccatgtacaaccggctcaagatcttggtgaatcaagtgagcaacctcgggagcacaaaatgggatgaccatgaaatggtcaaggttattctaagatcactcgtttttcttaatcctacacaagttcaattaattcgtggtgatcctagatacaagctaatgtctcccgaaaaggttataggaaagtttgtgagctttgaattgatgatcaaaggctccaaacaaatcatcgagtgaggcgccacctccacacccgaggtgcaacccgtcgcattcaaagcgacggaggagaagaaagaagagtctatgtcaagtaggatccccatcgacgcctccaagctcgacaatgaggaaatggcgctcatcatcaagagcttccgccaaatcctcaagcaaaggagggggaaggattacaagccccgctccaagaaagtttgctacaagtgtggtaagcccggtcattttattgctaaatgtccattatcaagtgatagtgacaggggcggcgagaagaagggaagaaggaaagaaaagaagaagtactacaagaagaagggcggcgatgcccatgtgtgtcgggaatgggactccgatgagagctctaccgactcctcctccgacgaggatgccgccaacatcgccatcaacaaaggcctcctcttccccaacgtcggccacaagtacctcatggcaaaggacggcaaaaagaagaaggtaaaatctagagcttcactaaatatgcaacatctagtgatgaggctagctctagtgatgatgaggatgatttgcttacaatttttgccaaccttaacatgcaacaaaaggagaagttaaatgaattgattagtactattcatgagaaggatgaacttttggatagccaagaggacttccttattaaggaaaacaaaaagcatgttaaagtaaaaaatgcttatgctcaggaagtagaaaagtgtgaaacattaactagtgagcttagcatttgccatgacactatctctaaccttaaaattgaaaatgccaaattaattgctaaggttgagaaattaaatgttttgtgatgattctcttgtcaaccttaaaaatgataatgctagtttgattgccaagattgacaagttaaatgaatctctttctagccttaagattgagaatgataaattaatgtctaaggctaaagatttaaatgtttgcaatgtttctattttcaatcttagaaattagaatgccatattacatgctaagattgatgaattgaatgtttgcaaaccctctacatccaccgttgatcatgtttctatttgcatgagatgtagagattttaatgttgatgctattcatgatcacctagctttaattaaacaacaaaatgattacatagcacaactaactagcaaaattaatgagcatgagatagacaatgaaaatttaaatttgctagaagtatgctttataatgggagacgccctggcattaaggatggcattggattccaacagggagacaatgtcaagcttaatgcccccaagaaattgtctaattttgttaagggtaaggctcccatggctcaggataacgagggctatattttatatcttgctggttatctcgagcacaaaatcaggagaattcatgctaggaaacctcataatgtttcacatcatgcttttatgtataaaaatgaggcttctagctctaggcaatcaacccatgttaaattgcctaaaaggaaatctcctattgcatcaaatgaacctaatgtttcatttaagacttttgatgcttcttatgtgctcactaacaaatcaggcaaagtagttaccaaatatgttgggggcaaacacaagggctccaagacttgtgtttgggtacccaaggtgcttgtttctaatgtgaaaggacccaagaccatttgggtacctaagaacaaggcctaaacttgttttataggtttatgcatccgggggctcaagttggatcattgatagcgggtgcacaaaccatatgacaggggagaaaaagatgttctcctcctataagaaaaacaatgatccccaaagagctatcacattcggggatggaaatcaaggtttgatcaaaggacttggtaaaattgctatatcacctgaccattctatttccaatgtttttcttgtagattctttagattacaatttgctttctgttctcaattatgcaaaatgggttacaactgtctttttacggatataggtgttactgtctttagaagaagtgatgattcaatagcatttaagggagtattagagggtcagctatacttaattgattttaatagagcagaactcgatacttgtttaattgctaagactaatatgggttggctctggcatcgccgactagcccatggtgggatgaagaatcttcacaagcttctaatgggagaacacattttaggactaacaaatgttcattttgagaaagacagggtttgtagcgcatgccaagcaggaaagcaagttggtgccaatcatccacacaagaacatcatgacgaccaacaggccacttgagctactccacatggatttattcggcccaatagcttacataagcatcgacgagagtaagtatagtcttgtaaatgtggatgactattctcgcttcacttgggtattcattttgcaggataaatctaaaacccaagagaccttaaagggattcttgagatgggctcaaaatgagttcggattaaggatcaagaaaataagaagtgacaacgggacggagttcaagaactcacaaatagaaggctttcttgaggatgagggcatcgagcataggttctcttctacctacacacctcaacaaaatggtgtagtagagaggaagaatagaactctacttgacatggcgaggaccatgcttgatgagtacaagacctcggaccggttttgggcggaagcaatcaacaccgcttgctacgccatcaatcgactctaccttcatcgaatcctcaagaagacatcatatgaactcctcaccggtaaaaagcccaatgtttcatattttagagtctttggtagcaaatgttttattcttgtcaaaagaggtagaaaatctaaatttgctcctaaggctatagaaggctttttacttggttatgattcaaacacaagggcatatcgagtcttcaacaaatccactggattagttgaggtttcttatgacattgtgtttgatgagactaatggctctcaagtagagcaagttgatcttgatgagctagatgatgaagaggctccatgcgtcgcactaaggaacatgtccattggggatgtgtgtcctaaggaatccgaagagtccacacaagcacaagatcaaccatcatcttccatgcaagcatctccaccaacccaagatgaggatcaagctcaagatgatgaaaatgaagatcaagaggatgagccacctcaagaggaggacaatgatcaagggggagatagagttgatcaagacaaggaagatgatcagggtcaaagaccaccacacccaagagtccaccaagcgatacaaagagatcaccccgtgaactccatcctcgtcgatattcataaggggggtaacaactcgatctcgtgttgctcatttttgtgaacattactcttttatgtcttctattgagccatacagggtagaggatgcactaagagactcggattgggtgttggcaatgcaagaggaactcaacaacttcacgaggaatgaggtatgacatcttgttccacgtcctaaccaaaatgttgtaggaaccaagtgggtattccgcaacaagcaagatgagcatggtgtagtgacaaggaacaaagcccgacttgtagccaaaggatattcacaagttgaaggtttggatttcggtgaaacctatgcaccggtagctaggcttgagtcaattcgtatattacttgcctatgctatttaccatggctttaagctttatcaaatggacgtgaaaagtgccttcctcaatggaccaatcaaggaagaggtctatgttgagcaacctcccggctttgaagatagtgagtaccctaatcatgtttacaaactctctaaggcgctttatgggctcaagcaagccccaagagcatggtatgaatgcctaagagatttccttatcactaatggcttcaaagtcggcaaagccgatcctacactctttactaaaactattgcaaatgatttgtttgtatgccaaatttatgttgatgatatcatatttaggtctactaacaaatctacttgtgaagagtttagtaggattatgattcaaaaattcgagattgctatgatgggggagttgaagtatttcttaggatttcaagtgaagcaactccaagagggcaccttcatcagccaaaccaagtacattcaagatatacttaccaagtttggaatgaaggatgtgttgggggccttcggcttacgaaggtcctcaaaaacaggatttaacaatatttctggagtataatatgtgagcaggtatcttcggactcaagtcggtatcacagcaggagaagaccagaataatacgaaggttgatacagcgccgaagatgtgaacaggaaagcttcggcatggtagcagaaaatgaaaccgacttaaagatgaaaaggctattcagacctcgatagattactatagaattattatcaaatgtaaagggcatgaatgtaattttgtatgggctgagtcccgtgcctataaataggtgaacagtacccccgtactgttcacgctgattttgacattcgcttttgcgtcacgcttgtactttcatctccttcaagctgaaggtacatttgtaattcgatgttatttctgtttctacataataataatgcaaaaataagttaataataatatacaattgtttatgttatccttcatattccttttgattcatccttcgtcactgtatagtgtatttatgaaggtatacccctcataaccttcgtccgaaaatcattatatcctaagggaaataatgcttcgaaggacgaaggactttaccgattaacattttctatgttgccttgttcttaactcatagcatttgagaacaagtccccaacattggcgcccacctccggtgaactcacttccactctttgagtttttgaacaccttcggcgatcataaaccttcgctatggcgctgaagaaagcttcagcaactggcactgcagctcttcaaccgctggaccacaatcaggagactgtctctcttcgggaggcccgaagccagaaaaggaaggctgttagccggacacagccagaggatgagatagaccaagaaatcagagacatggagatgcttcatcaacaggtgcaaaggaagaaggaaaagatggccaggctagctgaactgcaaaggcagataaacgaagcctctgaggaagttcgtcatcttactcaggatgagcagcaccgaaggcctcagcaccaagaccttcatcaggagggtttcctcaatgaagatgactggtatgacaatttccatcatgggaattttgtttttgatgatgcttctcctttgtccgctgagctgcaggctacaccttggcctccgtcctacaagccgcctcagcttcccatatttgatggccactcagacccgaagcagtttttgatgagctacgaagcaacagtatcttcgtatggtggcaatgctgcggtcatggccaaatcttttgttatggctgtcaggagtgttgctcaaacctggtactcctcccttcgaccaggaacgatcacttcgtggcaaaagctgaaggacttgttgttaaccagcttccaagggttccagacgaagccggtcatggctcaagctctattccagtgcacccaggatcacgaagagtaccttcaggcgtacgtccggaggttcttgcgtttgagggcacaggcaccaacagtgcccaacgaaattgtcattgaggccatgatcaaggggcttcggccaggaccgtcagctcagtacttcgctaggaagcctcctcaaactttggagaagctgctccagaagatggacgagtacattcaggccgataatgattttcgccaaagaagggaggaggctttcaggttttctgaaatgaccaggggcttcggagggaggttctatccgaggcacgttagatcaattcataactctacccaaaatgatgatagagggagccaacaacaaaggccacaatgttcctcacaggcttcggggcaacaacaaggctccttccgaccaccagctccgagaggcagaggtgccaagggcttcggcagaagatttggcgatcagccaagaagaattttttgcttgttctgtggtgagaacaaaggccataccaccaggatgtgccatgttaccatccagaagcaaaaggaaatagccgaagctgcagcacaacaggctcagccgaagcaggtcatgcacactgcttcgtatcattcgccttacatcccagagtatgtaggcaatcaccctgcagtttctgttgcttcggcgagtcaacctcaagcttcctggcaacagcctccgcctccaccaccgctgcaacaaggccagcagccagaagggagccaatatgctccacaccaaagggacttcagagaacagtccgaagctcgcacagtcaacagcactgtgccagagtcaaagcacatctactgacaaatatcctaccttaatagcaatctttttcattcagttttattttctgtgtaataaaggacattgtttaggtttcatgtaaatagtttcgttgattcccacaaggaaaatatattttcttcacaggcttaagttgttgaagtttaaagatttgtgataacaaagaggaccttcaaattatcgaaaattcttcgaagcaacaaaaagtcgttctaaggaacgcagagtaagtttgccgaagtcacaaaaagccgttccaaagggagcgcagtgtaagttttctgctccaaagtcgttccaaagggaatgcagagcatacagtgaaaagtcaacgctgataccgcctaagtaaaaggcgaagcgcgaaaagtcaacgcgaataccgctaaaagtaaaaggcgaagaagctcctaagggaggcttacagcgaaaaataaacgctgattccgctgaagtaaaaggcgaagaagctcctaagggaggcttatagtaaaaagacaacgctgattcaaaaagactatgtgttttatcgcaggaatgtgtgtgtatcttcggaataaaacaccatcttacacaacataacatcatcgcatcatttcgcatagcataagcatcatacatcatgctgcatatggcacaagaaggggacatgatatcgatcttcggaagaatgttttgaaaggggaaaatcatcggatattgttgtgacaagttgcaagcagatacactattgatcttcggaagtgtagcttcggagaacatcctcacgaagcttggatattattcatcagaacactatggatattgttgtgacaaataaaaattcttcttcacgaagcatgaaaagaagggaaggtgttttttcgtcaaagactcaaaaacggtacgtgtgtaaaatttcatgcatcgtaaagaattgagcagtaaaaacaggtatattacattcagggttacaaaatgttacacatatttcatttcagaagtttttacaatagtgcttaatcttctctcaaaacaacttctgcagcttcgttcaggagtcggttaacaacttcatccatgataacttcagccatctttttaatttcctcgtctcctttcgggtgagggcccggagatgctttagtaggatctgaaggaggacaggatatgaccacattgctattacaaattgcgaacgaagtttaaaaccaaaaattacaacacaataaaaaccattagttaatacctatttgcccttcgggctctgagcttttttcagcggccttagctacttctctagcgtcgtgaatgcccttctcgcttttctggataatttctcgagccatttctcggccaccattatcccagacatcggtgaaaaattttccaccaaccatgctagcttcggccgaaggatctcttgcatcttcgaaggacaaagcagcttcggattgcgctaaaatctttacatgctcgcagccctttttctctaaaatggtggcaattcctctggcacccgagaaagcacatatatctccgcggctatttaaaatttcctcgaaggcctcagcttcgtgatcgatccattcgatgggaccttcggggttgcctcttgtaaagttttcttcgctcgagaatgcgccgacgctggcgaagctagctttcaacttcttaacacactctatagatttgttataacatcttttcttggatgaacgaagctcttcaacagttccctctaaatgatttgcccattggtcgctgagttctcgcttcgtttcttcaagcatgcgttcttctttggctctggccagttgttttcgaagatcttcaatttcgcgcttctgagcttcagcttgacctttaaaagtagcttcgtcttcttttattctatttattaatgaatgtaatattttatctttttcgagaccttcgttcctcagttcaattactttggaacgaaggttgctcagggctatagcacacccttcgtcttcagcatctttctgggccctgagggcattgctaagtatcaggccctgtaaagaaaaatatgtgtgtgtcaatagatttaagcaaacgaaaaattttggtctcaacaaaaaatacaaagatcccatttgttgcacctttaagctattatatgccaggctgtcggccagatcgttcttcgacagcaccgagagcccgtcttctagtgttgggaatccgaagcttttgctcatctctcgccagacagaaatctccttgctgtcagggagacaatacaaaaagtcttcttctccactgccattgaatattaacgccccctttggatacttcagtttttgggcgtaaagctgggccccttgtttttctttttctgataattgtttccccgaagcatgacgaacaatataatcaaggactttgggggatgcttcgggggcaatgacactgatttcttcaacaaaagttggctctgttattttttcttcttcggtttccaaggattttatcttcgtgggctctgaggacccagcttcggcttcagtttcttgctctggagctttagtatcagaaatttcagttttcgcttcgggaatggcaacagtcttcttcggaggtgtgcttgaagatttaattgtttccagaacatctagcacattagccattctctttcttttcggagtcactgctggcaccttttgattttttactgtctcaacatttgctgcaggactcaaaacttctgatgttttttcctcagttggttttttcacttcttccatttttcctgtggatggcgcttcggtcatctctttggtttatggtaacaaaatcttcggttcttccaattctatccttgttggcgtttcggccatttctgcgacttctggcagcaaggttggtttggttggcttttcagcttcggtggccgaagaagtttctccggtgaactcaggcactgaagctggttcaatatagcgtggccgatgtgtgaggacctttatcctctttcttttcggttccggctcgctaggagcagttgcagcttcttctttcgcagaggttgtgtttttcttttctgccctcgaatgggataacgatagtcagggtagacgaacccgattgcatcaaacacccggttcagccttttcttttttcggcctccgaaggctgctgacagtgcagtatcttcggccttcgaataagccccaagcagttcatcacttaaattttcaatactctttaaccagtcatcatctggctcaacgaatttatctccgaacttgaaagtatacttcagcctgataagtccaccttcgtcggcctcctttatggtttcttgcggcatttcccatttctccgcgagcggccatactctgaaggcaatatgttcttgtaccaaatctctcgttccaataaaagaacaaataacaccgaaggctctctggcattcttcggcagcttcattcatttcaaccttcggcctccgcaggccgaagctttgccaaatagggcgcataattatacctttaatatcttcccgtactgccaggtcattcttcacataaaaccattctgtcatccagtcgccgggccatctcttccgaaaggttggcacgggacagcttgacccagaccgagaaacgaaactgtagcagccaaaattattgtgatattgttctttaccccaaggttttgtttcatatgataattcgtgtatgttacagaaacttttcgcatcaggttccagaccttggcttctcacagcccatacgaagatattcagccttataattgcttcgggggtaagttgatgaagaaagacttcaaacattttcagcacctctacgacgaagctgcttaggggaaatcgtagtccagctttcaaaaagcttcggtacactacgacttcattctcttcagggtgtggacaagtcttttccccttcgtcggccctcacaacggacaaatcccggaaataccttcctctcatattgacaagatgattttctttgatagttgatttgccgaaaaccgcatggcttggtcgccaagggcgatcttcagagtcttcaccaccactgtcaacatcataactgtcgctgtcaccagtatcttcagacaaaccttccagaatctccttggtgattttttctgtattggtcttcgacatcgctataagaaaccccaagttcttctcttcgtcgagactcagcttcatctcagcagcaaccttcttatcttcagacatcttcgaaaacactaaaaaactgttttcaaagccgaagcttcaaaactaaaagctcagcaaatcttagtgcacaagagctaaaaattgagtgagcgggagcagatggcaagagagcgtgccaaatgagtttgcggtatgatcttatttatacgcccagtgcgttgaaaattgaaagaccccgcttgtcagtgaatgttgctattctagcaaagggaaggtgttttttcggaccttcggcgtaaagccttcgtccatgtcgcaatctaaatttattattttaaaacaaattaatattgcgaggggctactcttgggggccttcggcttacgaaggtcctcaaaaacaggatttaacaatatttctggagtataatgtgtgaacaggtatcttcggactcaagtcggtatcacagcaggagaagaccagaataatacgaaggttgatacagcgccgaagatgtgaacaggaaagcttcggcatggtagcagaaaatgaaaccgacttaaagatgaaaaggctattcagacctcgatagattactatagaattattatcaaatgtaaagggcatgaatgtaattttgtatgggctgagtctcgtgcctataaataggtgaacagtacccccgtactgttcacgctgattttgacattcgcttttgcgtcacgcttgtactttcatctccttcaagctgaaggtacatttgtaattcgatgttatttctgtttctacataataataatgcaaaaataagttaataataatatacaattgtttatgttatccttcatattccttttgattcatccttcgtcactgtatagtgtatttatgaaggtatacccctcataaccttcgtccgaaaatcattatatcctaagggaaataatgcttcgaaggatgaaggactttaccgattaacattttctatgttgccttggtcttaactcacagcatttgagaacaagtccccaacaggatgctaagcccatcaagacacccatgggaaccaatgggcatctcgacctcgacacgggaggtaaatccgtagatcaaaaggtataccgatcgatgataggatctttactctatttatgagcatctcggccggatattatgttttccgtatgcatgtgtgcaagattccaagccgatcctaaggaagttcaccttaggcccgtgaaaataatcttgagatatttagttcatacacctaagtttggtctttggtaccccaagggatccacctttgatttaatacgttattcagatgctgattgggcagggtgtaaaattgatagaaagagcacatcaaggacttgtcagttcttgggaagatccctggtgtcttgggcttcaaagaaacaaaattcagtagctctttctaccgccgaagccgagtatattgccgcaggccattgttgcgcgcaattgctttggatgaggcaaacccttagggactatggctacaaattaaccaaagtccctctcctatgtgataatgagagtgcaatctacatggcggataatctcgttgaacacaaccgcactaagcacatagccattcggtatcactttttgagggatcgccaacaaaggggggatatcgagattgcttatgttagcaccaaagaacaactagtcgatatctttaccaaaccattagatgagaaaacctttaccaaacttaggaatgagctaaacattcttgattctaggaactttgattaaatctttgcacacataactcatttatgtacctttgatcatatctgttttatgcctatgactaatgtgtcttcaagtgaatttctactaagtcatagattgaaagggaaatggagtcttcggcgaagacaaggcttccattccactctatcggtattatttacccttcgccgtcactccgcaccgctctccactttgttataatcttcactcatatttacttgtacaattgaggagaaagtacaaagggcttatatttcactctcaaaatatccgtttttggcgattcatgccaaagggggagaaagtattagcccaaagcaaaaggaccgcaccaccaccaatttcaaagttttaaagaagattttcaattggtataaattggtatcttattttttttatatatttcaaattggtatgaccactttcaaaattggtatctaaaaccctcttgaacactaagaggataatttcattgagggggagttttgtttaagtcaaaggaaaatcatctgaaacagggggagaaaatttcaagtcttgaaaatgcttctcgaaatcttactcatatacctttgactattggaaaaaagactttgaaaagattttccaaaagaatttgcaaaaacaaaacaagtggtgcaaatgtggtccaaaatgttaaaagaaagaaagcaatccatacatatctagtgtaagtataaaattggtttaattccaagcaacctttgcacttgccttgtgcaaactagttcaattctacacttatatattttctttggtttgtgttgccatcaatcaccaaaaagggggagattgaaagggaaatagggccaaaccttttattaaatgattttggtggttgaaatgcctaacacaaataactggactaactagtttgctctagttcatcatttcacagaatcacaggtgcataagttcatctacaactattataaatcgactgtctggaataccgtagattatttcggacaggagaagttttttggaaaaacagaccaagcgcggaccgtccgggcccttgcggcagaccgtccgcgacaccaaagtgagcctcggacaggaacactgcataaacgcaagtcaacactgcggaccgtccaatggaaaagcaagcaccgtccgagaccaggcgcggaccgtccggcctcaggcgcggaccgtccggttggcacagaaccgaaaaacccgaaggtgacgggttcggtaaaatgaattatagcgtcctcgcggaccgtctggggtgcacgaccggaccgtccgcgactacctttatctgacatctgacaacacatttaatgcattatagccgttgatatagccgttactacttaccgttaggatttcagccgttgatgtacaagggcggaccatccggaccaggagcgcagactgtctgcggttggcagaaatgaagcaacagctaggaagtggttgggggctataaatacaaccccaaccacctccattcacttcacccaagcattccaatcctctacattcaatacaagagctagcaatccattcaaagacacaatcaatgcttcaaatctctccaagttccacaattaagacaagtgatcattagtgattagtgacttgagagagagaaagagtgatatgtgtgttatttgtcgctcttgtcgcttggcttttgcaatcatgttttcttcttcctccactcttgttctcaagacatttgtaatcaacgcaagagacaccaagttgtggtggtccttgtgaggggtctaagtgacccgttgattaaggagaaagctcactcggtctaaatgactgtttgagagagggaaagggttgaaagagacccggtctttgtgaccacctcaacggggagtaggtttgcaagaaccgaacctcggtaaaacaaatcaccgtgtcatccgctctatttctttggttgatttgttttcgccctctctttcggtctcgactctatttctaacgctaaccccggcttgcagttgtgcttaaagtttataaattttagatttgcctattcacccccctctaggcaactttcactcacccacatcgccaacaggggcaacttcctcaccctgctccacatcctgctttcatcttctcattaaggaacctgcaaagaagcccgctgctaaacccttggc

SEQ ID NO: 356 - DNA, 1743 bp, Zea mays
  Intron number 2 from transcript GRMZM2G125175_T02 (locus G RMZM2G125175) derived from phytozome v7.0 (chr-ID 7; pos 4 4364092 to 44365834)
cgatgtgatcttctaattaaattctctgcacctcgcttttccagcatccatttgttggtcgaatcccacattgctatgtactcttggggcaactttgtgcagcaattcaacacgtcaggataatttgggggattggggagtctagctactgcttttgaactggttattattattatgtagttacaccacagttctatgatgttttagaagtaaatagctgattgtaaataagagttgttgggcaagcattgcagctttgccagaaagggtgtgtatttgattgacatatagtagaacctctagcaatgttggaggtgaacattctagtagaatgataaatgtgaaatatatcaggcctgccaatatctggtttaccgggagaaaacttaaatagttttaaacctggtgattaatattgcgatgctaataggtcttgcaaagttttggtccatttgtttcaagtttcaactttgaagaatggtaagtcgttcaatacaagcataccatacaagtgatatataataattaatctacctagccgctgaatgtttcatacatgggcacttaaaaagcgaaagtatgggagcttaaaaatgctataccgcaaagcattagatacagagcgcatgacattctggagaccccaaatggtagtagaatatgattgatgtgaaaagttattctggagatcctaaatggtatattgccagtttgaaaaaaaaatctacaaatgatatcagagcgaaaagtttttgtagtttgattgcatcgattgtactggtgtcataagtttggaacagaggttctaatatggatttttggcctatataaatgaccatacgagggatttcatcctcaagagatcgaagggtttaatagttttggtttgaaattgcacaaactaaacggttttagcttctctgtgattcacaaactagaagcttgagactgtcactggtaattttttggtcattcactagtaatgtatgttgtaatgttgtgttcttgttgggaaattggattatgataaaatgacccttaagagtggcatgtcatatacctctatttatgattttgatttggaataatctaatggataccagttttataattccatgctcttccacatgatacttgctgcgatgccccatgtcagtgcgatatcagtagcttacatttaactcacataatcaattaatttcagttgagtccatttactgatgccccattgacattgctgctgtcatagtacttctgtcattatttgccaattcagtaaacttaggaagggcgctatagaacccatttcttcacttgtgccatattttatttcctgcaccctcttctttgcacttatatcgctatgtttttgtcactgaatttgggcatgacatactccctccgttcttttttatttgtcgtgttttagtttaaaaatgagctagccggcgacaaatatttgagaacggaggtagtattttcttttgaggcattagaaattaacttctgaggaatcatggttctgctgctctttgctgatgccaaatctctaacatatagtactgctaattggaacacaaactagcgaaccataggaatagtgagacatatagacatccgggttcttccatctcactgtcaaagattttatcatggcagatttgaagcatgtgttctgtcctaatgcgcattatttatctccatgcagtctgaagtggacgttgaagcgcagatactgaggaa

SEQ ID NO: 357 - DNA, 5468 bp, Zea mays
  Intron number 15 from transcript GRMZM2G415215_T01 (locus GRMZM2G415215) derived from phytozome v7.0 (chr-ID 1; pos 256436356 to 256441823 reverse strand)
agcacatatttccttaaaaaagcatttataaattattccacaagattgaaattatcatcctttagtggtgttggcatttagcatttgatttatgctaattttttttttccgaatacgcaggagagctgcgtatcattgaattaaaatagaggaaaaacggcctgaggcccaggacaaacagaacacacacaaaacaaaaacacacactcacacccacaaaacacacacaatacagacacatacaacccactaacaccccagtctttcaataggcttcaagactctcctttatctagggttgaaaagagagtgcaggttcctggctccagcagcaacccacaatctcatctcgtccttaaatccgtcttctaaggttgaaaggcagggtcgagcaccatcaaaaacacacctgtttcgctgcttccaaatattccaagccccaagtattaccatactattaaatccctttcttttgctcttaggaatcctggatgaagcctttctccaccattcagcaaagtctgaatctcttcttttaggacccacagaagtgagaccaattggagttaagatactatgccaaaagtgtcttgtgaagacgcaattagataaaatatgctgcacagtttcatcctcttggtcacataaaacacaattttcaggatgatcaagccctctttttttgagtctgtccgctgtccaacatttattgtttatagccagccaaacaaagaccttacacttaggggctgcccagctcttccaaattcttttccagggctcaaaagattccgctccaatgaaaaaagctctataggcagatttggaggtatacaatccattgctgctaaaattccacacatgttgatcatttgaattttgaagctgaaaagaatcaattacctcccataattgtaaatattgctcaatctcagccagagagagattcctctggatatcatgaacccagaagtgagaggtaagggcctgctgcacagtccttacatctttaatttttttcggaactgcagcagcgataaggggagctatatccataatagaatatccatgaatccacttatccttccaaaagaaagttgaaataccattaccaatagtggtagacactgcaacctgaaataaagcacgggcttgggatgatattttaagatccaggccactccaaggcttagaaggagcagttttttgtaaccaaagccatcgcaattgaagggcccaattcaccttttggagattaggaattccgaggccccccaaatcaataggccgagtgattttatcccaagatacaaggcagttacctcctctagcctcctttcttcctttccataagaagttccgttgaattttttcaatggcttttataacccattttggagcattaagagcagtaaataagtaaactgggatggcagagagtacagctttaataagagtgattctccccgcaagatttaaaaaggtcagccttccatcctggaagcttggcagcaattttctctatccagtgagtgaggtctccagcactaagttttttgctgctcagagggagaccaagataggttgtgggaaagttttttgaggcacacccaaaggtctggacagccaatgtagttctctcaaaattgcactgtattgggtaggagaaacttttttgcaagttagtttgaagacctgaggcaacaccaaaacacctcaaaatttctctgaccaccactaagtccccagaaactggttttacaaaaacagcaacatcatctgcgaacattgaaaccctttggctaatgcttctgtcagcaagggggtgtaataatccacactcatctgccctgatgaatagactattaagaacatccataactaagatgaataaaaggggagacagaggatcgccttgtctcaacccacgcttgagttttataggctgtccaggcactccattaacaagaacttgagtggatgaagtccatagtaagttcaaaatcagattgcaccaaacctgtccaaaacccaaatgtcgaagaatttccagaagaaatgcccaatgcactgagtcaaaggcctttttaatgtccagcttcaagaaaatagcagggattttcttatggtgcagcatcttgacagtttgactgaccataataaagttatcatgaatacatctaccccgaatgaaggcactttgatttgtgctaaccattttatccagttcaggagctaacctgttagccaagatttttgtgataagtttagcaaaactgtgaactaggctgattggtctaaaatctcccggaagaatagcctcaacatgttttggaataagagtaatatatgctgaattcaacaaatcaagccttccagggtatccttgttgtataaataagattgcagccagtaggtcccatttgattatatcccaacagcatttataaaagcgccctgtgaaaccgtcaggtccaggggctttatcactaggaagacttaaaatagcagaattaatttcctccaaagatatgggattatcaaaatgcgagagctccaaattgcctttatgaaaattagcaaggttaagactaaaatttcgctcaaacactttaccaatcagatccttgtaaaactgaaacataacctgctgtttatcctcttgagaagaaacaatgttctcgtcaaccatcagtttatgaataaagttcttctttttcctgaacctggcttgcgcatgaaagaaagccgtatttgcatctcctgttttgataaagttcactctagaccttaatctagcaatggttctttccaaagaagaaagatgaagacataataattttagttttttcctcaaccactcttcagccgaccacaaggttctgctgtcttgagcaatttccaaaagatgtagggtcatcttggccaatgcaagctgagtagaaacattacccacagacttatgactccaggaatgcagatccttagcaagtctcttaaatttaatagataatctctccatgggacaagcagccaagatagaggcattccaggaattagcaactacctcctgaaagccttgcatctttggccaaaaactctcaaaatgaaaacgcttctttcccttaaaggtcacattaagcctgaggatcagagggcagtgatcagaaatattagaggcagaactctgcagagaacaatcaggaaataaatcctcccaatcagaagtgtagaacactctgtccagcttgactaaagtaggaacatctctttgatttgaccaggtgaatcttcttccagttagaggcaactccttgagggagagattattaatccaagtatttaagctattcatgagggttctattaatatttgaattactcttgtcttcagcacatcggatcatattgaagtcccctgcaatcacccaggggccaggacaactggttctaaccatagagagttcttctagaaaagccaatttctcctcatctctatggggtccgtagacacccgaaaaccaccaagcagtgctgttttctttcataaaacagactgacactgaatgattaagaattttggagtctatagcagtaatgagccctctacgccaggctatcaagatacctcctctagtaccactagaaggcaagtaaacaaaatccccaaactctgaaccaagacaggaagcaacatcccagtgagaaatagaattcagcttggtttcttgaatacacacaatagtaggcatcatacagtttattaatgattgaagagaatccctacgatgagggtcattcagacccctcacattccaaaccagtatatcaaaattattcattgtgagataaaatacgaccctgtgggataaaccactctacgaaacttgcagcagaccatcagctgggcgaacgagtaattcctcctcagggatatcccacccaactttgtgccaagaagatccagacgtgtagccaaacttcctccccttgctgggaactctgcggctcacactatctgtctaaaactgggattgaaaaatgggcaggctcctgtttctgcggatgatctggaacgctgcgctagagaatttatgctaaattttgttcattgtataaatgtggttgaattatatgaaccatgcaactcattcgttatgtatgcatagttattgacgttgaggcgataatatgacatgctcttctcactgaatgtcctccatgtatgatttctaggtgtaaatttgtaggggggcatcgtgacaatggttagtagggggtaagggttgtgagcctttggggctgtgggaagcatggttgcacaggaatgaagtggactgggcaatttgaggctagtggttggggtttacagtgtctgaagtcttaaggatagaggcttttgtgatgattttgtgggttgttgttcctacgtgctctgaggggtcttgaagctttttgtgatgctttggttatgaaggttaccaaagtgactatggaaggtactaagaaatgaagagagactgattgtgacaggcctaaccagaatagacatctctcatttacagaactgtgccggtgtgtacctacattgtttgatttaccagttctgggtattgaacttttggcccacattccaacacatatggtgtgctgcacatggaaatcatcatgctgtggagtgtaaattggatctttgtaacactgtttaacgaagatactaatatctatgttttttttgcgaaatggcctctagctgagttggttaggtggtccgagtagcactcaggttctaagttctactccatgtgggagcagatttcaagctggggttaaaaaaatcccatcaactgtcccacaccaagcataggtttaaggcctggccccggtcgttctcacatgggctacgatgccactttgtatgggtggggtaggggttcggggggttttcttgacctatgtgaagtcttcttaatacaatgctcagggctgtcttaccacctgtagatcgagtttttttatgttcacatgaaggttatcaataacttggttattttttgtggccagaagcctgtagcactgagtatacccattttttttgccagtaaataacttaaaaataaaatccgaagtcaaatcaaaactccaagttggccttctttgtggtctggaggtcgagcaaaaaagaatcacaacctgtgatgcaaatatgcaagtagcagggataagacctaagatgctaccaactggacaactttaaattatttttatctgtttgaggtgataagagaaggatgtttactagcgcatgtatatacatgtttggtagatttctcaaggatggtatctcttgcccttctctttactgacttaattgttaatatctttgcaagtttgcattgaattttaaggttacacctttttatacaacatattgaacttaatagtgttagtttcctgtcacaggcctag

SEQ ID NO: 358 - DNA, 47350 bp, Zea mays
  Intron number 1 from transcript GRMZM2G403977_T01 (locus G RMZM2G403977) derived from phytozome v7.0 (chr-ID 9; pos 1 04294640 to 104341989)
cgcctagccccagcgaccagcacgcgcgatcggcggtcagcagcccagcgtggcgcgcagccggtgtggcccgccggcgtggccagctcgcggccagccggtgcgtgacccccgacggggcttgcccatgccaggcgcgaccaggaggccattgttggcgcacaagcctggccttgtccccggcgtggccaggaggccattattggcgcgaggccagcctcgtccccagcgtggctcactaccctggtcgagccccatggctgatcctgaaagttgcctagaggggggtgaataggcaagttaaaactttttcaacaaaactagaaacgaactgggtaaaaccggttcaaccggtttgcacgagctcaactaaagaatgagatataaaactgaattgatctcgaaatccacccagttaactttggaaatgagatgttctaaatgatccacaaggttcaaggtagtagatctgagatggcacttctcaaaatccacacaccaaaaagatataaacaaatcttccacgcaatggtgagagaacgaagaacacaaacaaacacaatgagcaagaatacaagagacacaagatttatcccgaggttcggtcacaccaccaaggtgccctacttccttgttgaggcgcccacaaagagcagggtctctttcaaccctaatcctccctttgccgacaacaaaggtcaagcccacacactaatctttgctcaaacgagcaggtaatacaaactttcttgtggtcttccacaagatttggagactcacaagagacacctagtcgtctaggagctagaagctccaagagtaatgaatccacaaagaactcgatgtagtaccaaagctcgaatcaaaaagagcaagaaggatttagagatgaagcaccaaaatcgcagctcttcaatctcactcaaagatttctctccaaagatttgaaatgggagaggcaagaggtgtgtgagagagagtgggaggtgtttctcaggttgggaatgaagttttgtgcgtgctctactataggggagagaggtaggagtgagtatatataggtggggttccaaaactagccattttgacttttctgctcaaaaaccagttgaaccgatccaaaaactggttgaaccagttttcaaaaagctacgcacaactttttggctgacctagcagacagacagggaaaagtgaacagtgcaaaaaccggttgaaccggtttccacgagacaaaaaccggttgagtgtccggtggagtgtccggctgaaccagtatttgaataccagctgaaccaacctgaaaaccagctgaaccagtattttccagagagaaattttggccaagatagacttaaaaagtttgtactacatactttcactaaggattaacaagggtaaaatggaagttttagatcaaggattttgagctttagtaccaacaccaaccttctttttggatccccttgatagtacgataattcctatactcaagttaaataaaatataattaagtaaactccttgagaaattggtgtctcatgtgtgatttctccatggcgttgcttcataaggatcacaaacatccttgtctcaccttttgaagcaaacacaaagcaaaccctgtgacctgtaccatttcaccatatatgagttcaaatcatggcttcaagtcactttattgatgcatcaacatattataactcttcatagctgattagttcatcgacttagtgcaagtactctcttcttcaccttagccatggtacctcggtccacaagccgtcgcttggccttcaccttcgcttagttcctcgaagccctttccttgctatcttcaccctatcaagccattcttgagttacatcatattgagcatccattgagagaatcatttcttcaatattgtgaaccttgcttgaatgtcatctagatataaatgctaagatcaatcaagctctagtttgattctcatagaagcatatatggactaatagtaatatggtcaagccaattcatgattcctcatatctcattcactttggcttgaccaatcctcttaatcacttcaacctctatcatgatcatatttatgcatagtgatttctcaggtcttgtccatatattcaaaccaatatagagaccatattatatccatttgcattgtctcactggttatttaaccttgtgttgaacctttgttcactgatcactatacattattcaagtatgttcatcatactgaatttcctgttcaacacttaacaaacttgttagacctttaaatgtgttgttatccaaatcatcaaaactcacaaaagggatgaatgcactttcaatctcccctttttggtgattgatgacaacacatttaaatcttacataagatttgataaataagattttgaatcctatgatatagtttcctccccctaaatatgtgcatttcagaaaataccagttttgtacttatcggcatttcgaccccggggggtccctggaccgacgagtaaattgttgctgcgtgccccaacccagatgggttggcgcgagatggaacacgaaaggggggggagaaaaccttggctcgggttatcctgcgccagagtgggtgcgcttgcagtaggggttacaagcgttcgcgagggaaagagggagtcccgcgcgaccacactcgtatgagggccctggcccttccttttatagatgcaaggagagggtccaggtgtacaatggggctgtagcaatacgctaacgtgtccagcagagaggagccagagccctatgtacatgccaatgtggctgtcggataggtgctagagccctgtgtacgcggtgtcgtggccgtcggaggagcgtttgagctctgtaggagcatagctgtcggggctgtcgggaccttgctgacgtctccttgcttccgtaaggggctgagagccaccgtcatcatggacgcacgcggggagccatcattacttgttaccggggcgagcctggatgggacgccggtcttgttcccccgtagccagagctagctaggtgtagggtaatgatggaccccctgcggcatggtcggtccgagcccaaggtcgggcgaggcggagactcctcttgaggccgaggccagggtcgggcgaggacgcgattcctcctgaggtcgaggttgaggccgagccttagggtcgggcgaggcagagaccaccttccgaggccgaggcgggggccgagccctggggtcgggcgaggcggagacttctcctaaggctgaggcccaaggtcgggcgaggcagagcttcctgtggcgcttgaggctggactcagctgctgtcagcctcaccctggcgggtggcacagcagtcgaagaggggcgagcggcgctgttttcctgtcaggtcagtcagtgggagggcgaagtgactgcggtcacttcgaccttgccgactgaggcacgcgtgtcaggataaggcgccaggcgatccttgcattgaatgcgcctgcgatacggtcggttggtgaggcgatttggcaaaggttgcttcactacgaagcctgcccgagctgggcttcgggcgagtcgagggtgcgcccgttgcttgaggaggccctcaggcgaggcataaattctcctgggactacagttcctgcccgaggctaggctcgggcgaggcgagaccgcgtcccttgagtagacgaagccttaacctgaattgcgcccatcagtctctgcagtttgtgctgatggtgattaccagccgagtttaggagtgttgggggtacccctaattatggtacccgacagtagccctcgagcctcaaagggagtgttggtactcgcttggaggctttgtcgcacttttttgcaaggggaaaggcctttctcggttatattttgttccggtgggtgcgcgcgagcgcacccgccgggtgtagcccccgaggcctcggaggagtggtttgactcctctgaggtcttaatgcctttcgtgatgcccaggccggtctggttgttccctcatgcgatctgatcgttgcccgggtgcatggtcaggttccgagttttcaggctagtttgttgacgctgtcaacggtttggctggagccgagtttgcgagagcaaccctcgagcctccacacagagtgagaggacaatcaagaactgactcggcttttatcatacgccccttcgtcgcctttccgcaaggaggagggggggaaagcaccatgttgccctcggagggcaccgaacatggtgtctctagtgagttgctaacgggtgatctgagtggacgcccgtgccccgttcgataagggtcggctagtggcccagaggcgtgctccaaaagtacctgcaggtgatttggtggaccctgtcccgttcgatagggtccaagggctcgatgcctccctctgatgggacttcgttacaaaatcgctcctgctggtctcggaaatgtcctagggtacctcaggagcgtagcccgagcctcggccatgtatcggacgtatccagagtcatccctcgctctacgtgctctgggcggctgtcgaaccctttgaggggccagcctttgaacccctgatcagtagtgggcgcggagcccgagtgctctgaggcggctgtcgaacccttccgaggggccagccttcgaacctctgatcagtaatgatcctgaagcccgagtgctctgaggcggctatcgaacccttccgaggggccagccttcgaacccctgatcagtaggagggctcgggcccacttccttcgcggagaaggatccctttcgaaatatcccctttcccggtccctgtagcaagagagagaaaggggaagaagaaaaagatacgaatttaaacaatgtggcgcaccttttttgacgcggtcatcatggcggaggtgaaatgtcgcccgcttcgcctgtcaaaggtgtcgcttgccctgtcgcgaagttaatgcgacgggacgggtggttcacggggcggtcgttgcgcgagccgttcgagggacggaacatgggcgcatcgtcttcacgccgtgggagagggctcccctgctactccaggaggggacgtgagcctgcagacgacttgactgctgcttccgctcgcctgctgccgccattactgttggcccagttttggccatatcgaccgtcgcgcctcctcccgcgactgactgacccgtgaccgatgtgctcggttggcactgttgggtcatgcgcagggttgcctcgagtcgcggcaccggttccgcagtcgagaaggcgcgacattggcgcaagtggtggtgcagttttttgcacgtagtaaccggcgcaccggtttcatgacgtgtgggcctgggcttccatgctggatgcgttgaagtcgaaggggtgcgtctccgtgatgcggttgcacgccacctgcatggcggtccgccctttcaaccgttggtttcggcgagggtggaggagtgcttgtaaccgtggggcggttacacgctccgcacgcggcggtttggcttcttctgtttcgggccagcttgtatgacgtgtgggacccagcccccatgtcgtagggggaggaccctggggcacgtcagtgaagacttagtccgtgacgcctaaggacacgagtggggagagccgcctttaaaaagggatcgaccccccgggtggtagccatgtcttcgcactcccctcatgcatcgcatccctccaccttccgagcccccggatggggagcgcccacgttgccttcgtcttgttgttggaggagcgcaaccttacggaggtgggcacccttcagccatcgctcgacttcaaggattttcatcaggtagctcggctgcattccttcaccgatggtcacccaagatggtgaccaccagttcgatggtggggagaagcaagccgggctgcagcctctgccccgccctcagcttcaaggatcttcatcatccttactggggaggagggcgaggcgagccggggcctaccctcgcatgggttggcgacccgcttcttcctctggcatttgggggtggaaaccatcctccatctctgtggaggaggcgtcctccagccatgcgggggaaggcgaactgctgctgcctggccagggtgcagcattccgtccttcgtccgggcgactgcggtcggctgcaccgggggtcgcacaacacgtcgtacgccacgagggcggtactcgtgttctgagacggtcccgttctcgttcttgcggcgaggacgggagtgaggacctgccggtgcgctttggggcggccggtgctcgctggtgcggtgctggtgggcaggtggctgccgtggtcggtgttgaggtggtggcacccagagaaggtttctccgccgacgagatcgtcggcgccacctatggtcggacctccggctcttcggccttggcggcttgtcctcgcccctcgtgtggggacgtgggcgagggaccttcagcagcagtgttttgccctgaggccatcgctgcagctgtcttgccgtccgaggcggaggtcgttgacgctgctgcagtggtcggcggcgagccacccggagtttgtcgtcccgcaggccctccggtgtggaggttgctcatacccgcgggagtggaaccggagttccgtttgtaatggcaccttgagtgccggtgtttgttcattgtggatgtcgaggcctgaacgtctaggtatttgagtgtaataccgtgtttcttcctcatttcgagcactaggactcacctgtcggctaactgaaccgcttaaccgagtgtgagttgccctgtgcggaaggtgacgagtgaggtatccgtatcccggaggcgtagtagtccctcggctcggtcggccttgccacccaaggcttctcttgctcggttatagaaccctcgactgctctgcgatgagctagagccggaggcagcggtgttagcgtggatagaggcggagttggctcgagaagaagcttcgttggcccgggagcacgtggcctccctggccgaggaggtgcagcagcggcggctggagcttggccaggtcgtccgctggcgagaccaaccccaaagtcaggctgccgaggccatgagccgggctgatgtcctcaggggacagctggctgaggctacggagcggccggtcgaggtgtttgcccgggccgggacccttacggagaccttagctatgatggcccgagcttggtgctggcttcctccttcgacgtggagatccttccgcccgcatcgccgtccaaggcctggccagattccgccgaaggtggagacgacgctgagggtgctgctgctccctctgttgatgtctgaacctgcatggagagtttgtctgtagtgtgcgtatgtttttcgcgaccgccgaggcccaaacatatcattgtcgttgtaaagctgcgtttcctttcctcttatttcgagtatcaggacttgttcgtcggtagcagaatcgtttattcgagcgagagttacgtttcacggagggtgacgagtgaggtatccgtatcccagaggcgtaggagtccctcggctcgatcggcctcgtcgcttacgtgcactcttactcgttcgtaggattctgttatcgatatagtcgagaaggcacagaaatcattctgacagaaaagttttcaagcgttaagacttgttcggttagcagaatcgcttatctaagcgtgagttacttatcgcagaaggtgatgagtgaggtatccgtatcccggaggcgtaggagtccctcagctcggtcggccttgccgcttatgtgtactccgtcgttttcaggatcccgctatcgaagcagtcgaaaagcgcgaaagatgttctggcagaaagactttttccgaggaaaattttgacgcagagggggttccccccctctagcccccgagggagggtcgggctttgccgaggcaaggctgacccttccttgacggttagactttatttgtgtatgtatagaaaacgaggtatatgaacgacttgaaaacatcttaagggtaaaagcgatgtagctgtcggatgttccaagcgttgctgtagaccttgccttgattgttggccagcttgtatgttccgggcttcaaaatcttggcgatgatgaatggcccctcccagggaggagtaagcttgtggcgccctcgggcgtcttgcacttggaggtctcggggccgaacccctcgggcgtggtagcgtcgcagagactactgatatcgcgccgagtgtagcaaggccacgtcccgagcttcttccagctggtccagcgagtcttctcggctggtctggttgctttggtcatcgtacgcccttgtcctcggggaaccgtattctaagtctgtgggcaagacagcctcggccccatagactagaaagaacggtgagaaccccgtggctcggcttggcgtcgtcctcagacttcagaccaccgagcatagttccttcatccaccgcttgccgaacttattgaggtcgttgtagatcctcggcttaagtccctgcagaatcatgccgttggcacgctccacctgcccatttgtcagggggtgagctacggcggcccagtccactcggatgtggtggtcctcacagaagtctaggaacttcttgccagtaaactgggtgccattgtcggtgatgatggagttcgggaccccgaagcgacggatgatgttggtgaagaatgccaccgcctcctcgtgtggcggaactgtccgaattattccaacttaagtgcctaagtcccgccttagaggctagaccacacttaaaatggaataacccgtcaatccctcggatctagtccgacaaggccactgacaggatcaagtaccacaatctcactcgatggtgagtcgcagagcaaatacaataaaacgtaaaaccatacattaaggagtattaagttattacatcatcatcagagtttttgcaaaagtaatcatcattgttcgaagtgcagcggaataaaactaatggtaaataaacagagagatggggaagcccgtcccatcactcctcatgctcctcctcggccgaggcggggtcccactcgacagtccaacccggtggcaagatggacgaccaagtcactccagcaaccatgtcctccagagaacctgtaaaaattatgccacaagcaaggctgagtatactaatactcagctagacttacccggtgtgaggagtctactcctctacctctagacatgctgttatttggctatggggtttggctgccaaaagcactagctgagtttctaaaacaagttttagctttgtcaagtttaagtgtgactctcttaaggctaaatgcgtactatctactcatacatagtagcaaacatttttagcaatcaacatcttgtatcaactcatcatatttccacttgttactcaatgcagtacaatggatcaagcagtctcattagctgcgagaagcagacgattcgaattgagtttttattccttgcaaggtaaacctaaacacacgacatggcgaggcactccgtccccacacacatcaaccgtcccatcgattccccgtcaacagatcagggctcaccgccttggcgtacaatgcctcactgaccccgactgccgtcgtgcagtgaccgcacttgtacccaccataaccggaatgggagaccacgtctcaggtcgcgtgaggggcaaagtctactgccaggttcaatcaggtactaggcttaccgatttaccatatttctcggcatgtgcttagtacgttcaaacgcttgacacagatatccgcacgttaatccttattccaatttctcatctcgtagacaaccaatccccatggattgttgtccacagaccaacatcattgtgatatgaaagtgggtacaaccaattcctgacctcgcgcgagtgctagaaaaatcactcgacttctaccgagatcctaattaaataagcaactactcggcctagcatactagtattcagctcaaataggattcctgagatcatgcaactagggtttcaaacaactcctacacttaagtgcacattcaatcctacaatcattaggtatagtaaaatagcataaataacatgttatgcataaaaccggggcttgccttccaaagctgtggcaggcagatcctctggtgcaggctctggtgctggatccggggctacctcctgagcagctccttgctccggcacgaggatgtattctccgtcagcgaggttacagtctatcgaaatgcaatgaatatgtatgtcatgattatgcaggatttaataacattatgctaaaggaagaaaaactaagttaatgagtaacttagggtttcttggtcgtacgtggtttttagtggtttatgcgtatcactctaggtttaggttttgttaaggataagcatagtggattggtattccttgtgtatatttcagtggacaatttacaagggttttaggatgacactaatttccatcattcattttccctttctttattttctatttatgaattctagtgtaggtttgtactacaaccatgatttaactttctccaaaaattctgtaaaaattacaatgggttgttattggtcactatagcctgttctaggaaattgaggttcaaaaataaaaaggctatgctttagacaaaaataatcaaaagttgtgtaaatgggccactttgcactacaactctcaactaggagtgggttctgtcctaagggttatttttgttggcatctaacagtaataataagcttctgtgccaaaaatcacagaaagctaagggatggttatttagttgtgattttccaaagtttaatgccaaaaaggcacttttcactaccttgctatttgaaaaatgtcaaacagcagatttcatatttttcctatgttcttcataacaaaagattcactatcccaagggttggggtgttttcaccttggggttatttttgtagggcttttctaagttttccttgttttcttaaaataaaaggtatcctatttattttatactaaaccagggcataatcaatttttctagtaaactacactgaataagtatactaacaaaaatatgggggctccctggttctttatttaaatcacctttcctattttctttaaccttaagcataatgtaaaataaatggcaaactctaccttattggggtggacagaagggtttatcattttttaataggtcagtaggtggtcatgtatttctccaaattttcttaacctcagttagatagtgcaactattcttttcctattatttagcttttggccaaaaccataattaaatcagaaccctaaagttttctgtagcacataggggttttatatttttcttaagtagtttattgtatttaagatctgacaaaattggtttgactcaatttagatgaataaaacaaaagatatgaattattcaagtgctgtttaaattttaaatcagatttaattaaagatttcctggaaaaccactttgcaccgaagtcctcagggtatttctaaactaactctctcagttatacccccgcgctactattcatccgagtcactgacattgcgcaaaaccccctagctttctcttcttctcccccgcggtccctccctaggtttaaacagtacccgcaagaaagaaaagggcggcgcggcttaccggtggtgagagaggtccggcgaggggcggggttggctccgggaggttctgacggtcacaacggtgtacggctcgatggcggggatgaccggaatcgcccggcccacgtgcgcaggcgggtgctctcgtcggcggcgggtgtgccggccaaaccacggtgatctagttcaatccaatggcacggtgagcttcacggggtgatgtagaggctatctgtgcattgaatcgaaaaatggcgcagtgacttacccggtccacgtgcgccggcggggttctgaactccggcgagcacaatttcgctattccggtggcacgggtcctcggttcaagctcgtgcaagcttctcggcctcccagggaagctatccgagggcttggaccgagcggaggagggcgggaaaggggttggccacggtggttgcccttgggcggctctggcgggtcgcggggaggtcgccggagctatgggcgagctcggaggagttaggtgtggtacggaggaggcaacggggaaggcagccgggcactgggacgggctttatagccatggcgcgggcgtggtcacgggcggccgcgggcgcgcgggggttcgcgcacgggcgtgctctgagcgcgcccccgagtgtccgcccgcgtcgaacacgtgggagctcgcttctgccatggttcaacgatttgagcaccttagcgtgcgtatcttggcaaaaccactgtgtatggtctcttccctgctccatatcctacctttttgctatgagttccaagccacgatacggtcggggtagggagatagaggggtgagaagttgcctatgtcatagctgtccaaaccgggacaaaagctatgccaagtcgtgtcaaacgacttagggtaggtgtcaacttcctccagggcattctaggggtaatttggcaccactttgtcaattgggtcgaagtgttttgaattttggatgagggtgaacatgtgtgatctttgtccaaaggttagttttggacttaggcattttctgatttttcttttgtgctcaaacctttcgtgaactttttggggcttttctgaaatcttttggggttactttcttactattatttgtaggttattaagtgtactacaacttttatatttggcccaagccatgatcataaggttttcatgaccttttggtcctacttacatctagggttcccattgtccaaaggggtttgctttagggttttgggcaattctcccctttagatgtgcatgacaagttagggcatgatatccaagatgggttgcacttgcttaggaccttgaattccaagtttgatgtactttgctcaaactaacccacatgtgatagtaggttaaatggtgtagccctgggtggacaccctgagtaacaccaggggtgttacagccctcccccttaaaggaatctcgtcccgagattttaggtagagtcccttggaggggtgtgtgaaggtgtgttgtgtgctatccttttcttttacccaagtttctcttgttaactgctcttcgaatgtcattctctttgcaacttcagaaggaagtcctttttaagttaaaaccacaacttagactatccttgctatctaagtttttcttataattgtattcaaagggaaggtgggggtggggttttggggttacgtgccgactcctttgggcagaaagtcggggaagcgagagcgtaggaaatcctcagtctcccatgtagcttcttctactgaatggtgactccactgaaccttatacattctgattgactttgctcgtgttgacctctctttctgatccaataccttgacagggtactcttgataggacaagtttggttctatctcaatgtctggttcaggtagcacttcaataggtaggcggacacatttccgcagctgagatacatgaaacacattgtgaactgctgacatgtgaggtggcaattccaattgataggctacgggtccacaacttgctttgatctcatagggtccaatgtagcgaggagctaacttgcccttgatcccgaatctctggacgcccttgtgggtgataccttaagataaacatgctctcccacttcaaattgtagaggcttccgcctcttgtcatgatagctcttttgcctggcctgagcagcttctaagttctttgtaataactctgaccttttcttctgcttcaagtaccaagtctggtccaaatatttccctctctcctgcttgagaccaattcagcggggttctacatcttctcccatataaggcttcaaaaggtgccatcttcagactggactggtagctgttattataagaaaactcagccaaagaaagacacttgtcccaatcctttccatagtgtagtacacatgcccgcaacatgtcttccaaaatctgatttaccctttccgtctggccatctgtttgaggatggtatgctgagcttcgtattacctgggtcccaagtgagtcttgtagctgctcccaaaagcgtgccacaaacagcgctcctctgtcagatacaatggtctttggaataccatgcaaccgcactatttgatcaacataaatttctgcatacttctctgtcttgtgggtggtatgcactggtaagaaatgagcggtcttggtcaatctgtccacaataacccaaatggaatcatggtgcctggaggtattgggtaatcccacgataaagtccatgcaaatgtcctcccatttccaagatggtatgggaaggggttgcaaagggcctcctgccttcaaatgactggctttgaccctctggcaggtgtcacactcggatatgtacttggcaatttccctcttcattctggtccaccagtataaggatctgagatcatggtacatcttgtcgctgccagggtgcatggagaattttgaaaggtgagcttcatccaatatcttctttctaagctcagggtccttgggaacaaccaatcgatctccaaaccatagaattcccttgctgtcctgacgaaagcacttgtatttctccacattttgcttgatcatttctttaataacccaaacacccttgtcgtcaatctgtgcccggactatttgctcttgtaaggtgggttccaccgagatataatttaaatcacctgaagaaacaacttccaggttcagcttgcacaactcatcacacagggtggtaactctcgcatccatgctcatacaattgcactgggcctttctgctcaaggcatctgccacaacattggccttgccgggatggtaatgcacctccaaatcatagtccttgattaattctaaccacctcctctgcctcatgttaagatctgcatgagtgaaaatgtatttgagactcttgtgatcagtgtaaatgttacaatgagctcccatcaagtagtgtctccatatcttgagagcatgaaccacagctgctaactccagatcatgtgtagggtagttctgctcatggggtctgagtgctcgggaagcataagcaattactctattatcttacattaagacacaccccaatctagtaccagaagcatcacaataaacttcaaagggcttggtgttatcaggttgagctaacactggggctattgtcaaatgttgccttagtgtatgaaaggcatctttgcacttcttgctccaatcatacttgactcccttcttcaatagttcagtcattggcttggcaattctggagaaatccggaataaatcgtcgataataccctgccaatcccagaaaactccgaatctgcctcactatagtcgggggtttccaattcattacctcttgtaccttctcaggatcaactgatatcccatcctgagaaattgtgtgacccaagaatttaatttcctttagccagaactcacatttagacaacttagcataaagatgatgatcgcgtagtcgctgaagcacgatgtgaagatgctcagcatgttcgtcttcattcttggaatagaccagaatatcatcaatgaagacgaccacgaacttgtctaactctggcatgaatactgagttcattaggtacataaaataagccggggcattggtcagcccaaaagacatcaccaaaaactcgtaaagcccatatctggttgagaaggccgtcttgggaatatcgctggcgcgtattttaatctgatggtaacccgagcgaagatctatcttggagaatactttggctcccaccaactgatcgaacaaaacatcaatgcggggcagggggtatttgttcttgatagtcaccgcattgagagggcggtaatcgacacacattctcaaactctcgtcctttttcttcacaaataaagcaggacatccccaaggtgaagtactggggcgaatgaaccccttgtccaataactcctgcagttgctttttcagttctgctaattctgcgggaggcatcctataggatctcttggagataggagcagtcccgggttgcaattcaatggcaaactcaatgtctcggtcaggtggcatccctggcaattcattcggaaaaacatctgggtagtcacggaccactgagatcccttccactggtgactctatcatagtgaatgcacaagaacgggtacaaccctggtcgggtagatacaaggtgatctcgccatccaaaggggagtggatttctatggctctggctgcgacatcaatcaccgcgtggtgtcgcgataaccaatcagtccctaggatgatatctacactatccaatcccattatcaagagagtggttttaaaaatgaaactacccagcttaattggtacgtgtctattgatctgataggtggcaatcctgcctcctggtgtcgaaattgtaatacccccattggtgtggaggaaaggtaactgacacttggcactaaatttggtactgataaaactgtgtgatgcaccagaatcaaaaagaacaatagcaggataattcaaaactgtaaagataccggtcaagacgggtgctccctctggaatatcagccatggtggtgaagttcagcctgccttgcctcacttgcaccttctgcctcttgccttggttctgattaacattctacccctgcctctgctggtttctggggcaattcttggcataatgtccggtgttgccgcatgtgaaacacctgttgtcatttgcctggcgatattgttgttgctgctgattgttcctctgggctggaaactgggtgcggttgggtgcctgctgctgctgctgctgtggtcggatcacccatcgtccttgttgctactgaggcccctgttctgagtgtcagacacaatcctgaagcgctgtggctgagctgaaggtcctgccacaggggtcttcctcttcttctctgcctgacgagctgtgaaacagtcctcctgggagatggccatgttgactaacctattatagttgttggccctgacggtgttgagacggtcacggagcttagtgctgagccccctcctgaacctgtctctcttcttctcgtccgtgtctgcatgatatccagcatactagcacaggtcattaaaagcctgagcatactgcaacactgtcctgttgccctgagtgagtgccagaaactcgttgagctttcggtccataattccggctggtatatggtgccccctgaaagctgccttgaactctctccattccacctctcggtcctctggctgcatagcaagaaaatggtcccaccaagtccttgcgggtccgcgaagctgctgggtggcgaacctgaccttagtgacctctgagcaaactccatggagtagcgggaatttggattccactactctcaaccacacatctgcatcaagtgggtcctctaccctggtgaacaatggaggctgggtgctgaggaactcctggtaggtagctgccatggggtgacgctgatgatctccaccaccatagtgttgaggtggtggctgacgctgagctagctgccttaagatctcattctgctgagccattagctcctgcagagtgggaggcggtggcggcggtggaggaacgcgctcattctgaccacgacgcgctctcctggccatctgaaaaatcacatatattctcaataacacatcttcaagtttaaggtttaatcgcggtgaaagaatcaaaaggtgaattgatagattccgacataaacataaaggatttcaaaaggcataaacttttcttcccaaattaaaactaacatcatccatcaaccatgcttccaaaagagtttatcatgattacatcaatggcccaaaagactcaactctatctagcctagtaccccaagggtgcaaaagctaagctagctttgaggagtcctaccatcatcgacttttagctctctcccttgatacctagtgagcgaacgaggcaacactcgactcgggggaaggtggtctccctgagccagcagtgtccacgctggaggcaggctcctctcctccctcaatgtcgatgtcctcgttggcctccatgtcctggatctcctggtgatgcatatccaggtgctcattagcctcggcaagctactgctgggtgttgataagctgatcctcgagaacctcgatggtgttctccctggtccccactaattcctccagctcttggatctcatttgacagctgctccacctgcaagtccttttccaccatctcagtggacaaatcaaccacaagctcctctctgttgtctagggtgatcttagttgcctccaacaatgccatcagatgggacatcgcctcaccacgcatcacttgcagatggtacagggcattcatgcaccgtacggtcaagtgagcagtctgacctgggtagatagcccagatgtccttggcatgctccacccgatccttccacattgggtcgtcctccttctccgcggggaacaagccaatggggtgggtggacagctctaaggggtggaatccgcagaaagtggtcaatctgtgtagagcaatcgcctcgatcgtatcctcagcccggtatccaaaggactcagagtccagcaaacgccagcctggctgcaggggatgaggctccagggtcatcctcaccctacagcggggcactcggtgcttctcgaactgctgcaccgcgtactgaggaggcgtcgtgtatccggccccctgaagtacctcccacaaaatatggggaaagccctctcgtgcaagcccgtcagtgtgggacagtgcattcccgtcgtctgaggatccgtgggaagtcatctgtgtacggttaagcgtaagtaaaagaaaaagaactataaaagaaaaaggaaacacaactcagcctctctctaattataacaatggtactggggtacttcgttggtcatcattttgtatttaagtctttactcaatcttccatttgtttaattaagaatgcatgcatgctcgtcctgaacgacctcacatcaatataaagggaaatagggaagaactcccatcccctatagtagcctgtagggcttaatcacttagccacctaactacccctctatcatcctaaggcttcacgtcctaggtctatcctgaccgtcctacgatctatccaacattgtttctatcaagttttacttcggaaaaggatggtatttatattttattgattcctctgtggtggtacaagctccgataccagctgtggcggaactgcccgaattattccaacttaagtgcctaagtcccgccttagaggctagaccacacttaaatgggaataacccgtcaatccctcggatctagtccgacaaggccactgacaggatcaagtaccacaatctcactcgatggtgagtcgcaaaacaaatacaataaaacgtaaaaccatacattaaggagtattaagttattacatcatcatcggagtttttgcaaaagtaatcatcattgttcgaagtgcagcggaataaaactaacggtaaataaacagagagatgaggaagcctgtcccatcactcctcatgctcctcctcggccgaggcggggtcccactcgacagtccaacctggtggcaagatggacggccaagtcagtccagcaaccatgtcctccagagaacctgtaaaaattatgccacaagcaaggctgagtatactaatactcagctagacttacccggtgtgaggagtctactcctctacctctagacatgctgctgtttggctgtggggtttggctgccaaaagcactagctgagtttctaaaaacaagttttagctttgtcaagtttaagtgtgactctcttaaggctaaatgtgtactatctactcatacatagtagcaatcatttttagcaatcaacatcttgtatcaactcatcatatttccacttgttactcaatgcagtacaatggatcaagcagtctcattagctgcgagaagcagacgattcgaatcgagtttttattccttgcaaggtaaacctaaacacacgacgtggcgaggcactccgtccccacacacatcaaccgtccccatcgattccccgtcaacagatcagggctcaccgccttggcgtacaatgcctcactgaccccgactgccgtcgtgcagtgaccgcacttgtacccaccataatcggaatgggagaccacgtctcaggtcacgtgaggggcaaagtctactgccaggttcaatcaggtactaggcttaccgatttaccatatttctcggcatgtgcttagtacgttcaaacgcttgacacaggtatccgcacgttaatccttattccaatttctcatctcgtagacaaccaatccccatggattgttgtccacagaccaacatcattgtgatatgaaagtgggtacaaccaattcctgacctcgagcgagtgctagaaaaatcactcgacttctaccgagatcctaattaaataagcaactactcggcctagcatactagtattcagctcaaataggattcctgagatcatgcaactagggtttcaaacaactcctacacttaagtgcacattcaatcctacaatcattaggtatagtaaaatagcataaataacaggttatgcataaaaccggggcttgccttccaaagctgtggcaggcagatcctctagtgcaggctctggtgctggatccggggctacctcctgagcagctccttgctccggcaggaggacgtattctccgtcagcgaggttacagtctatcgaaatgcaatgaatatgtatgtcatgattatgcaggatttaataacattatgctaaaggaagaaaaactaagttaatgagtaacttagggtttcttggtcgtacgtggtttttagtggtttatgcgtatcactctaggtttaggttttgttaaggataagcatagtggattggtattccttgtgtatatttcagtggacaatttacaagggttttaggatgacagtaatttccatcattcattttccctttctttattttctatttatgaattctagtgtaggtttgaactacaaccatgatttaactttctccaaaaattctgtaaaaattacagtgggttgtcattggtcactatagcctgttctaggaaattgaggttcaaaaataaaaaggctatgctttagacaaaaataatcaaaagttgtgtaaatgggccactttgcactacaactctcaactaggagtgggttctgtcctaagggttatttttgttggcatctaacagtaataataagcttctgtgccaaaaatcacagaaagctaagggatggttatttagttgtgattttccaaagtttaatgccaaaaaggcacttttcactaccttgctatttgaaaaatgtcaaacagcagatttcatatttttcctatgttcttcataacaaaagatttactatcccaagggttggggtgttttcaccttggggttatttttgtagggcttttctaagttttccttgttttcttaaaataaaaggtatcctatttattttatactaaaccagggcataatcaattttctagtaaactacactgaataagtatactaacaaaaatatgggggctccctggttctttatttaaatcacctttcctattttctttaaccttaagcataatgtaaaataaatggcaaactctaccttattgaggtggacagaggggtttatcattttttaataggtcagtaggtggtcatgtacttctccaaattttcttaacctcagttagatagtgcaactattcttttcctattatttagcttttggccaaaaccctaattaaatcagaaccctaaagttttctgtagcacataggggttttatatttttcttaagtagtttattgtatttaagatctgacaaaattggtttgactcaatttggatgaataaaacagaagatatgaattattcaagtgttgtttaaattttaaatcagatttaattaaagatttcctggaaaaccactttgcaccgaagtcctcagggtatttctaaactaactctctcagttatacccccgcgctactattcatctgagtcactgacattgcgcaaaaccccctagctttctcttcttctcccccgcggtccctccctaggtttaaatagtacccgcaagaaagaaaagggcggcgcagcttaccggcggtgagagaggtccggcgaggggcggggttggcttcgggaggttctgacggtcacaacggtgtacggctcgacggcagggatggccggaatcgcccggtccacgtgcgcaggcgggtgctctcgtcggcggcgggtgtgccggccaaaccacgacgatctagttcaatccaatggcacggtgagcttcacggggtgatgtagaggctatctgtgcattgaatcgaaaaatggcgcagtgacttacccgatccacgtgcgccggcggggttctgaactccggcgagcacgattttgctattccggtggcgcgggtcctcggttcaagctcgtgcaagcttctcggcctcccagggaagctatccgagggcttggaccgagcagaggagggcgggaaaggggttggccatggtggttgccctcgggcggctctggcgggtcacggggaggtcgccggagctatgggcgagctcggaggagttaggcgtggtacggaggaggcaacggggaaggcagccgggcactgggacgggctttatagccatggcgcgggcgtggtcacgggcggccgcgggcgcgcgggggttcgcgcacggacgtgctctgagcgcgcccccgagtgtcagcccgcgtcgaacacgtgggagctcgcttctgccatggttcaacggcagatttgagcaccttagcatgcgtatcttggcaaaaccactgtgtacggtctcttccctgctccatatcctacctttttgctgtgagttccaagccaagatacggtcggggtagggagatataggggtgagaagttgcctatgtcatagctgtccaaaccgggacaaaagctatgccaagtcgtgtcaaacgacttagggtaggtgtcaacttcctccagggcattctaggggtaatttgtcgccactttgtcaattgggtcaaagtgttttgaattttggatgagggtgaacatgtgtgatctttgtccaaaggttagttttggacttaggcattttctgatttttcttttgtgctcaaacctttggtgaactttttggggcttttctgaaatctttttggggttactttcttactattatttgtaggttattaagtgtactacaacttttatatttggcctaagccatgatcataaggttttcatgaccttttggtcctacttacatctagggttcccattgtccaaaggggtttgctttagggttttgggcaattctcccctttagatgtgcatgacaagttagggcatgatatccaagatgggttgcacttgcttaggaccttgaattccaagtttgatgtactttgctcaaactaacccacatgtgatagtaggttaaatggtgtagccctgggtggacaccctgagtaacaccaggggtgttacagctcggacctgatgttggttaggggtcggacctcgatccacttggagaatttgtcgatggcgaccagtaggtgcgagaagcccccggttgccttctgcaagggaccaacgaggtccagaccccacacagcaaacgaccaagtgatgggtattgtctgcagtgcctgagcgggcaggtgcgtctgtcttgcgtagaattgacacccctggcaggagcgtacaatcctagtggcgtcggccaccacggtgggccagtagaagccttgttggaaggcgttcccaacgagggctcgaggtgctgcgtggtgaccgctagtccccgagtgtatctcttgcaatagctcctgcccttcggcgatggataggcattgttggagaatgcctgaggggctgcggtggtagagctccttttcatcgcccagtaagacgaacgacttggcgcgccgcgccagtcgccgagcttcggctttgtcgagggggagttctcctcggtggagatattgcaggtacggggtttgccagtttcgattaggcatgacccaattccgctctccctcgacatgcagtgcctcaccctcggcggccgagggtgcctcgggccgggccgaggcttcctcgggctcgggcgtgtcatcggtcttgatggagggttgatgtatgtctctagagaagacatccaggggaaccgttgcccaccccgaggctatcttagccagctcatccgtattctcgttgtaccttcgggcgacgtggttgagctcgagtccatagaacttgtcttccaggcgccgaacctcgtcgcagtaggcctccatcttccggtcgcggtagtgggagtccttcatgacttggtcgatgacaagctgcgagtcaccacgagcgtcgaggcgccgaacccctagctcgatggcgatgcgcaacccgttaaccagagcctcgtactcggccacgttgtttgacaccgggaaatggaggtgtagcacgtagcggaggtgcttcccaaggggtgagatgaagagcaggcccgcacctgctcctgttttcatcagcgacccatcgaagtacatggtccagagttccgattggatcagagctgttggtagctgggtgtcgacccattcaaccacgaagtctgccaagacttgggacttgatggccttccgaggagcgaacgagattgtctcgcccatgatctccaccgcccactttgctatcctacccgaggcctctcggcactggatgatctcccccagggggaaggatgacaccacagtcaccgaatgagactcaaagtagtgtcgcaactttcgccacgtcagaattactacgtacagtagcttctgaatttgcgggtagcggatcttggtctcggatagcacttcactgatgaagtagactggcctttggacgagcagtgcatgcccttcttctcgtctctcgactacgatcgtgacgctgaccacctgagtggttgcagctacgtagatcaagagggcttctcctgcagcggggggcaccaagatgggcacgcttgtaaggagtgcctttaaatttccatgggcttcctcggcctcgggggtccaagagaagtgctcggtcttccttaagacgcgatacaaaggtaggcctctttcgccaaggcgcgagatgaagcggctcagagccgcaaggcatcccatgaccctttgtactcctttcatgtctttgataggccccatgttggtgatggccgcgattttttctgggttggcctcgatgccctgcttggagacgatgaaccccaggagcatgcctcaggggactccgaagacacatttctcggggttgagtttcacgcccttcgccctcagacacttgaatgtcgtttcaaggtcagagaggaggtcggaggcttttctcgtcttgactacgatgtcatcgacgtaagcctcgaccgttcggcctatgtgctctccgaacacgtggttcatgcacctttggtatgtcacacctgcattcctcaaaccaaatggcatagtaatatagcagtacatgccaaaaggtgtgatgaaagaagtcgcgagctggtcggactctttcatcttgatttggtgataccctgagtaggcgtcgaggaatgacagggtttcgcacccagcagtagaatccatgatttgatcgatgcgaggcagagggtaggagaccttcagacatgctttgtttagaccagtgtagtctacacacatcctccatttcccacctttctttttcacaagcacaaggttggataaccattcgggatggaatgcctctttgatgaaccctgcagccatcagcttgtggatctcctcgcctatggctctgcgcttttcttcatcgaaacgatgcagaggctgcttcacgggtcgggctccagcttggatatccagcgagtgctcggcgacatccctcggtatgccaggcatgtccaagggactccacgcaaaaacctcggtgttcacgcggagaaagtcgatgagcactgcctcctatttggggtcgagctcggagccaatccggacttgcttggaggcatcgttgctggggtcgagagggatggacttaaccgcctctgctagctcgaagttgtcggcgtggcgcttcgcatctggcacctccttggagaggcactccaggtcggcgatgagggcctcggactcgacgagggcctcagcgtactccacacactccacgttgcattcgtacgcatgtcggtatgtggatccgacggtgatgaccccgttggggcccggcatcttgagcttgaggtaggtgtagttggggacggccatgaatttggcgtagcacggtctccctagcaccgcgtggtaggttcctcggaactcgaccacctcgaacgtgagggtttcttttcggaagttggagggagtcccgaagaagacgggtagatcgagttgtccaaggggctggactctcttcccggggatgatcccgtgaaagggcgccacgccggcccggatcatggacagatcgatctgcaagagcccgagggtctcggcgtagatgatgttgaggctgctgcctctgtccatgagaaccttggtgaacctgacgttgccgaggacggggacgacaacgagcgggtactttcctgggctcagcacgcggtcggggtggtcgccttggtcgaaggtgatgggcttgtcggaccagtctaggtagactggcgtcgccacctttaccgagcagacctcccggcgctcctgcttgcggtgccgagctgaggagttcgccacttgcccaccgtagatcatgaaacagtcgtggacctcggggaactcctctgccttgttgccctccttgtcgttgtcatggcctttgccaccttccgccgggggcccggccttatggaagtagcgccgaagcatgacacattcctcaagggtgtgcttgacgggaccctgatgataggggcatgactccttgagcatcttgttgaacaagttggcccctccgggaggcttccgaaggttcctgtgctcagcggcagtgacaagatctgcgtcggcggcatcgcgtttcgcttgcgacttcttcttgcctttcttctttgtgccgcgctgggcggatgcctcggggatgtcttcctgctggtgtccctgaggctgcttgtccttccagaagatggcctcgaccacctcctgaccagaggcgaacttggtggcgatgtccatcaactcgctcgccctggtgggagtcttgcgacccaattttctcaccaagtcgcggcaagtggtgccgacgaggaacgcaccggtgacatccgagtcggtgatgttgggtagctcggtgcgctgcttcgaaaaccgccggatatactcccgcagggattcccctggctgctggcggcagcttcggagatcccaggagttcccagggcgcacgtatgtgccctggaagtttccagcgaaggctttgaccagatcgtcctagttggaaatctgcgcaggaggcagatgctctagccaggctcgggcggcgtcggagaggaacagggggaggttgcggatgatgaggttgtcatcattcgttccacctagctggtaggccagccggtagtccgcaagccacagttccggccttgtttcccccgagtacttggtgatggtagtcagggctcagaaccgggtcgggaacggcgcccgtcgtatggcccggctgaaggcttgcggaccaggtggttcgggcgaggggctccgatcctccccactgtcgtagcgtcccccatgcctggggtggtagcctcggcacaccttttcatcgaggcgggctcgatggtcgtggcggcgatgctcgttgccgaggcgacccggggctgcaggcgtcgtgtcccgcgtgcgcccggtgtggaccgaggcttcccgcatgaattgggaagtcgcggcgcgatggtccggggagtacccttgccttcgggaggcagagctctcggcccgtcggaccgcggcatcctccatgagattcttgagttctccctggatacgccgcccctcgatggtggatggctccggcatcgctcggagtagtattgctgctgcaggcaggttctggccgaccccactggaagacgggggcagccttgccctggcatcgttagtgatacgacgctggacgtcctgagcctgatgacgcgcttctccggctagtgctcagcctgcccactcctgctcgatgttttgccggagctgcacaagttgtcttgcttcctcgtcgagcttggcctgcatctcgcggatttgctcgagctgtgtgtcctgaccctccgcagggactgggaccacagctagctcccgtaggatgtcaacgcgaggcacaggcccagggggatcatcgtcctccggcataccaaggtggttgcctttgtcgtgaccccctagatcgacgtggaaacattcgcgacttgggccacaaccttcgtcgtcaaggctgtggccatcatcggagcaatcggagaggcagtagtcacatgtggtcatgaagtccctcatggcgctaggattaccgagcccagagaaatcccaaccagagtcgggctcgtcttctccctcggaacccgagggcacgtaggtcgagacggccgtcagttggtcccaggtcgaccacatatggtaccccagaaggttaggatatgcctttatgaaagcgctcaccgaagcgggatcgcttggtggatcgaagctgaatctaaaaggcacagggtggaaaacggacggtacctctcgatcgatggacggtgacgaagtcgcgtcgaggacggactgcaccgttatctcaggtacaaggctaacgcccagcaggcccttcgcgagcctgctggcatcatctgtccgcttggggttggcgtgttgcggggaaacgacgctcgtcgtcgtctcaggcacgaggtcaacgcctgacgtgtcccccgctggggtgccggcgtcgtcgactcgctcgacagccgacgaggtgctgcctcctgcttggccacggttgccctgcctccttctcctgcggcgaggaaggcgacgggacaaacccggatgctgctcttccgccaggagggaagatgtcgccgagtccgccgccgtcgggctggctgacggtcgtcgttgtcgctgtcgcgctgcgggggaaggagtaccatgtcgtagctaccgtcgagggacatgaacacgagactcccgaaatggagcagcatcccgggctgaagaggttgccggagactacccatctggagcttgacgggaagttgttcgtcaacacgcagcagacccctacctggcgcgccaactgtcggcgtttcgaccccagggggtccctggaccaacgagtaaattgtcgctgcgtgccccaacccagatgggttggcgtgagatggaacacgaaagggggggagaaaacctcggctcgtgttatcctgcgccagagtgggtgcgcttgcagtaggggttacaagcgttcgcgagggagagagggagtcccgcgcgaccacactcgtatgagggccctggcccttccttttatagatgcaaggagagggtccaggtgtacaatgggggtgtagcaatacgctaacatgtccggcagagaggagccagagccctatgtacatgccaacgtggctatcggagaggtgctagagccctgtgtacacggtgtcgtggccgttggaggagcgtttgagctctgtaggagcacagctgtcggggctgtcgggaccttgttgacgtctccttgcatccgtaaggggctgagagccaccgtcgtcatggacgcacgcggggagccatcattacttgttactggggcgagcctggatgggacgccagtcttgttcccccgtagcctgagctagctaggggtagggtaatgatggatcccctgcggcgtggtcggtccgagaccaaggtcgggcgaggcggagactcctcctgaggccgaggccggggtcgagcgaggacgcgattcctcccgaggtcgaggttgaggccgagccttagggtcgggcgaggcagagaccaccttccgaggccgaggcgggggccgagccctggggtcgggtgaggcggagacttctcctaaggccgaggcccaaggtcgggcgaggcagagcttcctgtggcgcctgaggctggactcagctgctgtcagcctcaccctggcgggtggcacagcagtcggagaggggcgagcggcgttgttttcctgtcaggtcagtcagtgggagggcgaagtgactgcggtcacttcgatcttgccgactgaggcacgcgtgtcaggataaggcgccaggcgatccttgcattgaatgcgcctgcgatacggtcggttggtgaggcgatttggccaaggttgcttcactatgaagcctgcccgagatgggctttgggcgagtcgagggtgcgcccgttgcttgaggaggccctcgggcgaggcgtaaattcgcctgggactacagttcctgcccgaggctgggctcgggcgaggcgagaccgtgtcccttgagtagacgaagccttaacctgaattgcgcccatcagtctctgcagtttgtgatgatggtgattaccagtcgagtttaggagtgttgggggtacccctaattatggtacccgacagtactcaaataccaaaagcacatatttgggtcaaagtatggagataacttatatcatactattcatggagtgtagtgtgtcataaaataaacgtgatgctcatgacatagtatgcactcatcaactttctacatcttatgtttttcttatgattcccctttttttgttaattatttctccccttcttaaaagtattctaacacttagttacataagactaaaggtaagctttaattcaaaatttctccccctttgtcataaatctccaaaaaggatacaaagaatataaatggtagaaattatgattaagcgagatgtgaacacactatcatgaaaatgatccttagatggcacaaaggtaatggataagtgtcacaagtgatgtacctttgcgttttaccttttcaaggggtttccagacttgtgttggatttagaattcatttgcaagctcttgttggcataattgtgacataggtccaagatatcaaatgaatattgtcatactaattgaaagataaatcttgatacctggagtctagatgtcacctagcattttcttatcataacaagaggcaacatgaaaattgcacaagtatggattatacaactagtgatcatgtatgaaaataccaattgaaaaacaccaattgatacaatttgttagataagcagatcactaattgcatattacactaagttctcctcaagttttagtgcgcgcatatatatgaattcaattgataccagttgagagtacttatttgcaatttaaagtaccattagcataaaaggagtatcaactgaacataatcatgcaacataaggaacatgtgcactatttaatcaattaagtgctagacatgagaatttataagctatgctactttagacatttgcaatccaaaaggatgtgatacatatttaccaatgttagatgacgttggagtagcatatacaagagaaactcattctctaatgaaatgtataaaagatacatttattggagcaaagaatctttgatacccatcaaatttgtagtggaagcgattgtctttgcttgaagattcctttctaatttgagactttgttttatgccacatgttctccattataatcatgaatttccatcttagcttttgataggcttgacatttcaaagagaaacctatcctcttcaaacgatcaagagaaactcattttcttgataggttcaagagaaactcattttcatttctatggaaccattcatcctcatttgatgttctccaaggtgtgagactacacaacatgaacttgaaagaaatcattagtctcacaagatatagactaaactctccctcaatttgtgcatgcaagagtacacaaagtacacttatgcacattaacaatgcaaggttaaaggagatgtttgcactatatcttggtttaacataacatgctttacacagatgatgaaaattaaaccaattgaaagtttaagaactgaaagtatatcaattgaaatcctgaagggtaaagcatgctaatatgaacctcaaacctcataatgaaggttatcatataaatatgtcactgcatcttcattatttggttgacaaaaaagtgtaactcccttcttgaatcactatgatctcttttctctttacgatttcatccaaccaagtgatcttgaacttctttcatcttttcttgattcgatcatatttgatatgagatcaattgaaactcaatgattgaaacaaccaagactcttatatccgtagattttgaatccatcttgaaagcacttggaaggaccttattgaaacacttagaaaagagagcattagaaacacaagggagggtttcacaaatgatgatccttatatacggatggcaattgaatcatcattattgaaacccaaaaggatagactaaattcctttaaataagtgcacacatatagttgatgtcaaagttatatgcactattgaacattttatattgcgaagaatttaacctatactatggtacattccactaaggataaaatactaaaacaactgaaggagaggaagttttcataccttggcctcttgtcaacttcatcttactttagttgaatagtatcctttaagcttgtgatttatccaatttaataataagcatcatctctcaacatagattttcttatggataaactcaacacaagagatgacattagtagcacaagcactagtttcttatttagcaaccctttatatgtggaaggcaagtgtgttgctaaaataaagaaacctcataatatggactaaatttcccttgagcccttatgcacaatatatttttgaatgacatggataatatgcatggttgttcaatgaattctaaagggctgacttaatccatattatggtgagtgtctaatatggaagaataaaatccaaatttaactagatagaaaatatgtcacataattttggattgtttgaccatatgataatattcattcatcttccattggacctttatttcataatcaataactgatgtgtatcctcaagtgcttcttcttccttagtggctacacaagtcacaaaagatataagatttgaaaataatatgcacttgagattcagttgttaccacccttgctactatctccaaatatgatttatacatccattatcgagcacccaacttgatccattgaaggagtgatcctgtaaaacaagtttaagcttcatatcttagtacccaatttgaattgggtcctttgagattagtagtaagagccttgagtacccacatatacttgacaaccatcttacatggtttcaagtcaatatttaatcacacagataaaagctagagttaagaataggagccttttctccttttttttgatacatcattgtgttgccttcttgatgatgaacctagcttgaccttggttgcacctagcttatcatggttagtcacacaaacattcatatcataaagacaagttatgcatggaatttacaacttagtgatccaattgaatgtgaagcatatggataccgattgaaatagatttctaagatatcaaaatataggtttacaagatttagagagtatggatcactaattgtacctttttacagtttaaaaatcatatccatgttagtgcatatgtatgtcataaatatcaacaaaaatgattcttatgcacttttagatttaatgataagggaattttaaactgtctcaagagtagctatttagaaaacaaagattacaatccatatgaatgagatacaaatttaccattttagattgtcttagtataacttactcaagggaaacttattttctacgacacaagatatataatgttctcccactagatatgtgcatcaagtatttgaatgacttgccacatgcactttcaattcagttaagagtctcatgaggagtacattacatatcatggtcaaggcatgaaaaatttgcaatgaattgacttatccttaagaatacttaccaccaagtagagcgtaccatttgttgtaccaatttgaaagatcttactatcggtggtggtgtcatcatagtattcttcttttcatcatttgtggagacttccttctttagcttgttatctttttccttttaatactagttaaaaaaacttttaaaagagatattagtagtacaaggaagtatttaatgaatggtgatctttagatatgaattgcaaacaaatcatcatttatgaggcataaaggcataaattaaattccttttaagttaatgcacatggaggagtgaattaacaatatgcactaatttacaaatttaagccaaaaggaatttaaccttcatattgacatttatttccatagaatatattattagcaattgaaataatgtcacttgaaaggaactaccattgaatcaacaaccaattgaagcaattagttcaatacctttgccttgagcattcctaatctttcttttaggtgaatattaacctttaatgcttgtgattttaccaattgaaagagcacaatctctacttatgaatttccatgaaatatcttaaaagagattgcatttgaaacacaagcaatagtttcctatttagaaacctctagtatatgaatgataagaaggttactaaaataaggaaacctcatgatatgaactaaattacccttacaagcatcatgtgtaacatcaattgaaaaaaagatgaaactagcatgattattaaaataagtttacagggcaagtttaattcacaacatggtgagtgattaatgtagaatactcaaaaccaatttaaacaagaatgattacatcacatagtattggttcgatcttctttgaatgtttaatgacacactccatttgggaaacacattcccgtgttgtgaaactacataaatcactcagataaaaacattagtctcacaactctagtcatataaagaattccccttttgataagtgctttaagaatttgaatttcttacttagcactctattcatttaagaacatgggataatactctttatgtctaggtcatggcaataatatgatgattaacttgaaatatgccacaagatacatacaatcaatttaaagcatgtagattgtcacaatataaaaatatgaacttgcaatctaccatataattagatcctttccaaagcaagataaaatcttttaagttcattctcaagtgcttcatttttcctatgtggctacaaaagacacaaaggaatataccaattaaaagcaatgtgcacttaagaattaattgttaccatcctttggatatcacttggttgtaggccttttgcttgattcccacaaaggttaatccttattccctacaatcacaagttcttgctagagatgaatatgaagttagtgatataacaactcaattcatctttgggtcaatcttagaggatagacaatgtaagattgatagcttgagataagaattgagttaaaccgctcaagcaccccaaagcttcatatcatctctgggtacctgcaaaacttattaagtacattttggtacccatttttggatgggtccaccaaggttagctaataaatacttaggcacccaaatggcctttgtgctagttttaggtgaactacttacctttctagcacaattgtcatttttgggtctcctaagtgaatatgaatgaattgacatggtaggcttaggatacttactcatgggacaatcctggcataggtgtccctttcttcggcaagtgtagcaaatctgatttataattttgcaagactccttcttgccttgcttctttttgctacatggttagtgagcctctttctttctaaagttaaaccactatcttttatgtagggacatgacttaatctcatgtcccttctcatgacattgataacactttctagtgcatcttctcttatttggaagagtggcttgtttgttaccttatgtggagcatgtggagacgtggttgaggcacttgtcatgagctttagatttcttatcttgatgtttgctcatgactttcttggaaagcttggtattcttttgaaggggtcttgtgcatgctacggttgtccccttctcaagctttttcaccatattatcacagttatcttgagaaggttgagcatgacacttgcccttcaaaagagttaagctccttcttagccttccaacttcttccttgagctctttattttcttgtgtgatagaagtatcactagttcctaaaatttctagctcaatggaagattggctttcatgagagcaacatttgttagcacatgacaatatagtttctacttgagtacatgtgcatatgtgaggttggtatgatttcaaattagttaacacaacctcatgagccatttctaacatgatatgtgaatccataaatttattatgagagcacacaagcatatcatgtttttcttgcaaagctagattttcaatatatgatgaatgattaacaactttaatttgctcaattgaaatgtcttcatacctttggaccaaatcatcatgagagcactttagcttctcatgctctttggtcaacttctctaagtcttcgatttttctgatgaggaagtcttcttgcttatgaagcatttctttttgttcttccgctcttttcatgagtttgagcaagctcatccgatgtttattgcttagctgagcgaagaattgttgaagatcatcctcatcttcactatcactttcttgctcctccttatcctctctttcgctttcactgtcactcccattagcaataaagcacatatgagaagtggatttgaaagacgaaccttgtgaagaggtggattcgtcgtttggtctccatcgatcattttcttcttcaattttgttatttgcctcatcttccttcattttgaggaacatcctttcggcaattctcatggcaagatctattgccctaggatcaacatctgcaacaaaagatgaagtcgaggtaacctcaactttttcaagcttagaagcactttcatttcttagtccccccgacatgatcttttcctcacgtggttaagcattagaacaaggattaggctccgatacgaatgaaaagttgcctagagggggggtgaataggcaagttaaaaactttttcaacagaactagaaacgaactgggtaaaactggttcaaccggtgtcaaaacaggttcaaccaatttgcacgagctcaactaaagaatgagatataaaactgaattgatctcgaaatccacccagttaactttggaaatgtgatgttctaaatgatccacagggttcaaggtagtagatctgagaagggcacttctcaaaatccacacaccaaaaagatataaacaaatcttccacgcaatggtgagagaacgaagaacacaaacaaacacaatgagcaagaatacaagagacacaagatttatcccgaggttcggtcacaccaccaaggtgccctacttcctcgttgaggcgcccaaaaagagccgggtctctttaaaccctaatcctctctttgccgaccacaaaggtcaagcccacacactaatctttgctcaaacgagtgggtaatacaaactttcttgtggtcttccacaagatttggagactcacaaaagacacctattcgtctaggagctagaagctccaagagtaatgaatccacaaagaactcgatgtagtaccaaagctcaaatcaagaagagtaagaaggatttagagatgaagcaccaaaatcacagctcttcaatctcactcaaagatttctctccaaagatttgaaatgggagaggcaagaggtgtgtgagagagagtgggaggtgtttctcaggttgggaatgaagttttgtgcgtgctctactataggggagagaggtaggagtgagtatatattggtggggttccaaaactagccgttttgacttttctgctcaaaaaccggttgaaccggttttcaaaaagctgcgcacagctttttggctgacctagcagatagacaagaaaaagtgaacagtgcaaaaaccggttgaaccggtttccaccagacaaaaaccggttgagtgtccggttgagtgtcgggctgaaccagtatttgaataccagctgaactaacgtgaaaaccagctgaaccagtattttctagagagcaattttggccaagatagacttaaaaaggttgtactacatactttcactaaggattaacaagggtaaaatggaagttttagatcaaggattttgagctttagtaccaacaccaaccttctttttggatcccccttgatagtacgacgattcctatactcaagttaaataaaatataattaagtaaactccttgagaaattggtgtctcatgtgtgatttctccatggcattgcttcataaggatcacaaacatccttgtctcatcttttgaagcaaacacaaagcaaaccctgtgacttgtaccatttcaccatatatgagttcaaatcatggcttcaagtcactttactgatgcatcaacatattataactcttcatagctgattagttcatcgacttagtgcaagtactctcttcttcaccttagccatggtacctcggtccacaagccgtcgcttggccttcacctttgtttagttcctcgaagccctttccttgctatctttaccctatcaagccattcttgagtcacatcatattgagcatccattgagagaatcatttcttcaatattgtgaaccttgcttgaatgtcatctagatataaatgctaagatcaatcaagctctagtttgattctcatagaagcatatatggactaatagtaatatggtcaagccaattcatgattcctcatatctcattcactttggcttgaccaatcctcttaatcacttcaacctctatcatgatcatatttatgcatagtgatttctcaggtcttgtccatatattcaaaccaatatagagaccatattatatccatttacattgtctcactggttatttaaccttgtgttgaacctttgttcactgatcattatacactattcaagtatgttcatcatactgaatttcctgttcaacacttagcaaacttgttagacctttaaatgtgttgttatccaaatcaccaaaactcataaaagggatgaatgcactttcagatcccctctccttccttctcccccatgtcgttctctgctctttttcctgaggttgaagacggcaggaggaaccactccatgtttgtgcggttcatgcatcaaggaggaagaaaaaaaaacagaccacacccacatttaatcccatccgtcaggatcttctgtgattgtgctccttgtgaccctttgtgtggtaagtggtcggccgttaggactgcgccacgtcgtcgttaatctgcgattaataactatatatttttgcgttagatattcgtttcattctgttccggttgcgttaacttcgtaaagatatcgtacatacgttaaaaatattattctgtcatgatacctgttttatgtaattaattaattgctagtttgtccatcagttttataaataataatatagttaagattaatttatagttttagttgcacctttataaatacaggttaatttgattagtacctattcaaatgttttaattaataagtgtttagtataaacacgatgtctgttagcgactctcgtgagtcgtgcgcgtcgtcgcactgtctacgtgctgtccgcgtgtgtggtgctgcgtgtcgcgcgttgtcacacgtcgtttacgtgcgtcgcgtgtgccatttacacgtgtcgctcgccttgtcgcgcgtatctcacgtgttgatcacgtgtgtcgcgcggcgtctgcgcgtgataataattgttttcgcttataaacatttatgttaataatgataatttgtcggttcgcgtattttaaatagttaacttaaggtttgctcgactaatagttgttagagtaatattctaattagattaaaagtatagtgttcaacccgcgctttgataataaacattaacatggttaatatttagcttaaatactttttatttagttaatacttgtttagtttgagcacgacatctaattagtttttctccgtctgtcgcgtggcctgttccgcatgcggtggcatgctgtttcgcgtgtcattcgcgtgctgcttgtacgtcgtcatcgttcgttcgcgcgttcgcgccacgcgtacggtttatgtgttgttcgcgcgcttcgtttgagcgtgtcgttcgcgcgctgttcacgtggcgtcgcgcgcattgtttcgtgtgccatctgtgtgctgtttcacgccttgttgcgtgtcatcacgtgttattcgcgtgtgtcgcgtaccttgccgcgagtcgatcgcgcgtatcacgcgttatccgcgcacgatattaattattcttttataatcactcatgacggttaattaactatttgtttagttgtccactattaaaatagtgaattggccaaaggtaggcactagtctttattgataaatgtcaattaatataactatgtcgaactaaatattctaactaatattttcagtgtaaatgcgataacatgtcgattgtagctctgactagcgcgtttcttttcctcgcgtgatcgtaaaagagatctctattttatattacacatttttataatattttccttggtatggtgtaatgttcttatgcatgtgtatgtttgttgcttgtgtctgtttgtattcgttgtgcgtcgcgaatagattgcgatccattccgagcttcgatgaattgacgatcaagcgttggtgaccaagtgatcaagctctctgtgttctatgaggttaaagatcttgagcatctgtttggtgaaggcaagtgtcatctgacctattatgtcttatctacttataattcactgtcccgcattactttatgaaacctaaggattgactagctttgtatttatcttgtccttgattaccttttgggctattatggttagcttcatgctattgctttactttaatcaatgaatatgatgtgaatatttatgatacgatgatgttatcccgatgatgatattgtgatatttttaggggactcgggccattttccctgagtacctctccgtaaggacctgtttcgtggagtgaccacccaggataacagtgcaaccatgagggtggaatggggacgcccttagctgattaattagatgaacctggggtatagttggctttgccggagggccgtcaatgggggtcggggcgtagtgctctctctgctaaggtggggtgcagaggttcatttgatttggttttgttagtcacacaccttggggaggtgtactgcgtttgtacgaccggtgaaacctaacgagcagctatgcaccaggggagtctttgtaaaggctacgtagtgtatccctggcccttcaccttggtagtgaagatcgggtcttgcaaacctaggctggaaagggatcacgactcatgggtaaagtgtgcgacctttgcagaggattagaaactgatatatcagccgtgctcacggttatgagcgaccttgggatcctctttggttagaaatacatatgatctgagatacaatggttatgtttatggttttggttcgactatgatgataatgttgttcctctatgaggaaatggttcacaggttggttatatgataaaacttggcttccactaataataaacacctgaccaactaaaagcaactgcttgagcttaactccacataaagctagtccaccttagctaaacaggatatttgctgagtacgttgatgtgtactcacccttgctttcaccaaacaccaggttgcctttggtgcaatctatgctcaagtaaagaagaaggcatcaaggcggatctccaggagttccaggacttcgacgagttcgaggattaggctagtgacctcccccagtcagctgcctgtggtgggttaatttacgttggctacgtttctattctgtgtactttgattatattatgtaaatgactctagtctttcatactattacttacactttattgttattcgaagcattgtgctatgatgagtcatttatgtaatcgccgtgtacgtgaatttctgatcctggcacgtacatggtttgtattcggtttaccttccaaaactgggtgtgacagcttcggcggtggatagagctattgagttttgtttctttgaagcccaagacaccagggaccttcttagaaactgacaagtccctgatgtgctcttcttgtcaattttacatccagcataatcagcattggaatacccaattagattaaaggtagatcccatggggtaccatagcccaaacttaggagtataaactaaatatctcacgattcttttcacagccctaaggtgaacttccttaggatttggctggaaccttgcacacatgcatatggaaagcataatatccggtcgtgaagcacataaatagagtaaagaacctatcatcgaccggtataccttttgatctacagatttacctcttgtgtcgaggtcgagatgcccatttgttcccatgggagtcttgatgggtttggcattcttcattccaaacttcttgagtatatcgtgaatgtacttagtttggcagatgaaggtgcccacttggagttgtttgatttgaaatccaaggaagtacttcaacttcaactcccccatcatagacatctcgaatttctgtatcataatcctaataaactcttcacaatatgacttgttagtagacccaaagataatatcatcaacataaatttggcatataaataagtctttagaaatggttttagtgaagagagtagggtcagcttttccgactttaaatccattagtgagaagaaagtctcttaggcattcatatcatgctcttggggcttgtttaagcccataaagtgccttcgagagcttataaacatgtgaaggatactcactatcttcaaagccgggaggttgctcaacatacacctcttctttgatagggccattgagaaaggcacttttcacgtccatttgatacaacttaaagccatggtaagtagcataggcaagtaatatacgaattgactcaagcctagctacgggtgcatagatttcatcgaaatccaaaccttcgacttgtgaatatcctttggcaacaagttgggctttgttcctagtcaccacaccatgctcatcttgtttgttgtggaatacccacttgatacctacaacattttggttaggacgtggaactaaatgtcatacatcattcctcgtgaagttgttgagctcctcttgcattgccaccacccagtccggatctctacatttgcctttaagaatctgcatttatatcgatgacttaagttgcaacctttactattcttagtttagaatataggactagaacttaggttgcataacttcttttatggtagatgttgggggccttcggcttacgaaggtcctcaaaaacaggatttaacaatatttctggagtataatgcgtgagcaggtatcttcggactcaagtcggtatcgcagcaggagaagaccagaataatacgaaggttcatacagcgccgaagatgtgaacaggaaagcttcgacatggtagcagaaaatgaaaccgacttaaagatgaaaaggctattcagacctcgatagattactatagaattattatcaaatgtaaagggcatgaatgtaattttgtatgggttgcgtcccacgcctataaataggtgaacagtacccccgtactgttcacgctgattttaacattcgctttggcgtcacgcttgtactttcatctccttcaagctgaaggtacattttgtaattcgatgtcatttctgtttctacataatgataatgcaaaaataagtcaataataatatacaattgtctatgttatccttcgtattccttatgattcatccttcgtcaatgtatagtgtatttatgaaggcttgcccctcataaccttcgtccgaaaatcattatatcctaagggaaataatgcttcgaaggacgaagaactttaccaattaatattttctatgttgccttgttcttaactcatagcatttgagaacaagtccccaacattggcgcccacctccggtgaactcacttccactctttgagtttttgaacaccttcggcgatcataaaccttcgctatggcgccgaagaaagcttggcccatacgaagatattcagccttataattgcttcgggggtaagttgatgaagatagacttcaaacattttcagcacctctacgacgaacctgctcaggggaaatcgtagtccagctttcaaaaagcttcggtacactacgacttcattctcttcagggtgtggacaagtcttttccccttcgtcggccctcacaacggacaaatcccggaaataccttcctctcatgttgacaagataattttctttgatagttgatttgccgaaaaccgcatggcttggtcgccaagggcgatcttcggagtcttcaccaccactgtccacatcataactgtcgttgtcaccagtatcttcagacaaaccttccagaatctccttggtgattttttctgtattggtcttcgacattgctataagaaaccccagattcttctcttcatcgagactcagcttcatcccggtagcagccttcttatcttcagacatcttcgggaatactaaaaaactgttttcaatgccgaagcttcaaaacttaaaagctcagcaaatcttggtgcgcaagagctaaaaattgagtgagcgggagcagatggcaagaaagcgtgccaaatgaatttgcggtatgatcttatttatacgcccagtgcgttgaaaattgaaagaccccgcttgtcagtgaatgttgctattctagcaaagggaaggtgttttttcggaccttcggcgtaaggccttcgtccatgtcgcaatctaaatttattattttaaaaacaaattaatattgcgaggggctactgttgggggccttcggcttacgaaggtcctcaaaaacaggatttaacaatatttctggagtataatgcgtgagcaggtatcttcagactcaagtcggtatcacagcaggagaagaccagaataatacgaaggttcatacagcgccgaagatggtgaacaggaaagttcggcatgatagcagaaaatgaaaccgacttaaagatgaaaaggctattcagacctcgatagattactatagaattattatcaaatgtaaagggcatgaaatgtaattttgtatgggctgcgtcccacgcctataaataggtgaacagtacccccgtactgttcacgctgattttaacattcgctttggcgtcacgcttgtactttcatctccttcaagctgaaggtacatttgtaattcgatgtcatttctgtttctacataatgataatgcaaaaataagtcaataataatatacaattgtctatgttatccttcgtattccttatgattcatccttcgtcaatgtatagtgtatttatgaaggcttgcccctcataaccttcgtccgaaaatcattatatcctaagggaaataatgcttcgaaggacgaaggactttaccaattaacattttctatgttgccttgttcttaactcatagcatttgagaacaagtccccaacagtagagataccaacacttagatgaaacctagtttggttattattgtttagctatttgcatagcttttgtatagtataattatttgtggcctggattagcgagaaaaatagaggtcttaattcaccccctcttaggcattcgtagtcctttcacatagtatgaagaaaaacttataaacacacatatatatctttgagttatttatgacttctatgtagatcaaaaaatcatatgagaaagaaaaagcctttaaaatatattgctaggactagcaacttggttcaaaattgttatatatatatattaataaaatatatattctactaaattaatatacatataaatgtaatctataacttcttgtgaatagataaaaattattggagcaagaaaaaatcattttaaaattagttttcttattcatgccccactttgtgtcgtattgacccaagtacggttcatctatttatgccattgccgtctatcgtgcttaactttgagatacggtccaccatactaacttaacctatttttctgagtcgcatcatgctttgagttgttttatatcatgtccatgcttaattatgtttgaatgcgttagatctaatagttagatggctaaaaaattgttagaaaaattagctgactaactattaggtgggttaaaccagctaagaaactaatacttagttgaggataaactattaaatgagttgtttggatgtttctagctaattttagcagctaagcttacctagaaatccatttctttggaagctgctgcccgaaaaggcgagaaccatctatctgctactcgtgtcagcagttggctagttaggttcaaaagcaaagtcgcacccgttcgctgtagtttcaatccccttccttccaaacgaatgcaaggcacgcccaggatcacgcaacatacacccacatcctccagatctaagtactgaaagacctggaattccaacgagggtatataaagttaaacatgtatatatatatataaacatctaaagtcataaaatgcgctcgcgtttcggcctcccttcgcattcccgcgctactgtcctctcggctggcgacacgtacacgcaccagtgcaccacgccaacgctttttgctcactggatgtacgtgaactggcccaggaccagcacccaccacatgaggctgagcgtgagcgaggtcccgagtaggccgaggcccagcccatagacggcgagccagctgagccagcttagcagcacgtggagctagttgccaggatgtaggcgctggccgccacgatgctctgcgcctgtaggaactt

SEQ ID NO: 359 - DNA, 6259 bp, Zea mays
  Intron number 4 from transcript GRMZM2G095348_T01 (locus G RMZM2G095348) derived from phytozome v7.0 (chr-ID 6; pos 7 2205617 to 72211875 reverse strand)
cggggagtgtctgcatctgggattatcaagcacaggtaaggccgttagggcccgaacaggtttttggaaacgccatgtgcatgagttcataccaatgttagtaaataagatatgaaccaaacataacattagggtttactcccttaatgctggatcctttactccagatcatctttgctgttgctatgatctatggtgttgcctatataaggtgctgacatgctgtagaactttgcacatctaagtttcagttatgagctttaataactttatggccacctttcttatttctttcactatatgttgttcaagtatatatagcattatggctacaaacagcacttgatctttcggacacattattacacatctacaatctacattgaatttttgatcctgggttaccgttgatagttcattttcgtttaccactgcgtgacacttaatgattatgttctcccttttttagccactctgcatttctgtgagctaaggtgttaacctaatgaccttttaaattgttgtataatatgacccatttctgtttcgtttctgtcactaatcttcatgttcatggttgtgggctgaaccaatatgtgtctgagctgcattgtcgagctattacatatcacatatgcacctgcagttctgcaagatctgtatgcttgagtacaaaacgggggatttaccttaggtacgataagaaatcaaaatgatttgtgaaatttatgagtatgacataagaaatattgtctcattcctgggaaattaggatccagctagtggatcttgttactaaccttgggattgataattgataattagtccctaaggactattggtaatatatataggcagtaggcctgggcctaatgggccttaacacccctcctcaaactcaaggtggaaatggaggatctgaagctttgagtttgatcaagtgaaactgatgttgtactcttgtttgtgttttggtgaagaaatctgccaattgagattctgagggcacatattgaagatcaatagtctcctgctgacaatgggatcgagtaaaagatgcatcaacatctatgtgtttagtaagttcatgcttcactggatcatgagcaatctgtatagcactcaagtcatcacataacagaggtgtagaagtgtcacaagagacaccaagatcaaccaagagccagcgcaaccaaataatttcagcagtggtagtagcaagtgcccgaagttcggcttcagcactagaatgagatatggccgcttgcttcttggatttccatgcaatcggagatgatccaaggagaatacagtaacctgtagtagaacaacggtcaacaggatcacttgcccaagtggcatcggaatacacatgaagctgaagtgggctatcagaagcatagagtaaacatctggatcttgtcccgcgtaaatatcgaagcacacgaagcaaatgactataatgaactgaagtaggtgttgatacaaattggctcaacatatgaacaacatgagcaatatcaggtctggtgatggtgagataaacaagactacccataatatgatgatgccgagttgggtctgctagtggtgtcccatccttcggacgaagttttaaatgaatatccatcggtgttgcaacaatgcgtgtatcagtaagtccagagcgatcaagaagatcttgtatatatttggactgagacagataaaaggctttttgagtctgctgaacttcaatgcccaagaaatagctaagcggtcccaaatcagacatctgaaattccttactaagatgctgcttgacatgagaaatatgttctgagttgtcacctataatcagtatatcatccacatataatagaagtatagtgcggccttttggagagacatgaacaaacaatgcaggatcatgttcactagaagaaagaccagcaactgtgatgacagagatgaatcgctcaaaccaagcacgaggagcttgtttcagcccatacaatgcgcgacggagacgacaaacatgccctgagggagtatcaacccctggaggaggatgcatataaacttcttgtagatcgccattgagaaaagcatttttgacatccatctgggagatagtccaagaagatgaggctgcaactgcaatcaaagttcgaacaatagtcatatgcgcaacaggtgcaaaagtctcatcataatcaagtccttgagtctgttgaaagccacgagccacaagacgagctttatacctctcaatggaaccatctgattttgtcttaactttgaagacccatttacatgtgataggaacaacatgcgagggtaaaggaacaatatcccatgtaccagtgcgttcaagagcagccaattcatcaatcatagctagctgccactcaagaatcccagaagcttcctaatatgtagtgggttcaacaattggcacaccagcctgtggaaaacaatagcgatctggaggttcaatggtaccacggtcacgaagacggtatccctgattaaaaacatcattagactcattattgttagtacaagaatcaggtacaggatcagtatccggaccaaccgtagaaatagagcgggaacgacgaatgtaggtttggatgacatgtggtttgaaagagtaagaagaagatgacgtggaggtggaaggtggtgttattggaatgagaacatcagatgtggatgtagaagatgatggtgcagatgcaggaatggaaggaagacacatggaagaagtagattctgtgggataatatgagtgagtagactggttgtgaaagaaggggcgattttcattgaaactcacatatctagaaattcgaatacgacgagtcgaaggatcataacaacgatagcctttgtgttcaggactatatccaaggaatacacattctacagattgagcagtcaatttggtccgctcacgtggtggtaactagacataacatatacatccaaacacacgaagatgatcatatcgtgggggagtcccaaaaagaacttcacctggggatttgccagaaagtttagatgatggttgtctattaatgagatacacagcagtggaaacagcttcactccaaaagtgtgatggaacacaagaagatatcaaaatagtacgagcactcaataatatgacggtgtttgcgttcaacaacaccattttgggcatgagcaccaggacaggaaagctgagctagagtaccctctaagatcaatagctagcggaaattgtcagataaaaattcaccaccagaatcggaacaaaatatttaattgtagtagaaaactgggtgtgaaccatgcgagtgaaggacttataaatagaaggcaattccgagcggcgtttcatgaagtaaatccaagtataacgagaatgatcatcaataaaaatgacataatatttatgaccaccttttgaaacaaacggagctggaccccaaacatcagagtgcattagatcaaaatgtttagcagaatgagaatcactagtaaaatatggaagttgtatttgttttccaagatgacaacctttacaatgaaaactagactcaacatgtgtagggcctaaacatcctgactttattagggtggacagacgagatcacataagtgacctagacgatgatgccactgagcaaacgacgtcgtggaacccgaagcagcaagcacatgaggtgtagaggtatggtaggaaggaagaggcaaggtatccaagatgtagacgcgaggcgaagatttacgacgatggccagtcccaatcatatcccctgtgtgacgatcctgtacaaaacaagataagtcatcaaatccaacaaaactattgtgatcagtaatttgaccaactgatagatccatggataactcagtaacaaaaaatatatttggaacagtaaaattagaatcggaaagagaatccttgtgggtgacatgacataatgtaccatcagctgtctgaacagaagtaccctcagtgacaggtgtagtagatgccagatgtgattgatcggatgtcacatgaaatgaagcgccagaatcaagaacccaagatgatgataaagcaccagcagaagaagtagcaacaactgcaactgagcctttaggagatcctataccacgaccacgagtagcacgacagacatggaagtcaaccaacttctctggaaacttagcaaagcagttcttagaccgatgagtggtctttttgcagtgttcacaaggctgaaaggaggtgttcctagacctctgagcagcaaccaacacactgtgagaactcacaccattaatagaagacatagacttcagacgagtctcttcagcaagcaattcggacaatgcctgagccatggtgagagtatccgaactgtgaagcagccttacacgaagggaatcaaattcaggtcgaactcccataacaaatttgtaggtaaagaacttctcaatgaacttatgggctggacaaggcacaactgtacaagcgggcaccatggaggtcaatgcactcataagacgatcaaagacggaataatattcatcaatggacatatcatgttgctcaatcatatgagtctgctacataagggtatgtaaatgagcaccgctatcttgaacaaaccgatccttcagatgtgaccagatagccttagcagtggtaaatttggacagactcataatcatagttggtttagtgttgttgaccattgcagccattaccttgccatcattgatctgccaagtcttgactgcagcagcattgcttctatcagctgctaaaactggagaatcttcagtcaaatgaaatagtaaacaatgacctcttaatgcagtctggacacaaaaagcccattctgggtaattctgcccatcaagcacaatgttgacaacaatagcgttggccgacatattgcagagtaataaaacactgaagaataacagatctgaaacagactggctgaaaggtaccaaaatcccgagcgggagcaacggatgaacaatgctgcgtgcgacgttggcagacaccagcagatctgatcggggctgcgtgcgacatagaagagcagacacccggtgctgcgcgctgacagcggggcgcagcagctccgcaggccgcgacggcagctcgcgccgcgcggcggcagggaccgcgtgcagagggcgcaacctggcggacgaagacgacaggcgcgcgaggggaagccgacgaagacggcccgcacacggatgaagacgacacggcaaggtggctagggcgcggccagcgcacggaagacggcggacggcggtgcggcccgcacacagatgaagcggatggcggcggtgcccgcactcagatgaagacggcgcgacaacggcggtccgcgacggcggctgaggcgcggcccgcgcacagaagacaacatgacaacagcggtccgcgacggcggctaggatgggggagatccgcgacggcgtctagggcgggggacagccgcgacgacggctagggtggggaacagccgcgacgacggctaaaaaattagggtttcgtaacctgctttgttaccatgttactaacctcgagattgataattagtccataaggactataggtaatatatataggcagtaggcttgggccttaatagatctatgtatctgacataatggatatgatttgccaatgcaatagggatgaaaacgggtacttacctggatattatttttggccttttttctttggttgtgaataaataggatatagaatcttctatgcaaattcatattcttgtttttagtattgagcttgtaaagattcataaaaggtaaacctcaaatttatcatatatcttctcaaatggtagatataaaattcggatacaattcagatacggatacggatattgtttcacctttttttgtcgcagggagcaaataatgtactacctccatccctttttatttgacaccaaatagtgcaagattgaactacaaaatgtcaaacaaaaaaaggagggagtataaaacaatctatgcaaaattttattcttatttgtaatattgtgcttgacaacatgagaaaagattagcatcaaatttcatacatatctatttcaaaatattaaatttgtcctaacaatttggatacccactttcatccctaaatgcaatataacaagtgtatatttgttgttgcataaaaaacaaagttagattctgagaattttattcattgacatgtttgtttttgtatataccttttcaggca

SEQ ID NO: 360 - DNA, 888 bp, Zea mays
  Intron number 1 from transcript GRMZM5G876434_T01 (locus G RMZM5G876434) derived from phytozome v7.0 (chr-ID 8; pos 1 28488231 to 128489118)
acgtggtatgctgcttccatcttctccttgaattactctttttatattgtaattctgtggttgatagcctgctgaaatctgaagtctggtccagtttttagatatccagttacattacatcagcattgtgttaactataatttatcagctacaaacagtagtatcatgatggtcccagttagtccccattggtaaccgaccattttttccagaagggtctgtccgcttagggcttgttcggttattttcaatccatatggattgaagaagattatatggattgagagagattttgacttactaagtattgaaacccctacaatcccctcaatccatagtactggattgaagggaattaaatcccttgctaattaaaatggaattgaaggtgatttaatcctcttcgatcccttgcaacataagagcatctccaacaacgtgacctatagaaatgccctataatttaaaataagtatattttatagaatttagggcaccaacaaaacaccccgctccaacagtaaagccccagatctagattatagggcagcccactacggtgtagtatatttgaggcacttgagagggtgccctatagttttttgacaaaattttataaaatgaggtactgttggagtggtttttcctgtatagagcctcatatttcaatttgagacactagtttgaggcattgttggagatactctaacagagcctaatgtggatccttgttgacacagcattagctgcagatcccatgtgcattgacacgtttgatctttcagcataaatataaatacttggtttgtcctgcgtccttgctctgaaccggctgaacttgctgctctcgcaggtaaccggggaggctgtcaagaggctttcgtggca

SEQ ID NO: 361 - DNA, 9329 bp, Zea mays
  Intron number 1 from transcript GRMZM2G155899_T01 (locus G RMZM2G155899) derived from phytozome v7.0 (chr-ID 1; pos 2 96169700 to 296179028)
ttggttttattgaagtcgaaactccagttctacaggtatttttttgcataccttctaggtctgtattcatcaggatcagccagcctatataatatgtgaccattgtaggggccatgcagtcgatacatataaattggatttattatgtttaaagagaataccttgttttaatttaagtgatcagatcctgtcaaagaaaaactgtgttttaagatccattacacatcctataagtttttccacagataaaccaataaattttacctcctaaatgcatactacagtaatgcttctgatttctgaattactttccaagcctctaaatcataagttccacttttgaaaatactaagggcctatttgttttagcttttggctagtctttgccaaccagaaaaagggcaggtccaatactgaaggctcccacatgagtgaggtctggggaagggataaaccgaggcacacctttctccgcaaatgcggagaccggagaggctgcttcgaacccacgatttggcgactcaatgagacagctctcattactgcaccaacctgcccttctggtctttgccagccagaagctgaaacaaatattctagctgttgagctagcttttcaagagctggaaagctggcttctaaggaaatgaagtaaaagctgaaatcatgtcttgatgagcttttctggcttttggtgtgctgagaggctaaaaatttatcacaaaagccaacaactagaagccaaaagccagaaaaccaacttttgagccaaaaaccaaaagctgcagctcaaagaaacatgtcctaacttaaaaaaactcgacctgcgggggtaaggctgcccctaggcattatattaagaagactttctcacgcaggtctagaaaatctccgaacccctgtcccacccatacacaacggcaccgtagcccatgtgagaaacaaccgcgactgggaccggtaccgggctttagacctgtgctttcgcgtgagacagacaaggggattttgttaaccacaacttgaaattcgctcccacagggagtcgaacccagacctgaggagtgctactcagagtttcagaccacctaaccaactcggctaggggccctttcgcacatgccctaacttatgtaagacttattcaccacttaagctagtggattgataaccgtttagataacatggtttcctaaggtaaatcttgttaactatgcgattttgaaccctttactgcagtaacaacacgatttaacatggtccggtattaacatatttttttttgcttctagtgattgtgcaaccaaaaagataaggggcaatcacgtataactaagacttgtatgtttttgttttaataaatctgtaatgcagcacttgtgtgcactccaaaaccaccaataatctttctgtgctcataatttgaatgaaaaatatgatatgctgatggagtgttgttctttatttgcttacatttaatgtgtgacacgctcatattcgacaaaacattctgattgtaaatgaaaacctatgtgccttctagggatggcaacgggtttaaaacccgcgggtacagagattacaaacccgtacccgcgagatcaatgttaaacccgcacccgttacccgcgacgggtagcgtatgttacccaaacccgctacccgcgggtttatggcacccgcgggtacacccgcgggcacaatcatataacaaatactaggtgagtgcccgtgcgttgcaacggaaccgtataataacatgataacttatgtacatatctgtgttatattgttataaatatgtgctcgtacgttgcgacggaagtaaaagatttgtatgaaacattaatacgaaacgacaaacatcactataatatgcaaaatccgtgtgcaaaacattatcaacatcacacaaattatttctaaaaagttaatttagaatttttaattacagacaaatgttatatcacacaaattatatacatcccgagtgaattagcagagcatgacatcccaaccctcattaccaattcatggggcacaattttaatggtcgcatccattttggaaaggccagtcctccataatacaaaatgtatcattctgtaaatcagacaaccttggttgtgatgaacagatcctccctaatggtaagttgggtcttgaattcctccgtgagaacactaacttcatctttattacggtagtcatctgcagacaaagtcaccatgcacagactgtaaattaccaagtataaaaaggagaactcatgtaccgacgctaatatatggaaagtgccatgagaaccattcgctgaagtgttttgttgacaaagcaataaataatcatactaaaggaaaattggcatattcatattctcagagtttccgaccagagcacattgtctataaatattgtttacgatatctattagataattaacaataaagagttctgtaggagaacaaggaacaaacctgactaccatggggaaggatttatgtccttgtcaagcgaacccaaaagaaagattgtcaggatcacaatggtgtgaacatgattcacattcaacttcatcttggccatcctatagctaagccccaggccaagctaggccctcccttattatgaatcctacaatcgccatggtaaaatgttatttaaccttggccctgctatagctaagccccaggccaagctaggcctaccccaagtctgactcctacagtcaccatgggaaaatgttatttattttcttcctatgggttatttggatgaaaacatttacatctcggatgaaatcaccaaaatcaatgacaccccttggtttggcattgaaaagaccaaacgtctgcaaaggcaatttcatgttaatttaactgatgccaaaattgcttaaagcacaatacaatagtgatgaaatacaaatgagtataattgccaagcagattcttaaacagttctagttggaattcttcctgtgcaatataaaatgaccgcaaatattaaccactcttgtcaaatacctgttgatctgtttgggctccagatagttcgcattatcccacttatgatcagaaagactggaacgaaagggaaaatgaagagttacaattttgcttgcatgagaaaaaggaacatcagttcagcatataatcattgtgatttttaatatttacttgttactggtggaacttacgttacttcatacaaatagtgtaggagctcctgaaaatcactcaattatccacttgctctaggcagcgccttgaaatcactgaactccccatcgagaaaatggcatctatatgtgtagagaagctggtcttccaattctgttctgacctatctcgtagttagtgttaaacgccatactcaaccataagcacaatacaaagagcataattgaatcattaaccttaatccctggtagcccacgcagacccaatgaacaaaatcttggtacaaagttacacaaaaacacactggaacattagggccaaaactgatgtgtttgtcatgcatgatatggcagatgtgtaaagcaagggaaggagaaaacttacaagcataaaccatatgcatgtatggatcctcacagatcaagccatggcagtggaggaacgacatgaaaactttaacaaaatattacctgctccagcgcttgccaacatcatcatataccctattcaataggttgaaaacaatatcgctaccctcaaaatttaatggcattagactatgacaatatgcaaattccagtgaccgtaagaactgatacccaaatcatccctatcaaaccctaattctcatggcacaaaaaccatcccaatcaagttctgaaactcatgacacacaaagaaaaaactgagcacacaaaaaggaatcgagagatggccggcgggtgaggtggagggacgaatggagctgcaccaccttgttggaaccccacgaccttatccagcctcgctcgcataactggagacggcacgacatggagacgatcgttcgggtgtggccgacgcggagccgggacgacgacgaccctgtcgccgcgtgtggggagggctggtggaagcgatgcagggacgccgaggaaacttcaactcacatcatcactgtcgtcatccgactcatcttcagaactgtcctcatcgctgctgctctcttgcttgaccgtcttcgaaccattttttgcaactgcagccaagggtttagcagcaggcttctttgcaggttccttaatgagaagatgaattggcatctaaaaactctgaaaactacattaacaattcaatttgctggttgctggtttttttcagcattaaaacccaaaaatgataacatacctcatcagattcaaaggtctcgtcgctagtgtcatcatcactggactcttgtttagcaatcttgggagcagccgccttctttgtatgtaccttgttaacctgtagaaatactaatatttctgggaacataagaaactgactcttatacgacattacaaaaagtggcttagcattttaccgaacaagagaatttgtgttgactcgggtcaaatgagtgagaacacttggaaaaaaccaaataaattaaaacagttaaccagctaaaatggcttagtagattcagtcaaagaggaatccagagtttgttttataagaaattttcatttctaaaaataccaaagcatcaagaaatctttagaaactaatagattgttcatcaggttttttgtatcctgttctagaaccattttgcaaagaagaccaaagatcttcctctgataaataaatattagtggccctgaagaaatggctttcatatcttgcataaagtatatcagattagcacatgctagaatgattcctatcatcttttttaaacaagacgcatgttacaaatgtgcaggagctaaatggagaatttaagccaaaatcccaatgagatgataggagtatcatattatttcactttgatagataagtttctggaattgtaaaaaattcaagaggacctagtagtaagtgatggatgaacatgaacgtatacctgcaagatctctatagcggcaatgtatgcccggacgtcacagtttgagtacccccagcccttgagatcaacgatgcagaggaatttctcctgccctctggggattctgcatagattaaattattacgagctgagacggtgttttgcagcgcgtggcagatcaaatcaaccagatactcggaagaacttgccgctagctagctagatgatgattacctggcacagatcttgtcgaagaagtagacaacaaaacctgcacaattaagagcagctaactgtgttcaggcaggtacggttcaggtcggacggcacacaaatgttagcaaggaccaacgaccaaggagggaagacatagacatgcatggacggagcagctagcagtgtcacaacaagtgcgtactcttgaactctgccatgtcacggccgacggagaagtgcctggccgcaaaggcgacgaggatggggcggccggccctgtcgccgccgcccatgcacagcttgtcctgcgacagctccctcctcacctgctcctccggcacggagccgccgggcgccgcctccctccgccacttgaggaacttgaggaacatggcggaggccttgtccacgtcgtggtcgcgcgcgcgcaggaaccgaccagcgtcaggttgtccaccgcctgcatgcgcaccggcctcctccaatcagtttctgaagtctttcagcgattactgaaagatatatcgttgtttgattaataataacaatgatgataataaataatctttaggtcttttgccttgcctcctttgaccaacagggatcgatggagaggaggcaaatttcagtaggggcttgccggtggataactcatctttaaatccatcacttactccagaggcccagctgaaacccccatggacacaacgaagcaccgaatcgagcagagcctcgatcagagatgcgggaggtgggctcagcagcagaggaggacgccaaccatggatctcgccgagtaggagaccgcgacctcggtgttccatggagagcagctcgttgggggagtggaccgcgggggagaggagatctgctgggaccgctattccatggagagcagcgtgggcaggatgggcttgcccggccatggatctcgccgaggaggagacccgaccgtggatctcgctgaggagctgactgcgatagaggatgagagggagacgcagggaggaagggggacacagacgatagattgacggggggcatcgtgagccgtggtgaggacgtcgaggcggctgtcacggcggggaggcggtcgggggcatcgcgagattgggggcacggtgcgggcgaaatttccgggggcaggcggggcttgcgcgacgtccgggcaggggcgggggcatggtgaagtgtggacgccctccctacctccttatagagtagtaaagatttattaaactgatagcacataataataaatatttattaaactgataaaaacatgtaccgatcttagccaaaagttttatgagttccctggcatctgtagtcttcttttatatcatttgattggctccgctcgctcaaagctttcgaggtggcactaaattgagatgcatgtgctctacaatctacacagacgcgggtttgcgggcacgggtacaacattttcatacccacgagaaaaaacacgtcggattgagaatcaaacccgtacccgtacccacgggtacaaactcacacccaaacccgcaccttatagggtttttacccgcgggcacgcgggtaaaatgtgcccgttgccatccctactgccttcggtgaaaagttgacttgcagtcttacactaaagcagaaatgcagttaagattaaaatgcacaatgtaatttaattttagacaaatgcttgatttcattattacatttaggcaccatttggatctttggaattgaaatccattctaataattataatttaggcacagatcaattaagcttatatggttgtatgcagaatatatttgtatactggtgtggccatatgaggcttggctccaacaagagccttaaaggctcctctctaattttaggggagattccctcccctatcctctccagcaccgtcttctaaatcgtcctctaaatatagaggatgcatagaggatgagatatagaggagactgtaaaggagggatatagaagacgttgctgcagacagtcttagaaagatacttatgtgctgtatttctgttgtatggaagcgagccgaagtgtgtgctataatatgtagagtagaaaccatgcttattaaaacgacgtttaaacgtcgtttaaactataaaacgctggaagaaaccgaaacggtgaaacgttttacgattcttcgtaaaacgtcgtttaacgacgtttaaacgtcacgttttggcgtttaaacgctgtatagcgtgaaacgctacgtttcgagcgtttaacgacctagcccaatttcccgcccaggtttagggttttcgctcaccaaagccgcgctccagacactccaggaagtccaggctgccgctccgctccaggccgcgacactccaggccaccgctctgcccccaggccgctccaggccgccgccgctccaggccaccactcctccgccgctccagcccaatttattgttgtttgcaacttgtagatgcataccaagaaaaggaacaggctagagcacaaaagactgaatgatttagtgtatgtttcatacaatagaaagatggccgctaggttccaaaaattgcgtgaagggaagaactttgatcctttggttcttgaagattttaattgggacaatgagtgggttgatccattagctaattcatctgttgttggggatgaccctcttttcacatgggagcatgttgatcatgccatcggtgcatctacacaacttcaagtccgctactttcctaggagagctcatggtactcaagtgccaattcttgaggatgatgaagatggtgttgatgagggtgatgagaatgaagacgatgacaattttgtacttgacgaccttgacatggatgatgaagaagaaacaaacaacagtggtggccgtggtgatgagcaacacaaggatgatgttggtttagatgatttggatgatggttattgagtgtttgagtaactcttgtgtgcttgtggttgtggacatggcattctactttagttgcttttgtgctatgtttgtgattgtggactattagacatctcattccactttgtttgcagttgtcgacttgctattagttgaacttgtgttattgtggtaatgtggttgtggacatgtcattttgcacaatattattgtgtgaacttatgttggttgtttggtatttgacttgatataattgcctaaaattatgatatattgaaatttccctatgttgtttaaaactacgtttaaactttgtttaaaccgtttaaaagttaaaactcacccatgagcgtttcaacgtttcgtcgttttaataaccttggtagaaacgtagcataaatgatctatagaatcaatttatatctcccaccctataaatttaagataggcttatatctgaacattggaaagctattgatgttaaattccaagccaaatagcctactccattaagtatattctaattccaccaaatgaaaggatccaaatgacccctaatcgtatttggcctggaatttatttaggagttactaatttcaaacatcagagaaaggagccttggcacagtggtaaagctgctgccttgtgactaggtcacgggttcgagtcgtggaaacaacctcttgcaaatgtagggaaaggctgcgtattatagacccaaaatgggtccgacccttccccataccccgcgcaagcgggagcacatgcaccggactgccctttaatttcaaacatcagcatattggattcctattgtcagttcatctctaaatctggaatagcttgtggtgcataacaaagtatcgtcatcgatagtgcacataggttgtaaagctcagcatcagaaaaacagaaaacatatcggccataaacatgtctttcttcttaaaaaagggcccatatgctattggtgtagttgaaccaatggcacaggtacaaccttgcatagtactaacgttataaaagaaataagttccttttgtgtcactatgcttgttattgatcactagtttatcttctctggtcctttcttatttacaacattacacataacaatgttaaaaacagggagcagcaggtggtgctgaagctagaccttttat

SEQ ID NO: 362 - DNA, 6425 bp, Zea mays
  Intron number 5 from transcript GRMZM2G047894_T01 (locus G RMZM2G047894) derived from phytozome v7.0 (chr-ID 9; pos 1 37743291 to 137749715 reverse strand)
gaagcaggttcgtgattatttgtcatttgatatgtcccacggtactcaaatctttgtggcttagttagttttttagcctgttggcagttagatacacacttctacattgaaatgtggtcgaattaggagtgactaaaatgcatttgcaatttcaaagacgtgtatttgtaacttgaggaaggaaagcttgaatataagccctggacggtttaacgatttgtggaatataaatataacaggtaacgtatcacatactattagatattgtgcagtatttgtcatccgccttgtttactcaccactagttatttttgattgagcttatcggagcatgagttggaatgagtgaaaccctattcctaatcctacaaaatacaacatgtgctgatggtgtctatcctttctaccatgtgtgtttaatcctagaaaaggataggttgaacttgattgggacacgaaccttgcttgtaatatatttatatttgaatgcaatttttttgtgcttacccttcaaagtttgatgtgccaagtcaagatgttggaagacatgctaaaaaacttccaaaacaaaacacatattttccttgtagttgtgcacaaatttcgatcttttttctttccagataagggatcatgatattaccccctattaagatctagttgcataccatggagaatctcgatgggcacgtgattgtagatggtggaggcggggcgcctattgaggaggcaggtggcggttgctatggcttcaacctaataaggggatgacgtggaggcatggagcagtgtgcagatggagttgttaagtgtatggaggatacattcagttttgccattgtaagcggaggtgtaagggtagaataggcataacagggtgctatgagaaacaaggagttggtggcattataacaaattatttaccattatcaacctgaaacacttgatgagcgagttgaattgggtacgcgcaactgaaagaaatgggtgattaaccagtgcacttcagacttgcgttgcatgggaaacgtccaacaaacacgactaaaatcatcgaaaaaaactcggacggggagggaaagaccgccctcccggtagtgtattaagaagagatcgaaacatggtcccgaccgagaaaacccccgaaccctggccctccatcactaacgggtgcccactctgcaacggcccagtcggagggtggcgcataggatatcgatccccgagagcagacgagacacatcgaggggattttttaaccaagcccaaaattcgctcttaaatggggggggggggtcgaactcgagacctggaggtgctacttggaagccttaaccattacgctagaggccctttcacgactaaaatcattgagaatgacaagatagtaaagacaacccaaaatactaggaaccagagaagtttagacatcacaatgaaactcaacctgctgggggtaagacaacccccgagtattgtattaagaaaaccttttcacacaggtcgagaaaacccccaaacctctaccccacccatacacagtggcatcgaagcccatgtgagaacggtcgcgatcgaggctgagccttagacctgtgctttgacgtgggacagagacgaggggattttttaaccacaacctgaaattcgctcccacggggagttgagcccaggacctgaggagtgctactcagaccacctaaccaacttggctagaggccctttcgcagacatcacaatgaagaagctcgaaaggagcagaagtgcatgaaatcgaactagcaaaactgcaaaaggtagctacgaatgtttgccaaggagtgtcaaatagagcgatctattttattacaggagatgactttggtgagcaagacactggtgtcctggactcctggtgccacacgacgaaggggacgacgaggtgggcatgagcagcaacaacatcgggcaaggtgtagaggttgtcgtcattagcgcagcgaacatctctcgtatggtctgaagatccttaatagagaaaccaaagggtcaaatttaatggagcaaaggttgtcgcgattaaactgatgtacgaacaacaaattacgaacgagagaggggacaacaagaacattaccaagatgaaaagtagaggatgaagttggaagaagggagtgtccttgggcaagaacaataaaggaattgctattgccaacaataatggaagagtggaagggagtaaagttggagtataccatccgatgatgacatgtgggaggtggtgccggtgttgaggacccaggggttggatccctggagttgtagctgttgtagggcagccatcatcatcccagatgggttccagctggggaggcgcttgatactgccacctaggggcaggttgagaccagcccccaacttattgcggtcatggctaggtgattgaaggcgcttaggagccaacaaaggtgttgttgtcttgaggataaggcccaggcagacttgtagatggtgcgcaccaagtatgacaagtaggcggcatgctccacgagttgaaatagacccatgggccaaaaggatagggccctgcttgctcctcgtccccgtgacctttgcaccggttgcggccaccacctacaggtgcagcgcccgcacttgcttttgtcagggaagcagggcccttgcagtcgctagaacaacctccaccactgtcggtgccactggtgaggagggcggtagcttaggcatttttcgcgtaatcggtgaggcacggttctttgaggaccaatatgttgtgtgcttagatgaaggatgacaagggtttggcattggctatgttgttggcggtgttggtgtagcaggcgttgaggccgcggaggaagtttaggacgagctggggatcgtcgatgacgatgcaaacatcacgtagggcgtgaacaagggtctttatccgtttgcgatactcgttgatggacagatcgccctaggtcatggagtgaaacacatgacttagaaagattgcctgtggagctttgttttttttacggcgcaaggaagcccctacaacacgattttattaaaacaaaggaaaacagattttacaaaggtgacaaacaaacatggaaaaagaaaaaagctagcgagagttcagccataatgaaattctgaacttgagaatgaggctaaatctaagcatttgaagcttcaacatgtcgttgaagcagctccgccaagaggaaaacgagggtgccaaattcctgaagatcaaatcatttctctgtttccaaatgcccaagcaactaaagccattatttccatgaaaatttcgtggccgaaggcattcttagcagcttcgatcatcttaaagaaattcaaatcatgattccactgaatacccacataattctagcagtttgagctaaaaaggcagtcaaacaataagtggtaggttgactcttcacaattaagatcacagaggatgcacttgaaatcactgtcaacagtcagagaacctttccttctgagaaggttcttcgaattaattctatctctgaagacaagccatacaaagattttgattttcttacagactttggattgccagatccaattgaaaggagagggcggttgaatggatttgaagcttaacttgtaaaatttggaggaactgaaattgccattaccctaagggtatatccagctgtctttaccttccctagaagattgaatttggccaatattctcacaggaagcctgatattctttagtggcttgaaaagagagaggagtatgaaaattatcttccagatttatattgtcaaagaattcctgaagagagcactctttctttttggtgaaagaaaagagacaggggaaggtatgcttgggagagagattattccaaccatcctgccaaagaaggatgaatttggccaatattctcacagaaagcctgatattctttagtggcttgaaaagggagaggaagaggagtatgaaaattatcttccaaatttatattgtcgaagaattcctgaagagagcactctttctttttggcgaaagaaaagagacaggggaaggcatgcttgggagagagattattccaaacatcctgccaaagaaggatggtccttccatctccaatccgaggcaatagcatgacctctaaagtaatccaccaatctgagaacatccttccaccaaaaggagcctttttcaggggagaagtgagggacccgactggaagcataataagagttccaaacaagattcacccaagtaatatccagtctgctatagaatttgtgctagaatttcaccagaagggccatattctggattttcagattaagaactcccagacctcttttattcttaggataggtaactttatctcaagagatgaggggattgtgatgggcattctcgttgcatcctctccaaagacaatcccttctcactcgatcaatggcaccaataactgttgcaggcagttttaacgtgcacaagacaaagataggcatgacagagaaagttgagttaactagggtaagcctccccaccattgagagccaaaagctggtggagttcaatcttctttcaattttgttgatgagaggtaggtaatccttgattcttggttttaaaattcccatcggcagatctaggtacgtgaaaggaaatgacccaatttgacaaccgaaaaccgccgtgaactgagcggttttagaggcatccaggttgataggcagaagacaagatttgttaaagttgattttgagcccagttgaagttgagaaagagtgtagaattccttttaaatagagcatgtggagctttgttggtggtgaagaggttgtcgatagcaaacccaaagttggtgtgcggtctgatcggtggtcctggcgagatcaaggacctcatcggagacgaatccgtagagccatctgcggatgcagcagcccgcctgcaaccaagatggatctgtaggtcgggtggccttggtgccatcgatgtgccccatgagaccgaatttgccgcacatggctgtgaaaagttggatcagctttcggccgcttcttgggatatttggaagaaaagaaataacttcatttttcaggcaacccctccgtcgtttctaggctggaagcgtgattatattcagaccatggagcagcagatgcttagaatgccaccagactttaagagtcttgtgagccgttggctctcctctttgtagttctcttcctgtggaggttgttcggttaggactttgttggtttgtttctccttttgctttctttctttctttcttctccttctccttctaggtaagtcaggtttggttacgcctttctcttctctctccccatagtttgtacagtcctcctgtaccttctctgttagggcctaaggaggcccatggaggggctgcgacagcagcagccatgggccctctataggggattagataaggatagttagagataagattagttaagattatttaggagattcgttgagattatctagtaaggttatcagttagtttgttgagagtttttaggagagttttaaggagataaggatatctagctagataggggcggtcagccggcctatttatgtaatcaatggatgagaaataaaggaggtaagaattagaagggagaaaccctcctcttgctcggccgtgggtagagacccccggccgatgttcctgcccatcgatacccctctccaatccctcaccgatctagcgaccataacattctctctcttttttataatatttataaaatttgcggcgctgtaggggattcccttacagttttctcgatcaaaaaaagttggatcagcgaatgtagttagggttatggagttctaggacgacagggacatgtgatttgatgcagatagtggcatagggctagagagcaggaaggttgtcgctggtctgtgatggactggttgacgaggtgttgaagatggacgacatgatgcagttcgacgatcagggctcgagagaagtgccgacttgtttgggccagaggaggaggcacctgaggcaagggagggtcggcgcataggggaggtggcgccagagaaggcaattagatgagatggcgtcagagttggtgactgctgggctagggcagcaggaagaaaacctagactgttgataccatatagaaagatagatgaaaaacaccacacacccttaggtgagaggtggccttcatatatatacaaaaatcgcaaataactttacaattaatgaagatttgttaagtcattctagggtgggtgataatcacctagggtgacgaatagcgcttattattaactatctcctaacattaagaaatcgttgtgcctatcgttctttattctttcttttttggtcaggctgatccacgttttgtttggaacaaaaatttgtt

SEQ ID NO: 363 - DNA, 7790 bp, Zea mays
  Intron number 8 from transcript GRMZM2G050501_T01 (locus G RMZM2G050501) derived from phytozome v7.0 (chr-ID 7; pos 1 63613477 to 163621266 reverse strand)
ctgattcatctggacctgaagagtctcagttagaggtaccagctatgttctaatcctaaatcctgagtcttgtatgcagagcaccaagttaagagcatgtccatcctttgattgacctatggtgatgaagtctatgtgtactcagttgcaaatcaatggtttctatttgtgttctagccaactcttgatgttcccctagtgttgtacctggattagatgacttagttccagttatttagttttgttgttatccttgtatattttttttgacagaggggataaccccctatttcattacgaaatagaaagagacttaagttcatacaagaccatagaaccatccagaacttaaaagccgacaagatacacaactatcagctacgaagaaacattacctgagcgaaccagcctactaggagcagcacatagcacagaactgaccaaaaacatagatcacaaagatcaacctagagcaacaagcaactaaacagcttaagtaacgatctagcccaaggttttcagcagcctggagctaccgaggggggaattacagcaaacatattgttgaagaaccaaaatagccggatcacaacagaagcttcattgaatccgtctgtcgactggcttccaaccacgagtcctgctgtagatctcacacgccatccttctgattttgaggcttccttgttccaccaattttctttccttctttttctgacggatagccgaagtatcaagccagtagcaacaagagaaaatcacattagtcggatcatcaattctgtcatttccaaaacaacaatcattgcgacaacgccagatcgcccaaatgacagcaccacaaccaaaaaggaccagattcttttcagttttgttaaaactgttaatccaagaaccaaatagatcattcacattgttgggaatagaaattaagccaagagcagagtagactattctccaagtaaatctagcaaccgagcactgaaagaacaaatggtctatggattctaaaaatccattttttcttgaacaaattatccttggtcaaaatctttttatgcataacaagccacagaaaagctttgattttatgtgggagtctagtcttccacaagaagctagaaggaaaaggaatctgagcacatttgatttctttataaaaagaattaacagaaaaacctttattacccagaagccaaactgacttatcatcctcctcagaaatagtagtattcatggttattaaaacggtaaaacgttaaaacgttatgaaccaactttttaacttttaaacgtttaaacgaatgttgaaacgtcttttcagacttgacatagaaattcaaatatagaataagttcacacataagccttcgtgactgatctttgagttggtcttgcgaagtggccgcagaggtgaggcgtagcgcagaggccgacggtctacaacgcagtgggaagtggctgggacccctcactcctagtccgagccgcagaggtgattcactgtgaggggcagcgagggcagcggttggatctgggccgtcgagggcagcgacagcaagtggatgtggcgacgcactgagcttggccgggcaactggatgcagcggcagcaagtgggcactggagcagtggaacttggccgggcaagtggatgcattggcagcaagtgggtattgggtagtggcatggcgacgcactagcttgtgggtggactggtggagggaagagggaggagggaggagggaggcggggggccagtggcgtacctgggggcaggagggcggtcgcactgtcgtaggcgcgactgggcggccgaccgggagatctccagcgctggctgaggagtgaggaggcgcaatctgcagtcgcaagcgcggctgggcggcctccagcgctggttcgaagcgaaagcgagtagccgagtacctaaagcccaggaagacccactagtaactagaacgtcctcagaacgtctaaaacgacataaaacgtgtttcggacgtttaaacgacgattaaacgtctaaaacggacgttctacgcagatttgttagaacgttcggacgttttagtttctaatcacgttttaccgcttaaacgacgcttaaacgttgtttaagcgacgttttaataaccatggtagtattattacattgtgtaataaggttattataatcgtcttccaaagcaccataaatccttcttctgaaattcacagctctaaaatcagaagaaaaggctttttccactgtgatatctttatcataagcaatatcaaacagactaggatatttagaagacagaggttctgaatcacaccaaatattgtgccagaagctggtgctattgccattacctaccttttttttacaatatttgtaaaaattgtccctaacatccagaatacccttccaaaagtgagaatcactttgtctttttttcaatgaaataataggccttcctttaacatatttatgtctgataatggtctgccaaagaccattcgtattttccaacttccaaatccatttagcaagaaacgcctcattcatcttgtgtaaatccaagaccccaaggccaccatgacctctcggagagcaaaccatattccagtcagccagatgatattttttttaatatggccaccttgccacaaaagcctttttctgaagagatccattttcttcacaatattcttgggagccttatacatcgagagcatgtataaagggacattggtaagactactattaatcaagactaatcgaccacccaaactaaggaattttccttgccaagaacccattttttttcaactttctctactgtgggtaaccacagggacttgcaaagttttttatcatcaatcggaacccccaaatatttcataggaagacaattatgaggacaagtaaaaatgtcagtataccacatttccttatcaccagcttcacctaaacagaaaatttcacttttatgaaagttaattttgagaccagacatctgttcaaataagcaaagaataaacttaagatttctggctccttccatatcatcttggagtaaaaaatggtatcatcagcatattgcaaaaggcaacaaccatcagggataatatggggaatgagccctctaataataccttcatctttggctttttgaatcatacaagcaagcccatctgcagcaatattaaaaagcactttgtgtgtggtaaaatagggaccaaccctgtcatttgttttgatggccactttaccatctttaacagttttcataacccagtcacaccatttgccactgaagccttttttaatcatcatatgatgaagaaagttccaattgactttgtcatatgctttctcaaaatccaccttaaaaatcaccccactctgcttcttcctttttacctcatgaataatctcatgaagagacaccactccatccatgatgtatttacctttgataaaaccatactggaaatcactaatcacattattgatacaactggccagtctgttggtcagaactttggtgataatcttatatcacacattgagcaagcaaataggtctgaaagctttaatgtcagtagcattaggaactttgggaataagagtcaccacaccaaaattaagtctctcaatgttgagagcaccaacataaaaatcttgaaaaaggttaaacagatcatttttaatcgtgtcccaaaactcctgaaagaattcagctgggatgctatcaggcccaggagctctattatgtttcatagagaacacttctctaatttcttccatgtcaaacggtctggtcaggtaatctctgtcattatcatccaacattttcatattcaaatgattcaaagaaatactagaatcttgaaagggaccaaacagattttggtaaaaagaagtcgccaaatggttaatttcatcatccttctgagcaactttgtcatcatgagtaagagtcataattttaagcttccttctcttacatttggctaacagatgaaaataccttgaatcttcatctccatccaggatgaatttatcacgagctttctgtttgagcttagttccctcctcatcaactaattttttgagagtcaactccaggtcaagtttctccattctgtcattttccgaaagaccaaccacttcactgatattgtcaaagatgtcaatttttgccaacaattcttttttcattttttataatgtccttcaacattgatattccagcctttaagcatttgtttcaaacgtttaatttttgttttccaaatgtcaatgctacctttagccttcacagggatagaccaattgtctatcacttttttgtgaaaatctggcctatccttccaacataactcatatttgaaaactctgctaccaatagggataacatccgtttggatacataaaggaacatgatcagagaaggatctattcagaccacggacattgatgttgttataagcaagatcccactcccgactagccagaaatctatccaacttttcaaaagtagggtcaatccggttattagaccaagtgaacaacctattgttcaagtcaaactccacaagcccattttgctcaataatactgttaaagaggaagctccacttattaacacccccaggtttgtttttcttttccgcttttcttataatattaaaatcaccaccaacgagtaaaggatcacgacttctcgagcaaaaggacgaaagctcacataataatctgcctttattctccttttgagcagcaccatacacattgacaaagttccagatgagattttgttctctatgcagaatcaaggtgcgaatcatgaattcaccaatttcgttttctctcacatcaaacacatcagtattaaaacccactaataaaccgccagatctgccattaggcggggcagaaaaccaagcaaaaggtttactaccagccagcgaagctaaccaagaataactgaaatgactcctttgggtttcttgcagaccaataaagtcaattttctcatctctgatgagttcttttagaaactgaactttagaactattccctaaaccctgacaattccaaatgaggcctatcatcagaaagggtctgggggggggagacaaagaatctctgcttccctctttttattaggtgtacacctaaatttaggggaagcttttttttgctgtttctttcgatgtttaatttttctcccttttcttaggactataacatccaaaagatcataatcgatttcatcctcagaatcagcatggatactactatccacttcatttaaatcatcaacaatgggtttctcatttttcttatttccacatgattgaatagccagaatctttctggacatttctaaatcttttatcaggtcaagattagccacagcagaggatttagaaggacccaaacaaactccaagcttattggaaatattaaacaaatcttcattactagcattaagtaaagagaaggaattattgttcatacctttgttgaggaaggcgtccttagcttcagctctagaaatagccttgtccgccaccttaatgtcttcattcttctccagtcttgagctctttcttatgccttcagaggtagacgtcaggatctcacttgactttttgcccaccggatccttcttttcatctttggccgagggaatcgaaatcactttgcccactttagcttggaagtcagtttgcatttcttccatatcctttgcaaattcctctaattcttgagaactcaacaggtcatcttcgttggggtcaaaatcaactttctcatcactaagatcttccaatctcagcccttcacctgatttatctttagaactatccatgaaaacttcagattttttaaaggattctttgccttgagaggaggtctctcccatcctaaaattaggtattgggtcttcatctccgatttcatcatcatttctgggctttttcccagatttgtcaaacatcagatcatttatcccatggatatccacagaagctctcttacccagattgattgtctcatcattccatccttcatcactaatggattcaattctaaagtagatgtcatataaaaaaggtttcacagccacttcaacaactggcgggatcatagttacactcttaatgtggactttaaatcccacaatatcctcggaatccaaagacataagatcaacttcttcaacaacaccaatcatggaaccaatttcacagattgattggtaattttgtaattcttcagggacattctcagcaactatccatgcagtatgcaacctagatttaggtttggcacgagagctccacgggacaactgcaattttagcaccagacatcttcatcttaagttcaggaaagctcatcatctcatcaaggcgttcttgagaggggaattgcattaaaaaaccagagtggcactttgtagctttccatgttttaccccaaggaaaatggaaaccaaagtctttcgccagatcttcagcagatactaaaccctcaatcactttaaccaatccaatgaaaaccctctttggttttttggatataggtttagtgaagtgagatagatagaaccctagaccatcagctgccatacctactatgggcatattaggtttgctctgctttggtagcacacatcttgctgtaacatgagtatccttgcggcatatatcgcaccataaagcattgaagcaatttctagcatgatgaccttcaaccccacatttttggcaaaaagcgggacgagcaagttcaatttctttcttcaaagaagtaggggacaagatgggattacctgattgagtaccatctcccgaagaagaagacatcaatccatcttgggggtcagcttttccagtctgcggtttcaatctccagctaagattgcggttccgattccaagattgggagccttgggcagaatctttctgtccccagcgatcccaagggggattggggatgttcttgttcttcggatccattccgccaagattcttgctattgcggacaacacccgaccccaaccgaggccactcttcttcaggcacggggggacacaaggatgttacgcaccaaccgccatgaaaaccagatcgagaggagacagggagcgaccaaagacgcgagaggaaagcggcgcagtgggggaaagagtgcgaacccacaaagtcgggaggaaaccctaacctgtatttggagaccgcagcgtcaggggtcgcggcagggagaagaacccgcagcgaatgggctagggttggagcgagcggcaaaatcccctggctccatccagaccaagtatccggagaagcgaaatgaacaggcgcgcgattaccttggcccgcacagcctactgtagacgacagcccaccgagtccagcccgcgtaccaacaggaagcgaaccatgcacgataggagcgggggcacgcggggaagaaggagctccggcccaaggagctttttgccttttctttttcgccatcgtccggccgccaaatttagcttggatctggatcgaggagcgctcggccttgcgtcgcccctgcagccctgtgtgtcgtcatgacaccgttatccttgtatatgattgatttaatgtgtattgtctaccatgattctgggagagaaatatgtcagtttctgttagtacatttttcagccatgaattcatgaactgcaactcatctcacagtttgaattattgttgtaatccagggttcagccacttcaacacttctgggacatacaca

SEQ ID NO: 364 - DNA, 918 bp, Zea mays
  Intron number 10 from transcript GRMZM2G006130_T03 (locus GRMZM2G006130) derived from phytozome v7.0 (chr-ID 3; pos 230009129 to 230010046 reverse strand)
aagttgatactgtagctattgccccttttgtaaaggtatctttttagctccctagttatacctcgagtagactaagcagccttgaaaatttattgatataatgatataaggaccttcatttttttaatgtgttgtactttctcagccatgggtgcaaattaccattgtaaataaatacttagatattataatatcatttgtctttttttttagctacaaaccatatccaagattagaacttattcgttaatacaaatcctgtgtatctgagaaaaaaaaagattaaaactttattgctcagataacagtgagaaccatcacatttttttatcgaacacgcagaagagctgtgtatatttatattaagaagaaagaaataaggaccaaagtaggtcagtatagaagcaccacctcacagtggccacaaacgaagatacagaaaaacattcgttaggaagaactcaactcaacaaccaccacactaaaaaacctaaggaggccagatgacacgcaggcctgaagcacctgccttacaccacacatctgcctcctcgatgtcctgaagaaggcactgcacactcggggacaccccacaccccataaaaaaagcaacacatattatcagttttgaataatgctgaagttttattctcttttagttgtcttcatgaatgctgaaaaagatataacagtagtgggtgaccctttacttttcattcaggtagttcacatgccgagatgacgcttaacttgagttatacgctcacctttaccaagattgtccatgaactaattaattctgtttatatgaatagtaacagactcaataagataccattatctcctattgacttaggtaattcttatacttataattcttctacctttaattttattgaactgtttgttttctacagg

SEQ ID NO: 365 - DNA, 3136 bp, Zea mays
  Intron number 6 from transcript GRMZM2G334225_T02 (locus G RMZM2G334225) derived from phytozome v7.0 (chr-ID 6; pos 1 12215542 to 112218677)
gaagtcttaaaggagcaacttaggttatacacaaactcccaacaatgcatgcatcggcagctttcctcaaacagaaatatacaatatcttgcaatccctaataaagcatatgtgactatatgaataagacatttcaaatattttatcaattcattagtttcttttaagcagctaacatggtaacaactaagatgtgatgtattgaaaaatataccatctatcattactccttactccttagtacatatatgtgtagtatttaagaataattaagcatatgtatcaaacatacccatgctgaaaaagcaacaacgttttattaacaaaagtgaaaaagaaaactgtaatatacaaatacaatcttatgaaaatactttctcatcaattaataatgtaggaaatttagtttcaaaacaagataaacaaacttgtatttatttataatatattcttttggtactttatctgattttaacttgtaagaaaaaattagaaccaaacacacaaaatttagacattcgtaaaatataaataaaacacaatattatttaaattggagggttaatgattcaaatagtataaaattactttaaaccttaatgttgatactataaaatttgtgctacaactaggattttggaaaaaaaattctctattggtctttatactgtaataattatggatcctacattttgtaaaagttatctaaaattattaggttattttagacagtgaatagccacttacaaacttaatttaatagtagataacatgatgtttttactatcactaatattacaaaaaaattgtattctttataattctttatatttcaacaattataaaggaattcatgagtgttttaatcaattagattattttaggtatataatggtgtaacaacttttgtgaattggattatcatgtaccacctattactttatccatttgaattattgtaagactaccttagccttacacccaatctaatggtctatttctttgctggcaaaaaaaacttttttaaaataataacttttatataagcatataatactattataaggagagatattcacatgaaaataatgtggatattgagttcctaaacaagtaaagtcgatctttaatcactcaaatgcatttttttcaacaatggttatatttgttgtagtttcctgcatttattactattgctgctacattaattgttaggtgggaaggcttaacaactaatgtcgttatatgtggcatcctatcattcactatactcggagcatctactacatcctttctaaatttcaatctctaaattatcatttggagagtcatttgcataaaaactactttctatattttttcaatctccaacaacttttctatatcttatttgcagtctaaagaatcattgaaattttctatctttgactagtgagaaatctggaaatagaagatggctataatctgttgagagtattttttttacaaaattatgtatttatatcaaatatgaagaatatagagaacctcgtggagttgctcatcctagttagattggtgacaagtgacaactagtcaaaatatcacatacaaaatactctttcaatcccaaaacttgttgttttaggattcaaattgtattctgaaaaaaataatgtttcagcattataactaggttgtgtccttataaactagagattgtagtctgcatgcatctataaatttctttgatcaatttattccttaattagtatggatcgcctttaataaataaggttgtgtgggtgattttgatagatcaccaataagtctaaaaatcctaaacatcaagttttttattctctattggtctttataatgtaataattatggatcctacattttgtaaaagttatctaaaattattagcttattttagacaatgaatagccactaacaaacttaatttaatagtagataacatgatgtttttactatcactaatattacaaaaatgtattctttatatttcaacaattataaaggaatttatgagttttttaatcaattagactattttaggtatataatggtgtaacaacttttgtgaattggattaacatgtaccacctattactttatccatttgaattattgtaagactaccttacacccaatctaatggtctatttttttgctagcagaaaatctttcttaaaataataacttttatataaccatataataatactattataaggagagatattcacatgaaaataatgtggatattgagttcctaaacaagtcgatccttattcactcaaatgcatttttttcaacaatggttatatgtgttgtagtttactgcatttgttactattactgctacattaattgttaggtgggaaggcttaacgactaatgtcgttatatgtggctatcctatcattcactgctcggagcatctactacatccttttctaaatttcaatctctaaattatcatttagagagttatttgcataaaaacactttcttcatcttttcaatctccaacaacttttctatatcttatttgcagtctaaagaatcattcaagttttctatctttgactagcgagaaatccggaatagaagatggctatacttggatagccatttaaataatctgttggggtatttttttacaaaatcctgtatttatatcaaataggaagaatatagagaacctcatggagttgctcatcctagttagattggtgatgagtgacaactagtcaaaatatcacatacaaaatactcttttaatcccaaaacttgttgttttaggatttaaattgtattctgaaaaataatgttgctgcattataactaggttgcgtccttataaactagagattgtagtctgcatgcatctataaatttctttgatcaatttattccttaattagtatggatcgcctttaataaataaggttgtgtgggtgattttgatagatcaccaataagtctaaaatcctaaaacatcaagtttatttagaggataattttcttactataaataattgattatctattttgtgccattataaatatctagcgctagaacataaccttggttcttaggatgttcgaaccagatctgacaacattg

SEQ ID NO: 366 - DNA, 950 bp, Zea mays
  Intron number 3 from transcript GRMZM5G863645_T01 (locus G RMZM5G863645) derived from phytozome v7.0 (chr-ID 1; pos 2 69286124 to 269287073 reverse strand)
gactggactggtgagcatcttttcccctccttttttggttgttatattatcacgaactacttatgcatttactgtttgatttgattttcgtccatgttgatgactgtgtggttgtgaacttaattaactagtaccacaaattattcaccagccatggcaagggaaatgaacgaagatgccaatttctcactaggacgaaatgtacacttaatttttctggtcttaaatcctgaaagtgaaacgcaggactgtctattttttacacttgactttggtggccctgacctttagtagttgagatgaataatgttatctggttcgtagctgggagcttagctgtgattcttcttcgcttactttgtggttaccttgtatcgtgtattatctgaatgtgatctgggagcttaggtgcacaccagttcaattgcttcccattccatattggtgattatccacaagttgttggcttggacatttaattctgaggggtacagattgttgggtacacatcatttataacaaagattgacgtatgaactaatattttccttgtggcccgtttggttcctaggaaccgttccctgaaatgatttatacccggattgtttgcctaatttatataagctttgggtggattcctggacaaacgaacaatgccttattcagtttagcttctccttgttgaattagtaaaactacatgctagcttgaagttgcttatagtttatttactacatataaccataaaaatattaactgctccaaacgttaagctgtaagagcatagaatgagattctatactatagtaaggaaccaaatggtaataatgcagcgaacaatttagctaattaatatttggattttgtcagaactgcaggcaccactgagaatcactgataaatttatcagtctgatgttaacctgtagattgtgctgtgtaatataggtc

SEQ ID NO: 367 - DNA, 23337 bp, Zea mays
  Intron number 2 from transcript AC199335.3_FGT002 (locus A C199335.3_FG002) derived from phytozome v7.0 (chr-ID 10; p os 58274476 to 58297812 reverse strand)
agcagcagtgcaagattgaagtgtttgattggaaggtaaattagtagtaggttaatggtcttttccgcgtggtaggctttgcacttctcatatgatagataaccaccaccacaggtccttttacatgcctttataaacaaacattttccactattaacaaatcgatctaaccaatcagatcgtatcatgtcacctatttctgtgtagccctactaatttattaaaaatatgatatcttctaggtcaaatattttgttttaatctgttcaagttgcttaggttcatattaattttgtgtacatagtaataacaatgttttacttatactacatgttttaattaaataattgttcattaatgttaattagctaggcaatctagttaacctaatttatagttgtaatgtacgtattttataaaaaaattgttaaagtgattaatatcaacttaaatatttcaatttaatacatgcttagtttaaatgcaacatctattagatttattgtgcctaaaaatattgttttactcataacttcttcgttttaactctaattttaatggttctcgaacctacaatctcgtagcgacgtgtagaatattcttatgaattttgttcttatgctttggtataatgttaacatatacattatttgcttgattgtatgtattgctacgagcagagacaaggtgacgaggaatctgaaacccaacttttggggcgacatctggtctacaaggtttatcgcaagtacaaagcaagttatgtccttgatcactttctttaacctaataatgttcttttaatcatcgttgctctattaggttaagttgatggtacttaatagatttccctagttttgttcaccctacaccttgcaaacaaatgaattattgggtagtcttgctattgctctacatggttttgggattaatgatacatataattcatgaccatgttccattatgatttattatttttggttatctattattgtttatgataagattattgtgttaattggaacatggagcgaccacccaggaaaatagcgctaccacaagggtggtatgggacgcccttgactgactaattaggaaagctagtagatgactacctaacccgaaaggggcaaccacggtgtgaggaactgccgatatagggaggttctcgggtcgatcatgttgtgatggctttttccgacgagtgtcctatatcacccccttctcacataaactgtagcagcttttctgaaactagtggaactttgtaaaggccttgtagtgggaccttgcctcgttcctcggtagagatgaatgggaagtcacgatcccttggcaaatgggtaacacgacttgtgggtaaagatgtgccagctctgcagaatgtaaaactagtatatctacaattctctcggtctagagcagctcaaaccctcacatgagtaaattatggaattaaatttaatctatcattcattgcattgcattgtgggatttattattgatagtgatcaattatataattgggttggtatacacttatacttagtaattgctaataaaattttgaccaacactaaaagcaatgctcagccttaatcgttctctttggtaagccttacacttcacatgagccccactgtaagtgagctcatgcacattagtcctagcaacttgttgagcgatgaacgtatgtgagcgcactcttgctaaactcacaccatgtcaaggacaggtactgccaagatgagaaacatgaaggatgtcgcgatgagttcgtgagaggtctaggctatcgtctcctagtcaactatggttgcaggatcgttgtcgtcatatgatgtatttatttagttattttgtatagaacccctattatataataaagatgtgacattgatttctataccatgggtcatcatatgtgtgagacttgatcctagcacacatttgagacacatctggatttgcccttaaattcgggtgtgacacacattggagccacatggcaaagttgtggtttttgaaacattttgtgaacaaaaattggctatcatgccacaagtttgtggtagatgttctatcgaggtttagtgtgaaactacaccaactaactctgaatgccatcgtgaccctcaagaaatatgtgtgggctacggtgacatatggaggtgagccatttgtcatggtcttcgtaaaagcgctattgtctacattggtaaaagaagaccatttccttatagatcatttagtttgggaactgcacccttactccgaagactaggaagaccttggaggctgttattgatatagtgtcatacagaaaaaaccggtggggcagcaactagactaaggtttggttttacttgaatgtagcgagggcgaatacatcagttgttggcccgaaggctagggagatgttccctcatcgatatgtctcatttccccattatgaggtgtcatatgttgatcattattcaactttgaaatagtagagacatgatcattgcaagcatcaattttaaaatccttacatctattgctaatagagacatgctccaaagatgaactagcaacactcaacttttctattctagtatttaaatcaacatttgagctcttaagactagaaatagaatcatggcatgaagataacttaaaagcgagcatttcattcttcttaatttctagagcaagggatttttctatattaacaatttatcatattcttcatagagaatatcctcttgcttttctagcaatctatcttttccattaaaaacatcaaccaattcattaattttatctatttttatctatctaagcccttaaaaagatcactataatctaaatcatcatcagaatcctcatcactagaagaagtgtacttgggagtgtcatgtacgtgtaccttcttctctttagccatgtggcatgtgtgtcacttgttggggaagagggaggacttgttgaaggcggaggcgacgagcctttatcgtcgaagtcaaatgaagagcagtctgaatcccactctttgccgacgtgcgcctcacccttcttcttcttatagaacttcttgtccttcttcccttttttgtcttggtcctagtcattctcattatcaggacattgagaaaataaatgaccagacttaccacacttgaagcatgtacgatttccccttgatttgctcttgttggggtagtccttgcgtcccttcactgtggtcttgaagcacatgatcacaagcgtcatttcctcctcattgagatcgaccacctcaatttgtgccaccctgtcgaggagcgcctccttgttggtcgtcgccttgagagcaacgggttgcggctcgtagtgtggaagaggttcgttggcaatgtcgtcgacatacctagcttcctttgccatcttgcgccctctcgcaaattttccaagaatttcctcaggtgacatcttagtgtacctagggttctgaaagttccctttgacccgggaacaggatctggatgtcgcctagaggggggggtgaataggcgaataaaacttattactttaaaacttaaattcttactctactcgaagacttagtacgcagtggagtgagaagactcttcaagtaggttgcagcggaatagaagatccctttctcaaaatgtcctgcacttcaaataaagcttataccacagataagtattgaagtgcagatataaagacgagtagaaagagagtcaggatacaatacagaacagagcacacagacgcaaggatttatctcgaggttcggccaagcctgaaatgcttgcctagtcctcgttggagttagccacacctgggcttggagtctatttcaactccttcctccgtttgctcagatctgtcagtatgacagatagagcctttcactattgagtggggttacaacagaaccgcggctgcttacaaacttcttggcagcactccggcagagtaacgatacgctcaagaccttgctctagctctaagcagcacttctcctctctctaaaggcttatagttgtgccttctacacaaattagagagatacgcacaagagggagagtgagaattgatccgagtgatgtctacacttgttggctgcacttcactcttgctggaggcgcctaggggtcccttttataggcataaggggcctaggagccgttggaagcaatccaggaaggcaaatcttgccttctgtcgggtggcgcaccggacagtccggtgcacaccggacactgtccggtgcccgatttctttccttctatggcgaagccgaccgttggtagtcttggagccgttggcgcaccggacatgtccggtgcacaccggacagtccggtgcctccatctagccgttggttcagccacgtgtcccgcgcagatcgcgcggtcgaccgttggcccggccgaccgttggctcaccggacagtctggtgcacaccggacagtccggtgaattatagccgtacgtcgctggtgaattcccgagagcggccagttcgccagagttcagcctggcgcaccggacactgtccggtgcaccaccggacactgtccggtgagccaccggacagtccggtgcacccagactgagcagagtcttggctgtacacagccaagccttttgcacctatttccttttcttcttctttctgtttctaacacttagacaagtatattagtacactaaaaccaatgtactaagtctagaaacataccttctcttaattattacatctatagcatttcacatgcttgagtttcgatgttggactcataaatcatcaagtctgcttgacttgatcaagattgacatttcttggctccaacatcctgcaaagatcacatagaacatctccaaacataggaacaacccaaactaaagatcaaggtgaacttagctcttttgggctgcttccagttctggttttgacatttgttctccttctagtgaccttgatctccttcttagagcttggtcttgagccttatgacttacaccacataactgtagctgttacctcattggttgtaagtcacgtccttatgtagtgatccttgatgtgccgtagctgttctcaactcgatcacccttgactttgcaagccttcttcttcgcccttggctttgggttcctcagcctccttgaccttctcccgtgcacttggtacctcgaagcttttcttcctccgtccttggcttgatcagttgtctccgagctatgcacccgagtatcacttttgcaatgtccaacttacttgtgatgtccattatgtatccataatccagttcttggaccatcacatttgttcacttgtgttgaaccctgtaggctttaccttaagcacctgttcaacacttagtacacttgttagtcctttaattgagttgtcatccaaacaccaaaactcacaagagagctttcaatctccccctttttggtgattgatggcaacacaattaaagcttacatacgaataagatttgaagcacaaatttgaattctaagattatagaatgctccccctaaatatgtgcttacttcaaaaacataattttggcctcagacgccaatttgcacatacttaggcaattcgaaacatttctacactttagcactttttaggatgcattgtgtcaagaatcaaaccatgatgctataacacacaaatgcacataatcatgttaaacaccattcaaattagtggatatatcacaggaatatcaacctaccactattcacctttaagataccaatttaaactaagataccaatttaaagcaatcttaaagcaccattaaccacatgactatctattacactatagaagccaattaataattcatcgcatcgcagcggaaacactagttcatatgatgcaacacatataatattgtaagaagcatatgaatatcacactggcaaagctcaaactaacacatcaccccttaggataagctttcctctcaggttgagataagctttaatacacaaattctccccctttgacatcaaacaccaataaccatactcaagcaagaacatatgatgatgtcaagggacagcagggtgttaaggaggaaaaacgactatcaaaacttccccttacttattgaacatatgccctatcaacatttagataagatacatatatgcaaaaagattaatacttccttttgtacctttaccatgatgtagtgtacttcccatcttgaaagtagttaatctttcgagagcttcttcacacttgtgcctgaatctttctcctaactttttcttgttgctaagacaccaaacttagaacaagttatagtattgggcacaagaagaaacttctattctcatgattatcaaaagatgtcaattgaagcgaactattacggctaccaattgaaagataccaattgcacagttcatttattatcatggctccatgatatttaagaataagcatctattatcaccagatattatagagcatgagcaatctaaagatatgcacttactcacaacttgagataccaatttcttgacttacagaggtacccaagtcctgattgctccatttcttgcttatcttctcttttccacctagagactatacaagattgctcaagaaacagttagtcaaaagacacaagttatgtgtgctccccctcaagttgtgcatcaagtatttgaatgacttgtacttgcacattctagcttccttagaactagaggggatcacaacataccttggtcaaggcatactctcccacttttatcacccaaagatgccaatttgaatatcaaatgaaacaccacttaacaccaattgaaagctaaatgaaaggttgactaaatacaacaatgcacgcctcagcggcacctaagtcaattgaatactcacaggaagtctaacatttacgcaacttggacatgcttcatacttaactatcattgcatataccaattgaagatcaacacaatcatgtatataaagcgaaatatctaagcatgtcataattaagaaggtttcttaggtgcacaaaagaaacaacattttaaaggcataaattacctaagccaagatattaccaattgaaatgcaagaacacagctatgatcactatcaatggaatttcaagatattcaataaaactgcacagttccattttccatacctttgcctttatgagagcacttgttatcaccaattcagggctccttttgcttatgcacctcatagcttaaaagggcacgacatggatttgaaattcacacagtaccaaaccagagtaatcatgtgaacatggactaaacaaaatgtcataattgcacatagcatgacttaaaaaaagttacaggtttatccatatacaccaagagagtaaatcgttgtggatataacaaatgaaagagctaccaatgaatgattcaaaagatatatcctatagagcaccagccatgattaagcaaccatcattatgatccataaagcataactactctaaggacaggtagcacaacaagccaacttaagagcaatactaaattgcaattatgtacttaaaatacatgggtaccgtccttttgagagcaggttgtagattctcatcaaggtcctttacttgattcaccaataatgattcaggacctatacaccttatttcacttgagatgaacatgggattagtgtttcacaataattcaacctcgggtcaataaacaccaaaacaattaacagcttaagcatatagttttagataaccgtcttaatctctctcatggtctccagtccatctcaaggcacctgcatggtctagttagcacagtttggtacccatctcgggatgggtccataatgatcatctaaatgtgcctttggtacccaaattgcctttgtgctagttctaggtgatctcgttatagatctagcacaagtgtatgatttgggtctcctacgcgaataagattgacacaaattcacttgcttaggaatcttacctttataacataccttgaatagatgaccctgctcaccacacttgtagcagaagcgtcgttcaacttgacacgacgcttgctttgtgtcattttccttggtgagtgtcaccttggaggatgcacatccttgattcttcatgaccggacatgaagtgatcgtgtggtccttattgttgcatccaaaacaactccttgtcactttatttttgtctttgtacggacaagacgtgatgaggtggtccaacttcttgcacttgaaacacctccttcttccttttccctttgtgtacttgaatgacatggagagagggtcagtgcaaacaacatgattaattgaatctttacctttttccaagcttatgttgatttctttatctttaggaacatttttcttattgagcttgacacttgctgcagtttttcctttctcaagcttcttcaccacgcccccgtggatatcttgagagagttgagcaaagtgtcttctcctcagttgtcgttgcttcttattcccacagaatttcttttgtgaccctaaaacttgttgctcaatcaatgattggctttcttttgagcaacaggggttagcacatgatgatatacaattcaaatgcgcacacgtgcgaggatgaggttcacatgaatttaagtttgcaattataacctcatgagcaacattaagcatgatatggtcatcaactagtttattatgagaatatgacaacatatcatactttttacctagagcacgtttttctaagtccattgtttctacttgactcttaaacatagaattttccgttttaagttgagcaacatcagataatacatcatgattatttctttgctcaaataaaatagattcataccgatggaccaaattatcatgagagcactttagctcctcatgttctttggtcatcttctccaggctgtcgttggttttgatgagagtctcctctagcctgagaagcgtctcgccttgttccttgttcctcctcaacaacttaaccaagagcactttgtcttctttgttgagatgggtgtagaaccggcgaatctcctcttcttccacatcaccggtcttattttccctgtcattattattagtggaagcagtacaggaaaatgtaccttgtggtgatgaagactcatcctcgctatcatcctcatattcctcctcatcatcgctttcgtctccaccatcattgttagcaataagacatttataactagtggaagacaaacctgtcgacgaggtggattcatcgttgggtgcccattgttcttgatcttctccctttgaaaggttagtatcacaagcaatatagggagtagaagcagtacaatttgccacacaatattttactttaattctattccataaatcatgagcatcaacaattaaatcattaccactactcatgatggcgaaataagcacctctagaaagagaatcaactaagatgctgcaagcacgatgattgagagaaaaacatcttagttcatcattagagggatttttactaatatcagatggaaaaatacttctcctaaagatctgtctcaaatcaggatcaacactcatgaaagcattataaatagagacataccaagatttgtaattagagccatcgcctgaaagaagttctacagttacctcttgtgacgacatcgttatctccggacggctaagcccacactggagaggcctagctttgataccaattgaaagttccctttgacccgggaacaggatctggatgtcgcctagagggggggtgaataggcgaataaaacttattactttaaaacttaaattcttactctactcgaagacttagtacgcagtggagtgagaagactcttcaagtaggttgcagcggaatagaagatccctttctcaaaatgtcctgcacttcaaataaagcttataccacagataagtattgaagtgcagatataaagacgagtagaaagagagtcaggatacaatacagaacagagcacacagacgcaaggatttatcccgaggttcggccaagcctgaaatgcttgcctagtcctcattggagttagccacacctgggcttggagtctatttcaactccttcctccgtttgctcagatctgtcagtatgacagatagagcctttcactattgagtggggttacaacagaaccgcggctgcttacaaacttcttggcagcactccggcagagtaacgatacgctcaagaccttgctctagctctaagcagcacttctcctctctctaaaggcttatagttgtgccttctacacaaattagagagatacgcacaagagggagagtgagaattgatccgagtgatgtctacacttgttggctgtacttcactcttgctggaggcgcctaggggtcccttttataggcataaggggcctaggagccgttggaagcaatccaggaaggcaaatcttgccttctgtcgggtggcgcaccggacagtccggtgcacaccggacactgtccggtgcccgatttctttccttctatggcgaagccgaccgttggtagtcttggagccgttggcgcaccggacatgtccggtgcacaccggacagtccggtgcctccatctagccgttggttcagccacgtgtcccgcgcagatcacgcggtcgaccgttggctcggccgaccgttggctcaccggacagtccggtgcacaccggacagtccggtgaattatagccgtacgtcgctggtgaattcccgagagcggccagttcgccagagttcagcctggcgcaccagacactgtccggtgcaccaccggacactgtccggtgagccaccggacagtccggtgcacccagactgagcagagtcttggctgtatacagccaagccttttgcacctatttccttttcttcttctttctgtttctaacacttagacaagtatattagtacactaaaaccaatgtactaagtctagaaacataccttctcttaattattacatctatagcatttcacatgcttgagtttcgatgttggactcataaatcatcaagtctgcttgacttgatcaagattgacatttcttggctccaacatcctgcaaagatcacatagaacatctccaaacataggaacaacccaaactaaagatcaaggtgaacttagctcttttgggctgcttccagttctggttttgacatttgttctccttctagtgaccttgatctccttcttagagcttggtcttgagccttatgacttacaccacataactgtagctgttacctcattggttgtaagtcacgtccttatgtagtgatccttgatgtgccgtagctgttctcaactcgatcacccttgactttgcaagccttcttcttcgcccttggctttgggttcctcagcctccttgaccttctcccgtgcacttggtacctcgaagcttttcttcctccgtccttggcttgatcagttgtctccgagctacgcacccgagtatcacttttgcaatgtccaacttacttgtgatgtccattatgtatccataatccagttcttggaccatcacatttgttcacttgtgttgaaccctgtaggctttaccttaagcacctgttcaacacttagtacacttgttagtcctttaattgagttgtcatccaaacaccaaaactcacaagagagctttcaggttctcaagaaataggttcacaagattaagatcaatgacgataaattaacttagcattagtcgcacgacgtcatggtccgtccatcttgtgctcccatagcttcaaatcttgttcactagggtcgcttgttgtatgtgtcagttggctcttcaccctcttcatggcgaacctccctagttcaccctcgaccaactccatcttggtgatcatggtgatgttgtttccctcatgagagatcttgagggtgtcccaaatttccttggcgttgtccaagccactaactttgttgtattcctccatagagaatctagaatcacagtagtggcttgggtatttttatgaatcatttcttgcatgtgaatagcattgtaattcttatcatcactatcaacaacatgcattccattttctactacgtcccaaatgataggatgaagagaaaataaatgattgcacgtcttatgactccaccaagaatagtcctgaaagtcgcctagaggggggtgaataggcggaaactgaaatttataaacttaaaccacaactacaagccggggttagcgttagaaataaaaccgagtccgaaagacagggcaaacaaatcaaccaaagaaatagagcggatgacacggtgatttattttaccgaggttcggttccaatgaacctagtccccgttgaggtggtcacaaagaccgggtctctttcaaccctttccctctctcaaacggtcaactagaccgagtgagctttctctttaatcaaacgggtcacttagaccccacaaggaccaccacacaattggtgtctcttgctttgattacaagtgcttgaagaacaagagtgaggaagaagaaagcgatccaagaacaagagctcaaaggacacaagcaaaaacactctctctagtcactatttgtttggagtggatttgggacttggagaggctttgattctattgaattatgtcttgtattgattgcactagctcttgtattgaatgagatgtctgaaaaaacttggatgcttgaagtggtggtggttggggagtatttatagccctaaccaccaaaccaaccgttggggaggctatctgtcgatggtcgcaccggacagtccggtgcgccagccacatcacccaaccgttagggttctgacggtttcggccgttggagctctaacttcttggtgcaccggacagtccggtgtcccaccggacaggcacttttcactgtctggtgcgccttctggcgctgctctgactctgcgcgaactgtccgcgcactattcacgtttgcaggcgaccgttggagttgaccgttgcgctcgatagccgttgctccactggcacaccggatagtccggtgttacactggacagtccggtgaattatagcggagtggtgcctgagaaacccgaaggtgaagagttcagtctgtacggcctctggtgcaccggacactgtccggtggcacaccggacagtccgatgcgccagaccagggttctcttcggtttcttttgctcctttgttttgaaccctaactttgatctttttattggtttgtgttgaacctttggcacctgtagaatatataatctagagcaaactagtttgtccaattatttgtgttgggcatttcaaccaccaaaatcatttaggaaaaggtttgaccctatttccttttcaatctccccctttttggtgattgatgccaacacaaaccaaagcaaatatataagtgcagaattttaaactagtttgcataaggcaagtgcaaaggttgcttggaattaaaccaatttaactttcactagatatgcatggattgctttctttcttttatcattttggaccatattcgcaccacatgttttatttttgcaaattcttttggaaaatcttttcaaagcctttttgcaaatagtcaaaggtacttgaataagtttttgagaaacattttcaagttttgaaatttttctccccctgtttcaaatgcttttcatttgaataaaacataactcgtcctggatgaaattctcctcttagctttcaagaggatttcgagttttagatacctattgaaaaatctttgacaccatatatcaatttgaaatatagataccaattgaaatataatttctagaggaataccaattgaaaactttatgtcgaaaatttttgaatttggtggtggtgcggtccttttgctttgggctaatactctctccccctttggcattaatcgccaaaaacaaagactttgtgagcccttaattttctccccattggtatgagtaataagagtgaagattataccatagtggagaatggtgcggagtgacggcgaagggcaaataataccgatagagtggagtggaagccttgtcttcgccgaagactccatttccctttcaatctacgacttagcataggaataaacttgaaaacacattagtgatagacataaaagagatataatcaaaggtatataaatgagctatgtgtgcaaattgtcaatcaaagtttctagaatcaagaatgtttagctcattcctaagtttggtaaaggttttctcatctagtggtttggtaaagatatccgctaattgttctttggtgctaacgtaagcaatctcgatacccccctttgttggtgatccctcaaaaagtgataccgaatggctatgtgcttagtgcggctgtgttcaacaggattatccgccatgcggattgcactctcattatcacataggagagggactttgctcaatttgtagccatagtccctaagggtttgcctcatctagagcaattgtgcgcaacaatggcccgcggcaatatactcggcttcggcggtagaaagagctactgaattttatttctttgaagcccaagacaccagggatcttcctagaaactgaaaagtccctgatgtgctcttcctatcaattttacaccctgcccaatcaacatctaagtatcctattaaatccaaagtagatcccttggggtaccaaagaccaaacttaggtgtataaactaaatatctcatgattcttttcacggccctaaggtgaacttccttaggatcggcttgaaatcttacacacatgcatacgaaaagcataatatccggtcgagatgcgcataaatagagtagcgatcctatcattgaccggtataccttttgatctacgaatttacctccggtgtcaaggtcgagatgcccattgattcccatgggtgtcttgatgggcttggcatccttcattccaaacttggtaagtatgtcttgtatgtactttgtttggctgatgaaggtgccctcttggagttgcttgacttgaaattctagaaaatacttcaactcccccatcatagacatctcgaatttttgaatcataatcctactaaactcttcacatgtagatttgttagcagacccaaatatgatatcatcaacataaatttggcatacaaacaaatcatttgcaatggttttagtaaagagtgtaggatcggcttttccgactttgaagccattagtgataagaaaatctcttaggcattcataccatgctcttggggcttgcttgagcccataaagcgccttagagagtttatacacatggttagggtactcactatcttcaaagccgggaggttgctcaacatagacttcttccttgattggtccattgaggaaggcacttttcacgtccatttggtaaagcttaaagccatggtaggtagcataggcaagtaatatgcgaattgactcaagcctagctacggatgcataggtttcaccgaaatccaaaccttcgacttgtgaatagcccttggccacaagtcaggctttgttccttgtcaccacaccatgctcatcttgcttgttgcggaatacccacttggtacctacaacatttggattaggacgtggaactaaatgccatacctcattccttatgaagttgttgagttcctcttgcattgccaacacccaatccgaatctcttaatgcatcttccaccctgtatggctcaatagaagacacaaaagagtaatgttcacaaaaatgagcgactcaagatcaagttgttacccccttatgaatatcgccgaggatgaagttcacggggtgatatctttgaatcgcttgatggactcttgggtgtggcggtctttgacctagtacttcttgatcatcctccttgtcttgatcattatcatctcccccttgatcattgtcctcatcttgaggtggctcatcctcttgatcttcattttcattatcttgagctcgatcctcattttgggttggtggagatgcttgcatggaagatgacggttgatcttgtgcttgtggaggctcttcggattccttaggacacacatccccaatggacatgttccttagcgcgatgcacagagcctcttcatcatctagctcatcaagattaacttgctctacttgagagccattagtctcatcaaacataatgtcacaagaaatctcaactaatccattggatttgttgaagactctatatgcccttgtgtttgagtcataaccaagtaaaaagccttctacagccttgggagcaaatttaggttttctacctcttttgacaagaataaagcatttgctaccaaagactctaaaatatgaaacattgggctctttaccggtgaggagtttgtatgatgtcttcttgaggattcggtgaaggtagagtcggttgatggagtagcaggcgatgttaatcgcctcagcccaaaaccggtccggagtcttgtactcatcaagcatggttcttgccatgtccaatagagttctattcttcctctccactacaccattttgctgaggtgtgtagggagaagagaacttatgcttgatgccctcctcctcaagaaagccttcaatttgagagttcttgaactccgtctcgttgtcgcttcttatcttcttgattctcaatccgaactcattttgagctcatctcaagaatccctttagagtctcttaggtttgtgatttttcctgcaaaaagaacacccaagtgaagcgagaatagtcatccataattacaagacaatacttactcctgccgatgcttatgtaagcgatcgggccgaataaatccatgtggagtagctcaagcggcctgtcagtcgtcatggtgttcttatgtggatgatgggcaccaacttgctttcctgcttgacatgcgctacagaccctgtctttctcaaaatgaatattggttagtcccaaaatgtgttctccctttagaagcttgtgaaggttcttcatcccaacatgggctaattggtgatgccagagccaacccatattagtcttagcaattaagcaagtatcgagttcagctctattaaaatcaactaagtatagctgaccctctaatactcccttaaatgctattgaatcatcacttcttctaaagacagtaacacctatatccgtaaaaagacagttctaacccattttgcgtaattgagaaactgaaagcaagttgtaatctaaagaatctacaagaaaaacattggaaatagaatggtcagatgatatagcaattttaccaagtcctttcaccaaacattgatttccatccccaaatgtgatagctctttggggatcttcgtttttctcgtaggaagagaacatccttttctccccagtcatgtggtttgtgcacccgctatcaattatccaacttgagcccctggatgcataaacctacaaaacaagttaaggtcttgttcttaggtacccaaacggtcttgggtcctttcacattagaaacaagcaccttgggtacccaaacataagtcttggagcccttgtgtttgcccccaacatatttggcaactattttgcctgatttgttagttaaaacataggatgtatcaaaagttttaaatgaaacattaggttcatttgatgcaataggagatttctttttaggcattttaacaagggtagaatgcctagaactagatgtatcattcttatacataaaagcatgatgggaaccagaatgatacttactagaatgaattctcctaattttatgctcgggataaccagcaggatataaaatatagccctcgttatcctgagctatgggagccttacccttaacaaagttagacaatttcttgggggcattaagcttgacattgcctccctgttggaagccaatgtcatccttaatgccagggtgtctaccattatagagcatgcttctagcaaatttgaattttcattttctatctcacgctcattgattttagcagtaagttgagctatgtgatcattttgttgtttaattaaagctaggtgatcatggatagcatcaacattaacatctctacatctagtgcaaatagaaatacgttcaacaatagaagtagagggtttgcaagatcttaattcctctatcttagcatataaagtagcatctcatttctaagacaggaaatagaatcattgcaaacattcaaatccttagccttagcaattagtttattattctcaatcttaaggctagaaattgattcattcaatttgtcaatcctagcaattaaactagcattatcatttttaagattggcaattgaatcatcacagacatttctcttttcaaccttagcaatcaaattagcattttcaattctaaggttggagttagtgttatggcagatgctaagctcactagtcaatttttcacatttctctatttcctgagcataagcatttttaagtttaacatgctttttgttttccttaataaggaattcctcttggctatccaagagttcatccttctcatgaatggcacctatcaattcattcaatttttctttttgttgcatgtttaagttggcaaaaagagcaagcaaatcatcttcatcatcactacagctaccctcatcactagatgtcgtatatttagtggaggctctagattttaccttcttgccatgaggcacttgtggctgacgttggggaagaggaggcccttgttaacggtgatgttggcggcgtccttgtcagaggaggagtcggtagagctctcatcggagtcccattcccggcatacatgggcatcaccgcccttcttcttgtagtatcttttctttttcttcctctttcccttcttgtcgtcgcccctgtcactatcactagataatggacatttagcgataaaatgaccgggcttaccacatttgtagcacactttcttggagcggggtttgtaatccttcccccctcctttgcttgaggatttggcgaaaactcttgatgatgagcgtcatttcctcgttgtcgagcttagaggcgtcgatggggagcctacttgatgtagactcttccttcttttcttccgtcgctttgaatgcgacgagttgcacctcgggtgtggaggtgccgccttgctcgacgatttgtttggagcctttgatcatcaattcaaagctcacaaactttcctatcacttcctcgggagacattagcttatatctaggatcaccacatattaattgaacttaagtaggattacgaaatacgagtgatctaagaataaccttggccatttcatggtcatcccatttggtgctcccgaggttgcgcacttggttgaccaaggtcttgagccggttgtacatggcttgtggtacttggttgaggatgaatcgaccgagctccccctcgatcgtctcccgcttggtgatcttggtcacctcatctccttcgtgcgtgatctttagcatgtcccaaatctctttggcactcttcaacccttgcaccttattatactcgtctcgacatagagaggcgaggagtatagtagtggcttgggagttgaagtgccggatttgggcgacctcgtccgagtcatacccttcatcctccacggatggtacctgcgctccaaactcaacaataacccaaatgctagcgtggagtgaggttagatgatgcctcattttatcactccacatacaataatcttcaccgtcaaaaaccggtggtttgcctaatgggatggaaagtaaaggagtgcgtttagaaatgcggggatagcgtagggggatcttactaaacttcttgcgctcatggcgcttagaagtgacgaacggagcgtcggagccggaggtggatggcgatgaagaatcggtctcgtagtagaccacttttttcattttctttttcttgtcgccactccggtgcgacttgacgcggggaggtgagtcctctcttcctttggcgctggactcctttgatggagccttctcgcggcttgtgtccgtttccatctccctcttggtggatcctcccgacatcacttcgagtggttagactctaatgaagtaccgggctttgataccaattgaaagtcgcctagaggggggtgaataggcggaaactgaaatttataaacttaaagcacaactacaagtcggggttagcgttagaaataaaaccgagtccgaaagagagggaaaacaaatcaaccaaagaaatagagcagatgacacggtgatttgttttaccgaggttcggttccaatgaacctagtccccgttgaggtggtcacaaagaccgggtctctttcaaccctttccctctctcaaacggtcacctagaccgagtgagctttctccttaatcaaacgggtcacttagaccccacaaggaccaccacacaattggtgtctcttggtttgattacaagtgcttgaagaacaagagtgaggaagaagaaagcgatccaagaacaagagctcaaaggacacaagcaaaaacactctctatagtcactatttgtttggagtggatttgggacttggagaggctttgattctattgaattgtgtcttgtattgattgcactagctcttgtattgaatgagatgtctgaaaaacttggatgcttgaagtggtggtgggtgggactataaatacccccaaccaccaaaccaactgttggggaggctatctgtcgatgggcgcaccggacagtatgatgcgccaccggacactgtccggtgcgccagccacgtcacccaactgttagggttctgacggtttcgaccgttggagctttgacttcttggtgcaccggacagttcggtgtcgcaccggacaggcactgttcactgtctggtgcgccttctagcgctgctctgactctgcacgaactatccgcgcactgttcacgtttgcaggcgaccgttggagttgaccgttgcgctcgatagtcgttgctccactagcataccggacagtccggtgttacaccggacagtccggtgaattatagcggagtggcgcctgagaaacccgaaggtgaagagttcagtctgtacggcccctggtgcaccggacactgtccggtgcgccagaccagggttctcttcggtgtcttttgctcctttggtttgaaccctaactttgatctttttattggtttttgttgaacctttggaacctgtagaatatataatctagagaaaactagttagtccaattatttatattgggcatttcaaccaccaaaatcatttaggaaaaggtttgaccctatttccctttcaagtcctccccatcaaagtgggaaggtttgctaagagggatagacaatgaatgaacattgtaattgtaaggaatacgcgagtaattaaaagacgtcttagtgtagttttgttttattgtcttttgctttgaagaggagtcgtcatcatcctttggtgaagataaaaatatgtcgctatcgtaatagacgatcttcttgatacacttcttcttcttcttcccagatcccgagtcaacgggcttttctccctttggctcattgttgagagtctccttctcgtcggtcaccttgcccttccctttagcgtcgtcgaccatctcttcgggtttttagacccaacaaaagagattggctctggtaccaattgagagcacctaaaggggggtgaataggtgatcatgcaaatcttgctccaaacaacacaaacttgatctaacaaaagtattagtgaagattaaaaccaagtttggatgagaagagaagagaaagatgggctcttcacttgattgttcccttatgatcagtattaaactaggagcaatatcacaactgaatatgagcactaataaatacaacaattgcaataaataaaatagacaagagacaaaacaatttttatcatggttcagctaatgtctactccacgttgtggtgacctcctttggtcaagggttgcactcaacccctctcaattgatctaaagaacaaactttagtgccacatttgtcttccttatatcttggtcctgtttgtgaggaatctccacaacttagagtgcctcacgccttacataaatgatcacaatcaaaaccagagtaagggagtgagtaagaacatgcacacaagagcacaatcgtagtaacaacacacacaagcaaagaagagagcacaagaaaaaaacgatagagtgacagctcagaaacgtgctcaaatgtctctcaaacacttcgaaggtgtggcaacagagtcttaaagttgtagtgtgctcttagaatgcttggtgtactgatagaggcgcataggggcctcttttatagcccaaaggggcataggagtcgttgctccttccatagaaatattgccaataacctgctctgcgctggtgcactgcatcaggtctatgcgccgtagtccaggatatgattggtggccttccataccggggcggcaccggaccgagtctatgcgccatcggatcgcctgctgatgtcatccgaccattggatttttgtgccattggagaagaggtctggtggaacaccgaaccatgaataatagatatcgatgaatttttagagaaaaatccgagactgtcgagttcgtttgggttgtatggacccgatccggtgcaccaccggactggaccggtgctccaaatcagactgggtttaggcccttttagcctatctttctccaaactttttggcttttttgaggggttccctagcacttatataaacattgttagcacataaaacatttgacttaagtgtaggaaccatacctttttcacttcttttcaaaaggatttgcaatatgcccacaactaagtccaaatcctacttttcttgaacaaaaggagttagtagccaaacaaaggtgcaagaaacatagtatagtgtaagtgctacttattcaagtacttaaacctcctatttttgtagttttaaccaaagttgcactttttggtcttccaatccaactcatttgaacttctcatcttcaatttgctttctctaaacttgtgctcatgctcacataaagagtgttagtttagagtggtatattgaacatttaatcaccaaaacaactagaaaatggatcaagggcacatttccctttcacgaaggagctagcctcggagaagaaagagttggaagacctcaagagctagggggcaatcaaaggcttctctgcttatggttgttgaggtagtgcacgaacaattttgttcgatgtaccaggctctgggttcggaggctgagctgctagaccacac

SEQ ID NO: 368 - DNA, 1980 bp, Zea mays
  Intron number 2 from transcript GRMZM2G046824_T05 (locus G RMZM2G046824) derived from phytozome v7.0 (chr-ID 8; pos 9 9594174 to 99596153 reverse strand)
tgttgtttcttgtggtcggccaagattccagtgcggtaagtttagttcacacacttgttttccttgctacattacatgttgtgtgcattaatctatttagaattctgtgtatttgtccggtcagttcattactctaatagcccattttgctaactaaagattacattctagttagtggatatgattgtccttgaaaaataataggaggaaggtatatgagaaagaagaacagttggctccgtttaacttgctcccattgtggtgcttaaaattcgtggaccaagtagccaataggtcatatttctgggtgttaccttgctaccagaagtgcttttggtgattttgatttgtcaagtgcaacctgttgtgcgataaggcacatttttagcaactaaagttgattcccagatttagcaaataaaagacatacaagaaccacgataaggttgcagtaaacaagatgaacatttaatcagcacattaggatagatttatgctactcacaatgtcataagcaagcatcatggcaattgacacaataagcaggtaaatataactagaaaaaatgctacagaattatcctctaatgattctcagtacgggttgctaaaccaatggccatccaaggcttaaaaggcttttagaatccttgaccaagtatggtatcatccattttatcctagaatttagctcaactagttcacagttgatcaattacacacatcatgaagtatacagatcactttgcaatgagaaagtgctcaacagtgataaatgatcattgaacagatttattcactagtaaatcagcctatgctgccatacatgaatgtcactgaacccattcatcatcgagaatcacattcaaacctgcagttacaattcagcctttgatcaataataactgcttgttcgaggaataacgtgctaaacaggaaattagcattagatattgcacatataatgacatgtaggtgagtgcaacacacttacatagtccttgcagtgaagcaggacagagaggcaaagcacatttgcgcgtgtcccagaaaattattcaccccttctataccaaggtagtgcaggtgttatctttggagacatggtgctgctgtgccaactgcagggtacgctaaaactggcgcccaagtagcaggagatcgctgctactcagagcgccccaaactgcagtctaaaagtgataaacaactgcagtctctatttgaaggctcaaatttggctaggttctgtttatataatagggaacattgctgcctcattcactctggcaaattttgttggagttattcataatgcccttattctgttttcttcttttccctgagaccaacatgaaagaaaggaaattagtgcaagcttaattcactcagctgagaccaacgcctggattggcagatccatattttgtaaatttcttgagtcaatgtctgggagtgggagcaacctgtatgcatcgtcatcattaacttcaagtatcatgcttccacgcattgctgatactgatactgagtgcacaattgtttgatcacaaggagagagctgaacaggctgccaacctgagttattatataaagattcttttagggttatttactctgataaaaagttagtaagattctctgtttaaatctttatgtgattattaaactgacccaagcgaatccatgttaaatatttctacataacccacattttagttttgatatacatcctagtgaatccaaacattacatttagattttagtagttgacaatgaatttctttggtcatgtgatgctctgcttgaggacacctaatctcacatttttctcgtctttgtttactgtccatcaaaatcctgttggttggtggtgataatcgcaaacatttttttagaaagaaacaaaattcttagactctatgactcctgtaagaccaacaataattacattatgtttgacttatgcagtttgatccca

SEQ ID NO: 369 - DNA, 11779 bp, Zea mays
  Intron number 3 from transcript GRMZM5G844096_T02 (locus G RMZM5G844096) derived from phytozome v7.0 (chr-ID 4; pos 1 8445231 to 18457009)
aggagaagcccctgagcagcagtcgtttggtggaggcaagtgtcctttgacctatctctgtcctattcattctttaattcacctcccgctttacacatttatacctaaggattgactagcttttgttatccatgtccttgtttacctatttgggtcggattattactacttagtctgatgctattgctcaactctaatcaatgaacatgatgtgattatctatgatacgttgttttcccgttcttctttatgattatacttgtggttttcaaggggactcgagcggtttctcgagtgcctctccgtaaggacctgttctatggatgaccgcccgggaaaacagtgcaaccatgagggtggaatggggtgcccttagctgaataattagaggatccggggtgtagttcacttagccgtcgtgccgtcaatggggctcggtgtatgcggctcgctctgccaagtttgggttcgccccttggggaggagtgcggtgcatttaggaaacctaacgggtggctacagccccggggaatctttgtaaaggcttcgtagtgaatccctggccattcacctcgggagtgaataagggtcttgcaagcccgggccagagagggaatcacggcttgtgggtaaagtgcacaacctctgcagagtgttatgaaactgatatatcagccgtgctcgcggttatgagcggccaagggagctccagagattagtgatacttgatcagagatattgtggtacaggtggcaatgagattgatggttctggttatgattatggtattggtaagtggtattctttccgtttggaaaggatacatcgggttaataacttgggttaatgctaaaacttggctttctactagtaagtaataacctgaccaactaaaagcaactgcttgacttatccccacataaagctagtccactacagccaaacaggatacttgctgagtatgttgatgtgtactcacccttgctctacacaccaaaccccccccccaggttgtcagcattgcaaccactgctcaggagaagatgaagctgtggaaggagacttccaggagttccaagattacgacgagttctaggtgtgggttagcggcaacccccagtcggctgcctgtgaaggccgcgttatctacgtttcttttccgcactttgatttattgtaagaactatatggacgtctcagacgtatgatgtaatcgactatttcccttattaatactattttgagcactgtgtgatgatgtccatattatgtaactgctgtgtacgtgaataactgatcctggcacgtacatggttcgcattcggtttgccttctaaaaaccgggtgtgacataagtggtatcaaagccgtgctgactgtaggaccgctaacctagagtagaatggtcgttctaaggattatagacctctgtctcttccttgactttgatatcccttcaaaagttggtcctactgaccaaacctatgttctactatatattataccttgctgaaaatcatgttttattctaatccttcacctacttatgattcattacttgctggtcatattaattctgttctcacccttttgcttgcgatgtcttttgtagatggctcgacttagacacactgcacgaaagtcagtcatccccttcttaccctcccgccttgctgagcgtccgcttcgccgtcccgtggccggacagtccagccacttggagagactgcaccaccgcctgcgtgaggagcaggaacgtcgacgacaggagcagcagagctcttccctctcgctccaccaggagatagagtctgtgaggagctgctcccctgtgcttcctctggagccgccccctgcaccaccactgggcgccccagcttctggagtagctgctggaggagacccagacgacggagatggcgacgacagctcgagccacgacaccgacttctctgctaaccctgagccggaaggatgggttgctcgacccatcactcgcgacgctgctcgcgggtgtcacttccacgatgcgctcgacaccctgctacgtcgggcatttgaccggcatacttggtccgtcgagtatcgctgtgtggtctaccagcatagtcgcggggtctacccggaccgctgggaggcgacttgcttggtgcgctgcccggaggacagtctccagggtgcagaggcctgttcagagcactattctatctctgagcgggactcagctgaggcagccatgcaagatgctgcacggcgtgcgctttcgcactactgctcggttttcggtggggcagctgacggtcttgacctgaagtattacccccgccgttcatctggcagcacaggaggcgtgattgtctcacccgtcggtgagggcaatcctaggttgagcagcacagtcaacctagccgccgtgctaaacacggagctggaccatgcattagacgagctgagtagggctcgtgctgagatcgccctgctgcgggctgagcgcgcggaacgtcgttttctggacggtggttcccccgctcccgttgggactcagcacccgtaccgctcacctcagcgtggacaccagtcttatggcaatcccgcctgcaagaccaagataaacctagaaccatagatcgttagagttggatcttgtaattaatacgaaataaatatatacatagaagcttcagtcttagcgttagtctcggtcttagttagttttagttagacagggtagtttgctatatcctgtgcatttatgtttgtcatgatgaactatgtttggtttggatctttgtaatgattgtcaccagagtgtgggtatcccctgcattttggtttacatactatgtcaataaagttagttatatagttgggaaacccattattctcctttcctctttatctgagaagctgtgtggtctgtgttggagatcagtgaagatgctcatctgttcagtgctgttggagaattctatactcttttcttatgctgcaagctttgccagatcagttctgatgtgtggttgcgttctgcagatgtcagagaacaggcgtagaggaggaaggcgtgctcagcaggagcgagccgctccgcaggatgaggtgccccagcagcagcacctgccgcccccgcccccgatgtcgatcgagcagatgtttctgatgcagactcaggcagttcaagctatcggtcagactttggccgccattcagcagcagcagcagcagcagcagcaagcaccaccccagcctcagatgcctcagatgcctagagataagcgtgctgaattcatgagaggtcatccaccaacgttcgctcattcttctgaccccatggatgctgaagattggctgcgcactgtggagcgggagttgcataccgctcagtgcgatgaccgggagaaagtcttgtatggtccccgtctgttgagaggagcagcccagtcatggtgggagtcttacctcgccacccatgccaaccccgacaccatcacctgggaagaattcagaggtagctttcgtcagtaccatgtccctgcaggtctgatgacagtgaagaaggaggagttcctggccctcaagcaagggtcatcgtctgtcagtgagtatcgagacaggtttctgcaattgtctcgctatgctcctgaagatgtcaacaccgacgccaagcgacaataccgttttctgagaggcttggttgaccctctgcagtatcagctgatgaatcacaccttcccgacattccagcacctgattgacagagcgatcatgacggagagaaagcgcaaggagatggaagatcgtaagcgcaagatcagtggaccccagcctggaagcagcagccgtccccgtttctcaggcaatcaacctcagcagttcaggcagaaccagcgtccacctcagcagcatcagcagcgtcagcagtatcagcagttccaaaggcagtaccctcagaatcagtaccagaaccgtcagagcaatcagtcaggaggtcagtttcagaagcagaatcagcaagcacctcgtcttcctgccccagcaaatcagcagaacagtcaggcagcaccagctcaggttggaaacagggcgtgtttccactgtggagagcaaggccattgggtgatgcaatgtccgaagaaggcagcccagcagcagtcaggccccaatgccccagcgaagcagaatgtgcctcagcctggagcaggcaatcgccctcagccgcgttataatcatggaaggctgaaccacttggaagctgaagcagttcaggagacccccgacatgatagtaggtatgttcccagtcgattcccatattgcagaagtgttatttgatactggagcaacacattctttcattactgcatcatgggtagaagcacataatcttccaactactaccatgtcaacccccattcaaattgactcagccggtggtagaattcgagctgatagcatttgtttaaatgtaagtgtggaaataagggggatagcgtttcccgccaaccttatagtaatgggtactcagggaatagatgtcatcctagggatgaattggttagataagtatcaggcagttatcagttgtgataaaaggacaatcaagttagtgtccccactaggagaggaagtggtgaccgagttagtcccgcctgagccgaagaaaggaagttgttatcagatggctgtcgatagcagtgaagcagatccaattgagagtatcaaggttgtgtctgaattcccagatgtgtttccaaaggatttaccgggtatgccaccagagcggaaagttgaatttgctatagagcttcttcctggaaccgcccctatcttcaagagagcttacagaatatctggaccagagttggatgaacttaagaagcaaattgatgagctgtcagagaaaggttacatccggccaagcacctcgccttgggccgcccctgtcttgtttgtggagaagaaagatggtaccaagaggatgtgtattgattatcgagctttgaatgaagtcacgatcaagaacaagtatcctttgcccagaatagaagatctgttcgaccagttgagaggagccagtgtgttctccaagattgatctgaggtcaggttatcatcagctcaggatccgaccttcggacattccgaagacggcattcattaccaagtatggtttatacgagttcacagtgatgtcttttggtttgaccaatgcgccagcgttctttatgaacttgatgaacagtgtattcatggattatcttgataagtttgtggtggtattcattgatgatattctggtctattctcaaagtgaagaagagcatgcagaccatttgaggatggtattgcagagattgcgagagcaccagttgtatgcaaagttgagcaagtgtgagttctggatcagtgaagtcctgttcttgggtcacataatcaacaaagaaggattggctgtggatccgaagaaagtggcagacattctgaactggaaagcaccaacggatgctcgaggaatcaagagcttcattggaatggccggatattatcggcgattcattgaagggttttcgaagattgcgaagccaatgacagcgttgctaggcaacaaggttgaattcaagtggacccagaaatgccaagaggcctttgaagcgctgaaagagaagttgacaacagcgcctgtcctagtcttgcctgatgtgcacaagcccttctcggtgtattgtgatgcttgttacacaggtttgggatgtgtgttgatgcaagagggaagagttgtggcttactcgtcccgacagctgaaggttcatgagaagaactacccaatccatgatctagagttggcagcagtggttcacgcactgaagacatggaggcactatctgtatggacagaaatgcgatgtttacacagaccacaagagtctgaagtacatattcactcagtcagagttgaacatgaggcaacgaagatggttagagttgatcaaagactatgagttggagattcattaccatccaggcaaagcaaacgtagtggcagatgctctgagcagaaagagtcaagtcaatctaatggttgctcgtccgatgccttatgagttggccaaggagtttgacaggttgagtctcggatttctgaacaattctcgaggagtcacagttgaattggaacctaccttggagcgtgaaatcaaagacgcgcagaagaatgatgagaagatcagtgagattcggcgattgattctagaaggcaaaggcaaagattttcgagaagatgctgaaggcgtgatatggttcaaagaccgcttgtgtgttcccaatgtccagtccattcgggagttgattctcaaggaagctcatgagacagcctattcgattcaccctggcagtgagaagatgtatcaggatctgaagaagaaattctggtggtacggaatgaaaagggaaatcgcagagcatgtggctatgtgcgatagttgtcgaagaattaaggcagaacaccagagaccagctggattgttgcaaccgttgcagatccctcagtggaaatgggatgaaattggtatggatttcatagtcggattgcctcgcactcgagccggctacgattccatttgggtagtagtggaccgcttgaccaagtcagcccacttcatacctgtcaagaccaactacaacagtgcagtattggcagaattgtatatgtctcggatcgtttgtcttcatggtgtgccaaagaagatagtgtcagacagaggaacgcagttcacctctcatttctggcagcagttgcatgaagccttgggcacgcatctgaatttcagttcagcttatcacccgcagacagatggtcagactgaaagaaccaatcaaattcttgaagatatgttgagagcctgtgcgttgcaagatcagtccggatgggacaagcgattgccttatgcagagttttcctataacaacagttatcaggccagtttgaagatgtcaccatttcaggcgctgtatggaaggagttgcagaactccgttgcaatgggatcagcctggagagaagcaagtgtttgggccagacattttgcttgaagccgaagagaacatcaagatggtccgagagaatctgaagatagcgcaatcaaggcagcgaagctatgcagacacaagaagaagagagctgagtttcgaagtcggagactttgtctatctgaaagtgtcaccgatcagaggagtcagaagattcggagtcaaaggcaagctggcaccccgctacattggtccgtaccagattcttgcaagacgaggagaagtggcttatcagctcagtttgccagagaatttgtctgctgtgcataatgtctttcatgtgtctcaattgaagaagtgtttgcgtgtgccagaagagcagttgccagtggaaggtcttgaggtccaggaggacttgacctacgttgagaagccagctcagatccttgaggttgcagatagagtcacccgaaggaagaccgtcagaatgtgcaaagtcagatggagtcaccactctgaggaagaagcaacctgggagcgtgaagatgatctgatggccaagtacccggagctctttgctagccagccctgaatctcgagggcgagattcttttaagggggataggtttgtaacgccccgaatttttgcagttgaattttttcttttctttactcgccaaaattcgggcgttaccttttccttttctttttcccctcgctaaaccttgaccttttccaaagtttagcgggattcggtttggaattcccgtacgtataaaaaccctaaatgctttatgttgctcgatgcaccatgccgaaccttgcatttcttttgattgctttgaaagtgcaaatgcattcatgtagaaagatcggattttgaaaatgtggagaagatcttttctttctttttcttcctccctctctttttctctcctcttttcctctctctcccgcgccgtgggccgaccccggccggcccagccgccccctggcgccccccccttgggcccaataggcccaaccgccccccccccacctcccctttttcccccaattctttctccctccctctcattttctctcattttctctccctctccctaagccgccgcccctacccctgccctaagccgccgccgccccctgcccaaccgccgccctcggccgcccctgccgccggccgcccctcgccgtcgcgcccctccccggtgagctcccccctccccctctcctccctcccccatcccctctcccctttccccatggccggttcggccgcctccctgcccgcccggtccggccgcccgccgcccagcccagccgccgtggccggctcggccgccccgcccccccccctgccccgccggttcggccgccccacggccggctcggccgccccctgcgccgccccctgccccgccggttcggccgcccctgcgctccgccggttcggccgccccgccctcgccagctcggccgccccctgcgcgccccgcctagggccggttcaaccgccctagggccggttcaaccgccccccccccccttctgtttttttttattttttttatttttttttattttattttatttactttctgtgatcataattactgtattttaagtaggctaatcactgttcatgctatggaaaataggaagtttaatttaaaattccgttatgttattgattcacgtagttaattgtttaccctgtgcaatgttgatcaactaaaagtgattaggtttccattagtatatataaatatgtataacagaattattttgttaaaaaccaattgtgtcattagtgcataagatttaacccccccctgcgagacctttcccgtttcttcctagccataacaaatgcgttatcgaatgtcatacttgatgcatattcgccttattgttatcttgtaggtgtactgatctttcgtaataaatatgggaagggatgtatgtatgtttgcgctcgcatagagaacgatccggtcgaagagcccgaggaattcgcaggagaaagcccctgagcagcagtcgtttggtggaggcaagtgtcctttgacctatctctgtcctattcattctttaattcacctcccgctttacacatttatacctaaggattgactagcttttgttatccatgtccttgtttacctatttgggtcggattattactacttagtctgatgctattgctcaactctaatcaatgaacatgatgtgattatctatgatacgctgttttcccgttcttctttatgattatacttgtggttttcaaggggactcgagcggtttctcgagtgcctctccgtaaggacctgttctatggatgaccgcccgggaaaacagtgcaaccatgagggtggaatggggtgcccttagctgaataattagaggatccggggtgtagttcacttagccgtcgtgccgtcaatggggctcggtgtatgcggctcgctctgccaagtttgggttcgccccttggggaggagtgcggtgcatttaggaaacctaacgggtggctacagccccggggaatctttgtaaaggcttcgtagtgaatccctggccattcacctcgggagtgaataagggtcttgcaagcccgggccagagagggaatcacggcttgtgggtaaagtgcacaacctctgcagagtgttatgaaactgatatatcagccgtgctcgcggttatgagcggccaagggagctccagagattagtgatacttgatcagagatattgtggtacaggtggcaatgagattgatggttctggttatgattatggtattggtaagtggtattctttccgtttggaaaggatacatcgggttaataacttgggttaatgctaaaacttggctttctactagtaagtaataacctgaccaactaaaagcaactgcttgacttatccccacataaagctagtccactacagccaaacaggatacttgctgagtatgttgatgtgtactcacccttgctctacacaccaaaccccccccccccaggttgtcagcattgcaaccactgctcaggagaagatgaagctgtggaaggagacttccaggagttccaagattacgacgagttctaggtgtgggttagcggcaacccccagtcggctgcctgtgaaggccgcgttatctacgtttcttttccgcactttgatttattgtaagaactatatggacgtctcagacgtatgatgtaatcgactatttcccttattaatactattttgagcactgtgtgatgatgtccatattatgtaactgctgtgtacgtgaataactgatcctggcacgtacatggttcgcattcggtttgccttctaaaaaccgggtgtgacagtttcgtcgtacaatttttctttatatgctactattagagtttatggtcgcttcggccctggtcttggccaatttctgggtccgccactgggccaggccttattggccgtgcctattggtcaagcctaggtcttgagcccatatggttttttatagattggtttctatcttgataggcaaagatatccaacggtggtgatactaatataaactaacccgagttgatccttgcctatatatcaatgtttacaagtcgggcgaccaggcgactaatcgcgattagggcgacgattagtcgacctaatcggtcctggttgacctctggtcgtccgttagtcgtcctatggatttaaggacatatatatatatatatatatatatatatatattgcatcagcagcagcactgacgccgctggacggctggagcacttggaggctggaccgctggagcagagacgtcggcaaggacagaggagaggagagagacgtcggcaacgacagaggagaggagtagggttttctggcggttgggaaatgttctggcggctggaagggtcctagcggctgggagcctgggagggtttttgaaggggcggctactgtagatgggccaaaaacaagagggaagcccagtaccaaaagtccaaaactgcaacgaccaaaaacgaccagacagtgctcgaccagacgactaatcgttcaggtcgacgactagtcggacgactagaaaccctaatcgcgtcgtcttcctaatcgcccacttccaggtgaccagtccgactaatcacgattagtcggacgacttgtaaacactgctatatatgtacatttactccatggctctgtaatctgtctattttttactgtgcaattcgtttgctttcactggtaattgctcagctgcaacacctatagatctgcgcttgcagcatcatgctacttatactatgtctcttgaggattcttgctatcgtttgttatggataactgttgtcgagtccttccttggtcaacagtataggcggcgccataagtctaggatatgggcccatgaggttctctatgtagttgtcatctccactaatggagatcattctctcaaatccccaaagttagtaacatagagatagagcacataacagaatattacaactgtaaggacatttagtaggagttgacttaaggagctattctgccagttcaaaattgttcaggtgaagctatatctggagacaactgtctctatcacaaacaatatctcccattggccatataacctgcatttggaaaaataaactcctacaaaccattgctagaagtagcatattatgtcttcgtttttcttttgtaaaatccttatgctttggcagcggaactacg

SEQ ID NO: 370 - DNA, 7472 bp, Zea mays
  Intron number 2 from transcript GRMZM2G131001_T01 (locus G RMZM2G131001) derived from phytozome v7.0 (chr-ID 3; pos 8 565980 to 8573451 reverse strand)
cttctgtttcgataccatagccaagcgaatagtaggtgttgggggcttgttctcaaatgctataaatcaagaacaaggcaacacgaagatgttaagtattaaatacccttcgtccgctgaagcattatctcctcgaggatttaatgaacttcggacgaaggataaggttacgaaggaaaagaccttcgttaagttggtaaatgagtaaacagaataaacatatatatataaagtgcgaaaataataataccagcgttatcatcaatacatttccattattaaattcatgaaaacgagttacaaatgtaccttcagactgatgtaaggcaaaggtacaagtcgagatgcaaaaaagacgtgtattcagtcagcgtgaacagtacgagagtactgttcacctatttataggcacgggacgcagcccgtgtaaaattacattgatgccctttacatttatcaataactctatagtaattcttcgaggtccaatctggcttttcatctttaagtcggttcctcttttctgccgttatgccgaagcttttctgcatatggcttcatgatcgtcttatccttcgtcatgaccgcttttcattccagcttcgtcttgaacatgcccttatatattcgcaacctgactccgaaggtgcatgttccgaaggtgcctgttcacattttacacttggaaaacattgtcaaactgtgtttttgaggaccttcgggagccgaaggcccccaacagtagcccctcgcaatatcaatttattgtaaagataaatttatattgcgacatggacgaaggctttaagccgaagatccgaaaaaacaccttccttttgctagaatagcaacagtcactgacaagcggggccctccagttttcgacatattgggtgtataaatacaagctctccgcgagtttatttgacacgcccttttgccacctgcttttttactcaccagctttcaacctgcgcaccctgcccttagcctgcgcgtgacagcgtttgctcggtcttaaatttttaagcttcggcttcaagtctagtttgccagcattcgcgaaaatgtctgaagataagacagctgctggtgcttcgaagctaagcctttcggaggagatgcatctgggttttcttgagtcaatgtcgaagaccaatactgaaaagattgtcaaggaaactttggagggtttatctgaagatactggcgacagtgatagctatgatgtggatagtggcggagaggattccgaagatcgcccgtggcggcctagtcactcaattttcggaaaatcaactataaagcagagtcaccttgaaaacatgagggggagatacttccgagatatatccatcgtgagggcggatgacggagaaaaaactacgccgacccccgaagataatgaggttgtgatcttccgaagctttttaaaggctgggctacgattccccctaagcaagtttgtagtagaagttctgaaaatatatcaaatttaccttcatcaacttacccctgaagcagtgataagattgggaatcttcgtctgggccgtgaggagccagggtttggagccaagtgctaaaagcttttgcaatatacacgagctagtatatgagacgaaaccgtggggtaaggaacaatatcataataattttggttgttatagcttcggtgcccactctgggtcaagctgtcccgtgccaacctttcagaagagatggcccggggaatggatgaaggaatggttctatgtgaaaaacgatttgacggttcgggaagatatcaaggatatcatcatgcgccctatctggcagcgcttcggacttcggaaaccaacggtagaaatggacgaagcagctgaagaatgtcagagggccttcggcgtagtctgttcctttattgggaccagggatttaatgcaagagcacattgccttcagagtgtggccacttgtagatgactgggaaatgccgaaggagaccatcaaagaagctgacgagggtgaacttattagactgaaatatacattcaagtatggagataaatttgttgaaccggatgatgattggctaaaaagtattgagaatgtaagtgatgaattgcttgggacctagtcaaaggctgaaaacactgcattatcagcggctttcggaggccgaaagaagaagaggctcaaccgagtatttgatgctattgggtttatctatcccgactactattatccaatgcgaggtcaaaagagaaaaaatactactcctgcaaaggacactacttcggctgctcccggggagccagcaccggagaggaagaaagtaaaagtgtccacacaccctccacgttgtattgagccggctacagtgcccgagtttattggcgaggcctcttcggccaccgaagccagagaaccaagtgcagcgctaaagttcgaagaaatggccgaggcaccagcaataagaaaggagaaatctgaagaaagagaaacaccagatgttataagtccttcgacaaaagttgagacagctaaaagccagaaggggccagcagcaaccccgaaaagaaaaagaatggtaaatgtgctggatgtcctggaaacgattaaatcttcaagcacaactccaaggaaaattattgaggcgcctattgaagcctttgctgctgaaacttcaaagcagcaatctgaaactaaagctaggccttcggaatccaccaagatacagcctttggaggtcgaaaaaatgtcaaaggcaagtttaggaactgaaaaagcaacaataacagaaccgattctgattggggaaattggtactgccacccccgaagcatcctccaaaatacatgattatattgtgcgacatgcttcggggaagaaactgtctgaagaagagatttttgaagccaatcactatgcccgagaactgaaatattcgaagggggcgtagtattcaacgggacaaacgaagatgacttcttatattgcctcccagacaataaagaattatctgtgtgccgggaaatggctagaagcatgggattcccgaagcttgaagctggcctttgcgccatgacgaaggaggatcttgcggatagtcttgcatataacagtctaaaggtacgaagattgtaaactttaaattttgtggattttgaatgaatcctttacttgttgtgttaatccattcattctttttgaatagggcctaattctcagcaatgccttaagggcacaaaagaatgctgaagacgagagctgcaccattgctctcaacaaccttcgaacaaaggttattaggctacgaaacgaagccttggagaaagacagaattctgcttacattagtgcaaaaaatgaaggaggacgaagctaaatctaaaactcaagccgaagcacagaggcttgagattgaagatcttcgtaaacaactagcccgagccaaagaagaacgtattcttgaagaaacaaaacgagagttaagtgaacaatgggcagatcatttggaagttaatgttaaagagcttcgtgcttctcaaagaaaatgctatgttaaatccatagagtgcgttaagaagataaaatccaactttgccaacgttggcgcattctctagcgaggagaatttctcaaggggcaatttcgaaggtccgatggaatggattagtaacgaagctgaggccttcgaagaaatcctgaatagccgcggagacatatgtgctttttcgggtgctagaggaattgctactgttttggagaagaaaggttgtgagcatgtaaaatctttagcgcaatccgaagctactttgtcttccgaagacattaaagacccctcagccgaagcaagcatgatcggcggaaaatttttcactgatatctgggacaacggcggccgaaaaatggcacaagaaattattcaaaaaagcgaaaaaggcatccatgatgccagaaaagtagcggcggctgccgaaaaaagtaccgagcccgaagggcaaataggtattaattagtgatttttattatgttgtaatttttgattccaaactttgctcacggtttgtaatagtaatatagccgtatcttctcttcgctcagaacctattgaggcatctccgggcccccacccgaagggggacgatgaaattagaaaaatggccgaagccattatggacaaggttgttgaccagttactgaacgaagctgcagaaatagttctaagagaggattaaatgctactgtaaaaacatttggaacgtaacgtatgtaatatattgtgactttgaatgtaatatataatccatgtacagttttaattctttacgatgcatgaaatcttgcgtacataccgttttttgagccttcggcgaaaaaacaccttcccttcttttcatgcttcgtgaagaaaattttatatcgccagaagttgcatacgttcgtggtgaagattatccaagcttcgtgaaatattctccaaagctatagaaaagtttttgttgcctctctaatgaagctacacttcttctcggcttgtcttgtggtttagcacgattttctcttttccgaattattctccgaagatcaatactgtatccccttcttgttccatatgcaatatgctgtatgatgcttatgttatgcagaatgatgtgatgatgttatgttatgcaagatgacgtttgtgccacagatacatatccctctaatagagcatacacactttttatatcagcgttgacttttcgctgtaagcctcccttaggagcttcttcgccttttactttcagcggaatcagcgtttatttttcgctgtaagcctcccttaggagcttcttcgccttttactttcggcggaatcagcgctgacttttcgctgtaggctcagaaaacttacactgcgctcgcttaggaacgactttttactgtttcgaacaacttgctctgtgtctattaaaacaaaattttgataatacaaaggtccttcatgccaccataaattcgtacgcttcaacgattcaagcctatgaaaaagacacatttttattaaagtggaagacgaaagtgttacaaggaattaaaaaatgataaaggacacttgatcttcccataattgttccttattaacaaaaaagtaataccgaatgtaaaaatgcgaaaaaactgctgttgaggtaggatatttatcagtaaatgtgcttcgactctggcacagtgctattgactgtgcgagcttcggagccctctctgaaatccctcagattgtgatgactcccttctggctggagccctggctgcgtcggtggcggcggtggaggctgttgccaggatgcttggggttgacttgccgaagcaacagaagctgcagggtgattgcctacatattctggaatgtaaggcgaatgaaacgaagcagtatgcaggacctgcttcggctgattctgttgtgcagcagcttctgctagctccttttgcttctggatggtaatgtgacacatcctggtggtgtggcccttaccttcaccacagaataggcagtatatttttcttggttgatccccaaatcttcccccgaagctcctggcgcctctgccccttggcactggcggccggaaggagctttgctgctgccccgaagcttgggaggagcactgtggcctttgctgttgactcgctttgtcgtcattttgagtagaattgtgaattgacctgacgtgccttggataaaatattcctccgaagcccctagtcatttcagagaacctgagggcttcctcccttctttggcgaaaatcattgttagctcgaatgtactcgtccatcttctggagcagcttctccagagtttggggaggcttcctggcaaagtactgagctgcaggtcctggccgaagccccttgatcatggcctcaatgacaatttcattgggcactgttggtgccagcgtcctcagacgtaggaaccttcggacatatgcttgaagatattcttcatgatcctgggtgcactggaataaagcttgagcagtgactggcttcgtctgaaagccttggaagctggttatcagcatgtccttcaacttttgccatgaggtgattgtccctggcctaagggaagagtaccaagtttgtgcgacgcttctgacagccatgacgaaggactttgccatgaccgccgtgttgccaccgtacgaagatatagttgcttcgtagctcatcaagaattgtttcgggtctgaatgaccgtcgtacatggggagctgaggtggcttgtaagactgtggccaaggaacagcctgcagttctgttgacaagggagaagcatcatcaaaagcaaaacttccgtgatggaaatcttcataccagtcatcctcattgtagaaaccctcttgatgaagctctctgcgcgggggcctttggttctggtcatcttgagcaagatgtcgaagctcttcagaggcttcgtctatctgcctttgaagatcagctagacgagccatcttctccttcttgcgttggacctgttgattgagcatttccaaattttggatttcttgatccaattcgtcctccggaggcgctggactggtggcctttctcttctggcttcgggcctccctaagagaaacgacatcttgattggggtctagcggctgcagagcagcagcccctgttgctgaagcttttttggcggcatgacgaaggtgatgcttgtcgaagattttcaaaactcaaaaagtggaagtgagttcaccggaggtgggcgccaatgttgggggcttgttctcaaatgctataaatcaagaacaaggcaacacgaagatgttaagtattaaatacccttcgtccgctgaagcattatctcctcgaggatttaatgaacttcggacgaaggataaggttacgaaggaaaagaccttcgttaagttggtaaatgagtaaacagaataaacatatatatataaagtgcgaaaataataataccagcgttatcattaatacatttccattattaaattcatgaaaacgagttacaaatgtaccttcagactgatgtaaggcaaaggtacaagtcgagatgcaaaaaagacgtgtattcagtcagcgtgaacagtacgagagtactgttcacctatttataggcatgggacgcagcccgtgtaaaattacattgatgccctttacatttatcaataactctatagtaattcttcgaggtccaatctggcttttcatctttaagtcggttcctcttttctgccgttatgccgaagcttttctgcatttggcttcatgatcgtcttatccttcgtcatgaccgcttttcattccagcttcgtcttgaacatgccccttatatattcgcgacctgactccgaaggtgcatgttccgaaggtgcctgttcacattttacacttggaaaacattgtcaaactgtgtttttgaggaccttcgggagccgaaggcccccaacagtagggaaacc

SEQ ID NO: 371 - DNA, 13288 bp, Zea mays
  Intron number 1 from transcript GRMZM2G427444_T04 (locus G RMZM2G427444) derived from phytozome v7.0 (chr-ID 5; pos 2 09947952 to 209961239)
tttaaggattggtagtgggtggatttcttgtaaatttatttcaaacctaaattcgggttttatgctatagaaaatagaaatacttcatgatgatgaatcatcaggttaagatcgatctaaaccaatccattttatatatacatacgacatgccaacggttaaacaacttattagaaatgcaagacaaccaatacgaaatgctagaaaatcggccgcgcttaagggatgtcctcagcgtcgaggaacatgtgctagggtgtatgtgcgactcgttcagatcatgagttcaaacaaataataaaatttttgaagtatccatgatcggtaccaatgaataggatagagaagctctatcctagatttctatggtatatggaatttatggtttcctttggtgcaaatccaatcatctagattggaagaagcaattcccccattggtaacaaatggttatccattaagcggaggaaatagtaataaaaagaaaaaggcttatgctcctttatcttaaaagaacggactaaagggtcagctacttagccaactttcataattaaataccgtcactgtatgaataactcttattgtgaaaagagttatttactctataatggataggtagagccaaagaatgtgaactatacaagttcacaataccttttgatgaaagaaagggctccggtgtatagagagggcctcgccgtttaaaagggaaccataaaaacgatggaacccactatttttttagtatcgttagaatttgttatttctatgcgaaataactaaatagaataaaaaatcgtggttgggaaggttatagtagcaaaagccattggaattaatattttatatatcggaataatccgtttagttattaatgggaaaaaagagggttaaaagaagagaaatcattagttattcattaaggttaatttgattcaatgaccagagttccgcgaggatatatagctcggagacgacgaacaaaaatgcgttcatttgcctcaaactttaggggggctcatttaagacttaatcgagtgattactcaacaagtaagaagagcttttgtttcttctcatcgagatagaggcaggcaaaagagggattttcgtcgtttgtggatcactcggataaacgcagcaacacgggtatataacgtattcaatagttatagtaaattaatacacaatctgtccaagaaggaattgattcttaatcgtaaaatgcttgcacaagtagctgtatcaaatccaaataatctttacacgatttccaataaaataaggatcatcaattaaaggataaaaaagtaatatacaggaataattaaaaccgaattcccggagagggaactccgggaagatacaataaattaagattaagtggtaggaatcgacgagcatgttgcaataaataaaaaaactatttattttttcccatttttctttcttataacaaacacaagaatccaaattggattactttactttatatatgagtctgagtctttcgaataaaacatcaacaatcggaacttaagtttcgattgttgtttcttaaattctggttggagtttcttaagtttcgattggaattgaacttttgtgttaattgaggaatatgtctattttttctgtgtctaggaccagtaattattgaaattgcctgggcttgaaattgcttctcattctcatagttacgaaatggtaagaaagataaaatacgagcctgttttatagcaagagtaattaatcgttgttgtttcaaggttaatctatttattcgtctagataatatttttccttgttcactaataaatcgattaattaaactcatgtttctataatcaattcgatcccccgggcctattcgagaacgcctacgaaaaggttgtttggatttacgaaaaggttgcttagatttacgaaaaggttgtttgaatttacgaaaaggttgcttagatttatgaaaagtttgtttggatttacgaaagggttgcttagatttacgaaaaggttgtttagatatatacatgatttattccttattttaaaatttgaaaaaaaatggatttctttcttttattaatttttgatccagaaccagaagaagtagtctttctttggtccatatattatttgattaaatcaaaatatactatataaattgattaaatcaaaatatactatataaaaatataaaaaatccaaatatataaaaataaaaaccctctatacatatgaaataatatctacctaaaatcagatgagttgatttgtatttagtattctatctatgttctatatatttaataagaagttcttactctttctgttctttggaaaaatcgaacacacgatgctcctatttctttatttcattatgagtggtatgcttgcgacaataacgacaaaattttcttaattctaattgtccgggcgtattgtggcgattcttttgagtactatatctagaaatccccgtcgattccttattggtaccctttcgaacacaactaatacattccaaaataactcggattctaacatctttgcccttggccatgaacctcctttcctttttggatcgacttaacttaattcttatacctattcttttattcttctattttggatccaaagaaaagaagaagaataaaatccatagaagttcctaactaaaaatgtgatttctaaagattttgttgtaattcttcgaattctcgaacaaatccaatccaatagaatacaaaatttttgaaattcgtaaattaagtaataaaacatagagaaataattaaagaatacaatccttatccatcttttctttctttttgcttcatatactaaaaaagaattcaaaaaggggaaattttcgtcatgtcacgaagaattctatctctcgcataggaataactagaataaaaaaaaagggaatgacaaagcatctgggaataaacgattgatttctatcaataaacctgctaaagccccaaaccatagagtacttagcacgggtgctacagagagatatgtttttatatcccgcattgaaaatcctccttccgtattggaatacatatatgatcagatactcttgcccaagatcctttgtatttcttttgtttaggcgaaattcctaactaaaaaaacaaaataaatattatatatatatagaatgaaccgtatagacgagattttcctatccctaaaaaagatgaccccttcttcctatacattactaaggaatagtagtctttcttttataggtgaaatttgactggattttagtttataccccttccttgattatatgagaccaaaaacaagaaatgacaagaaagttctatatggataaagaaatagaagaaaattacgatgtggaaaacaagaaaggaattgtgtacaatggcattgtacaacaatttggaaaagggatgtagcgcagcttggtagcgcgtttgttttgggtacaaaatgtcacaggttcaaatcctgtcatccctacctattaattctctcttcgttatgggcagtagtggggagatcgattaaagtgggtataacttgaatttgtggatactatacggacgtgagacacgttaggaatagaaaaggattttcttttttttttgttttgaaagcgctcttagttcagtttggtagaacgcgggtctccaaaacccgatgtcgtaggttcaaatcctatagagcgtgattccatatatcttatgtcgaaactaaaataacttaaaaaaaaacaaagtagaattgcaactccaatttgacctcctccagaccagagaggaggtcaatcaaaaaagaaatattactcaatcaaagatccaactgatccccacgcctgtattgcaaatacgcagtcacgaataatcccgctaaagtaataggaattaggcctaagacgattccaaatagaaaaacttcaatcatttcgatttgttcgaggggataaaaaaagaggtacgatctatctctaaataatagtctaaactacccacgaatctcaatgaccaagaaaagaattggtaattagtgtggaaaagagtctagaataccaagaatccaaaagaaagattcttctattcaattcatttcaaataagacgtatcttgttcaagctaataaatagagctggggttatagttaaagcagccagtagaaaaccgaaataactagttatagtaagcatgaaggggttcaattccattttttttactacactacatatgttggtaaagcacttacctaagtttaagttatggaaaattcataattcatcggttattttagataatactaaaaaacaagatagagtgagatacagaagtgtaaaaaaaagagaaaatcgattcatcagacggaacatgagtccctaattccgaatcaagagatttgttgtggaatctgtcagttaagtaaactaataatattaagaactagatcatctaaccccattgaaaaatgaaattggattttcgggagaattttggaataaaagataaataaagaattgaatttgaaaaaaaaaattctttctatttcggattcggattatttcttttttaataggatggatttcatcctctttttggagcaaattttaactcattgtattccatatggaataagaggagaagaaaagcattccacgacccccgaggggccccctcaaaaagggaactattccttaaatttacttttttttatttatttttattcgttttttgaaccccaacaaaagtggattcaaagttacttcaattatccttttcttttaagttcttcttgtaaagttccatgcttgctgtttggtcaagaaaattagacctaatccaacaaacaagacaaggattgattacgaatcttgattcttcaaagaatgtattccgtttctttcataacggattatccgctattcgattttctatttattagatattattttatgctaaccaattaaattcctttaactaaaaaaggatcgattttgcatatacttatctttgtattgcgtcaatatgagaatatccttcctaaattctttatcttattaatcattaacttagattttcccaagatcttggccgctattccaaattaaattattctactattccgaagacaatgaaaataagtaggacccaaaaaattgtggggttctattgatgccttgaataacatgtaattttcctatagacaaggaacaaaaaagagaaaaaaggaattctgtttcgggaccaagcaaaactggattgctgtgccataggaaggatagctatactaattcggtatactcaaaatacacctttggtacaaaattgacaatctcacaaggatgaaatatcagtaattttctatttactggtggatcccatcttttacggaatcaattccttttttgaataaaaattttgggagctcagcatgtctggaagcacgggagaacgttcttttgctgatattattaccagtattcgatactgggttattcatagcattactataccttccctattcattgcgggttggttatttgtcagtacgggtttagcttatgacgtgtttggaagtcctcgaccaaacgagtatttcacggaaagccgacaaggaattccattaataaccgaccgttttgattctttagaacaactagatgaatttagtagatccttttaggaggcccccaatgaccatagatcgaacctatcctatttttacagtgcgatggctggctgttcacggattagctgtacccacggtttttttcttgggatcaatatcagcaatgcagttcatccaacgataaaccaaattccaactatagaactatgacacaatcaaacccgaatgaacaaaatgttgaattgaatcgtaccagtctatactggggtttattactcatttttgtacttgctgttttattttccaattacttcttcaattgagagaaagaaagagagtagtaagaattctcttatcccatttggaaggataccatctttataactatccatgactgtttttgtctctagcatgaccacttgagaaaatgtggaggaaagtaggggaaatggccgatactactggaagaattcctctttggctgataggtactgtaactggtattcttgtgattggtttaataggtgttttcttttacggttcgtattctggattgggttcatctctatagtaatcggaggatccagattgtaaacatgaaaaagtaggaacttagcgggtccttactcccctttatctgattagagcggaaagggcccgcggaattcttattgttataacgcggttttgttccataatctagaaattggttacctatttctatttgtaaaaataacaaagagaaaacctttgctctgatggttggaatccctccatttattcttttgtttgttaatgatgttagtgagtgaagcaatccatcggtcgatttaaagcccccgcctttcgcccataaaatggattcactcttatgaagcaacaagaaagaggggagaggatccagtattttattccatgaaggaagtatcctgcaaatcgttgatttagtttagagtaataaactaataaaaccttaatcaaaactactcaactagcctaaaaatcaaaaccacccttccatgggagggtatagattttttttacaaaatttctgtaagttcaaagttgaacttaattcaaaaagtaaagcaattctatttgctcacaagaaatgtgtcccccgccataccttctttccctctgtttgtccactaccgcgcccgaacctaagcaaaggaagtccaaaagacagacccgaataaagaataaatagtaatctttgacaaaacaaataagaagaaaaatgattcttacttcgatacaagaagaatcgacacaagaaaaaggcaaaaaagcctttttcttgtgcccaatagaggattaagaagacccacaattcctcctaaaaggacttgttccttttattgttctcgtctttgccttggatcctcttcttttgcatgagatagaaataaggaattccagaaatcgaggcttttttctcacttgatggtaagaaatcccaggatctagaaattcatttcgtacaattgaaccttttcaaactgtttctttttgagaaccaaaaaaacttgtgccaaaataacagatgcgaagaaaaacaaaaggccttggacgcgcaatggatcctgaagcactatttctgcatccccctgaccaaaccctcctacattaggattgcttgttaatggttgatcaagcttgattgattccccctctgaaacaagaagttctggcccgggaggtataatatcaatcacttggcgtccatccgatgcatccactatggatatttcatatccccccttttctttacgtagtattttttttactatacctgttgacgtagcattatagaccgtattgttactcttgctaccgtcaggatagatctgtccccttcctcggtttccccctacatatatgggatattttaagaaatgaacgtctttttttgtagcgggatcgggggaaagaatgggaaagacaatttcactatatttcttaccgggaacagggcctatcacaagaatatttttttattgggacgataactctgaaaagagagatttcctatcttttctttcaactcaggagaaatacggtcgggcggcgctaattcgaatccctcgggcaaaataagaacagcacccacattcaaccctccctttttaccattagcaagaacttgtttcagctgcatatcataaggaattcgaagaactgcttcaaatacagtatcaggaagcactgcttggggaacttcaatatccacaggcttattagctaaatggcaattggcacatacaattcgtccagttgcttcccgcgggttttcataaccctgctgcgcaaaaatgggatatgcgtttgaaatagatgtgcgagttattacgtatatcatgatcgatacagaaatcgatcgaatcatctgttcctttaaccaagaaaaagtttttctattttccatgtccaatcgcggatcccggaatttctaaaataaattagataggtagctaagctaatctagttccctatacacgagtctgttgtcattctactgcaatagttgtactagaatgatgaataccttgagcaggtagaaatagaaagaattttgttaaaaaggaaaagggctttctttccatttctaaaggaagaaaagaaatatgctaatttgattaatattaggaaatgaaatgagtgagtttatgcttcactaattgaatgataaatgactacaagtgaaggagatagacggtttaaacaaaaaaagacccaaaatttcaaacacgtgtctagaatcacaggaaaactacaaacaaaaatagtgaaaattagctcgttaggagcccatccaagattgttgtagacccaacgaattagtagttcccaaccgcaggtagagtgaaatccaacaaaaaaatcagtaactaaaagaataaaaaaagcttttattgaatcatttaagttatagaaaaattcctgaacccaagaattcaaaatgacaagttcttctttacccagaaaaaaagaaccacttagaatagccaaacagattatatttgttgagaaatgcaaaatgatatggagatgatcctcattatctattttggccaattgtattatttccttgtgtattcctataggaagtttttgtacatgtgtcttcggtttctcttttatcatttcgtccaagagaaaaagttcctctaattctatgaatccttctagaatccttttctcttgaatatcacttaagaaagtttcggattgcctggtattccaccaattcttaatccaaagttccagacatttgttaaaagagaaagagactccccagggcaaaagtacgataaatacaagatataagaaagaaggcaatgctttcttttttttcatttttgatctgtaagctgaatatatatgatatttcttttctttgaagcaaaaattctataacaaggtttgagaccttgtgtttgtatctatttctctttttgtatactagtggaatttcattgtattgggttctttcttagatctaaatggagtggaatagagaaataaaaaaaggcctttcgtataaaaatggaagaatagtatgccatatatctcacttggacaaaacaaattcgaagcaattttctcttatcctcgtttgttccttcctttactttagataaatactcgaaaatccccttacaattgcaaaaaattgcaattggtactcaaaatacttcaattggtacacgcaagaaataggccaattcggcagctttttgttcaatttctcgtggagtaaaaaacttctcatcagtacgagtcaagggaatgaccccctggccccggatttccatataaaggatacgacgaggataaagaccctctttaacctgaattctaattgattggatatcccgcacaaggaattgaaggaagatgcgacgttttattccagggaatccccaacgaaaaatgcacactattccctcttttctatcgaatcggtcataaccactgcctacattccataaaatagtgcaccacaaataggagctaatgaataggcctgcgattccgtagaaagacatcacgaccccctgtggaaaaaaaagaatttgttgagatggaagtacagatatcatattcttaccaagataactggaagccccaatcgctaagaatcctaatgaacctagaaaaagaatacaggcccagaaaaaattacctctttttcgagaaccttttagaagttctatccatatgtgttctgatcgccaattcatattagatatactaaatccagtagcggtcaattgaaattgagagaataagctaaatgatttttactttactttttttgattctgaaatagccttcagtagctagtactcctgtgaaataattggttagatacattgactttctattcaaaaaaaattagtggatccacttaaaaaaaaactcgctatagtcggctacgcatatgcatgcatttatgctcgtagcttatatctgcatccatagacgtttttcatttgtgtgtagaaagagctacataccctatcatattatagtacttacacaaaaaatatctgtattatgatcctggaaatacattgagaaaatttggccccgtcgtttctagacaatcttatttttctgcacataaagaaataaggaagtcattgcaattgccggaaatactaagcctactaaaggtacgaaaatagagggtaagttaaaatctgtcatagaatatgtgtctcaattcaaatttactatttctatctattcaaaatatatcttaagattcttatgatataattaagtatatctattataaggaatattgactattgtattttttagtttacaaaataaagattttttatagatatagaataaaaaagtattctataaaataaatgaatggaattgataataagaaaattgcaaaaaagggaagaaaaaggataatggtagcccccccattaactaatttatgaatttcatagtaatagaaatccatgtcctaccgagacagaatttcgaacttgctatcctcttgcctaataggcaaagattgacctctgtagaaagactgattcattcggatcgatatgaggacccaactccgttgcattgccagaatccatgttccatatttgaagcgggttgacctctgtgcttctctcatggtacaatcctcttcctgctgagccccctttctcctcggtccacagagaaaaaatgtaggactggtgccgacagttcatcacggaagaaagaactcacagagccgggatcgctaactaatagaatagtactactaactaatactaatatatagataactaatactaatatatagatattaatactaatatatagatatatagaaatagatatctagaaatagaaacgaactaatatatagataatcgaaatcgaaaagaactgtcttttctgtatactttccccgttctattgctaccgcgggtcttatgcaatcgatcggatcatatagatatcccttcaacacaacataggtcatcgaaaggatctcggacgactcaccaaagcacgaaagccagttagaaaatggattcctatttgaagagtgcctaaccgcatggataagctcacattaacccgtcaattttggatccaattcgggatttttcttgggaagtttcgggaagaaattggaataatatcgattcatacagaggaaaaagttctctattgatgcaaacgctgtacctagaggatagggatagaggaagagggaaaaatcgaaatgaaataaataaagaataaagccaaaaaaataagtcgaagatagaagagcccagattcaaaatgaagaaatggaaactcgaaaaggatccttctgattctcaaagaatgaggggcaaggggattgataccgagaaagatttcttcttattataagacgtgatttgatccgcatatgtttggtaaaagaacaatcttctcctttaatcataaatggaaagtgttcaattagaacatgaaaacgtgactcaattggtcttagttagtcttcgggacggagtggaagaagggcggagactctcgaacgaggaaaaggatcccttcgaaagaattgaacgaggagccgtatgaggtgaaaatctcatgtacggttctgtagagggacagtaaggatgacttatctgtcgacttttccactatcaaccccaaaaaacccaactctgccttacgtaaagttgccagagtacgattaacctctggatttgaaatcactgcttatatacctggtattggccataatttacaagaacattctgtagtattagtaagaggaggaagggttaaggatttacccggtgtgagatatcgcattattcgaggaaccctagatgctgtcgcagtaaagaatcgtcaacaagggcgttctagtgcgttgtagattcttatccaagacttgtatcatttgatgatgccatgtgaatcgctagaaacatgtgaagtgtatggctaacccaataacgaaagtttcgtaaggggactggagcaggctaccatgagacaaaagatcttctttctaaagagattcgattcggaactcttatatgtccaaggtcaatatggaaattctttcagaggttttcccttactttgtccgtgtcaacaaacaattcgaaatacctcgactttttcagaacaggtccgagtcaaatagcaatgattcgaagcacttctttttccattacactatttcggaaacctaaggactcgatcgtatggatatggaaaatacaggatttccggtcctagcgggaaaaggagggaaacggatactcaatttaaagtgagtaaacagaattccatactcgatctcatagatccctatagaattctgtggaaagccgtattcgatgaaagtcgtatgtacggcttggagggagatctttcctatctttcgagatccaccctacaatatggggccaaaaagccaaaaaaataagtgattcgtttttagcccttataaaaagaaaacggattcttgaacctctttcacgctcatgtcacgtcgaggtactgcagaaaaaagaaccgcaaaatccgatccaatttttcgtaatcgattagttaacatggtggttaaccgtattatgaaagacggaaaaaaatcattggcttatcaaattctctatcgagccgtgaaaaagattcaacaaaagacagaaacaaatccactattggttttacgtcaagcaatacgtagagtaactcccaatataggagtaaaaacaagacgtaataaaaaaggatcgacgcggaaagttccgattgaaataggatctaaacaaggaagagcacttgccattcgttggttattagaagcatcccaaaagcgtccgggtcgaaatatggctttcaaattaagttccgaattagtagatgctgccaaagggagtgggggtgccatacgcaaaaaggaagcgactcatagaatggcagaggcaaatagagctcttgcacattttcgttaatccatgaacagaatctaggtatgtagacacatggatccatacatctcgatcggaaaagaatcaatagaaggagaatcggacgatatctttttcgaaacaaataaaaaggaaaaaaaagagaaaacagaaatc

SEQ ID NO: 372 - DNA, 20597 bp, Zea mays
  Intron number 1 from transcript GRMZM5G824838_T01 (locus G RMZM5G824838) derived from phytozome v7.0 (chr-ID 9; pos 1 10866209 to 110886805)
tggtggtgttgagccccaaactgagcgagtggacggtccggccctgaggccggacggtccgcggtccggacagtccgcgcctgtgggccggacggtctgcgcatgcgcagagcagtttagggttccgagttttgtgctatgtttgttggctagatttgcggagttagctcagaatccagtcgtgtaaagggtccagcccccctcctctataaaaagagaggtctacggccgatttggaatgatcaatcggatcaatacaacttctattcgcatttatttccagtacaattaggagtagttctagtctagttctagtttagcctctcaatccccaaattcttcgcctctcttcgactctacgctgattagaggagtctaggtcggccggcccgagcctagacaactcctaggatctctcctccccgacggggtccctcccgggagcgagatccaggcgccgccggcgatcttccgccgcccctgcgcacgcgcggaccgtccggccctagggtgcggaccgtccggccgtcaggcaggaatccctagcccctgcgccaggtcgcggaccgtccggccctaggccgcggaccgtccgcgcctgaccagagagcaccgccgctggttctcttgagtaattgacgcctccaaaaaggtgtcaacatactttttggcgactccgctggggacaacacatatagacctatcaaatcggccctcaatggccggttcaagggatagctctgatatttctccaagcaacatcatagagccgacttgggaaaccttgccggccgacgagcagctccagttcgaggagcacaaggagcggatgatccaggaggtgaaagcaaagttcttggccaacttcaaagtggacaggaacaacaaggtcgtccgacatcgggcgacggatccggcttcgctccaacccacgccagatatccccaatgtaagtaataccaactatctgcaatctcttagaaattatgtagaagatcagcgtgaacaaatgcagaacatcatagggggtatgcaaagcgatcttaagagactagtgttggcacttgctctcagttgcaaggaggccaacaagggtgaacagtgatggtaacagggttacgtgctagaaggcaatagctctgttaatctggcccctcacgggcactgtgcgggggtatttataggtacctgagcactcaacgccttgtgctaaggacgcatgtgccctcagctacctaggttatccccagaatattcccataaagcggggttacagactgtaattacagggatgcctttacaaattaggcccgtaacgcgcggcggccacgcagggcccgttacgatgggccggatcgcacgtgggcctctgagctggacgaggccgcactgtggatgacgtcgtcgccggtcttcgtctggtgccgatcaagcgaagggtgtccctgcctgttttgtctctgccagaccagcggctgcagcgaaggcttcgagcgaagggtggcgtctttgccttcgccccaacatttgccctccgagggaccagttcgacaaagtcatctggtgccgaagacgtcgctagatgtcggagacgctgccctcgctcgaagtggttccgcgggggtttttgatgtgaccgttgattgacggcgtactgttagattgtcggtttcccgaagcgccgcgccctgttggattgcgggtttcccgaagagccgcgcgccgcctataaaagggggcgggggtcggcgctttttgaacttcactttccgcgctccgcgaaaaccctagccgcccgccgtcttgctgctcgtctgcccgccgtgctcttgttcgccggagatctggctcgggtgaagcagaccgcccgtcgccgccgacggtacgtagcgatgccgacctcctcttcttccgctgccgctacgccgccggccgatccctcgccgccggccgccgcctcgtctgaggagatgctgggtagttcgatggcggaggagttgcgcgccggcgattctgttgattttggcgtgtcgcggatgtcgtcggtccgcgtgcaagatatgcagcggttgggttacttcggcggcagagttgctcgtgtcccggggacggaggaagtccccgagccggagggcgagttggttgttttcgaggtgttcttcgccgccggtctccgcttgcctgcgcaccgatttgttggtgaagtcctgcgcaggttcaatgttcagatacatcagctgacaccgaatgccgtggtggctctgtcgaagtatgtctgggcgacgacttcgtacggcggacaaccatcggtcgaagtttttgtgaagtattattgtttgcactggcagaagaggatgattggagacgaagttgctcagtttgggtcctgcacattcacgccgaagaccggcaagaccacgatgcaggtagtcgagttggttccttgcgcccgcaacaagtggggcaactggaatgaattttggttttacgttgctgagggtaccgtcgaaggccatgagggaccccccgtgtccgagatgtgttctcatttttactcagcgtacccgccctttgaagtggcagaggaggatgtggacgaaggggcccttcgatgcgccgccggcctgagcagtgggcgcgatttggttgaagagtttgtggcgtacggggtgtggcccttggcgcatggctgggcgctgggcgaagtgtgccctcgccagatgccttttcacggtggaagggtggtgcgaagtcctgccttcgcgctgaatctgcaaagccgcgacccggccgcctttgtgcgtgaggcggaggatggggcggtgcggctcgttggacgttacgtgccgaggacagagggccagcgcagctttgatatccgcgggtcgaatgaccgtttgaacagggtttttgaattaaatcaattgccgtatgacggctatcttggtcaagacgatgtggaccgccgtgggaagaaaccggtggtggagactggagacgaccctgcgccggcggccgccccatcctctaaaaagagaaaattaggtactgttatgggaggacttggggtttctgatagttttgctagagagttgatgaggacgtgcgcgcccccgggggaaggatgtcttcgcccgagctccgggagtcttcggctcggatgctgagggttaccgggggttgctggcctaggaatgttcctatcccccacgcggctggcgaggacctttttacatctcgcatggttcgtgagtggagagtttttccttacgggcggaatattgctgctgttgtgtcggcagtgatggacaaggatcgccagggagcggcgcaaaagcgccaggcggttgtcaggctcgttgaagctaggccgaagaggcagcggggatctgcgaaggctgcggccgccggtggaggcaagccgccgctggcggcgaagtcgggcgcccctgcgtctagcaaagcgccggaggcgacggcaggcgccgggggctccaaaccgacgaaggcagtgccgccggccagcagagtgccggaggccgccaaggcggcgaagttgctgtcggcaggcaagcgtgtcgccgacttcgccactgatattagtgtggaggactatcttggtggtaagtcgttggctcctgttttttattattattatttattcgttgatacgtcgcagggtcggacgagggccaacttgctatagttgcgcctaccgcggcgacaacgacggctgccgcagcgccgaaggcgaagggcggggttcttagcgccggaggtgaggtggcggccctcgcggctgtcagggatgaggcgggcgctgcgtcccgccggctgaaggaggtggcggagtcgctaagtcaggtccgctgagccagactttgttttttattattattattattatttgtcggggccgcggtcttatgtgtgttgtgcaggtggctgacttcgccaaccgcacggcgtcgggggccctcacggcagttgtgtctgccgaagtcgagagacttcggacacaacatgctgacgccgtccgagagaaatcggccgccgacagcaagtgccgcaagctggcggacaaggtggccgcgctggagggagagaaggctgacctccggcgccaattggcgggggagaggagggagaccaacgaggccctcgtcaagacgcaggctgcgcaggcggaagccagtctggcacgggcggagggcaatcttgccagggagcgcgccgagcagctgcaggagcggctcatcgccctggagagccacgtggagcgggccgaggccgcgacgcgcgcggaggccgaacggacgcgcacgcagcttatggatacatatcgtgagctgggtgcgcggaccggtgacttcgaagtgccggaccgagagcccggacttcgctgtctggaatgggtgcaggaggagctgcaggcactccccactgtcgtggaggggtttatgtcgtacgcctccctggtcacctgcgagggggcgatgaacgcgctctcccgcgaagggtgccggcacttcgaggtcttcgaccaggccgatgaggattttgagcgagatatctataaggttgaagaccccgtagtgatggaatccgccagggccgtctacgactggatgtggggtccgcatggtcgcgaggtggtcagggagcgggccgcaacggcgagggctcaggtaacgttttcgtttgtttggcgtttgttggatgtgggctgtgcgtgtgtttgcttaattttgtgtgttttgtcttaggcggcgcgtggcgagcgggtggacgacttcggggcgttgaacagcgcgctggctgacccagagccgaccccggcggaggccgtgtctggggtcgccctggagccggccccggatactacggaagacgcaccggatgcccccgcatccgctgcggctggcgaagacctgcccccaaaggtcgccgaaggcgcgcctgatgcccccgcagctgctgcgccgagtgttgaagatcccgcgacggtggtggcgggaacaacagcggaagcaacggcggagccgacggcggaggctcccgcagcgtcagggccttcgcaggtggcgtagtgggtgtagagggttggggaattttggatatgttgctgaattttggttgctgcgcaggttcaagattttgggcctgcgcacgcaaccgccactactaaatttttggcggcttcgaccgcggaagatggtaatgaatgtggtggatctgcatctgagttttttgattttgctgactctgggagctcggttgagtggactgaggagtcgtcggaggaggacttggactattttgcggccttggatgtggctgcggcggaggcttcgccacacgccgcggacgcacaagatgcgccaggtcctagcaccgggcgccgacgacgaagggcggttgcgaagcgtagggttagtggggcagagggggctcggcttcgtgtgaatagggctggtcggcaggaactgttgtctttgccggccgccgcgagtacaggtgaaggggagctgcgaagtctttttgcgggtgaggagcttaggataatgttatttaattatagggagatgggaattattcctaaggttgagccgatgtagagtgtgatgccctcacttgtatatgtgtaaaggcttgtatgatgaagttgtgtgccctcgcttgtctatgcctgcgaaggcgttgtgtactttgtcttgtgtgttttgttatgctgtgttggtgcgattatagtcggtcttggcgcggacggtttgatgttgtcgtttctgcttttgttgtgctagtccagctgcactcttaggcgacttctgcgcggatagtcttcgcggtagacttcggttttttcgcacttgttgtgctagtccggttgcacccttaggcgacttctgcgcggatagtcttcgcggtagacttcggttttttcgcacttgttgtgctagtccggctgcacccttaggtgacttctgcgtggatttgtcgcacgcgagggtggctagcgcttagcctcgcggtgacctcgtattggtcgaatgtcgaagtccgtcgtcgcggtcttttttcgacgcatgtttttgcgggggatttttcacacatatattacatggctccgcctcgttaaaaacctcaccccacgggaggaaaagagtgcgggctggtacaagattgtttttgcgaattacaagggcgaaatcagccctgatgagtcaaacaaaaaatttgcggaggttgtcgatgttccaggagtgctccaggtcctcgccgtttggcgttgtgagcctgtaagcgctgggggaagcttttgtcttgactataaaggggccctcccacttgggctccagcttgcccttggactccgcccgagctgttcggacgagtacgaggtccccttcgctgaactccctcgggatgaccgtgtggtcgcgccatgctttggtctgggcttggtatttgtttagggcctgtagggcgaagactcggtctccgtcaatgagatcctttgaagttggctcgtccacgttggggacggctgacggaattgttcgcggggacccatgctttatttcttgtggggtcatggcctccgatccgtatagaaggcggaagggagtaaacccagtcgccctgcattcagtcgtgtttagtgcccagactgcctcaggtaacaaatcggtccatctgcccttttttcatcaaggagcatcttcttgacagctgtgaagattttcccattggcgcgttccatgaccccgttggactgcggatgataaactgaggcgaaggcaagcttggtgccaatggagaaacaaaaatccttgaagtcttggctgtcaaactacttaccgttgtccactgttagttcggacggtactccgaagcggcaaacaatgttttgcagaagaatttttgggcagtctttgatgttattgtggaaacagccctcgcctcgatccatttggtgaagtactcgacgacgacgaaggtgaacttaaggttcccctgagcggtgggcaggggcccgacaatgtccagaccccagcgctggagaggccatgtatgggcgatcagctttgtatactgcgaggggctgcctgaccgaggagaaaacttctggcaggcttcgcaggaccttgtgacccgatttgcggtgcagatcattgtgggccagtaaaagccctggtggatcaccttggcagctagggcccttggccctgcgtgtgagccgcacgtgccactgtggacttctcgtaggatctgcatgccttcggtttcggtgacgcacttaagcattggctgactgacccctttcttgtagagttggccttcaatcagtgcgaagtcccggcttcgatgtctgaggcgcttggcctcgctgacgtcggttggatgatagtacccctgtaggaacagggttattggtgcccgccagtcctcggtcatgattaggttgactatgcggtggccctcgctgtcattagttatttggagcccttcggggctccggacggctggcgtgccgatggtatgaaagaacacgtcggagggcaaggactcgcccctggcgacggccttggccaatgcgtcggcctcctcgttcttggccctatccacatgctgcaaagtgaatcccttgaattgtctctcgagacttcggatggccgcaaggtattgcataagtgcggggtcctttgctgcgtagtctttctcgacctggccgacaactatcttggagtctgttttgatgatacaagtggtgactccgagggcccttagcttgcggaggccgaggatgactgcttcatattctgctatattgtttgtgcacttgtcggattccagagcgaagctgaggcgtgccgcatatctgtgcttgaccccggctggcgaggtgacgactgcagcgacgcctgcccccgcatggcaccatgcgccgtcgcaatggatcgtccaaaccttctctgtggacgggtctggttgagttattggcccagtccagtcgacgacgaagtctgccaggacttgtgacttgatggctgtcctgggctcgaagctgatgtggtagccggatagttcggctgcccacttggcaatcctcaccgatgcctccgggtttctgaataattcgccgagtcccctgtctgaggtgactcggaccttgaatgcttcaaagtagtggcgcagtttgcgcgaagacataacgactgtgtaggcaatcttctccagctctgtcatgttgcacttggacggtgtcagtacctcggagacatagtaaatagggcactgcctgaccacaccctcaactgtctgctcctgcactagtgccgcgctgacagcatgcggcgaagccgcgacgtagagcaatagggggagcgaggagtcggggcttgtgaggatggccagctccgacaggtactgttttagtgaggcgaaggccgctgcctgctctggtccccaggcgaagtcctttgcaccgcggagtgttttgaggaaggggaggcttcgctcggcggacctggagatgaatctgttgagagcggccaatctgcccgtcagacgctggacgtccctggcggactgcggaggcgacatgtctacgatggcctggatcttggttgggttggcctcgatgccgcggtgtgataccaggtagcccaatattttgccctggcgaacgccgaagacgcacttttccgggtttaggcggagtcgtgcgtctcgcatgttcgcgaatgtctcggcgaggtcggcgagatggtcttccttgttcttgctggcgacgacgatgtcgtccacatatgtaaatatatttctgccaacctgcccttcgagtactgttttggtgagtctggagaaggtggacccggcgttcttgagtccctccggcattctgatgaagcaatatgtgacgaagggtgttataaagctggtgctagccttgtcttcctccttcatgtatatctggtgataaccggagaagcagtcgaggagtgacatgacctcgcatccggccgcgctatcgactattttgtcgatccgcggcaatgggaaattgtcctttgggcaggccttgttgagactggtgaagtctatacacattcgccatttcccgctttttttctgcaccattacaacattggagagccacgtggggtaagccactggctcgatgaatttagcctctaggaggcagtgcacctccgccttggcggcctctgtcttttcgtcggacattttgcgaagcctctgcttttttggtcgcaccgaagggtcaattcccaagttgtgctcaattatggatcggctgactccgaccaggtcgagggcggaccaggcgaagacatctttattcttggacaggcagcagaggagtctctcttcttcatgcgaggtgaggtcttcgctgataatgactgtctgcttgggcgtggcttgatcgagggggacagtcttggtcccgtcttggctctgcagctgtgccttgtcgtgctgtttatcggttgagctggcgggcgcagggagctcgcgctgggccgtgaagcagtgcacgtttctctgaccgggcacgaagtcccgctctatgttgcgcgccgtctgctggttgccgtagaccgtaatggcgcctagcggacctggtatcttcatacataggtacagtccgtgaatggcggcttcgaacttattgatggagccccggcccatgatggcgttgtatggatataccatatccacgatatcgaaagttacttgctcacttcgggcattgggtgctacaccgaaggagaggggcaactctattttgccgacgggaaaggtgcccttgccgccgaagccatacaatgggttatccgaaggcttgagcaggctgtggcttatgcccatgcggtcgaagccgtggaggaatatgatgtccgcctgactgccgttgtcgactaggactttgtgtaggtcccagcctgccacgctgcaattgataaccataacgtcgatgtggagggcgctgcggaggtcgacgtctcgtgcgtcgaaggtcagcggtatgtgggaccactttgtctgcacgactgggccagtgacggcgacatggttgatgctgcggtagtggtcccgcttctgccgcttggtgtcgaagtcagtgctggaccccccagttatcatgtgaatgactccgcgatatggttgatcggcgaagtcttactgctttggggcatgggggatgttttgatgttgctggtgtggtggtgggggtggaggaggtacgatttgtacttcctgatggtgttggtaagcgtgatgcggtggatgcggggcgggagcgttgatatatgggggggggggttgctggtaattgtgcgcgacaattctggggttgtcggctggctgtgcccgtgccattctgtctctggtggccttcgtttcggggcagtctttagtttggtgggcgcagtcttcgccgtggaaaaggcagtagaatcggcgcggcggctgcgcacgccctcggcccctaccacgagttccatttccgcggccctggggggatattcctggcggcgaggggggtcagcagcgggatgctggttggcgatgttgtgcacttgctgctgattgcggccgtctcgaccggagtctggctgcggagtcctcgtccacgtgcggctggactgtggggcatctttgggtttccgctgcgactcaaccttgcgctggtggagctcttcggatttggcatatttttcaaagagctgatatagctcctggaggttcttgggtggatctctgatacagtggctgtagaggacgccggcacgaaggccactgatggcgtagtggatagcgatttgatcatcaacggagggcagctgtgacttgagtgttaaaaatttgcggtaatactcccgcagagtctccttttccagctgtttgcaaagcgagagctcggccaaggcgtcagtgtctgggcggtacccttggaagttgagcagaaacttgtccctgagacttcgccaggaatcaatggacagcggaggcaatctggtgaaccaggtaagagctgggccctctagggcagtgatgaaagacttcgccattgtggcgtcgtctcctccggcggatgcaacagcgacctgataactcattatgtattgcgccgggtcggtgctgccgttgtacttaggataggtccctgctcggaagttagctggccaaggcatcacttgcaggtgtggcgccaggggacttcgctcgtcgagatagttgaccccttggaatggcgcgacgtgctggaaggtgtggtcgcgctgggggaaacgcgggtcttccgattgtgctcggtgttgcaggggtggcccatgcagtaggccgaggtggccttcgcgcgtgtcttccagttgtgcgcgctgctggaggggtggcccttgctgcaggccaaggtggccttcgcgctgcattagcgcgatctcccgctcgaggtcttgggccttctgctcttcgtcgcgtatcatttgccgcactttggctagtgcggacacacgctggcgcttggcctccagtatctctttctgcctctggagattgcggttcttgaggcgcagggtgcacaactgtagctgttcttccgctgagacgccgaggacttcaccatcctcggtgaggtccgcgccttccagtggggcgaagcctgggggtggctgcgattgtccttcagggccgcaggtgcggaaagtgtcgtcttcgcaggtgcggggaacattgtcttcagtggcctcttggtgggtggattgggtgagggcgagggccttgccctttcttgcggcgagcagtgctgccttcgcagccttgtcagccttcgggttagctctcttgggtgccatcgcgggtggttttctcgtagcacgaacggtgggcgccaaatgttggcacttgctctcagtcgcaaggaggccaacaagggtgaacagtgatggtaacagggttacgtgctagaaggcaatagctctgttaatctggcccctcacgggcactgtgcgggggtatttataggtacccgagcgcccagcgccttgtgctaaggacgcatgtgccctcagctacctaggttatccccagaatattcccataaagcggggttacagactttaattacagggatgcctttacaaattaggcccgtaacgcgcggcggccacgcaaggcccgttacgatgggccggatcgcacgtgggcctctgagctggacgaggccgcactgtgggatgacgtcgtcgccggtcttcgtctggtgccgatcaagcgaagggtgtccctgcctgttttgtctctgccagaccagcggctgcagcgaaggcttcgagcgaagggtggcgtctttgccttcgccccaacaactagtacgtgcatttgataaatctagtatcacaaattttccttcgcacgaggttgagttaggaggtaacacgtgtaacacatcggctacaggttgtcacgaccagtcacaacccctttatgggatgccgatggacacataccctaagcaaccgcaaatcggcagcaaatcagccgatctgcgcatgcccagaccgtccgcacgtgagcgcggaccgtccggaccaacaacagtcgggccgatttttaatgagttacctagatatgcgcccgaaccaccacacacgacacagaatctaaactacccagtcggaccgtccgcgtacaacgacggacggtccgcacataatcacggacggtccggaccaatgtccagacagtccgcgcatgagtcttttgaggaggattattacctgaatcctcgcccgtctcagcaacacttcccatcacactatgcaatgcaccagcccattaattcaggatccagagcccaggaaagctttccggccccacctagaaggccggaaagaaacgaccaaacctatgagccatatagggcaaatggaaatgcaccacgtaactcaaaccaatggggggaaagacaacatgctaatatccagccaaccccacttatgtttgaccagagagccggtggtctcgcaccagctgccattgatatagtaagggaagaaatagccggggcgttccgagataagctcggagtaagcatggtccctggggggcaatcatatcggaaaccttatgacagccgatttgatcaccacccatacccacagggaaccaggatacccgaattcacaaaatttccgggtgatcaaggaaagaacacacgtgaacacataggccaatttttagcacaattaggagagttggccgacacagaggcattttgcgtacgtttattttcattatctttaacaggaactgcttttgcatggtatgccactttacctcctaattccatttcatcatggggggatttagaacaaaaatttcatgatcattttttctccggtgactatgagttggatttggtagacttagtgtcattacgacaagcaaaagatgaatcagttaatgattacatctggagattctgagatacaagaaaccgatgctttcaaattcatttagcagaaaaacagctagcaggattagcctttaatggtttacgatattatttaaaagaaagattagaaggcatccaattttttacgctagcacagttacaccagagagctttggcttgcgaaagccggagcaaagaaactgctaaaacaatgcgtcacaacgtacatatagtagaatgcgaccaaagtagctcggatgacgaatcagcggaagtgtatgctgctgaaatggtttggccaaaacaggccaaatcttcggcttgtccctccttgcagccggttcaaaagaaacggcaagaggaggttaagtttacgtttaatgtcggtaagtgtgataaaatatttgacgagttactcaaaaatggcaatattaaaataaatcacactgttccatccgctgacgagctaaaacgtcgtgcgtactgtaagtggcataactcattttctcatgccactaatgattgtaatgtatttcggcgacagattcaatcggccattaatgaaggacgattgaaatttcaggaaatgcaggtggatacaaaaccctttccgatgaacatgattgacttcgagggcaagaaagtcctagttcggccaaacacagccgataaagacaaaggcaaagagacaatcatcagcaatgctaaagaggccgatggggatcgtaaagtttcttgcaggaaagtggtggccgagaagactcctgatggaggggagaccctaaaggtgaccatcacagcctccagtactgggggcaagcgcagacagggagacagatgcaggaacccgtgctgcgtatcccggacggtccgacacgtaggcgcggacggtccgggaccccaccggacggtccggagagctccggcggacggtccggccgtactcaggattcacaacgtccacgtactttcaaaccacgacgaccagagataggtacgtggaaaacaaatacattcaaggcagctggtcggttggttaaagccggcccaacttttgatcaattattgtctaaatacgtaaaaaaagaaggtcggccccagtgaccggccagcaaagcgaccccgctcacccattcatgagcagcgtcaggtcaggccgattggaccaccccaccaatcggaagaaatgaaaagtcatactgtacaagtgagacctaacatacctgcatggacacctccatctccatatccacctatgccatatccatacacatatttacctccgccatatgtcccaaatcaaatgtggggcatgccaccatatccatttgggatgccacagtaccccgcctggggggcaccccaaacatctgtttttgacaggttgacgccaccagtacaagaccgattgagcactgctcaatccggtcaccaggcacaaacccaataggattgccggactactcggcctttcaggccgaccaatccgacaggggggcatatgcctgtagcaactcaaaaaacaacaaaaaaggacatcatcaaaataggcactgcagatgttgtcatacaagaagataataaagggccgatgattttcggcgaatcggccaacacaaccgaaaaggatacggctaccattaaaacagccgatccaaaatactccatgcctcgatggtgcccagcgggattgacatgatcccaaaagagaaaattacagtgcctaagagcaaaggagagccaggagaaggaggcggaaaagacatttaatgacacacatccactatacccgccaccgcaaaagaaatggagaccgaaggccgttgagaaaaaacaaacggccacagaaatagaaagtcaatctgcaccaggcgcggaccgtccggcccccacgcacggaccgtccgccgttcaccaggaagcctctagacaacctgcaccaggcgcggaccgtccggcccccgcgtgcggaccgtccgccgttcaccaggaggcctccaacgacacgacaacatcaatggaagaggacgacctgctgggagaagacctggtcgactacgaggcttctccagaacgcccaggtatggatgtaaatattattacattttctgctgattgtactattatcggcgacgatgaacctgttgttgcccagtttgattttggtcctaaagaagccgcctttactaaaccaaaagaatcggtaaatcatttaaagccgctcttcgtgcgcggccacattgatgggataccaatcgctaagatgttggtagatggaggggcggctgtaaatctaatgccttattcattatacagaaaattaggtaaacaagatgacgaacttgtcaagaccaacatgaccctcagcggtgttggaactgatagttcgatcaaagccaggggagtcacgtccgttgaattaaccatcgggactaagacccttgctgttgcattcttcgtcgctgatgtagaaggaaattacagtttaatcctaggcagagattggattcacgccaatcaatgtataccttctacattacatcaaatgctgatacaatgggtaggcgatgacatagaacaagtacatgctgatgtatcggcctgcatcgctgtggccgatgcccctgtactctggacttatgagactgctacatgtctcacaggagtagacttttctgattatcaattcataagtatagataagaaaggtttcattcctgtaatgctagagccgatggagaatcggctaaatcctaaataaagttaaatgatgaatacacataaagttcatgagtctttggtcacggacagttcggccgccaaggccggatggtctggtctttcacaaaagggttcggactttaagaccgaacatatatcacagcaaaaggacagtattacggatgatccggtccccgagaccggagagtccgctgtcacacaaagatcttctaattcctctgtggggaacatgatagaggaattcagagatcttgataaactaggacaggggtttacatcggccgatcctttggaggaaattgacataggagatggtaaaactccaaggccgacttttgtaaacaagaccctggagaccgatcctagagatgagatgatcggtctattgaaggaatattcagattgctttgcttggaattatactgagatgcctggattaagccgagagatcgtagagcatcggctgcctattaaatctggtttcagaccttttaagcaaagagctagaacatttcgtccagatcttctcccacgcatcaaggacgaaatccaccggctgctagaagctgattttatcagaccttgcagatacgcagagtgggtctccaatattgtgccggtggagaagaaggagtcaggtaaacttagagtatgcattgattttcgcaatttaaatagagcaactcctaaagacgaatatcccatgcccatagccgacacattaatcaataatgcatcaggaaatagaattattagcttccttgatggtaatgccggatataatcagattttcatggtcgaagaagatgcgtctaaaacggcctttatatgtccaggcttcattggtttatttgagtgggttgtcatgacatttggtttgaaaaatgctggtgctacttatcagagggctatgaatttgatcttccatgaattgttaggaaacactgtggaagtttacattgatgatattgtagtcaaatcggctgagtttagtttctcatatagctgatttgcgcaaagcctttgataaaatgcgttagtatggtttgaaaatgaacccacgtaaatgtgcttttggagtgtcggctggtaagtttttaggatttgtcatacatgaacatggtatagagatagaccctgaccgaatcaagtctattcggaatgtgggacctccgacctgtaaggtcgaggtagagaggtttctcggcaaggtgaattatttacgaaggtttatttctaacctagccgggaagattgatgcgttcacccctattcttcggcttaagaatgatgccgaattcgcttggggggcagaacagcaagaagcatttgatcttatcaaaaaatacttatcttcggcccccgtattaaaagcaccacgagcaggagtaccattccgattatacattgcagctgaggataaggtcattggggctgttctgacacaagaaactgaggggaaggagcatgtggtgacatatctaagccgaaggttggtggatgctgaaacaaggtacacttttattgaaaagttatgcttatgcttgttttttgcatgcaccaaatgtagatgttatttactgtctagtcattgcactgtttctggtcaagccgatgtgatcaaatacatgttgcataacccaattatgagtggtagaattggtaagtgggcttatgcactcatagaatatgacttggcctatgaaccattgaaatctatgaaaggccaagtcatagcggatttcattgtagaacatcaggttaatgatattcatgaactagacatgtcatacctcactattactccttggactttatattttgatggatcggtttgcaatgaagggcaaggaattggcattgtacttgtttcaccaagtaatgtctcctttgacttctctagccgattgaaaacttattgcactaataatcaagctgaatatgaggccctcctattcggcttagaacttttaaatggtatgggagtaaaacatgtgaaggtatttggtgattctcagctggttgtccaacaagtgttagaagaatatcaatgttttgatggtactctaaatagttaccttgagaaatgttggagcataattcattcttttgacgaattcagtattcggcatatctctagagttgagaatcatagagctaacgatttggcacaagatgcatcaggttatcggataaagagagggaagtttcacaaaactaaaaatctgataaccagtgcagagccaaattcccaggtcgcggaccgtccgcatgatggcgccggaccgtcctgggttaccagaaatgttctcttaatcgattcggctgacaatgaagccgatgcaagagattggaggacacctatacttaattctttacgaaatcccaatatcaaaacagataagaacattcggcgaacagctttcaagtatgttttgatgagtgacgaactctaccgccgaacagtcaatgacatcctgcttaagtgcttgggcccagatgatgctatattagccatggccgaagtacatgaagggatttgtggtactcatcaatcagctccaaagatgaagtggttgttgcgaaggtccggtttttattggcctagtatgatagctgattgtttcaagtactacaagggttgccaagtgtgtcaaaaattcggcgacctacagttggtccctgcagccgaattacatcctattattaagctttggccgttcagaggatggggattagactttattggagaaattcatccttcatcatcaaaggggcatcgatttgtgttagttgccactgactacttcaccaaatggactgaagtcgttgctctaaagaacatgacacacaaggaggtaatcgagtttataactgaacatattattcatagattcggcattccccagaccttaactacagatcaaggtacttcttttatgtcaaaggaggtacgtgaatttgctgaattatacaaaattaagctgcttaattcatctccatattatgctcaggccaatggtcaggccgagtctagcaataggacattgattaatttgataaaaaagaaaatatctgataatcctaaacattggcataagattttgtccgaagctttatgggctcataggatatctaaacatagggctactaaagtatctccttttgagcttgtctatgggcaggaagcagtgttgcctgtggaaatgagtttgaatgctgtcaggttcgccagacaaaatgatctaactgctactgattattatgatccaatgattgataatattgatgaggtgaccgacaagaggatgatagctttgggagcaatagaaaaggacaagatcatggtagccagggcctacaacaagaaggtcaaagcaaaatcatttcaagtaggggacctggtgtggaagaccattctgcctctaaggaataaagaccggaagttcgggaaatggtcaccaagctgggaaggtccttataaagtaaaacaggtgatgtctggcaacgcctattcactacaaacattacaaggcaaggacttgcctaaggctttgaatggttgtttcctcaaacagtaccatcctagtatgtggcaagatgtctaagagaaccgatgtaatcacatcgagttagttgcttttggtttgctcagctccaccaaaaggcaggggggcatatgttgagccccaaattgagcgagcggacggtccggccctgaggccggacggtccgcggtccggacagtccgcgcatgtgggccggacggtccgcgcatgcgcagagcagtttagggttccgagttttgtgctatgtttttggctagatttgcggaattagctcgaaatccagtcgtgtaaagggtccagccccctcctctataaaaagagaggtctacggccgatttggaatgatcaatcgaatcaatataacttctattcgcatttatttccagtacaattaggagtagttctagtctagttctagtttagcctctcaatccccaaattcttcgcctctcttcgactctacgccgattagaggagtctaggtcggccggcccgagcctagacaactcctaggatctctcctccccgacggggtccctcccgggagcgagatccaggcgccgccggcgatcttctgccgcccctgcgcacgcgcggaccgtccggccccagggtgcggaccgtccggccgtcaggcaggaatccctagcccctgcgccaggtcgcggaccgtctggccccaggccgcggaccgtccgcgcctgaccagagagcaccgccgctggttctcttgagtaattgacgcctccaaaaaggtgtcaacaggtggtcaatcctacaggttagtagaccttctgaat

SEQ ID NO: 373 - DNA, 791 bp, Zea mays
  Intron number 4 from transcript AC196420.4_FGT002 (locus A C196420.4_FG002) derived from phytozome v7.0 (chr-ID 2; po s 71242819 to 71243609 reverse strand)
ggcttacgcctgggggcttattcttccttctcgtacgatataattagcatacaaaaatgttacactgcttttatagggcgcacctcatctatttgcttgtacaagtcatcttactactgctttgacaaacattggtctgctctgctctggtctgtgctttaggattttgtttcattgggagaaacaaatgtcctttcttgcttttatttatgcttttctgaataattaagaagactagcctcatgttctaatcttcagcgttatatataatacaacaacaaaaaagagaggtttgcaattaaaagttaaaaaggggatttttctccaatacaaagaatcatcttgacagaatataaaacttttcttctaaacatagcatacaatggttttagcgactgttgggcggtctgcggttgtgcgccgatcatgtgtttttcgtctttttccttttttatttcaactaagtaattttgatgggcttcagtgatatagtgatacaatggattttgtagtacccaattggttcagtgatacagtgaatttcgtactacccgattggttctgtgatacattggatttcgtagtacccaattggagccgcttcttgtttcttttttttgggattcatgtaatcatgggagcactaggtttaggggtaaaagatttcgatggagtttcaatttgccactcgatttcttagcctgaggcctgtcaatggttatgataggctggtgctatgaattgaatctgatgcaggcgactaggcttgtcaaaactggaacgggtaaggt

SEQ ID NO: 374 - DNA, 5490 bp, Zea mays
  Intron number 5 from transcript GRMZM2G077233_T01 (locus G RMZM2G077233) derived from phytozome v7.0 (chr-ID 8; pos 6 09658 to 615147)
taccacaatatcaagtcattcggtaaggaaggtgggtcggagcataaacatctagagctttacttttacgatgatgatcccagtctcgagcatcggtaccgtaagtgtcgtgaagaacagcttcagaaagacaaagatgttattaaacagatagttggcatactccatggaaacccgtactccgagcaccttaggagcatgggccatgttgagaaccttgatgactatcatatcgcattgaaccttgaccagactttgaaccagaagacatataacacgcctctcacttcggaggtggccgctgtatggatcgaggggagcgaacggcgaggccagttcagcaagagtgttatgttacatgggaaggataggtcaagccacgacatccgctcataccatggatgctacgatgcactatcgtatccactgttcttccctaaaggtgaacttggatggcatgcaaatatcccaaaggttggtgtatccatggatgaagtggatgcataccgtgcgacacatagggcaaataattcaaacgatgaagatgcaggttagttgtttctttgtactttgagatttttgcacattattaactattctttcaacatcactcacttttcaatccttgcgtatgcagaatctcctacccatttatgtgtgtccgtacgtgactactactgctacaaattccagattcgtcccggggtatttaatccaatacttcatggaaagcggcttttccagcagttcgctgtcgacacgtacatcaagattgagagctctcgtttagatttcatacgtaagaatcaggatcgtttaagggcagacctataccagggcttggtggatagcatgttagatggagatatcagagcagaaaaggttgggaagcgaactgtgctgtctacgtcatttattggtggtcctcgtgacatgaaacgtcggtatatggatgctatggctctggtgcggaagtttggtaaaccggacatctttcttaccatgacatgtaaccccaactgggatgagataaggagagagcttctccctgggcaaacaccacaagatcgtcccgatcttgtagtgcgtgtctttcatgcgaagctacaggagttaaagcataggctgactaaacaggatattctcggtaaggtccgggcctacgtctatgtcgtggagtttcaaaaacggggtttgccacatgcccattttatactcatcatgcagaggaagtacaagctaacgtgccctgagcagaatgaccttttgatctcagccgagatcccacacaacaagtaccctgaactacgaaagatggttatcaagcatatgatgcatggcccgtgtgggtcgttaaaccctaactgcccatgcactaagggccatgtatcgtgcaagaatcattacccccggcctttcagtgacacaaccttgcaagggaaggactcatacccgatttacagacgtcgtgatgatgggcgtaaggaaaaggttcgagggtgcgaattggacaatagatgggttgtcccttacaacccttacctccttcgtctcttcaactgccacatcaatgttgaggcgtgcgggagcatcaaggctgttaaataccttttcaagtacatatacaaaggccatgatcgtgcgtctgttgttatgagagatgcgagcaaggcagatgatgatgtagatgagatcaagcagtacagagatgcaaggtgggtgactcctccagaagcgttatggaggatatacggctttgagcttagtcagaactctccacctgtgatgcaattgcaactccatcttccaaacatgcacatggtggcgtttcacgaacgacaaatggtcgagcgagtcgtcaaccgtccaggtgcttataggtcaatgctcacggcatattttgaagcgaataggctacatgagggggctcgtggcatcctatatcgtgacttccctgagtggtacacttggcaaagtggtaagggcaaagtatggcaacggaggaagcgtgatacgggtggacaagtcggtagaatagtctctgctcatcccgctgagggggagcgctactatctccgtgttctcctaaaccatgtgacttgcgccacctcctatgtggatctaaggacagtagatggtgtcccgctaccaacttttcgtgaggcagcaaagagaaggggactgcttgagtcggacaacacactggatgactgtctcactgaacgtgctcttttccagatgccatcggcgctgcgacgactttttgccacaatactggtgtactgtgagccaagcgacgtggcggtactctggcagaatcacctagatgttatgtcagaggactatcaacacaggagtcagggtaaaactcatgttgagcagatggtattgattgacattaggaacatgctgcagtcaatgggaaaggacataaagacattccctcttcctcctatcctcgacgcatatgacgatgctattggtactgctagggaggtctacgaggaggaaagtatcgaaccagcagtgggagatgtggctctcaaagactctcttaacgaggaacagagggccgcctatgataagattctatctgtcgtggacactgatcagggcggattgttctttgtggatggacctggtggcaccgggaagacttatctatacagagtgctgctcgcgacgctacgcagccagggcaagattgcagtggcaacagctacatctggcgttgcggcttccataatgcctggaggaagaaccgcccattcacgcttcaaaatacccctcactattgacgatggcgctgtatgtagcttcacgaagcagagtggaaccgcagagttgctacggaaagcatctctcattatctgggacgaggcttctatgaccaagagacaagccgttgaggcactggacaatagcatgcgcgatataatgggtcggcccgaactaccattcggtggtaaaaccattgtcttcggtggggatttcagacaagtcttgcctgttgttcgtaaagggtcaagggctcaagtggttgcttcttcgctacggatgtcttacctatgggagtccatgtcccacttaaagcttgttagcaatatgagggcaaaaaacgacccttggtttgcggagtatttgctgcgcgtaggcggtggaaccgaggacacaaatagtgacaacgacatctgtcttcctgacgaggtatgtgtgccttatagtgggagtgacagcgatcttgacaagctaatagaattcgttttcccaaatctcaacgaaaatatgtctgattcgacctatatcacttcaagggcgatactgtcaacgcggaacgactgggtggatatgataaatgcaaagatgatcgatcgttttcaaggggagcatatggtgtaccatagtttcgatagcgccatggatgatccccataactactaccctccagagttcctaaacacactgatgcctaatgggctgccaccacatgttttgaagctcaggattggatgccccgttatattgcttcggaatatagaccatgcgaatggactttgcaatggcaccaggctggtcgttcgtggtttccaaagaaatagcattgacgcagaaattgtactgggtcagcacgctggaaaacggattttcctgccgcgtatacctctgtgtccctccgatgaagagatgttccctttccagttcaaaagaaagcagtttcctgtacggcttagctttgcaatgacggttaacaaagcacagggtcagactattcccaatgttggcgtgtacttgcccgaaccagtgttctctcatggccaactatatgttgctctatctagagcgacagcccgatcgaacataaagatccttgccatcccaaccttcaatgggaagaagaggtcgaggaagggtgtaagaaagaaccctacagtagattgtgggacatgcaccaagaacatcgtatacaaggaggtcctaacaaactagacccagggtaagtttgtcaaaactgaattgtttgttaaccacgtaaaatctcatggagtaaatttctgtaagcatgatcattcattgtttggtacttggatgattgggtcctaacgcttttcatatttgttgattgttgcttcagcttgtaccggaaggttatgtgtttgtgctgggagataacagcaacaatatcttcaagtaccaataatctgaaaagatggttccctactggttctgcatataggaaggtatttatctttatcagttgtattctggaatatgccatctgaattaattatctgcaatttatctttatcagttgtattctggatgacgtgtgatgttttgacacatcaaaaacttgactgacattatttttcagctgtgacataccatgtatttgtatctgaagaactgtttgacatatatttggttcctgattctacgatctactgcaattggtatattgctcttttcttaaaaaactcttatctaatgtgcagatacctcatgtgactttaattcagtgtttccctatcagttatctaagcatatcagaagattggtacgaatgaactgttattcataatcaattaactaatgaatgaagtgttcttcatagttcatatcattgtccttgatagtgttttttgcaagttgagtgcactgcatgagaatcatcaacgtgttcttagcttttttgaccttttatattgcccgacacttcaatggtagaccactatagtagtcttcttatcttatttaagcatccataaagcaggacctagctaggtacatatatttatagtgctcagttttatgggagatctgaaaacttttgtagccatcaacttgttgtccagaaaccatgtaataaggggattaggggaaccctgtgaatagctatgagataacagcaaatcttcctgctttgtgtgtccacctttgcttccatcttagctggtttggttcagaagattcttcttctactggtgatctttttatcatctatgtgttcttgtctaaaattatcacttcttcactgccttgtgcccttgtctgaaactatcccttttgtatgtcaaggtgactctgtttggttatgaggaaagaacattcatttccttccttatgatctggtgagtgttgctgcgatgttaggacactgcagtcatagtagcagagaattctatcactcgagtgtcggcagatggggaaagatatatatctatcgatcgttttgtaaatatgttgctgtagaaaagagtgttaaatttatttatctatttattttttgaaatgtcatcagccttatcctttataagcagcagtaagatctatttattgttccttatttatcttttggtcgttttgcttacatatagcagtaatttggctatcttataagcagcagtaagcttataatcatcgccttttggttcggacatgcttttggttgattcagtttttcatattgagctgcacaagtacagcacaaga

SEQ ID NO: 375 - DNA, 1125 bp, Zea mays
  Intron number 2 from transcript GRMZM2G104397_T02 (locus G RMZM2G104397) derived from phytozome v7.0 (chr-ID 8; pos 9 1481081 to 91482205 reverse strand)
tttccgaggccacaaaatatttcaaaggcggtaagatatagttgtagcatctcacattttgtatttgcatctttcttgtacttccgaatacaaaaaaaatctagtatgtgcgagctttactgtaatgttgaactatgattcgaagaataacaataacaaacacaaattcatttcaataagctgtacaaggtatattcaattatttccaaagataattggaacttctgtggagaaatcaatcatctagtaatgatatgagcgttttctccttgtcaatttccctatggaaacacatattcactttaaacaaaatactaccagagtgattatggtcatttagattcacttttgatcttaaaatctctttactacctttaatgtaacaagaattgtctattgatcggaaatatgtggctgtgtaatatgacctttactatctcgagtgtgaaattatcagcctgttgcattttccccttgtatccatcatgttatgattttctactttatttgtggtaaatgttctcttagaatctccatactgactctaatttataaacccactaccatgccactcttgccaacaagctactcacataagtttggacatcaataaccataaacttattttcaggaatttggatggcaatctgtcgctaaaactagtttgaactactagactggaattctgagtcattttatttgattcattacatgctacatggctcatcagccgttgtccaagaatcactttcaggatcagaaatagcaatccactacaagagtggattgacatggatagtcagtctttaaaagatcgctaagcaacatttcatggaaccacttttaaatttgtctctcttgctatataacttttgatcttgttttgttgataggctgagagataacatctgaaataaacttaaaaatcattccatgatatattgctttcccccgtatctttctttggtttcagttagctgatactgatatactgcatgtttgtaaactgtggctgttctatgatatatgccattaattcctgatggagcttgattaattgtgaaatgctttgtgggcttgctgtgtttccctgattctggttttgccataacctttccttctagt

SEQ ID NO: 376 - DNA, 5585 bp, Zea mays
  Intron number 1 from transcript GRMZM2G128016_T02 (locus G RMZM2G128016) derived from phytozome v7.0 (chr-ID 1; pos 2 77492946 to 277498530)
ccgtcgctccaccagacggagatcaactgggataagtaagcaactatccgtcttgtaattttataggtttccatttcgtgccgattcccccctttcccgcggtccgtcctagtctcctagagatttagctccgaccattgaacagtgtcctccgccctagtccgaatcggctttatcgcctaggtttaggaattgtcgtttgaggatttgacatctctgttcatgctctgtgatgacccaaggtggtgcgtcggcgagtatggtggaattgatcagcaggtatggagtattagttgagttcttcgggtattagtgcttgggccgtattaatatttctttgggctgtaatagatggattatccagggcattagccgtattagtagttgaattcgagatctataaatactgtaatgagttgttgagaggaggatatgaaataaaatagaaacagatacctgaacaaactcacctggtccccgtcggcgttgtcgtcgtcgttccgcaagcaactcacgcccggcgatccgccgctgtggccaagggtcatcacaagtggtatcggagctgttgatcctcggagggtggtcatcacggcgccgtccacgaagccatccgttcagacgtggctgatcctagaagcagtggcaggcgtggagcaaaaaagggaggagcgttgggagcggatgatgctggcggtggagcggttgactggaagatggaaaccatggagattggacagaagaaagcggaggaagatcgagcactgatggctcgacaaatggaggaaaacgagagaaccattgcacagctgcgactggagttgcaggcgaaggacttggaaggtaacgaaacaaactctgagcgagagatgtgtgctcctcgatgggatgatcggggtggaggaatggagcgtggaagagatcgtagggagcagtggggtggaggaagagagggtaggacaggcccatttccgaagtggacattccccaaatttcagggcagtgatccaggaatatggtttgatcgatgtgtagattacttcaatgtctattaggtgccggagtgaatgtgggcgagttcggcttttatgcacatgaggggaatgcgtcaaggtggctgcaggtgtataagttgaaacatggattgtgtgattgggggcagtttacacaggcagttagggagaagttcggagtaggcgaatatcctcaagctatgagagatttagtcaatgtgactcagcaacaaggagtggaggaatactctcaagcctttgatgatatcagatatgtcactactttgcataattctgagttggatgagactttctttgtgacactatatcagggggctgaaacctgaaattcaaactcaggtcatggctcagatgcctaagacagtggataagacgaagaggttggccaaggtgtatcaggagatttcagagaagaatagaatgaagcatcaaaaggggctggctctgaaaactcaggttacaggagtaaggggagataatagggcaggaacattgtatcctgagttgagcaaggagaggcagttgagagactacagaagagcaaatgggttgtgttttatctgtggtgataaatttgaaccaggccatcaagcaaaatgtcccaagaggttggtaactcaactgcataatctgacagtggaagatatgggtatgattttgactgatgaagtgttgcagaagttggagcatgaggagaagtgagtggaggagttacatcaattatcctggaatgctatcagtgcacagaatgtgatggatgcatgagggtccaagctctgattcaggatcagatgttggtcatgttgattgattctggtagttctgcaacctttatcagtcagcgaattgtagcaaagttggggttgatcactgaagattgctcaactgtgcgagttaagatggcaaatggagcagctatgatcagtgacaaaagggttaaggaagtagtgtggagatctgggggcacctgtacagcactgctatgagggtgctagatttggaagcatatgatgtgatcctagggtatgatcggctgaaagcctacagtcctatggagtgtgactggattaacaaggtgttaatctttactgatcaaggaaagaaggtgaggttgcagggtgatgcaagagagatgcaggaagtgcaacaagtatctgtgttgcagctggagaaatggatgaagggagaggaagtttgggtgtttgtgcttctggagcaggtttcagaagaaacagttgggaaaattgatacagatctacaggagattctaagggaatttgaagatgtttttgctatgccttcgggattgcctccagtcagaccttatgaccatcacattcctctgttgccagggtctattccagtaaacgcaaggccttatagatactctccagctcacaactgagattgagaagcaaattactgaactgttagcagctgggttgatagtccctagtgtaagtccttttgcttccccagtattacttgtgcaaaaaaagatggcagctggaggttctgtataggttacaggaagttaaatggaatgactataaagaatagattccctatgcctatgatggatgagatactggatgaattagctggtgcccaatattttactagtctcgatatgacagcagggctatcatcaaatcagaatgggagctgaggatgaatacaagactgcttttaaaacacatcatggccattatcagtttcgagtgatgccttttggtctcactaatgctccagctagtttccaatgtgccatgaactcagtgttggagagttttctcagaaaatttgttatggtcttcttggatgatattctcatctacagccctagtttggaagtgcattatcagcatatcaggatggtgttggccaagctgagagagcaccaatttttcttaaagatgaagaaatgctcttttgtgaagcatgaactaaaatatttgggccatgtgatttcaaggaatggggtggccacagactctagtaaaactgaagccatgttgtcctggccacaacctaagaatgtgacagagttgaggggatttttgggcttaacaggctactacagtaaatttgtgaagggttatggtattatggctagacctcttactagactgttgcagaaaacagcaggtgtttcagtggtctgaagaagctcaggttgcttttcagaaattgaaacaagctatggcttcaacaccagtacttgccctacccaggtttgatctgcctttcacagttgagacagatgcttcagatgtgggtctaggggctgtgttatgcagcaaggcagacccattgctttgattagtaaagctctgggagaaaagaacaaacatatttctttatatgagaaggagtttttagccttgattatgacagtagataagtggaggcagtatttgcagaggggtgcctttgtgattaagacagatcacaaatctttgacattcctgggagatcagcagttacaatcagatcttcaaaagaaggctatgaccaagttaatggggctgcagtttcagattgtatataaaaagggggcagagaatgtggttgctgatgctttatcaaggaggagttcagtattggagttagctgccatttctgaagcgcaaccagtttgggtacaggaggtgctaaattcttattctaccgattctgaagctcacagttgataactcagttgctggtacgcagtcctgatgaaaatgggttttcattgtatcaaggcattattcgcaaggcaggcaggatttgggatggtgctatctgctctgagaaccagttggtggcagcatgcatgacagctccattggtgtcatctggtacacaggccacatatcaacaggtaaaaaaagtgttctattggatggggttaaaaggcggatgtggtccagtttgtacaacagcgtgcaacttgtcaaaaggcaaagagtgaaagaactcatccagctgggttattacaacctttgcctgtaccacagggtgtgtgggaagatgtgactatggatttcattgaaggtttgcctaagtcggatgggtttgatacaatcttagtggtggttgacagattttcgaaatatagccatttcttccctttgaaacatccttttactgcgaaaggtgttgctcaagtctttctggacagtgtggttaagttacatggagggcccaagtcgctggtatctgacagggataaggtgtttactagcagtttttggaagaatttgtttcagctgatggaggtcaagctgctgatgtctacagcctatcgcccacagactgatggccaaagtgagcgtgtcaaccaatgtctggagatgtatctcaggtgtgctgtcaattctcaacccaccaaatggaagaattggttggctctagcggagtattggtacaatactactcatcatgctgttttgggttgtacaccattcagggtgttatatgggtatgatgctcctctgttagcccttcctagactcatcaatattgaggacccagatgtcactaagtgggtcaaggaaaggaatgctttttctgccatgttgaaggaacagttggctagagcacagctgcgtatgaagcaatatgctgataaaggcagaacaccaagagaatttcaagtaggagaatttgttctgttaaaactccagccatatgcacagaagacagtggtgaatcggccttgtcccaaatcgtcctttaaattttttgggccttacaagattgcagctcgagttggggcagtggcatataagttggaattgccacctgatgctcaagtgcatccggtgtttcatgtgtctcaacttaagccgtttcacccgtgttattctccagtttacactgagctccctatattggttgatctgtctcaaggggatgttgagcctgagcaaattttgaatcgacggatggtgcataaaggaaacaattccatcgtccaggtgatggtaaaatggacaggaatatccgttgacactggcacactgctacttgagaagactataaagtggcgaaagctaggtttcctacagctcacgcttggggacaagcgtcgtttggcgccgggggagatgtgatgacccaaggtggtgcgtaggcaagtatggtggtattgatcagcaggtatggagtattagttgagttcttcgggtattagtgcttgggccgtattagggccgtattaatattcctttggtggattagccagggcattagccgtattagtagttgaattcgagatctataaatactgtaatgagttgttgagaggaggatatgaaataaaatagaaacaaacacctgaacaaactcacctgggtccccgtcggcgttctcttcgccgttccgcaagcgactcacgcccggcgatccgccgccgtggccaagggtcatcacatgctcctggacgaggcgcagttttggggattcagagcttattccgttgtttctgattcttttactattctcaaatcgtggtactgaaatgttgcagcctcgacaagaccaagctctacgtggtgggcgcag

SEQ ID NO: 377 - DNA, 10426 bp, Zea mays
  Intron number 1 from transcript GRMZM2G126642_T01 (locus G RMZM2G126642) derived from phytozome v7.0 (chr-ID 5; pos 1 98108145 to 198118570 reverse strand)
ttgggtcgaggtaagagaattcaaattggtcgttagattttagttgaagggcagggattggatcgcaccttaataaaatcctagccatcggatcgtgatcccacggctcaggtttgatcataccccttcgccttggcatttattctaaagaccccctcggcttttctcaaatcaacccgccacccgagtcagtgttaagatcattatagagaagaccttggatttacaaaataaaccctgaactcctgttaaattgtgcctgcagtacacttattcgctggaattaataaaatagacctagaaaatgatttcttgggtaaaggaaatactaaatgcttacaaaattcataacttctacgttttaactctgatttgacccgttcaagttgcgttagctttgtaatagaattatctacaccttggtaaccttattttatcatgaaacatgtttgtaaataattaatttgtttaccctatgctcattgggttaacttacttaatttaaaaattaaagtagtattttcacttcctagttgtaatttgactaaaatacgttctctaatcaagttataacttggattaaaattaaattaatgatttcttaggaatatctttctcacatgatttatactaatcaacctagaacctagttttcctatttaatcacataaaccttcggaaaatcgtaactcgataaccgtaactccgaatttaatgattctcgttcctacgatctcgtagcagcgcgtagaatattagtacgcggtttattcttatgtttggtgtgatgttaattttgcctatacatgtttgtctgtattgctacgtttagcagtgaggacacgtgtcatctgaagagcaagatggtacctggaatctcaagtcccaggcaagttgtgcccttgatcacttcttttacccactcatgttctaattaatcataatgatctgcataggttaattttgatgggacctaataggttacctagtctgtctatctttatgccttgtttaccactgaactttttgggtagtacttgctagtgctatatgtggttttgggcattgagatacacattattcatgattatacttttgttatccgttgttatttattgttcatgtcaagatcattaatgttaattggaacatagagcttaacttgagaaacacgtgccaccacaagggtttatggacgcccttggctgattaattaggaaagctagtggaggactaccttactcgaaaggggcaagggcagtaggggagtggtcagtgtagggaggtccttgcttgattttgctgcgatggcggtcaggcaagaaccctgcattggagcttcctataaactgtagcgggttttctgaagctagtggaactttgtaaaggcctcgtagtgttaccctgcctcgcctcctcggtagaggtgtatgggaagtcgcgatcccttggcagatgggtaacatgacttgtgggtaaagggtaccacctctgcagagtgtaaaactggtatactagccgagctcacggtcatgagcagctcaggactctctgatgattaatttatggaactaaattcaatttgtcatatgcatttgcatcgcaggtgatgttattacttttcttaattgggttggtatttacttatacttagtaattgctaataaaattttgaccaactttaaaagcaatgctcagctctaaccatcctctttggtaagccttacacttcacatgaactcccacctttggcgagttcattcacattattccccacaacttgttgagcgatgaacgtatgtgagctcactcttgctgcctcacccccccccccacaggtcaagaacaggtaccgcaggatgaggcgcatggaggatgctgcgatgagttcgtgagagagatctaggccgtcgtctcccagtcaactttgggttgctagaccattgtctccttataatgtaattatttatttattttatatagaactctgattaaatagtaaagatgtgacattcaatcctgtgccatgattcatcatatgtgtgagacttggtcccagcacacctggtgattatgttcgcgctcgggctttggacccctgaaacccgggtgtgacagtctcctatcatgatacatgaaagcatggttcttttgagcactactagccatagcggccttccctttctccttggcggagatggaagccttatgacttgttaagttcttgacttccctcttgaagccaagaccatccttaattgaggggtgtctaccaatcgtgtaggcatcccttgcaaattttagtttgtcaaattcattcttgctagtcttaagttgggcattaagactagccacttcatcattcaatttagaaattgaaactaggtgttcactacaagcatcaacattgaaatctttacacctattgcaaactacaacatgttctacacaagatgttgattcattagctatttctaacttagcactcaaatcatcatttatactctttaagctagaaatagagtcatgacatgtagacaattcacaagaaagcatttcattccttttaatttctaaagcaagggatttttgtgcctctacaaacttatcatgttcttcatacaaaagatcctcttgcttttctaataacctatttttatcattcaaggcatcaattaattcattaatcttatcaaccttagttctatctaggcccttgaataaacatgaatagtctatttcatcatcactagattcttcatcacttaaggaagcgtaagtatcacgagtgcttaccttcttttcccttgccatgaggcaggtgtgatgctcgttggggaagagggccgacttgttgaaggcggtggcggcgagtccttcgttgtcggagtcggacgacgaacaatccgagtcccactccttgccaaggtgtgcctcgcccttagccttcttgtaagtcttcttcttttccctcttgttcccttgttcttggtcactatcattatcgggacaattagcgataaaatgaccaatcttaccacatttgaagcatgagagtttcccttttgtcttgttcttgttgggatgctccttacgaccctttagtgccgtcttgaaacgcttgatgatgagggccatttcttcatcattaagcccagccgcctcaacttgtgccaccttgctaggtagcgcctccttgctcctcgttgctttgagagcaatggtttgaggctcttggattgggccattcaacgcatcatcaacgtatctagcctccttgatcatcatccgtccgcttacaaattttccaagtatctcctcgggcgtcatcttggtgtacctaggattctcacaaatattgttcacaagatgtggatcaaggacagtaaacgaccttagcattaggcggacgacgtcgtggtccgtccatcgcgtgcttccatagctccttattttgttgacgagggtcttgagtcggttgtacgtttgggttggctcttctcccctgatcattgcgaatctcccaagttcgccctccaccaactccatctttgaagcgtcccgatcctttgggactcaaatgtgatacaattactagtcccaggaggctagtaaccacattcattacttcaaatagttacagagtctgaataatgttattacaataccggggaatacaagctcgggagtgagccgaaaatcataaagcgcagtggaaggtaaaatagcctaggccacaggcagaactgggtgaagacacagccccatcaatcaagcatagcagaaaagaagtcttccgctgctgaaaaacataaataaatctgggcgaatacactaggtattccgtaagcccacccggctcccgtaaagagaaagtgacctataatgtacatgtttcatatggtggagttgaagtcactcatactttttcagagaaaggcataactcgttgtttaaggttttcccaagacaatagaaataacacttgcttgaccaccactgagcttcccgctcccgtggcacgactttctttccagaacatacacacctttccctattcccggttgtagtagaaacactaattgccataccataccagactcatccataccagtggacacggactattcgaataggttttcaaactctgcgcagaggtgtacactttacccactagtccggctctgcgatctcatagctagtgagacccgaatccgaatctctttctttcctcgcacgtcctaaccttaacggttataccggaaggagtcaggccaccaccatgtccaaaccggacaaatcattccccctccttatcctctcggtgctccccagccttcataaccctggggttggatcgtaagagttcagatcgagtggctgcccacacaacctcgagtggttgtactttttatgagtaccggcaatgaaagatgacaaaccagtccttatacgagaggacgatccttctgctcacgcctaaaccagctgagccatcaccttaggccctcccctaaaccagggagtccctgatcatcctactcaccaggtgatgagggtgaatacccttcatcgcacactttttggaaaacatgttacttgcacccttttacttaccccatatcttttaatcaaagtaatagtgaatgcgggctctctcatgctcaccatgcaattcgattcccatcccataatccaggcctaggcagtggtagagagaaataggtaaataatgcatcaagggaaggatggacttgccttcgtcaaagctttcctggcacaagaggtttgtctcggaggggtcgggttcttacccttctttcggagctataagttccgaaggatcggatccctcttccgctaatcaaacacagataataacaatacatcaaacatagtgactttagtggggtgtgcaaattcttataccttattatttttgtgccctataatttatttagactatttttgttgcataaaatattagcatctaaatatatatatatatatatgaaaatgggaaaaagaaaagggaaaagaaaaagaagaagggatttccagctagctgggccgaggggatttcggcccaccaggcgcgagcgcgcgcgcgggggcgtgcttgcggcccagttggcccagccgcgagggagcgacggcgggcgacggcgccgtggcgcggggcccacacgccagggagagggggtggttaacggcgttgatggcaacggaaggaggggggttcgaccggagcctggccggcggcgaaatcccgcggcggttctccgccgctggtccggttctacggcggggaggtggtggcgaggcacgggtgggtgcaggggatcacgggagtggggttaatttggcctgcgggggcgtatggcggccggtccgcgacacggtggtgggtgcccgcggcggtgatgccgccggtgcggttgccggccacaatagagggggaaaagtggcgccctgagaccgtgagagtgtggcggagcttcgagcatagtttaattggacagaggatcgctagagagggggaagggagctcaccggagcgacgaagggagcacggcggcgctagctcgaatggctcgggggaaagcagtggagatggccggagctggtgtggtgaggacggggtccgggcgggtgcttttataggcgctcgggggagggagggggatggaggagacggcgagcaccggcgagctcgccatgatggtgggaatggcgctaacgccgattgagatggctcggggcagggcgggggggtgaggggacggctcgagtacagtggcggggttgtcgtggaggttgggcgagccttaatggcgaggcgacggggcgagggggggctcggcggcggatgcgccggtgagggatgggcgagaaagacgaagctgacaggcgggccctgttgccagagagagggagcagtgcgagagggagggaggcgggtcgctgacgggcggggccaggctgtcagcgagagggagcggcgcgcggagctgggccgcctggaccggggagaggggaaggagagcgcgggcgcgcggggctagttgggccggattcggcccagccgagggaggggagagagtttctcttttttcttttcttttctaattcttttcttttcatttttctatttttgtttcttttttcctttgaatcaaaaattctctaaatgatcttgagtgataaatatagtctaggtgaggtgctcttgtcatttcaagtgtatgcacatgatggggtgatctaggggtagagttaaaggagaaaataaattaaagagggggggtttaggaggttagagtttcaaaccttggttgggatttttgggatgctacaatcttggtgagcatggtgacgtcgttcccctcatgtgagattttgagggtgtcccaaatttgcttggcgttatccaagccgctcaccttatggtattcatccctgcacaatgaggctagaagaacagtagtagcttgtgcatttttgtgaatttgctcattaatgaacatgggactatccgtactatcaaagtgcattccattttctactatctcccatatacttggatgaagagagaacaagtggctatgcattttgtgactccaaaatccgtagtcctctccatcaaagtgggggggtttaccgaggggaatggaaagcaaatgagcattggaactttgcggaatacgagaataatcaaaggaaaagtttgaattaaccgtcttctttttctcgtagtcgttgtcgttgtccttttgggaagaggaagattcgtcgctgtcgtagtagactatctccttgatgcgccttgttttcttcttcctcccgtcttttcttttgtggcccgagcctgagtcagtaggcttgtcatcctttggatcattgacgaaggactccttctccttatcattgaccaccatccccttacccttaggatccatctcttcgggcgattagtccctttcttgaagagaacggctctgataccaattgagagcacctagagaggggtgaataggtgatcctgtaaaaacttaaaacttaacaccacaaacttgattaagagttagaacaatggaatcaagtgagtagataggagggctcttgtgaaacacaatagacacagtaaggacaagcacaagagacacgaggatttatcccgtggttcggccaagtacaaaacttgcctactccacgttgtggcgtcccaacgaatgagagttgcactcaactcttctcaagtgatccaatgatcaacttgaataccacgatgttcttctttactttactcttttcccgtttgcgaggaatctccacaacttggagtctctcgcccttacaataagaatcaatatgaagcacaagcgtaagggagggaatcaacacactcaaatccacatcaaatacgcacacacaagaccaagacttgagctcaagacaatatctcgaggttctcactagaacggagctcaaatcactaagaatgtcgaacaagtgcgcaagaatgaagtgtgagtgatcaacaatgctcaaggaatgcttttttatactcctccatgcgcataggggtcccttttatagccccaaggcagctaggagccgttgagagcatttcaagaaggcaattcttgccttctatcgcctggcgcaccggacagtccggtgcaccaccggacactgtccggtgcggatttctttccttctttggcgaagccgaccgttggcgctttggagccgttggcgcaccggacactgtctggtgcacaccggacagtctgatgccccttctgatcgttggctcttgccacgcgtcgcgcgcggattatgcggccgaccgttggcccggccgactgttgactcaccggacagtccggtgcaccaccagacagtccagtgatttatagttgtacgccattaattgcttcccgagagcagccagttgacagacgccgacctggcgcaccggacactgtccggtgcaccaccggacagtccggtgcacccagaccgagctgtctttggctgaacaaagtcatctcttttccaacttgatttctcctgtttccagcacttagacacaatacattagtctccaaaacaatgtactaagtcttagaaacatacctttttacttgatttgcactttatccatcactttgcatagattaacataagtccacttgtgttggcactcaatcaccaaaatacttagaaatggcccaagggcacatttccctttcagcattctgccacccggccggagattttcctctccgacagctgtagtggactagctttatgtggggttaaagtccagcgattacttttggttggtcaggatattattactagtagagagccaagttttagtattaacccaagttgttaacccaaaaataccctttccaaacggaaagaataccagaacattaccataagcataatcataaccatcatcctcgtcactacctgtaaaccaaacatctctgatcaaagtatctctaatcaatggagctcccttggccgctcataaccgcgagcacggctgatatatcagtttcataacactttgcagaggttgcacactttacccacaagccgtgattctcttttgcctcgggccgatcaaacccttaaacactaccaaggtgaacaggcagggtttcactatgtagcctttacaaagatttcgtgaggctgtagtcgcccgttaggtttcctaaatgtaccacactcctccccaaggggcaaaccgcccttggcagagcgagccgcatacaccgagccccattgacggcacgatgacgaagcgaactacaccccagttactctaattattcagctaagagcgtcccatttcaccctcatggttgcactgtttttccgggcgatcatccaacgaaccagtccttacggagaggcactcaagaaacagctcgagtcctcttaaatgccacaagtatatcatcataatcaaaaggaaaacaacgtatcatagataatctcatcatgttcattgattaatgtgaagcactggcatatagctaaatcaaaataacccaaccaaaataggtaaacaaggacaaggtaaacaaaagctagtcaatccttaggtataaatcatgtaaatgcggggagtgaattataagaatgagtaggacatagatgggtcaagggacacttgccttcaccaaccaactgctgctcagggtcttcacgtgcaactccttcggactccaccaactgactgttatctatacgagttcaaacatacattccacaaatttaatacaaaagaacagtacaacatgcaatctactactactctataaggacgcaacgagggcatccaccatggcttcaccatgcctctgcccgactctcctcgcccacgcttaggccccagctctcctccctcctcgcgaccgcgcaatcccctcttgatgctttccatggagagctgagtgtcggccttccgaaatctccgcatccttatggtgaagcgtgcccccgccactgccctcgtcaatcccttcaatctcgcaaaaatcactgcgtgcccacagacctcgtcatggaaggcccgtcctcgccgtctcgcccccattcgcgctccccccgacctcgtcatggaaggccgagcaacccgccattctcgctcttccccaccatcctcgacccctccgcgcacggccccggatcccctcacgccggcatgccacgacggatttgcgtgcgccaacaacctatgccatgtctcagtccacacgcgctatctcccattgccccctccccctctgtgcaaggccctgcctcaccctcacaccgacgcgccatctacgcccattcccccagtttccacgccgtcgtccccccgccccgctcgcggtgtccacggaaggcacaacaagaaggccgcgccggagatcctcctccacgctcccgttgctctggcttccttaacgaggtcgagcttcgcctcctctgctgcaacctccctgcacaccctcgactgcgcccccactcgcttcccctccccctgcgcatctgctcgcccaagaagttcaacctcgagtttgtgtgtcctctcgtttttgtgcgtcgtcaacacagctgcacgccctgccgccccagcaaccttcgtgctctgatttctccgctcacccccatccccttcgtgtgcgatgctcttggcgaaactgccgcccacggcccccatccggatctgcgtgcgccactccgagtcccatcccatgccaactggtgaaacagccacccacgtcccatgctagatccgcacgcgccgctcttagccccctcgcctcgcttcgtccatcacgctcacaacatcccatccctagccaaaatttcagatcccgcaataatcgtatcgatcctcccaataccg

SEQ ID NO: 378 - DNA, 3173 bp, Zea mays
  Intron number 6 from transcript GRMZM2G036543_T01 (locus G RMZM2G036543) derived from phytozome v7.0 (chr-ID 1; pos 7 4268664 to 74271836 reverse strand)
tgatagtgacctctgtaagtgctcatgctctaaatctgtgcaaactttgctatttttttttcttcttcattatgtgatgtattgtgaagggagggcagcagtagagcctaccgtctgtaactggaaggtcccggttcgagccccagcctctgcatattatgcgggtaaggcttggcgcttaaagatacccttctgcagaccccacacagtgcgggaagcctacgacactgtggactcccttcattatgtgatgtattgtgtaaatgtttttttggttagtctgtacttctatatgaagatataattagggcctatctccattatattcgtatttctatttgcttttgttggtctaaaactgttactaacccttacaatgaaaactagactcagcatgtgtaggacctaaacatcctgactttattagggtggacaaacgagatccgcataagtgaccaagacgatgatgccactgagcaaacgtcgtcgtggaacccgaaagccgcaagcacatgaggtgtagaggtatggtaggaaggaagatgcaaggtatccaagatgtagaggagaggcgaagatttacggcgacgaccagtcccaatcacatcccctgtgtgacgatcctgtacaaaacaagatgagtcatcaaatccaacaaaacaattgtgatcagtaatttgaccaactgatagtagatccatggataactcaggaacaaaaaatatatttggaatagtaaaattagaatcagaaagagaacccttgtgggtgacatgacataatgtaccatcagctgtctgaacagaggtaccctcggtgacaggtgtagtagatgccagacgtgactgatcagatgtcacatgaaaagaagcaccagaatcaagaacccaagatgatgatatagcaccagcagaagaagtagcagcaaccacaactgagcctttaggagatggtcccataccacgaccacgagtagcacgacggacacgaaaatcagccaacttctctggaaacttagcaaaacagttctcagaccgatgagtggtctttttgcagtgttcacaaggctgaaaggtgttcctagacctctaagcagcagccaacacactgtgagaacttacaccagtaatagaagacatagatttcagacgagtctcttcagcaagcaattcggacaatgcccgagccatggtgagagtatccgaactgtgaagcagccttgcacgaagggaatcgaattcaggtcgaactcccataacaaatctgtaggtaaagaacttgtcaatgaacttatgggctggacaaggcacaacagtacaagctggcaccatggaggtcaatgcactcataagacgatcaaaggcggaataatattcatcaatggacatatcatgttgctcaatcacatgagtctgctgcataagagtatgtaaaagagcaccgctatcctgaacaaaccgatccttcagatgtgaccagatagccttagtagtggtaaatttggacagactcataatcatagttggtttagtgctgttgaccattgcagccattactttgccatcattgatctgccaagtcttaattgcagcagcattgcttcgatcaacggctaaaactggagaatcttcagtcaaatgaaaaagtaaaccatgaccccttaatgcagtctgaacacaaaaaaacccattctgggtaattctggccatcaagcacaatgttgacaacaatagcgttggccgacatattgcagattaataaatcactgaagaataagagatctgaaacaactggctggaaggtaccaaaatcccgatcttgagcagcggatgaacagtgatgatagacaccaagcgcagcagcaccgcaggccgcgactgcgcgcagagggcgaacgaggaggccgcgactgcgccgggtggacgaagacagcagcagcagagggtcgcgattgcgactgcagcagccgcgcgggcgcgcagaaggcgcgacagcagcagtgccgggcggccgcaactgcagcagagggcgtgcagcagccacgcgggcgcgcagaaggcgcgacagcagcagtgccgggcggccgcaactgcagcagagggcatgcagcagccgcgcgggcgcgcagaaggcgcgacagcagcagtgccgggtggccgcaactgcagcagagggcgtgcagatgaagcgacggcagcaggggcaggatcctcgacggcgggcagcagagggcgcgcggatgaagcgacggcagcaggggcaggatcctcgacggcggctggggcaggggacagccgcgtgggagaagcccgatccgcggcggcaggggtaggagcctcgacggcgggcggcggatccgcgacggcgggcggctgatccgcgacggcggacggccgcgacggcgtctaaggcaggatcctcgacggcggcggctagatgaggaagagaacagccgcgacggcggctgggtgggtagtggaaggacagccgcgacagcggctgggcgagaaacagccgcgaaggcggcaaaaaaagattagggtttcgtaacctgctctataccatgttactaacgttgagattgataatctgtccctaaggactattggtaatatataggcagtaggcctgggcctaatgggccttaacagtgtctaccaccacattttgtttattccttcatgccaatgttatttgcatcttggctgcctcgatttcgtcttgatggacacaagtttgtagtcacattgctgccgttgaagaatgctttatcaccattcttgtacagcccctattccacattgggcttgtcaatatccttaccgcttggtcaatacgcttagttgcccatcctcgtctcatctctggatgccacttgaactttggtgcaagtgcaagtagatgatgttatcacttttcagctgctagtattgattatttctcttctaataacatctatatcttctgcttaagcaaccttcgataatagtcctgagctagcttgttctaatatggaggtgaaagtttttcccccttgttgtacttgttgcgttgtttgatagttgtcattgttggatattattttttgcacaaacataccttgcttttactgcaggtcgccttgtatattatttgagtatctgtaactcatgtattcaagtcttttatgtagt

SEQ ID NO: 379 - DNA, 1779 bp, Zea mays
  Intron number 1 from transcript GRMZM2G100118_T01 (locus G RMZM2G100118) derived from phytozome v7.0 (chr-ID 4; pos 4 318877 to 4320655)
acctcactcgcctcctcgctcaccccgacgagaaggtagggtcttcccccccttcacttcctcgttgcttgtgtctgcgggagtccgattggtttctcggtaatagaaaagtgagtttcttgcttaattgggggaaaaaatacctgccgcgcaactcccagcggagttgaccgaagctggcgacaagaactgcttggcctgtttcctgttgtagattttgggataccttagcgactgtgcttgtaattttgagcctggactgggtacagatggcgtccattttatcatttatatgagaactattgattggattggtgaagaattttgaccttactttctgcagttgggaatctgggatgagatgtgtggcaactgggagctacataatcccatttgctgttaacatgttctgcagcataagtttttttttatctagttaaaatttgaaataactacgggtttgttgaaaagaagtgaacaactttgctttagggaattatgatttgtggtttgtgcgaaaagcctgggaatgagggcaattatttgagctaaactgttggagaatatgttggttcagttaagctgagagctaactgtggtggttgtcatttccttttctcttcttctctatgcctgtttcctttatgtattctcatctttttggttgaagtagtgtaattattgttcatttgtgcttgaaaacaggagagtttggtagcgggtcaatggttaggtttggcgatggtgggggaggatgtgctggaatatcttttttatgtttcattcctgtagaggtcgtctatactctatattcatttattattcataagtcagaattttgcatcccaaaaaatttcaacaaatatataactgtttggtttggtgaactctatattctgtggtggagactacagaatgactattatagtagatgggtaagaaaagaaaaagaagatgaaatgattactttggtatttcactattgtcacatctcaatattcatttcataaccatcattttcgaccttaattatatagtgattcttataaaaaaggataagcatgcccatttatctgacataatgatttatcagttgctggctttctttctttttctagtttatcactatgggacaaggtaatatctgatatttatatctgaaaattattcttgtgaacattcattcaggatataaacatggctctattcagccaattttgctaatgcctttacctgctacattctgatcaaccggcttttgcgtgattgtcttacttcataattatctttcagaaaatgtaactaattatgacagaaaacttcaaaaatcgccattatatttcatgactaagtaattcattattatctttttgaaatcttaagttttcattatttctgaagttcaacaattatttaattttgttttgtaagttgtagcacaaaagggtagacctggtgcagtggtgaaaaccgtctcactgagtcaccaggccgcagcttcgaagcagcctctcccatccccggggggaaggcttgccttggtttatcccttccctagacccactcatgtatgccactccagcattggattttccttttttaagctgtaagatatgtacaattgtaagaagtggaacccaagaaaaacttctttgttaaacccaagaagtggagccaattctggttaatgattatgcatattgttctgtacgatatgattgtagataatgctgctgcatatattttatttaatgtcgtcatcttgattacaggttgtgg

SEQ ID NO: 380 - DNA, 12125 bp, Zea mays
  Intron number 10 from transcript GRMZM2G028766_T01 (locus GRMZM2G028766) derived from phytozome v7.0 (chr-ID 4; pos 102077714 to 102089838)
gggattgcctaagaaatcttaagcaacagaacaaggtactatatgtagtttgaccattgagatctgcttattctttttttcgacacatttgccttggaaatctttccacttactgtcatgttttggttatttaatagagcagctgctagttgggcactatactatttcattaggtatctctacgatattaaagcaccagtttttccggtcacacggtttccactgtcattgtgctccctcacatttataaatagtaaaaaatgctaaaattatgcacaaattgggattcgaaccatggttgttggctttaaaccccacattcacaccccacctatccaacagaacacacacgtctgtgtgttttatattctatacttaagcataaatagaaatcataacaacgtacgagcactttgctatagcactctgtccaactaaacactcctatgcttgtcaagttggacagagtgctatgtacaacagattaggagcaattatttccaaactgtgtttttacaaagcactagttctgatggttcagatcactgccccttactattgggacttaaggatataaagcctggttgtagaaggtttcattttgaatcccactggacaaaactacaaggttttcagaagtggttgaagctgcatggaattctgtagtttcttcttcctgccgtttcagtccctttcagaaaaattgggcgccactgtcaagcatctacaaagttggagccaaaaaagagtagggcacatcaactctccgctagggatggcaagagaaatacttcatatattggagatcaggatatcagacggacctccttttgggttagaaaagtggttgcttgatcaacttaaaggccatattgtggccctcacatccctgcagcgatccatgattccatggctagaagtcgctctaggatcacctcgattgctgaaggagacaccaacacatccttcttccacttgcatgctagacaaaggaaacataagaattttattagcagtttgaggtctgaggaggggctggtcttgaccaagcatcaggataaataggagattgttgatgtttttaccataatctcctagggatttccagtgacagagaacataccattaatctagaagaactagaacttcaatttccctcccatgatctctctgagctgaatagtccaatcacagaggaggaagtttggaaaaccattttatcattaccatgaaacaaagccccaggccctgatgggttcactggtaaattttacaaatcatgttggcaaatcataaaagaggatatcatgacagcagtttctgcagtctggagcagaagaatggaaaattttgaacaactcaactcagcctatatctctctcctgcctaaggaggaagctactcatttgaaagaatttcgacctataagtttggtacatgttgagcccgcttttggcaggcggacggtccgcgtgtgcgcagaatcaattaggattccgagtttattgcgggatttgttagctaattctgcgggattaactcggaaaacgtcttgtaacgggtctagacctccccctttatatagatgaagggctacggtcgattgaaccccccacaatcgatcaaatcaaatcaacttctcgtttttaccttatgcattaggagtagttctagtttagccctagtttaacctccctctacctcaaatctgctctacgtcgactacatgcgtcttgggtggtctgccgacgccaagacacaccctaggatctctcctcccagacggggtccctcatgggaggcgaggtcttggtctactgcgaagaagaccctctcgccatcgcggaccgtctgagcccaggcgtggaccgttcggacgtacggagaggagacgttcctgcgccaggccgcggaccgtccggccctgtgccacgaaccgtccacgccttcgcagagagcaccgccaggtggtccgttccagtgtttggtgcccggatcggcgccaacacactttttggcgacttcgctgggaaaggtgtctatatctactaaaaaccaggccctcaaatggccggttctaaagatcacaccgatatctccccagacaatatcctgaagccggctgttgaaagtctgacggctgatgagcaacaacaatacacagacttcatgcgtcaagcgaaggagagattcttgtcacaattcacggtggatcgtcaccagaaggttgtgaaacatggagagatcgaggtcacatctcttctaccttcgcttcaaatatccaatgtaagtaaaaccgacgacatcaaatctattaaacagtatgtagatcaacaacaagatcaaatgaaacaacatattagagggttagaggaatcaattagaaaattaacgcgttcgttggagaaatctgttgctcctagttttccatcatatgaaactagtaataggatatctatgtctaatacatcgacaacaaatggggattcgcagccccaaccattatatgatatgccgatgaacacatatctagggtaaataccaccaccgccgtccctgcttggtagatcggcgcccctagacacggtcggaccgtccgactttccatgccggacagttccaaggtaattagctctaataagacgcagttcttgcatgaacatgagcttcctatcgttaccctggggcccgtacacacaggtcaaccaccactcatcaccaatcgttggacagaatttgacagagacactgaagacatcaacccgggagtcgacaatagctcccaatttagatcttcaggccaacagtacaccaccgctagcaccaacagaattaagagtcacgaaattgttatcgaagtcaggacccaataacgagagaacaaggcgacgactacagctctgcatcttggtttcttgtaaacaaattatgtctgcacggaccgactctactagactccttacagaatcttgcctcgcgacggagtttaagccgcggacattccagaacagaattatggaaggatccattagtaaacacttagaagacaacacacatccaccaaattagcagaccatggtggccgctccacccaagtcatctgggactgcccaaccgaaaagtgctgcaagggcttgaacctgtggataggaaagaggatggcagaacagcttggcagggtccggtgacccactctgacgtagggccgctggggcaggtcacattaatttcccccaacattctgttgggccgctggaaactgataggcctgtctcgccccagtgtcaggtagcagctcacttctccaccctcccgcccatttctcccaggtcgctggagttaagtgagccgctagaatcagctaacttaaactctcccatggtccagagctacagaatgcatccaaatgtttacgggacatcacttaaagtctacagtagaagaagacagcgtgattcagttggacaggttgacgcaccagaggacgaatctccttccaaacagcagttctttgagatggtgtccaagaaaattggttgtttacttcctactccaaaagctaagaagaggagaaaacctgccatcccttcgcagggactccgtcgtagtcgacgggtggctggtctaggcgctgagcacattccacagatccccagggccaagattttggtgatgaaggctatccataatacttcagacacgaatcagctcaaccgtgaggatctggagacatatcttgattcttgattagcatctctttgacacatagcacatatcaaccaaaactttatgtgttgggcatctaatcaccaaaacatttatagaaatggcccaagggcacatttccctttcaatctcccccttttggtgatttatgccaacacattaaaagcaactcaaaatgcaacaacgttttcaacaataagctaaagagtgcaaattgaagacaaattcatctcacataggatttggcatatttggatcacttttgccactacttggtttattttcacaaaacaaattctttttcctatatacatgtcaaaaacacttgttttggcaaatcaagagatctttcaagaataattttgatcaaatgccaaaaactccccctttttcccataattaaatttctccctcataagagaacaatttttgcggtaagagggttttgatcaaataccaagaatctaacactaaaattttgaaattcacaagtggttggctgatccagttgctttggccttaatttctccccctttggcattaagcaccaaaacaggagaactagttggccctttaaccccattgcctcaccaaaatgtcaaataagatcacaaggcaatgagaacacaaataagaacttgggacaacatacattgataccggaatgcagtggaagccctttctttgcccaagttcaccttttccctttcaattcaactttgagactatatcaaaagtactcaaacaaccatgttagtctcaaagggtcaagttgtagtacatcctctccctaaacatgtgcatcatgtgcatagggaattgtgaggtctggggatgagttgtacaacttgaacaccgaaagtaagcaattaaagacattaatgcttaaagtaacatgatcaaaggcataaaaacatatgtatgctatagatcaatccaagtttcgcgaatctaagacatttagctcactacgcaacctgcaaaaccttttctcatctagaagcttagtgaagatattggctagttggttctcggtgctaatatggtaaatatcgatatgtcacctttgctggtggtctctcaaaaagtgatgccagatgtctatgtgtttagtgcggctgtgttcaacaagattatccgccaagcggattgcactctcattattacataggagtgggactttgctcggattgtagccaaagtataatcggcctcagcggtggatatggcaacaaatgtttgtttcttagagctccaagacaccagggaccttcctagaagctgacaagtcctcgatgtgctcttcctatcaaccttgcacccgacatagtcagaatctgaatatccaattaagtcaaaggtagacccctttggataccagatcccgaagcaaggcgtagaaaccaaatatctaagaattcgcttaacggccacaaggtgacattccttggtgtcggattgaaatctagcacacatgcatacgcttagcatatatctggtctactagcacaaagataaagtaaagaacctatcattgacgggtatgccttttgatcaacggacttaccttctttgttgaggtccaagtgttcgtccgttcccatcggtgtctttgcggactttgcatacttcatcccaaacctcttgagcaagtcttgagtgtacttcgtttgggagatgaaggtcccttccttgagttgcttcacttggaatccaagaaagtagttcaacttgcccatcatagacatctcgaatttctgcatatcaccctgctaaactcctcacaagacttttgattagtagaaccaaatattatgtcatcgacatatatttggcatacagatagatcaccattacaagtcttagtaaagagagtaggatcaactttcccaaccttgaaagcattagaaataataaaatctctaaggcattcataccatgttattggggcttgcttaagtccatagagcgccttatagagcctatatacgtggtcgggatacttcctccttgattggtccattgaggaaggcactcttcacgtccatttgaaacaacttaaacgagtgttgagcagcataggccaataatatgcgaattgattcatgcctagctataggagcaagtctcctcaaaatccaaacctgcgacttgggcataaccttttgccacaagtcgagccttgttccttgtcaccacaccgtgttcatcttgcttgttgcggaacaccacttggttcccacaacgttttgtttcggacgtggcaccaggctccacacttcatttctcttgaagttgttgagctcttcctgcatggccaacacccaatccggatcctgcaaggcttcttctaccctgaaaggctcaatagaagaaacaaacgagtaatgctcacagaaattagctaagcgtgagggagtagttactccattgctgatatcactcagaatctaatccactggatgattcttttgaattgtcgcccggacttgagttggatgagcttgttgtgcttcttcctccttatcatgttctccatgtgctcccccttgattcaagccttcatcttgaggtacctgttcctcatcttgagttgggggatgcaccaacgtagaggaagaaggttgatcttgttcttcttgttcctgcggtcgcacatcacctattgccattgttcttatggcgaccgttggaacttcatcctcatctacatcatcaagatcaacttgctctcttgtagagccattagtctcatcaaatacaacgtcgctagagacttcaactaaacctgatgatttgttgaagaccctatacgcctttgtatttgaatcataacctagtaaaaacccttctacatatttgggagcaaacttcgaatgtctacctttctttaccaagatgtagcatttgctcccaaatatacggaattaagaaacattgggcttgttaccagttaggagttcgtatgatgttttcttgaggaggcgatggagatagagccggtttatgccatgactgtaagtagagggactctaactctcatcaagaggatgacactatgagttgggacaatttttctgtttatttgctcaaacactacacaatgtcatacccatctaagggttggagacacatatttatagccctagaggctgcactaccacactaccacacctcacacacactacacaacaggattgtcctctagatgctaaatagactacagaggacagtcaaaagcaactgctgtcctctagatgctaaagagactacagaggacagtcaaaagcgactgttgtcctctagatgctaaagagactatagaggacagtcaaaaagcgactgctgtcctctagatgctaaagagactataaaggacagtcaaaaagcgactgctgtcctctagatgctcaagattattccatcaatggcaggctgtattcatagcttccgaccaaaaccgctcaggcgttttgtactctccaagcattgtgctcgccgtatcaattagcgtcctgttcttactctctactacatcattttgctgtggtgtgtaggtagcggagaactcatgcttgatgccttcctcctcaagatattcttctacttgaaggttcttgaactcagatccgttatcgctccttattttcttcaccttgagcttaaattcattttgagctctccttaggaagtacttcaaagtttagcatcgggttttagatttatcctgcaaaaaggacacccaagtgaagcgggaaaaatcatcaacaattataagaccatacttacttccccgatgctaagataagcaacgggcccgaagagatccatatgtaggagttccattggtcttgatgtctgaaaggatcacgatgcccaagaggaggggggtgaattgggcttttctaaaaatcaacaataattaaaccctaagcaagagcccaacttcaccccaacaactagcaataagagaatactactagaaatacaacaatgctaagacaatacttcaactacttgctaaacaaatgcacaagataaaatatttgaattaagtgcggaatgtaaagcaaagtttagaagactcctccaatttttcccgaggtatcgaagagtcggcactctcccctagtcctcgttggagcacacgcgcaagggtatcgctcccccttggtcctcgcaagaaccaaatgctcactatgagatgatcctttgccactccgtcgcggtggatctctcacgaccgcttacaatcacgagccgggtcaccaacaagtcctccaaggtgatcaccgagctcccaacgccaccaagccgtataggtgatgccgatcaccaagagtaacaagccgtagactttcacttgaccaagagaagcctaatgcatgtggtgtgtgctctaggtggctctcgctagcactaatgaggtccaaatgcgggattatgattttctaatcacctcactaagctttgtggtgcttgcaatgttctagcaatgtgtaggagtaaatgtgtgcaacaagacaatcaatatggtgggtggagggggtataaatcgtcctcacccaccaactagccgttaccaaagcctggctgcgcatgggcgcaccgaacagttccggtgcgccaccggtgcgccaacggtaacctccaacggctagttctgacagctagctgtcaagcgatggtacactggacagtccagtgtgccggctataattcaatttttcaaactatgcgctctcgggtttctgcgcagggaataggtcttccccgggccagggtggccccactgacagagggcgcaccggacagtccggtgccccttggccagaaaccctaggttctgttttcttctgattttcaaatcggttttcgttctaactcgtgagtatgttttaaagtgacacctagcactatatgtgagtgtgaatatgcaccaacactacactagaactctcttggtcaaactactcatcgacaaccactctttatagtacggctaaagcaaaataaaagtcctaactctataccaagtgtccgcaactccttgacactcggaatacgaagaccttcatcttttgttttgtcgttatagccgtcgcttcaagttcttatctcagggattgttttcgccgttgtagtacatcttcatgtaatgcgacctaacttaccatttgtctctgcaaaacacacgttagtcacatataatattacgttgtcattaatcactaaaaccaaccagaggcctagatgctttcaatctccccctttttagtgattgataacaaccctacaagagtgtgagagtagtttgtttgaaatttctgtcaatagagaagatggttagttatactcaataatctttgacagaaagtgcgtgtaaaataataataagaatgagcgcatacacaacgtaagtttcttgttcatataagaacgaaatgaaatcgatgagcaagaactagaagactggtgataacatattaggtgaaaacacaatacacacacagtcaacataagcatcaagagcacataatagagtttgtgagtaaaattgtcatacaaaagtggagctagtacagagagtatcaagcacatatattacatcaaaatacacaagacaatctcaactaactctctaactctccctagctctcacaactctcatatctctccccctttggcgtcaaacaccaaaagggtaacccaaacctacaacccagaagaggaggcgggggcgcatccggtcgcggtcgtggcagaagagcgaacgccagctggggtcagagtcagtctcggatccaggacctgccgtagaagctggagctggtactgactcggactgaggctgcgctgcaggagctaccggagctaaagtggtcacagacacttccacaatagcagtaacaacaggcgctggtggcactggcggctgagcactgacggagctgataaccggcgacgagaaatccagggtgaccgactggagcggagagggagaaggaccgaacgaaggtagtgggggtcctgcctgaatggctgacacaatcactgcctgaagagttggagggggtgcagactgaacaggaggaagctgaacaccggtatgctgaagaatgtgagtcatgaaggcgcccggtgcttagcactgtctgccaaaagctgctgctgcagagtgtcctgcctgtcctgaatcgtctgaaacatagagagcatcctctcggacatctgctgctggatcgctgcctgacgagcctactcggctgcctgtcgagcctgctcggatgctataagagtctgctgctgcgaaagagactgaaggatcgcagccagagcagggtcaacagcaggaggggcaacactggaactctcggcctcatgatcatgtgagcgaggaggcacatgaggtggtggcgggatcccaaaatcatcatcatcatcaggaacgactgtgccctgagtctcgaactgatggaatgccgcatcctcagcctgagtgtctggcactggatctggtactggcactgggtcctcaggggctggacgataggatccaaattggaggcgtgaggcctcgagggtgccctggaactgaggtggccggatcagctgcgcgaagatgtagcagagatagtgcgcatatggcagctgtcggcgagcacgaagaccatccaataccgtgtcctcgatctcacagataaggaaatcaaccacatcaaactttgaatgtgagatcaaggcaccaaggctggagtgaaatctgctggagagcgtcgcgacccatctgtgaaaggcggtcggaacaaggccgcgacgtgagctgtggctggagcgactccgccgtgagggcgtcgaggaggatcagaagtaccatagcacaggctgtgaaggcgagtcgacaacttgggaaatccaaacagctggcgaatctggctggcatgaatagtgaatcctctcgctcaaaacggaacctcatccactggtgagggcgtcaacttcaaaaacccgaacttatttcgggtaccaccctcgggtacgcgaacccgaactgctcaacccagtacagcagtacgctagtacccacacatccccaccgtcctacgggccatggcccatgatgccagccatgactccgagcccgaaggcaagcaagtagcaacaactcagcgtctcagctaaaccctatccgacctatctggcattcctggtttcgacttccgcttccacccaccggatgccgcccggtgcctccatctctcccggagaccctgatgccctggcctccgcgagctgcgactgccggagctggactgtgtgcacgtcgacgcgctgttacctgccggcctgccctagcccccatactcgaccatcttcgttccgcaagctcactgtagacccatctgagtttgcttatttcattgtttttatgtgttcagggtagtattcaatggactggttttggcgttgcttgtacgctctacttgtatggatgtatgtagaccgcaatgggctagccgctagtggctgttgcctgttggctggtgcgcctaagccagggggcatcaaacagaacatttcaggtacttggggaaaatccgatacctgaacctgaattttcgggtaacctaaaacccggtatgattttaggtatcaattctcaaaaccaaaaatttatattacctgaattacccgacccaaaattttcgggtatctcgaatgaccatgactttggttaggacgctggctaatagatggaggtggctctaactactagaaaaaaacatagcactagaatattaaatcgaacctctaggatcgatggggctgtatattatataagtaggagtcctctgtcacaagaggaatcctggattacaacatctcaaccgacttcaactctaaacgatctgctctatttgtctctaacctctaataagagtcggattctaatctagctcaagaggatcctggacaactaagaccatatcctatatatagcatattctaacacattgtgcctttaactttaagtaggcaatcagatcctaaacctgcactagatgacgaaattagtctttccatacatggtgcttataagaaaaaaatataacaaaactataggtgtcatgctgcacttgacctagtactgctaatttagacagtaaatatggactgcgcagtttcttaaatacaaaagaggactttagctgtaaattgtgaagtgagttaggcatcccagacttggaattgtttaattatagtcctgccctctttgttttgatgcttaatatgaatttcctagcataacatcttgaaaagctgtaggagccaatttcatgatgttcagccattgacgttgagatttttgtaaccacatgcttattttttgcgacagg

SEQ ID NO: 381 - DNA, 2012 bp, Zea mays
  Intron number 1 from transcript GRMZM2G070432_T02 (locus G RMZM2G070432) derived from phytozome v7.0 (chr-ID 9; pos 8 759204 to 8761215)
agatctcacacgggagctcagccacgacacctcaggtaaatctccagtccgtctctttgttccgctccatgctccatccgaggagatcctgctttcgtaggttcttaacaacccgtgcaagatttgacagaacgcaacctcgggcttgaaaccctagctgcacatagctgtgcctcacgtcctcacctcacccactgcacggcaggaatagacgtgaaggtcgccaagaattattggaggtacatcgacgcccgacagctgcagtagggatggtggtcgccgtgccgacagtggtggggatggcccttgcggcgaccatttctattgttgcgttgtgagaagaagataacttgttttttaagattcagtgttttattatgttttgtgtaattgtatatcgtattcatgtccaataataaaaaatactataactatgatggaatcatctcaaccctgttagtatggtactttggtttgtagttatagggtcaaagtgttacaaagttgcattgtttttggcattagaaaatatgatggatcaacatggacattaggtgccaaaggtcatcttttgtttggattattcaaaacaaatgcccatcaattccaataaacgataatgttagaacagtttgtgcaataattaaataaaaaaatgtatcaggtcctacacttcttggaacaagaaatattttacgtccagtttgggagtcttaagttatagttttaatgaactgcaaaaagcttaacttatcctacgttattacctttttggttggtttcttacttggtttgctccccaacaattaagcagcataatctgttgggacttgattttctgtacttatgcaggttgggattagtatttcataagttgtgtaatatgtgtggtaatgtttcacctgtgtttctacacttttaatcgaatcggatttattccatcgattaggattggtccgcgtcgctgtgccgttaactagtgatatggagatgtagtcatctctggttgggaataggagccgttagtgttatcctttgatggttgacccactacggggatgaaatttcctgctagcgtgaaggagatgtgtgagtgccggttgaagcgagacttcgctattgccagtcggagttactacgattggtctttgctttatagagtaacagtttttgtgtggtaaatcggatctgtctttcaagagatcagaaaaaaaaacgacattcggtcagagtagatttcgcccaacgaatacaagtagctgaatctgtagctttttttctttgcaaatgtggaaactatttggcatgttgagctattttgtagtcccatgagtttgccattgaacattgaagggtactcattatttaaccttgaatgatggtcacgatgtttgtaccccttgaactatagtggactaccacccaagtgtttttttgaagtttgaacagagggttatccaatttccattgttccaagataacggaaataagatacgaaacaggtaatgttgatgttttctagggggctgtaggtttgatttgaccccacgatggatgtaggacattgtcttttgttattgatttttttgtaatgtgtaggattgaaattgaaaagttatatttcctatttattgataaaaccattttgttttcaatatgaagtttcctttggtttggcaattcattgtcaaatagatacccacttgttctgcaattaccaaacatgttctctcttttttaactctaaacctggaaaatcttctgtggtatcataccctactttattttagggtgtcattgtattctcctaaattgatactaagcttttgatagatttgagtgatatatcagcaacagttcatgagtatgtgcctgaaactatttggaatttccttgctcttaagtcctattgcacacttgttgctgttttattgtgtttgtttgttgaatatggttgataaaaaacttatgatacaggttgtggaggtttctacctccaagactggtaagca

SEQ ID NO: 382 - DNA, 675 bp, Zea mays
  Intron number 3 from transcript GRMZM2G402211_T02 (locus G RMZM2G402211) derived from phytozome v7.0 (chr-ID 8; pos 2 0538601 to 20539275 reverse strand)
aacagacgtttggtatgctttctttggactctgttgtacacaagcaaacaatagatctttatcactgtaagttcataatgttctcagccatttttgcagaaggaggacacttacaaaggaaagtgtcctatgaaatctgtcacttcttgggctaccaagctaggggagagctgcctttaaagtttgattgcgattatgcctacgcaagtccctcaccagttcatttaataaagaatattgattgttgttggtttaacatgtgggttgttggtctcaggtttttgggacatgtgtgctaccacatcatagctgcccagattgaaacggatacatggctacagtgacaaatcttaagaatccagtgaacaaagtggcgatgtggtgcgactcctatttcggtaagatttgtgttgatacgcctaatagttaaggaaaagtaagaatgtagcgtctaacccatgtctatccctgcagtctatgatgactgtgaagcgatgatcaagtgattgttttatgtctgttttatatgcaaaaaatataatcaagttttactgacgatgctaccaaaagttttttcttatgaatttgaattattgaatctaatttctgatccaccttgtgtctttactctaaatgatagtattactactttattcgcctgatcggacgcaaggc

SEQ ID NO: 383 - DNA, 2426 bp, Zea mays
  Intron number 2 from transcript GRMZM2G019597_T02 (locus G RMZM2G019597) derived from phytozome v7.0 (chr-ID 4; pos 2 38955726 to 238958151 reverse strand)
ccgagaagagcgacaccctggaaattcacagcaaagtcagttcgtgcccgtttcaagaataattcgattgcatttctaattgtttgggtagttttcctcccattacatatctccttgtgcttctgaaagtgcgtattgtagcatttttttcattgattttgccaaactcttaagtgtggctgtgccgctgtgggaccattttcctcctgccaatcatgcttccagcttcaactgaagaggggtagcattctgtgcattttatttacttgacgattcatttttcagttactagtttgaactgaaaacattgtattgttccccccctattccctatttaacataagactgtgttagaattttacatgctaaacattctttattatttagaaacataatacagtgttgtaattttagatgccaaacatccttaactttgtggtttcacttcaccttaatccatgttttgaccaaaacatattgtttgcagtcaatgggtggttcactaagatgagacatttgttgcgatacaactgcatgatgttttgagtcatttattcacactgttattaaagtgtcatttaaacgacgattaagcgtcgtttaagcgctagaacgcgatttgaatccaaaacgtccgaacgttttaaaaaatagtgttgaacgtctgttttggatgtttaagcatcgtgtaaacgtcctaaacgcgcgttttagacgttttagggttctacggacgttctatgtgttagtgggccttaatgggcctttccaggcttcaagcaagcctcccgccagacacgttccagattccaggcttcaagcctcccgctagccagccgccagcctgctaccgccgtcggtcgtcctcagccgcccgccaggtacgccgccggcccctctcctccctcctccggtcctccctcttccctccacccacagggaagtacgccgccgccagtgtggctgcccagtgctccagccgcacagtttttggcaagtgctccagccgcacagttcttccctccacccacaggccacacagcccattgattcaactcctgttgttcactgaccgcaaagatattcttatcaactgattggaatttccgcagcacctattgctccatttcatttggtataaagatttaaaccctttttggggggcatttagctgaagtgtggcattgtctgacagtgaatttcaatatttgaaagtctatgtcaagtctgaaaagacgtttcaacgttcgtttaaacgtttaaacgttgaaaagttggttcataacgttttaccgttttaataaccttgtttattcaacaactgtaaacctgaagcggtgatatgatcatatgagtctagttcagtaccagacttggtgttgcgtgcattgtattgggtacctgaattttttaccataccaggtctgaactaacatgttatcgttgtgtcgcttctgatgcatgatatttccctccatttgttaactgtgcatatcctttagtattttttgcagtgtctgatctcccaagggaactccttatttttgttcaaaaaatcttgatctatattgtcttcatgcaatgacttttgtctctgttcatcttatcagtttagcttttgttcagtaattattgacaggctggaaattctgcctagatatatgtatgcacatgagtaatttatccttgttgaacgatgagatgaaggataggattgtgttctgacagatgtattcaagtatcatctggacctgcacgctattcttggctagaattcagccaccaataggctttggtcaatggttgtgtttcagcctaaactggtggggcgggttggggtgggttcgttgattatatttttaggtgggtgcgttggcaaaagatgtttgcaagcgatgagttggggtgagccatgggtttgaccccattatcagggctatgtagcacagaagatagtgctgctagaaaatcttgttggcaatccctgcaaagttgagtggccacacattctttgatggtatccatgggtttaccaaccagaaatttaccaatggtatatgcatcttttactgaaatggtttgttaacatacagcaattcgataaggttcttgagccatgtcttttgcctgagctgtatctgaaaagaaaagacttgccactagaaaaatgtctattgttttaatacaaaatcttatatagtgaccaaagtggtgtctaactgtgaagacatgtatgatctgttgattatcaatatttgtttggtattttctactcaaaaaaagctgttcaggatgttcctttaacatttaatgtgatattaatagctgtgtccgcttccgctattacatatatttgtatttctatcctttaattgcttagccccctcttaacttcgtttcatgatccaccattgtttgttaggctg

SEQ ID NO: 384 - DNA, 2377 bp, Zea mays
  Intron number 1 from transcript GRMZM2G061088_T01 (locus G RMZM2G061088) derived from phytozome v7.0 (chr-ID 8; pos 3 7808139 to 37810515 reverse strand)
actgcttcgtcagggtacgtaaatagatatattgacagtaaacatgcttgtcggcagatcactacacatgtacagtgtgcatgtattatagtctctgcttgatttatttgtcacgattttcatctctacacatcaaacgaatccgttcgtgacatagatggacatatctcatatgctattcttcatcctataaatgtttgaatgaaaatattaagctagtatgagacttggtaacattccaaattcgaattttattttatttttctaactatggttattctatatattttatattaaaatcacagatttttgtttattacaattttcataggcacgatctacaaatttcagccatgaggatacatgcaaatccctttaaacaaaactacaaatcgaacaaaacatgaattaaattgacacaaagacaatttaataatttataattatttctataactaagcaagcacaaaaatcaagagattttcacataaaatcaaataaacaattgtacaaaaacaataaatttatattagttgaaggtagtactacgatagtattgcacaaaattatcatgagatccagccatataaaaacataggagaagtggttagttatagcatggcccacaggaacagtcgcagattgaccaatatattgtactataagttacttgccacctaacaagagataatcctacaaatatatgattttcaacccaatgcctgttgctatacttgtttagccttatgtgatgtggaaattgcaaaacattgaactacactccttccgttctcgaatatttgcagttcgctagttagtttatctttagttaaactaaaacgcgatgaataaaaaagaactgagcgtatactttcattggctggatgtgtagcatgcatctagctgtagcaggaacgttatactttccacatctgaccggacgccgctctcgtgcacgtttagtacttccctccagcctagtttatttgtcgtccagcgggatatatagctatctatcgacatgcttatagtgccagactagttatttgcattcattaattttttgaatagcggtgcaaaaggttcatataattaaactccaataatagtaacacatatttctctagctatctcttgtctccacattgtgagccacagattacgtagaagttccaccaacgacaaaacaaagttaattgaatcgagatcagcgtacgcgcgtaacaaaaagaggttgtttgtctctgtcataaaaaaactaagctttgcggaacacgtggcactggtcatgagttgatcagctagcgttgtcaaacttggttctgtttgaataatagatcgttcaacacagtaacgaaagctcagtctggatcctgggtagaatatgctccctcaactcatggttttttttcttcaaggattatataatagcaacccatgacaatctttataacgttatcatatcacatgtaactaattaagagtctggtcatataatgaatatctcatgatataaactatatatttaataattgattaataattggttcacctctttgtctcacaaggtatcttggagttcgtaagcactccacttttagctagctattagcaagcagatggcttccctttgtcgtctctctttatttctctttcttctgcatcaccataaattttacgtgatatctcttaccgtcggcctacgtcaccctactatacttgctctaaggtgtactcctaacggtgaatctaaagtgaaacaaatgagggtgcatatgtcttgaatgtgtatagtaatattttataggtgatgcatatacggtgaaacactagtttatttcactagttttgtaatttttttgggtgcatatgtcactacctagcttcgcctctgtgtactcaatccgttttaatttataaaccgttttgctttttggacactaatttaacagagtcgtcttattaaaaaatataattattagttattattactgtgacaccatttagtatataatatactttaagtatggctaaaaataaattaatttttttaaaaaataagtattttgaataatacgagctgttcaaaatttggtgtcaaaaaatcaaatgaattataaattagaatggatgtagtagtatgtaagagtactatgattggtactatcaacatttatttacatgttattgacgagctcgaataatagtccagatgatggttgagtgtgtgaataattaatgtcacggtgccacctaccatgatgcatgcttgacattaacataatgccacgtttactagtccaatcaatcaatggtgaaagctaaacttttgtgtggtcggctcgactcgaccgatcgattcacacgcagggttgcg

SEQ ID NO: 385 - DNA, 6137 bp, Zea mays
  Intron number 2 from transcript GRMZM2G132591_T04 (locus G RMZM2G132591) derived from phytozome v7.0 (chr-ID 4; pos 8 7227120 to 87233256)
cgacttgtttcctctgcctgcaaagatatccgtaggtgagatactacaaagaaaagaaaaaaaacaaactatcaaggggaaatgcaaaattaattgaaaatattattgttgatgcaaaattaattgaaaatatttatcgttgattctttggcggcgggaaaagcacgccgtaggcgagtactcctaaaaaacaataaccaaacctgtttctggctgaagaaatatgttcagcactcttaaaaaacgataacagccaaataaacttgtttctagcttataaacattgggtgagtactcttataaaacaatgacaacaaaacttctttctatctgtataaacatttgttgttggaaagtgtacttttttcaaaaaggaaaaaatgttcaaaattacatcatgtactgtgtttttggaaccatataagaaattcgtttaaattttaaccataggggcatgggggggggggggggggagggggggaggcgattaataaaagttgtctcccacgtttatttattgtttcgctccatttgagataacaaactgatctattcaccatgtttttaaataaggaccaatagaagctgtgtttggcaaaccacactttttgttcgctgtgtttggcaaaagaggtagaagctgtttcttgcctcttatttacatggctttagccaagccacaacaaaagccacgctggtttcgagccatacaaagaggccctatatctcatagatttttgcttataaccatggggataagcctttatctcctatggttctaagggggtgtttggtttctagggattaatgtttagtccctacattttattccattttagttctaaaattgctaaatatagaaactaaaactttattttagtttctatatttagcaatttatagacaaaaaaggaataaaatgaagagactaaacattagtccctacaaaccaaacaccccctaaacagcaagcctcatcaatctgaaagggttttggtttgaaccatccaagataacataaatttaaacgtttctaaaaaatccatgaaagatgagatgatatgggagttcttcaacagtgatactgcatctatcactctgtttattttactatctagatctaaccattgatttgagcactacaccccaccccgcccctcccttgacttagggtgcgtttggttggggagccaactagaacggaactattctgttctaatttctaagaatagagccgctccattctctgtttggtaggtagaatagaatcattctctgttttgtttggttggagagcacatcagagcggagtcgttctgttccgtgtttggttggagaatacagaacgacatgatccgaatgcaaaactgcacacaactcatgcaaacgtctcattcaaaccaaacaaaactgcaaaccgctcgtgcaaacctataatgcatggaccaaagttcatcaccacgaaattttcataatgcatgagttcatatcaccatgatacataactatagttcaaccatacgaataaaagatacatgtccaaataaaagatacatatttcatcaccagtgtaaccatatttcatccaatcaccatgatacatgagttcataacgccatgacaaaacatagttcatataaccataattctaatcatgacgcacaaactagaagttctcactaacgaaactcgaaaaccatgatagcttccaatcgaatggtagattcacgaaagcatgagcatcattaggatgtctaaccaagtgctgatagtactaagacttgtggttaagctgaaaacctgggagactgtccactgcttcaaacaaaccatctggtaaagcactgcttgctttctcgattgcctttgtagcctttcgctgccatgatcaaatgcttcaaccaagcaatcagtctttcttctactatcatcaatagtcttgtctctcttagctggcctagctaaagaagatatatcatcattgacaacacttttatcaatcccatggttcatcccctcactttctgcattgccatcagccccattgttcaccccatcaatcccaagtggttcattagagctctttgcatactgaccagtagcaaaactattgccaaatattgtagctagaaaaccatagtatggaagaggcttgttcaaatattcatcatcagccttgtttttttggatcctaacagtgagtgcaacacttattaaaaataaaaggatataagttctttctatgtttaagacaatactataataaaagcatataaagaacatataaactatttagactatgtacacactaaaatatcaaatacaaagggatagtaaacctcataccgccatatgttctttgtagtgctcatgatctagagaaacaatgaattcattttcatcccaaagtgcagcactcaaattcttaagatacttgatcctagtgtacttcttcttccatgtcttcaagtgattagcaacttgatcacatgtcctcatgagcttaaaatggtcattgagagccttagcacaagcattgagataaactttcttgaacccagtggaggtcttagtgccttcagcaacaatgttgctaagaatggtgagcacaaatgtggattgagttggtgtccattgacatagtccaccaccaacttttgcactgcttacctccttgtccatgacctacacatccatacaaataaaagatacatgtccatacaaaataaaagatacattccaacttttagcaacttacatgtccatacgaataaaatgttcatgtccatacaaataaaagatacatgtccatacaaataaatgctacatgtccatacaaatgatagagacattggaaaatacatagcaacaaatggtgtttgtatgatagtcttcccacatagcattggcaagttcctgcctgaagttaaccttaataccatgctctattgcttgtccatgcgaagatatttgatgattaatggtaggcaattcctcattctcaggaatgataaagtcatcacctccatcttgtataacccagttgtgaataatacaacaagcaaccacaatttctacttgtgtagagaaggggaagaacattgtagcatcatcaagaattttaaatcttcttttcaatgaaccaaatgcccgctctactgaaactcttagagatgaatgcctatgattgaataattctttctcattttgcacaggattagttccccacttgttcaagtggtatcatacaccacgaaaaggggcataaatccaggtttggctccatatccagcatcgactaggtagaacttgcctaacatacaagggatatgtatgtgagctacactaggtattatatttcatgactaaagtaatgagctacacaagttgtatttaccttcaggcacacgaagaccattttctctttctaaagcatcacgtaagactagtgcatcatgagctatcccctcccaaccggccaagacaaatgtgaatcgaagattaaaatctactgctgccatgacattttgagtagcataactctttctaccacgaaaggaagcctccatgtgtttaggaacagatgctcgcacatgtgtgccatctattgcaccaatacaatcctattattcaattagaatgcaaaaaaatataagcaattataatctgaattccacccttaaaatgaagggaagatacaatagcctcacaccttaaagtaaggatcccatcttgggtttcctgcaattttagctggagttgatgtagatggtggcctaataaactccttttgtagctctccaatagcgtggagtactttgttgaaatagcgactaacagtttcaccagacctatcaaaattggtgccaactaacctattcctaacattgtgacccacaatgtttaaaaacattgcaacctgctgctcaacacacaaatgtatggtgtcttttaaaaggccacgatccctaaatagtttacaaaattggaagaaggatgctctattgagtctaagcatactaacacatgttacatcatttttccatatcttattattaagatattcaaatctcattctatctctcccctcaattggagcatatgtaattgtttctacagattcacgatgctttctttttctagattgaataaccatggccatcatggaaagcaacatatgcgctgcagctgtgtaaactaaaatttgttacttcttatccatctatattatacacaacaaggttaaagttaatagttgctaacaaatcacataatcacacaaggcacatagtcaatagttgcaacaatattataccttctatcggcctatgttgcatgtgcttctcttctcaaagtgttgctgcaataataggacagagcctcggctggccctataggcaataatagaccggagcaagcaagcaatcagtcagagctcagtccaatgtgcagagtaagcaactcggtaataatagacatgcaccatgataataatcggttgcacccaccggtagagcaagcaagttgctacctaatcctaataatcagctggagccaccgtacctaatgacaccctgcagcaaaggcaagcatgcacgcagcagcaaccagcaggacgtgtaccatcactgagacctgctacgcgttgccgagtatcattgagccagcagccagcagccagcaggatagacgccgctggactgggagacgcggttggccagatccagcgacgaacgggcacaaagacgtacacaggacctagctactgggtcttttctgccatttccccctcctattcaaatccatcttcagatccatcactgtgaagctccctgcacccagcagatctggtgaagggttgctgacgacgtggacgaagggggtggtggtagaagtagaaacagcagaggaggaaaggccggtggggaaagagaagagggggctggaaggagaagaagtggtggcagattcacctaatttgacagatgacggcggacgggcggagctcctcacggcggcggctcaaagtgcactgctcgcgtgagagagaacgaaggagtagagagaaccagagcactcaggtccggtcgatttggccgagcagactcattctggatatcagttgtataatgcaatagagccactcccagagccgctccgctctttcttactgcgtaaccaaacactagacaataggaatggagccactccattctctaccgctcccaaaccaaacacacccttagtatctcattgtgttcaatccatccattcgactggcaatggacaattatgaaaacttcgcacttgcatcagttcacttaaccatttctaatgttttatgaactatcaataaattaggataataagtttatttgtactttgtataggtggcataggtggacttttcttaatagcactaatggtattcgtagttcttattcgtaacgagaaaaggaagatggcagaatttttcaaaaagaatggaggccctacattagagaaagcaaaaataataaagatttacagaaaggaggagctgaccccaatcttgacacgaagtaattttattggacgtggtgcttttggtgaagtttacaagggcctgcttgacaatcagttagttgcagtaaagaagccaattgatggcaatgtagcacagaatgatcaatttgccaatgaagtcattattcaatcacaagtgatccacaaaaacattgttaagctaataggttgttgcctagaagttgataaaccaatgcttgtgtatgagtatctctccaaagggagcctggatgatattcttcacggaagcagtggcgttctattaactttggagcaacgtttaaatattgctgcagaatcagcggaaggtctagcttatatgcattcgaaaacaggaaaaataatattgcatggtgatgttaaaccggccaatatacttttgaacgattgcttcacaccaaagatctctgactttggcatatcaaggctaattgttatagataaagaacaaacagatcatatcattggtgacaggacttatatggatccagtatatctacgagatggcatactaactgataaaagtgatgtctacagttttggggttgtgctcttggagctcataagcagga

SEQ ID NO: 386 - DNA, 49645 bp, Zea mays
  Intron number 4 from transcript GRMZM2G114904_T01 (locus G RMZM2G114904) derived from phytozome v7.0 (chr-ID 1; pos 1 93877976 to 193927620 reverse strand)
aatacctctgcacaagaggaagtgatcagaaagttgtgagttgcttatttagctttttagtttcttattttgcttatgttgcactggattgttttgttggtctacaacaactgaaatctgtagaaacacaatacaacttattattgatgtggttaacttttttctcaaatacataggagagttgtgtccttattttttctcaaacatacatgagagctatgtatccttatattgtagatagaaagaaaggggatagaaacccatataagtcaacccctatgcctcctatgaaagaagagaaggttgcaatgaaaaaataatccgacctttctagtcacttacactagcatctgcccacaaccaaaaaatagctcctgaagtttttgagcagtgagcactaatgaagcaccaaaactcaattcctctttgaaggaatgttgtgtcgttgctagggaaggagttgcactgtcaaaaactcctccttccctgtgaagccacaaggtccattcccctaggatcaccatactgttcaaatcttttgtttgcttttctcctaactagtgaagctcttgttccttctaggtacaatgtgcttaaaaaagagagaccagcaaatggtaccaaaaatgtctagcaaaacccaattagtgaggatgacgtggtttactgaatagtaataagaaataaaaatgtaaatggattggctagtggttacttgaattgggcatggtttgaagatactatcggcatattcatatttattatccatatatgagttctcgccttgatgagcgtaactgactaatgtggcccttgaagagggaatgcttgtgattgatgtatgataatttatttctgttggtgtaattatgaacaagtgtaacggtttacttgtaaagtggtgaagtataatgtgagtgagaaggtaacacataccaaaaaactacatggtatcagagctagggtttaccaccgccgcacgcagcccgcgtcgctcccgatgctcgcaaccacgtagctcacgtcgccgcgtcgctgctcccgacacgtgtgcgccgctgccgctcccgacacacgctcagccggcctcgccgcagcgcccccaccacctccacgcatcgccactctggcgagctgctgctgacttgcgtcaccgaagtctgaccaccacgtcctgtctacacggaggctgaaacacgaggaaaggaggagaggaggacgagatctacgagtggagtagagagctcgagaggctgcggtctaagtagagagtttgagaggctgcgagaaaggagtcgagtgtgtgactctgtgcttctgtgaaaatgagtacagaggaggctgcaaagaagacagaaattgaaggtagtggttcaagaggggttacaaagagtgagatgatgagtgaaatgagaagtatgatccaggagctcatggggttagggttgattggtgctaaggccaatacaagtagatctgagttgaagttggaacttgtgcctaatgatgtgaagttagaaggtagtaataattatctaagctggtccagaagagtgcgtgtactcttaggaggcaagggagtggagcattatttggaggagacatgtgttgagccgattgataagctcggcgtagaatggagaatcttgcatgcgacaaactctgtgatagttgcatggttattggcatccatgtctcccactgttagcaagagggtggaagccatgcatactgcatcacaaatctggaagaccttgagtaatatatatatactctcgaaaggggaatgtgatggtgatgatggaaattcagagcaaggcagatgcagtaaatcagatggggagaccagtggaacaatatgctagtgagctccaacacttatggggagagctggatcattatgctcctctccaaatggtttgcaaacatgatgcacaaatggttcataagtgggtagaggataggagtgacccactttctaaagaatatcgattctgagtttgagagcaggagagcgaccttttgtcaccaggagagtcttcctaccatggatgaggctatgtctgccatgatagatgaagagagcagactttgagtgatgagtaatggtaatcatgtgaagccagcatatgttgcaattgaggatagagaatgctataattgtggggaaaggggacacctgagttacaattgtcccaaccctagaggaaatggtggcaggggaggatctcgtggaggacgagggggtactcgtggtcgtgggagctatggaagaggtcacggaggtcgtggtggctctagggccaacatagctaccactgaagagagtctccctgttactctgtctgggggacaagctaagcaatgggagcagtggcagaagggcaagtcttccgagtgcctcacttcacctaatgggcaagccaccaactccttcgataactttgccaactacgcccacatgggtgaaggtactcgggcacaagtttttgcatcctcatgtaggtatcacatagtgtcggcgtttggaccccagggggtccctggaccgacgagtaaattgtcgccgcgtgtcccagcccagatgggtcggcgagacggagcatgaaggggggaaggagacaggcaaaaggggaaacccgcggccttcgtgttgccctgtgcccaggtcgggtgcgcttgcagtagggggttacaagcgtccacgtgggagagagcgagagacttacgcgtcggcccgttctcccgcgcggccaaccttctcgtagagagccctggaccttccttttataggcgtaaggagagggtccaggtgtacaatggggggtgtagcagtgtgctaacgtgtctagcagagaggagctagagccctaagtacatgttgtcgtggcagccggagaggttttggcaccttgttcatgtgatgtcgtgaccgtcggaggagcgctggagccttgcagaaggacagctgtcggggctgtcgagtccttgctgacgtctccttgcttccgtaaggggctgagagccgccatcgtcatggagcacatggggcgccatcattatttgtttaccggggcgagccagatgggacgccggtcttgttccctgtagcctgagctagctaggggtagggtaatgatggcccccctgtgacgtggtcggtccgagccctgggtcggccgaggcggaggctcctccgaggtcgaggtcgagtctgtcttccgaggtcgaggtcgagtccgagccccgggtcgggcgaggcggggaccgtcgtccgaggccaaggctgagtccgagccctggggtcgggcgaggcgaagttcgtcgtcttccggagccgaggctgagcccgagccctagggtcgggcgaggcggagttcatcgtcttccggagccgaggctgaatccgagccctggggtcgggcgaggcgaagtccatcttccgaggccgagacgggggccgagccctgaggtcgggcgaggcggagcttcctatggcgcctgaggccggacttggctgctgtcagcctcactctgtcgagtggcacagcagtcggagtgacacaggcggcactgttttcttgtcaggtcggtcagtggagcggcgaagtgactgtggtcacttcggctctgtcgactgaagagcgctcgtcaggataaggtgtcaggcgatccttgcattaaatgctcctgcgatacggtcggtcggcgtggcgatctggtcaaggttgcttctcggcgaagactgggcctcgggcgagccaaaggtgtgtctgttgcttgagggggccctcgggcgagacgtgaatcctccggggtcggctgcccttgcccgaggctgggctcgggcgaggcgagatcgtgtcccttgagtggactgagccttgaccttaatcgcacccatcaggcctttgcagctttgtgctgatgggggttaccagctgagattaggagtcttgggagtacccctaattatggtccccgacagtagcccccgagcctcgaagggagtgttgatactcgcttggaggcttttgtcgcacttttttgcaaggggaccagcctttctcggttgcgttttgttccagtgggtgcgcgcgagcgcacccgccgggtgtagccccgaggcctcggaggagtgatttgactccttcaaggtcttagcgcgtttcgtgatgcttcggccggtctggttgttccctcatgcgaactggtcgtagcccgggtgcatagtcaagtcccaagttctcgggctggtatgttgatgctgtcaatggtttggccggagccgggtttgcgagagcagcccccgagcctccgcacagagcgagaggacggtcaaggacagactcagcttttttacatacgcccctgcgtcgcctttccgcaaggagggggaaagtgccatgttgccctcggagggcgccgaacatggtgtttccagtgagttgctaacgggtaatccgagtgggcgcccgtgccccattcgttaggggtcggctagtggcccggaggcgcactccaaaagtacctgcggatgatttgccggacccggtccccttttgacggggtccgagggctcgatgcctccctctagtgggatttcgttacaaaatcgttcccgtcggtctcggaaatgtcctagggtacctcgggagcgtagctcgagccttggttatgtatcgaacgtacccagggtcatccctcgctctgcatgctctgaggcggctgtcagaacccttcgagggccagcctacgaacccctgatcagtagtgggcgcggagcccgagtggcctgaggcggccgttgaacccttccgaggggccagccttcgaacctctgaccagtagtgggcgcggagcccgagtgctctgaggcggttgttgaacccttccgaggggccagccttcgagcctctgatcagtaggggggctttgggcccgcttccttcgcggagaaggatccctttcggagtatcccctttcccggtccctgtggcaagagagagaaagagggagtggaaaaggatacgaaatcgaatgacatggcgcaccttttttgacgcggtcattatggcggaggtgaagcgtcgcccgcttcgcctgccaaaggtgtcgcatgtcctgccgcagagttaatgcgacgggacgagtggttcgcggggcagccgttgtgcgtgcgtgagccgttcgaggaatgggcgtctcgctttgagttttgaatctcgcggcgggttcgggcgaagtgttgaacgggtctcgcctgggcctttatatattcgggagagggactggtggcggttctttactctgctgctcgcctcccacttaggttttcgcaacccgagggaatagctagagaaaggaaaccacgcacctcgtcctctccgccgccacctcttctgcttggtgatggccgatcgggtgaccattgtttcgccacgcgacccgtggcctttctccaccgtcacggcggatgacctggaggccctttttgctgatggtttgcttcaccctctctccggtgactcgcagccggagtggatggcccctccgagcggagccgccccgtccccgccgtcggggtatgtggtgagcttcgtctcctttcacgagcgggggtttggagtgccggcaagccgttttatgcgggcgattctgcacgtctacggggtggagctgcacaacctcagtcctaactccatctcgcaagcagccatcttcacggcggtttgcgaaggatatttggggattgccccccactgggacctgtggacccatctcttctccgcggagctttttgcctcgccgacgggggaaagaagagttcgtatggcggtgcgggccggcggctgcatcctccagttgaggcaggcgcgggtgctgtagtacatccctgccatcctcgcgtcttcgaacaaagggtggcagcgccggtggttttatctccgaaatgacgacgggaggctcccgtcgttttctcaacgagtggtgatcgccgccagccagaactggcactacgggcccccgcgcgataaatagaagaatctccagccccttttgaaggccttggaggagctgcgagaaagagggctcaccgtcgcgggggtggttgccgccattcatcgccggagggtgctccccttgacgaagcggcggctgtcgctctgggagatgacgccgggggtcgacttggagggtttgcagatgtcctcggatcccctttccgtcgacgacctccacaggcaggtagccggtacggtagggaagttggaaaccggcgcctttcccagctctcgatgcgtcccgatcgtgggtgtgtgtccctggtgagtgtccgctccttctttcttcttgtgtcggattgcccttggttctcacagccgagacttttcgtccgtctccaagaggtaggggctcacaagccttccctgccaccggtcccaaaggacgcggtggaccgcgctgcgcggagggtcgccgcggagaagaggaaggagaagaaggacacgaagaaggcttgggcccgcgagcggacgcgggctcgggacgccttggaaaggctttgtcgtcggcaggagagggatgggctcccgagggagccgtcgccggagacgcctgatgacgatgacgatgatgaagaagacgacgacatggctgctcgcctcggcctcagcctggatctgaggatgggccaggggtcgtcaagctagcccccgagcgggctggcaccgtcggtatccgaggctgggacattggggtcccggcccgatgaatgggggcaggccgagggggtacttgaccccttggccgaggtagttgaggtgaccccggggagtcaggccgaggcgctgtttcccaagaactgttgcctgtgccggctgcgcaggagggtgatcctcgggtcgtcgtggctgtgcctgggcagtccgtccctctggtgcctcgggcgcccaaggcaaggatggtgctgaagccggcagcggggctgacctcggtggcaccttcggggatcgaggctcgagagacctccccataggcacgattgatcatggctcagagtgggtaagtatcttaggatatcttcgtcctggctcttccttcgtgtgccctgatcctgctcttccttttcttcccagcaagcggaggcatggttcgaccggtgtgctccccggaaggtcctcaaaacggcgtcggcttctgcagccagtgccgcgccgggcctcgccggccagctggccttcttacaagatgccccaaagcggggggcccaggcggcacaagttgtcgtggggcaagctcctgaggccgactcctccgtcgaggcggtcgtcgtgccgagggaggctgccggcgcggctgcggcctcgagcccaccagacgcgatgccggcgctggcaccggcttctgccgaggtggttgctgttccggccgtggagccacccgtcgctgccgacgctgagatggccaaggcgtcgctgcttggtgcctcagaggaggggggcccggaaccgcgacccgtcctggggagcggcaatctcgtccccgtgtggcgcagtcctgacgggcggcgccagtcgctccagttctggaccagtggggcttcggatcccctcttcgttcttgatgatgagcgagaggagcagtcttgggacgggctttgtgagtgtgccgaggcaacggtggggtcgcttcggtcgaccttggaggtcctttgcagggacgttcccaagatcctccaggtaatgatttcaagcatacctttcacttgatcaaggcattctttgtgacgccccgcttcctttcctcaggatttgacggatctgagcgccgccaagtcgtcgttcatccgccgcgaggtcgatgtctggggttcgctgcggtccctgaggaccacgcttgccggggctaccgagcgcctctcccaacggagcgccgaggtggcggaccttcggttgctctgtgtcgatctgggagcagaggcatcggcggcacacgcagaggcgcagcggcagcagttggagcttgaccaggtcatcggcgagcgggaccaatctcggggccgggccaccgaggctaaaagccgggctgaggctcttggagtccagttagccgaggcgtctgctcgggccggagcccttgcggcagacctagccgtggcccaagccacatcctcggagcagcgtgcccgagccgaaggtgtgtcttggctgttttaatattttgattcagcttcgttcctcaacccatgtttgaagtcttctgctttggctgtctgcagagctcgagtctgctctcgatgagtccaccaaggcacttgcccaggcggccgagcagaaggaggccgaccgtgcggccatgtccgaggccatctcagccttctaccgggtctttggttccgacgacgtcccctcgggaagctcccctcagagtcgcctgcaggccttgggtgaccacgcgcgcggcagactccatgaggcgctgcatcacggtgtcaggcgggccttcgccgtgctcgcttcccactatgacgtggatctggagcgggtcagcgaggggtattgccttcccgacgaagatgaagctaccctggccgaagtccagaggcttgacgcggccgccgcgggcccaagcgcggtgctggcgaccaccttcgaagcagagatcctcccgctcgcgccgtcgtccgaggctggggcggatctcgccgagggtggggacaaagtcgagggcgcggctccttctccgggcgacgcctgattctgccggagcagtttattttgaatgcatatgtgtcttttgcggccgccgaggcccgaacactttattatcgtaatataaggttgtgtctcttttcctcctgttttgcgtatccggactcgttcgtcagtagcaagattgcttacccaagtaagagttatttttcgtggtaggcgacgagtgaggtatccgtatcccagaggcgtaggaatcccttggctcggtcggccttgccacttacatgcacccttattcgtttcttggggtcctgttactgatatagccggaagacgcgaaagtctttttgatggaagacttttttcgaggaaaattttgacgcagagggggttcgccccttctagcccccgagggagggtcgggctttgccgaggcaaggctgaccctcccttgatggttagactttgtatgtgaacgaggtgtacgaacgacttgaaagcatcttaagggtagaagcgacgtagctgttggatgttccaagcgttgctgtagacctcgccttgactgttggccagcttgtacgtcccgggcttcagaaccttggcgatgacgaacggcccttcccagggaggcgtgagcttgtgccgccctcgggcgtcttgtcgcaaccgaagcaccaagtcgcccacctggaggtctcgggactgaacccctcgggcatggtagcgtggcagggactgctgataccgcgccgagtgtagtaaggccatgtcccgagcctcctccagctggtccagtgagtcttctcgattggtctggttgctctagtcatcgtacgcccgcgtcctcggggaaccgtattctaagtctgtgggcaagatggcctcgaccccatagactagaaaaaacggtgtgaagcccgtggctcggctcggcgttgtcctcagactccagaccaccgaggggagttccttcatccatcgcctgtcgaacttgttgaggtcgttgtggatcctcggcttgagtccttgcagaatcatgtcgttggcacgttctacctgcccattcgtcatggggtgaaccacgacggcccagtccacccggatgtggtgatcctcgcagaagtccaagaactttctgccggtgaactgggtgccattgtcggtgatgatggagttcgggaccccaaagcgatggatgatgttggtgtagaatgccaccgcatgttcggacctgatgctgtttaggggtcggacctcgatccacttggagaatttgtcgatggcgaccagcaggtgtgtgtagcccccgggtgccttctgcaagggaccgacgaggtccagaccccacacagcaaacggccaggtgatgggtattgtttgcagagcctgagcgggcaggtgggcctgccttgcatagaattgacaccctttgcaggtgcggacaattctagtggcgtcggccaccgcggtcggccagtagaaaccttgtcggaaagcgtttccaacaagggctcgaggcgctgcgtgatgaccgcaagcccccgagtgtatttcttgtaagagctcctggccttcggcgatggatatgcatcgctggaggatgccggaggggctgcggtggtagagctccttcccgtcacccagtaagacgaatgacttggcgcgccgcgccagtcgccgagcttcggctctgggtagctctcctcggtggagatattgcaggtacggggtctgccagttttgattaggcgggaccccattccgctcttcctcgacgcgcagagcctcatcctcggtagccgagggtgtctcgggctgagccgagggtgcctcgggctgagccgagggcgcctcgggctgggccgagaccttctcgggctcgggcgtgtcgtcggccttgactgagggttggtgtaggtctcgggagaagacgtcgggagggacggtcgtccgccccgaggctatcttagccagcttgtccgcagtttcgttgtatcatcgggcgatgtggttgagctcgagcccatagaacttgtcctccaggcgccgaacctcatcgcagtaggcttccatcttcgggtcgcggcagtgggagttcttcatgacttggtcgatgacaagctgcgagtcaccgcgagcgtcgaggcgtcggacccctagcttgatggcgatgcgcaacccgttgaccagagcctcgtactcagccacgttgttggacgccgagaaatggaggtgcagcacgtagcggaggtgtttcccgaggggcgagatgaagagcaggtccgcgtctgccccggttttcatcagcgacccgtcgaaaaacatggtccagagtttcggttggatcggagctgccgggagttgggtgtcgacccattcagccacaaagtccgccaagacttgggacttgatggccttccgaggggcgaacgaaattgtctcgcccatgatttccaccgcccactttgcaatcctacccgaggcctctcggcattggatgatctcccccagggggaaggatgacaccacaatcaccggatgagactcgaagtagtgtcgcaacttccgtcgcgtcagaatcatcgcgtacagcagcttctgaatttgtgggtagcggatcttggtctcggacagtacctcactgatgaagtaaaccagcctctggacgggcaatgcatgcccttcttctcgtctctcaaccacgatcgcggcgctgaccacctgagtggtagcggcgacgtagatcaagagggcttctccggcagcggggggcaccaagatgggcgcgttcgtaaggagcgccttcaggttcccgagggcttcctcggcctcgggggtccaagtgaagcactcggtcttccttaagaggcggtacagaggtaggcctctttcgccgaggcgcgagatgaagcggctcagagccgcaaggcatcccatgaccctctgtacgcctttcaagtccttgatgggccccatgtttgtgatggccgcgattttctccgggttggcctcgatgccccgctcggagacgatgaaccccaagagcatgcctctagggactccgaagacgcacttctcgggattgagttttacgcctttcaccttgagacaccggaatgtcgtttcaaggtcggagaggaggtcggaggctttcctcgtcttgactacgatgtcatcgacgtaagcctcgaccgttcgaccaatgtgctcgccaaacacgtggttcatgcacctttggtacgtcgcaccagcattcctaaaaccaaaaggcatagtaacgtagcagtacatgccaaaaggtgtgatgaaagaagtcgcgagctggtcggactctttcatcctgatttggtgataccccgagtaggcatcgaggaaagacagggtttcgcacctagcagtggaatccacgatttgatcgatgcgaggcagagggtagggaaccttcggacatgctttgtttagaccagtgtagtctacacacatccgccatttcccttctttctttctcacaagcacagggttggcaacccattcgggtggaatacctctttgatgaaccctgcggccatcagcttgtggatctcctcgcctatggccctgcgcttttcttcgtcaaatcgacgcaggggctgcttcacgggtcgggatccagctcggatatccagcgagtgctcggcgacatccctcggtatgccaggcatgttcgagggactccacgcaaaaacttcggcgtttgcgcggagaaagtcgacgagcactacttcttatttggggtcgagctcggagccgatccagatctgcttggaggcgtcgttgctggggtcgagagggacggacttaaccgtctctgctggctaaaagttgccggcgtggcgcttcacgtctggcgcctccttagagagggctctccaggtcggcgatgagggcctcggattcggcaagggcctcggcgtactccacgcactccacgtcgcattcgtacgcgtgtcggtacgtggggccgacggtgatgaccccgttggggcccggcatcttgagcttgaggtaggtgtagttggggacggccatgaacttggtgtagcatggcctccctagtactgcgtggtaggttcctcagaacccgaccacctcgaacgtgagggtttcccttcggaagttggagggagtcccgaagcagacaggcagatcgagttgtccgaggggttggacgcgtttcccggggatgatcccgtgaaaaggcgtcgcgccggcccggatcgaggacagatcgatctgcaggagcccgagggtctcggcatagatgatgttgaggctgctgcctccgtccatgaggaccttggtgagcctgatgttgccgatgacggggtcgacaacgagcggatatttccccgggctcggcacgcggtcggggtggtcgccctggtcgaaggtgatgggcttgtcggaccagtctaggtagactggcgccgccacctttatcgagcagacctcccgacgctcttgcttgcggtgccgagccgaggcgttcgccacttgcccaccgtagatcatgaagcagtcgcggacctcggggaactcctcggccttgtgatcctcctttttgtcgttgttgtgggccctgccaccctccgcaggtggcccggccttgtgaaagtggcgccgaagcatgacacactccttgagggtgtgcttgacgggcccttggtgataggggcacggctccttgagcatcttatcgaagagattggcacctctaggaggtttccgagggttcttgtactcagcggcggcgacaaggtccacgtcggtggcggcgcgtttcgcttgcgacttcttcttgttcttcttcttggtgccgcgctgagtggacacctcggggacgtcttccggctggcggccctggggctgtttgtccttccgaaagatggcctcaaccgcctcctggccagaggcgaacttggtggcgatgtccatcagctcgctcgccctggtgggggtcttgcgacccagcttgctcaccaggtcgcggcaggtggtgccagcgaggaacgcgccgatgacgtccaagtcggtgacgttgggcagctcggtgcgctgcttcgagaatcgccggatgtagtcctagagagactctcccggatgctggcggtagcttcggagatcccaggagttcccagggcgcacgtacgtgccctggaagttgccggcgaaggcttggaccaggtcgtcccagttggagatctgccccggaggcagatgctccagccaggcccgagcggtgtcggagaggaacagggggaggttgcgaatgatgaggttgtcatcgtccgttccacccagctggtaggccagccgatagtccgtgagccacagttccggcctcgtctcccccgagtactttgtgatagtagtcggggttcggaaccgggtcgggaacggcgcccgtcgtatggctcggctgaaagcctgcggaccgggtggttcgggcgaaggactccgatcctccccgctgtcgtagcgtcccccacgcctagggtggtagcctcggcgcaccttttcgtcgaggtgggctcgacggtcgcggcggtggtgctcgttgacgaggcgacccggggccgcaggcgccgtgttgcgcgtgcgcccggtatggaccgaggcttcccgcataaatcagaaagtcgcggcgcgatgctccgaggggtacccctgccttcaggaggcaaagctttcgacccgtcggaccacgacatcctccaggagattcttgagctctccctggatacgccgcccttcggtggtcgatggttccggcatcgcacggagtagtagtgctgctgcagccaggttctggccgaccccactggaagccggtggtggcctttccctgatgtcgtcggtaatgcggtgctggatgccttagggtagatgacgtgcttctccagccggagcttggtctgcccattcctgcccgatgttccgtcagaacggctcaagtgttcctgctccctcgtcgagcctggcctgcatctcgcggatttgctcgagctgtgcgtcctgaccccccgcagggactgggaccacagctagctcccgaaggatgtcaacgcaaggcgcaggcctagggggatcgccgttttccggcatgccaagatggttgccttcgtcgggaacccctagatcgacgtggaaacattcacgacttgggccgcagtccttgtcgccgaagctgcggctgccatcggaacaatcggagaggtagtagttgcatgcggtcatgaagtcctgcatggcactggggttaccgaacccggagaaatcccaacaaaagtcgggctcgtcatcttcctcggaacccgagggtccgtaggtcgagacggtcgttaatctgtcccagggcgaccgcatatggtaccccggagggtttggacatgcctttacgaaagcgtccaccgaagcggggtcgcttggtgggtcgcagctggatctaaaaggcacgagataggaatcggtcggtacctcttggtcgacgggcggtgacgaagtcgcgtcaggggcggactgcaccgtcgtctcaggtacgagggtgacgcccagcaagtccctcgcgagcgtgctggcgtcgttcgtccgcttggagttggcgtgttgcggggaaacggcgctcgtcttcgtctcagacgcgaggtcgacgcccgacgtgtcccccgttggggcaccggcgccatcgactcgctcgacagccgacgaggtgccgcctcctgcttggccatggttgccccgcctcctcctccgccggtgggggaggtgacgggacaaacccgaatgttgttctcctgccacgaggggaagacgtcgtcgattccgccgccggcgggcgggctgacggccgccattgtcgttgtcgcgcggcggaggaaggagtatcatgtcgtagctgccgtcgagggacatgaactcgagactcccaaaacggagcaccgtcccgggttggaaatgttgctggagactacccatctggagcttgacgggaagctgttcgtcaacacgtagcaggcccctacctggcgcgccaactatcggcgtttcgaccccggggggtccctggaccgacgagtaaattgtcgccgcgtgtcccagcccagatgggtcggcgcgagacagagcacgaaggggggaaggagataggcaaaaggggaaacccgtggccttcgtgttgccctgcgcccaggtcgggtgcgcttgcagtagggggttacaagcgtccacgtgggagagagcgagagacttacgcgtcggcccgttctcccgcgcggccaaccttctcgtagagagccctggaccttccttttataggcgtaaggagagggtccaggtgtacaatgggggtgtagcagtgtgctaacgtgtctagcagagtggagctagagccctaagtacatgccgtcgtggcagccggagaggttttggcaccctgttcatgtgatgtcgtggccgtcggaggagcgctggagccttgcggaaggacagctgtcagggctgtcgagtccttgctgacgtctccttgcttccgtaaggggctgagagccgccgtcgtcatggagcacgtggggcaccatcattatttgtttaccggggcgagccagatgggacgccggtcttgttccccgtagcctgagctagctaggggtagggtaatgatggccccccctatgacgtggttggtccaagccctaggtcgggcgaggcagaggctcctccgaggtcgaggtcgaggtcgagtctgtcttccgaggtcgaggtcgagtccgagccccgggtcgggcgaggcggagaccgtcgtccgaggccaaggctgagtccgagccctagggtcgggcgaggcggagttcgtcgtcttccagagccgaggctgagcccgagccctggggtcgggcgaggcggagttcgtcgtcttccggagaagagaggaaaatcgtcatttgttggaagtagcaagatctctcatgttttagatgaatgtgcctaagtatctgttagtaccctggaaaaggggtacctgttactacagtatggaggtgcaatgtccatgcggctatctttagtcgcgtggtgaacaaacacctgaccccaccacgtggacggctccagggccgccacgtggccaggaaagacaatatcctccaaggtatctgtggcagaactgcccaaattattccaacttaagtgcccaaatcccgccttggaggctagacaacacttaaatgggaataacccgtcaatccctctgatctagtccgactaggccactaacaggatcaagtaccacgtactcactcgatggtgaggcacagagcaaatacaataaaacataaaaccatacattaaggagtattaaatttattacatcatcatcggagtttttgcaaaagtagtcatcattgttcgaagtgcagcggaataaaactaacgttaaataaacggagagatggggaagcctgtcccatcactcctcatgctcctcctcagctgaggcagggtcccactcgacagtccaacccggtggcaagatggacggccaagtcactccagcaaccatgtcctctagagaacctgtaaaatcatgccacaagcaaggctgagtatactaatactcagctagacttaccgggtgtgaggagtctactcctctacctctagacatgcagctgtttggctgtggggtttggttgccaaaagcactagctgagtttataaatcaagtttttagctttgtcaaattttagtgtgactctcttaagactagatgtgtactatctactcattcatggtatcaagcaaatttagcaatcaacatcttttgccacatcatcacatttccacttgttactcaatgcagtacaatggatcaagcagtctcattagctgcgagaagcagacgattcgaatcgagtttttatcatctttgcaaggtaaacctaaacacacgatgtggcgaggcactccatccccacacacatcaaccgtccccatcgattccctagcaacagatcagggctcaccgccttggcgtacaatgcctcactgaccccgactgccgtcgtgcagtgaccgcacttgtacccaccataaccggaatgggagaccacgtcttaggtcgcgtgaggggtaaagtctgcgggcaggttcactcaggtactaggcttaccgatttaccatatttctcggcatgtgtttagtacgttcaaacgcttgacactggtatccgcacgttgatccttattccaatttctgtctcgtagaccatgcatccccatggacccgtgtccacagacgatcatcattatgttatcaaagtggatacaaccaattgttgtcctcgcgcgagtgctagaaaaatcactcgacttctaccgagatcctaattactcgacctagcatactagtattcatctcaataggattcctgagatcatgcaactagggtttcaatcaactcctacacttaagtgcacaatacaagcctacaaacattaagtatagtaaaatatcatatagaacaggttatgcataaaaccggagcttgccttccaaagctggggcaggcagatcctctggggcaggctctggtgctggatccggggctacctcctgagcaactccttgctccggcacgaggatgtactctccgtcagcgaggttgcaatctatcgaatgcaatgaataagaatatgtatgctatgattatgtaggatttaataatcattatgctaagtggagaaaaactaagttagttagtaacttagggtttcctggttatacgtggctcttagtggtttatgcttatcaactttaggtttgggttttgcctagggataagcatagtggattgaaacttggatttcccttatatgttttagtaggtatttaaggggttttactagttgggttagggtgacattaatctccactattaattcccctttttcattttctatttatgaattctagtgtgggtttgaactacaacagtggtttaactttttccaaaaattctataaaaattacagtgggttactatttgtcactgtaggctgtcctataaatttgaggtggatactaattcagatactacttgtgcaaaattaacaaaaaataagtttttaaaagagcattttacactatagctgtgatttaattgaggtttctgtaccaaattgtatttttgtccagatacatagattatattaggcctctgtgttaaaaatcacagaaaaaggcctactggatatttagttgtgaatttctaaagttttatgccaaaaatgtgcttataactaacttgctatttgaaaaatatcaaacaacagatttcctatttttcctatgttcataataacaaaacattagttatcccaaggttttgggtgttttctcattggggttatttttctagggtttttctaagttttccttgttttcctaaaataaaaggtatctcatttattctttactaaacaagggtataataactttttctagtgaactatactgaacaagtaaactaacaaaaatatgggtgctccctggttctttatttaaactaccttttatattttctttaactttaagcaaaaagtgttttaaatggcaaattctatcttaatggggtgtagagaggggtttattatttttaaacaggttagtaaatgattaagtacctctctaaattttcttgaccccagtcaaatagtgtagctatttttccttatttcttttagcttttgatcagttaatcatttaaatcaaaactttaaagttttctgtaacacttagaggttttatatttttcttaagtagtttacattatttagaatctggcaaaatttgtttgactcgatttgggtaaaccaaactgaagttatgaatttttcaagttctgtttggatttaaatcagaatattttaaaaggtttcctggaaaactactttgcaccgaagaccctgggttcttcctaaatcaattcactcatttctatccctgcgccactattctcttgagtcactgacagcgcacaaaaccccctagccttttcttcttctcccccgaggtccctccccttatgtaaacagtacccgcggaaaggaaaagggcggtgcggcttaccggcggtgagagaggtccggcgaggggcggggttggcttcgggaggtcctggcggtcacagcgaggtacggctcgacggcggtggtggccagaatcgatcggtccacgggcgcaggcgggtgatctcgtcggcggcgagtgttccggcctaaccacgacgatctagtccaattaaacggcacgatgagctccacgggatgacgtagaggctatgtgcacaaggaatcgaaaaatggtgcagagacttacccggtctacgttcaccagcggtcgggtgaagtccggcgaccgtggactggcttctccggcgaggcaaagtccgattccttgctcaaggagcttcaccgaggcatgcacggtctcttccgagggtcgggcgtggctgggaagggctctgcaggctggtcgatggtggtaggggatcgggtggccgtgggcacgccatttgcagggcaaatgtcggtgatctctggctctggtgaggtggagagcacgcggggagtacggttgaagcttcggtgggctttataggcgcgggcgcgagcagaagacacgggcgtggctcggcgcggcgcggggcgagtggggtcgggcgctgggcgtgctctggcgcgctcagagtgcgtcgaacacgtggaagtgttcttctgcccttgttcaacatctcgtcgagatcgcaaacgtgcgaatcttggcaaaaatccggcacaggcctcctcctagcacctagggttgtctcttgtatgtgagtccccatggcagatatgccctaggtagggagatttgtggacgccaaatctggcttgtccctctgtccacctcgcgacaaaaaccatgccaaatcttgtcaaacgtcttgggctcagtttcaaacttttccagtgggtgccttaggtggtatgacacatttttggtatacaacccaagtggttttggtgccatttactgagtgaacgcggtggatctttagattaggttcaaaatttgacttagaaagaattagagagctctagtgctctctccacttaaagaatggatttggggttttttaaagggtctttttgtaatgtttcctctctgcattttgtagattataatgttacttaaactttggctaagggttaactcatgatttgcacatttgcttaacctttcccccccccttaaaccagggttttgggagttaagggctcaagaagggtctagggtttaatcttctcttgcccaaggtgataattgcataaatgcttgggtaatgcttttggtcattaacattcttggttaatacatggtttccaaggttttggggctccctctcttccacttaaccacatgagataacaggtcataggtgcaagtagggagtcagggccttggtaacacctggggtgttacagccctccccccttaaaggaatctcgtcccgagattttaggtagagtcctttggaggggcgccatgaaggtgcgttggtgtgttgctccttcttttatccaagttctctagttaactgctcttcgaatgtcattctctttgcgacttcagaaggaagtcctttttgagtcattttcaaagtttacactacctttaacatctaagtttttcttatatttagattcaaagggcaggtggggtggggtttttgattacgtaccgactcctttgggcaaaaagtcggggaagcgagaacgtagaaaatcctcagtctcccatgtagcctcttctactgaatggtgactccactaaaccttatacattctgatcaaccttgcccgcgttgatctctccttttggtccaatacctttacggggtgctcttgataagacaagtaaggttctatctcaatttctggttcaggtagcacttcagtgggtaagcggacacatttccgtagctgggatacatggaacacatcatgaactgctgacatgtggggtggcaacctcaattgataggctacgggtccacaagtggctttgatctcatagggtccaatgtagcggggagctaacttgcccttgattccaaatctttggacacctttggtgggtgacaccttaagataaacatgatctcccacatcaaaccgcagaggcttccttctcttgtcatgatagctcttttgcctggcctgagcttctaggttcttcgtaataactctgaccttttcctctgcttcaagtaccaagtctggtccgaatatttccctctctccagcttgtgaccaattcagcggggttctacatcttctcacatacaaggcttcaaaaggtgccatttttagactggactggtagctgttattataggagaattctgccaaagaaagacacttgtcccaatttttaccatagtgtagcacacaggctcgcaacatgtcttcgaggatttgatttactctttctgtctggccatctgtctgcggatgatatgtggagctccttattgcatgggtcccaagtgattcttgtaggtgctcccaaaagtgtgccacaaacagtgctcctcggtcagatacaatggtcttcggaatgccatgcaaacgcactatttgatcaacatagatttctgcatacttttctgtcttgtgggtggtgtgtaccggcaagaaatgagttgtcttggtcaatctgtccacaatgacccaaatggaatcatggtgccgagaggtattgggcaatcccacgataaaatccatgcaaatatcctcccatttccaagatggtatgggaaggggttgcaaagggcctgctaccttcaaatgactggccttgattctctggcaggtatcacattcagatatatacttagcaatttccctcttcattctggtccaccagtataaggatctgagatcatgatacatcttattgctgttggggtgcatggagaattttgaaaggtgagcttcatccaatatcttctttctgagctcagggtccttgggaacaaccaatcggtctccaaaccataggattcctttgctgtcctgacggaagcatttgtatttttctgctttctgcttgatcatttccttaatgacctgaacacccttgtcaccaatatgtgccatgactatttgctcctgtaaggtaggctccacgaaaatataatttaaagcaccggaggaaaccacttctaggtttagcttgcacaactcatcacatagggtggtgactcttgcatccatgttcatgcaattgcactaggccttcctgcttaaagcatctgccacaacattggctttaccagggtggtaatgcacctccaaatcataatccttgataagttctaaccatatcctctgcctcatattaagatccgcctgagtgaaaatgtatttgagactcttatgatcagtgtaaatgttgcagtgagctcccatcaagtaatgtctccatatcttgagagcatgaaccacagctgctaactccagatcatgtgtggggtagttatgctcatggggtctgagtgctcgggagacataagcaattaccctgttgtcttgcattaagacacatcccaatccagtaccggaagcatcacaataaacttcaaagggcttagtgttgtcaggttgagctagcactggtgctgtcgtcaagtgttgccttagtgtatgaaaggcatcctcacacttctggctccaatcatacttgactcccttcttcaacagttcagtcattggtttggcaattctggagaaatccggaatgaatcgtcgataataccctgccaatcccagaaaactctgaatctgtctcactgtggtaggaggtttccaatccattacctcttgtaccttctcgggatcaactgataccccatcctgagaaattgtgtgacccaaaaatttaatttccctcagccagaaatcacatttagacaatttggcatacaactgatggtcacgcagtctctgaagtacagtatgcaaatgtttagtgtgctcggcttcattcttggaatagaccagaatatcatcaatgaaaaccaccacgaatttgtgcagctctggcatgaatactgagttcatcaggtacatgaaataagtcggggcattggtcagcccaaaagacatcaccaaaaactcatagagcccatatctagtagagaaagtcgtcttcggaatatcactggcacggatcttgatctgatggtagcccgagcgaaggtctatcttggagaacaccttggctcccaccaactgatcaaacaaaacatcaatgcggggcagtgggtatttgtttttgatggttaccgcattgagagggcggtaatcgacacacattctcagactttcatccttcttctttacaaatagggtcgggcatccccatggtaaagtacttgggcgaatgaatcccttgtccaacaactctcgtagttgctttttcaattctgctaattccgctggaggcatcctataaggcctcttggatataggagcagtcccgggttgcaattcaatggcgaactatatgtctctatcgggtcgcatccctagcaattcatccggaaaaacatctgggtagtcacagaccacagggattctctcaaccagggactctatcatggtgaatgcacaagaacgggtacaaccctgatcaggcaaatataacgtggtttcaccacaagtcggtgagtgcacctcaatggccctagctgcaatatcaaataactgtctgatgtcttgttaaccagtcagttcccaatatgatatccatgctatccaaacccaatatgaggagggtggttttaattatcagactgtcaaactttataggcacatgtttgttgatttgataggtggcaaccctgcctcctggtgttgaaattgtaatacccccattggtgtggtgaaaaggtaattggcacttggcactaaatttggcactgataaaactatgtgatgcaccagaatcaaaaagaataatagcaggataattcaaaactgaaaagataccagtcatgatgggtgctccctctggaatgtcagccatggtggtgaagttcagcctgccttgcctcacttgcaccttctgcctctagccttggttctggttggcattctgcccctgcctctactggtttctggggcaattcttggcataatgtccagtgttaccacaagtgaaacacctgttgtcattggcctgacgatattgctgctactgtggctgattgttcctctgagctagaaactgggtgcggttgggtgcctgctgctgctgctgtggtcggaccacccaacgtccttgctgctgctgaggtcctctgttctgagtgtcagacacgatcctgaagcgctgtggctgagctgaaggtcctgccacaggggtcttcctcttcttctctgtctaacgagctgtggtatagtcctcctgagaaatggccatgttgactaactcattatagttgctggccctgactgtgttgagacggtcacggagcttagtgttgagcccctcctgaacctgtccctcttcttctcatcagtgtctgcatgatatttggcatactggcacaggtcattaaaggcctgagcatactataacactgtccggtttccctgagtgagtgccagaaactcgttgagcttgcggtccataatgcctcctggtatatggtgccccctgaaagctgccttgaactctctccattccacttcatggtcagctggctgcatagcaagatagtggtcccaccatgtccgcgcgggtccgcgaagctgctgggtggcgaacctgaccttagtcacctctgaacaaactccatggagtagcgggaatttggattccactaccctctgccatacatcagcatcaagtgggtcctctgccctggtgaacaacggtggctaggtactgaggaactcctgataagtggctaccgtggggtgacgctgatgatcaccaccaccatagtgctgaggtggtggctgacgctgagctagctgtctcaagatctcgttctgctgagccatcagctcctgcagagtaggaggtgatggtggtggtggaggaatgcgctcattctatccacgacatgctcttcctgccatctgaaaaatcatgtatattctcaatatcacattcctgagattcaaggttcaatcgcggtgaaagagtcaaaagggtaaaaccaatatattcttgcataattataaaagattccacatggcctaaacttttcttcttaaattaagactgacagcattcatcaaccacgcttccaaaagagtttatcatgattacatcaataactcaaaagactcaactctatctagcctagtaccccaagggtgcaaaagctaagctagcttcgaggagtcctaccatcacagacttctaactctatccttgcgacctagtgagcaaacgaggcaacgctcgactcgggggaaggtggtctccctgagccagcagtgtccaagctggaggcaggctcctctcctccctcgatgtcgacatcctcgtaggcctccatgtcctggatctcctggtggtgcatatccaaatgctggttagcctccgcaagttgctgttgagtgttgacaagctgatcctcgagaacctcgatggtgttctctctcgttcccactagctcctcaagctcttggatctcatttgacaattgttccacatgtaggtctttttccaccatctcagtggacaagtcaaccacaagttcctctctgttatccaaagtgatcttggttgcctccaacaatgccattatatgggacattgcctctccacgcatcatttgcagacgatacagggcattcatgcaccgcaccgtcaagtgagcagtctgacctgggtagatagcccagatatccttggcatgctccactcggtccttccacattgggtcatcctccttctccgcggggaacaaaccaatggggtgagtggacagctccaaggggtggaatccgcagaaggtggtcagtccgtgaagagcaattgcctccatagtgtcctcagccctgtatccaaaagactcagagtccagcgaacgccagcctggctgtaggggatgaggctccagggtcatcctcaccctatagcggggcactcggtgcttctcgaacagctgcaccgcgtactggggaggcgtcgtgtaaccagctccctaaagtacctcccacaaaatacggggaaaaccctctcgtgcaagcccgtcagtgtgggactgtgcattcccttcgtccgaggatccgtgagaagtcatctgtgtacgattaagcgtaagtaaaagaaaaagaattgtaaaaagaaaatggatcacaactcagcctctctataacaacgacaatggtactggggtacttagtttgtcatcattttgtattaaagttcttacccaactatccattagttttaattaaggatgcatgcatgctcgtcctgaacgacctcacatcaacgtagagggaatagggaggaactcccatcccttatagtagcttgtagggcttactcaatcagccacctagctacccctctatcatcctaaggcttcacgtcctaggtctatcctgatcgtcctacgatctatccaacatttgtttctaccaagttttactttggaaaagaatggtatttatagtttattgattcctctgtggtggtacgagctccgataccagctgtggcggaactgcccgaattattccaacttaagtgcccaaatcccgccttggaggctagaccacacttaaatgggaataacccgtcaatccctcggatctagtccgactaggccactaacaggatcaagtaccacgtactcactcgatggtgaggcacatagcaaatacaattaaacataaaaccatacattaaggagtattaaatttattacatcttcatcggagtttttttgcaaaagtagtcatcattgttcgaagtgcagcggaataaaactaacggtaaataaacggagagatggggaagcatgtcccatcactcctcatgctcctcctcagctgaggtagggtcccactcgacagtccaacccggtggcaagatggacggccaagtcactccagcaaccatgtcctccagagaacctgtaaaattatgccacaagcaaggctgagtatactaatactcagctagacttacccggtgtgaggagtctactcctctacctctagacatgcagctgtttggctgtggggtttggttgccaaaagcactagctgagtttataaatcaagttttagctttgtcaaattttagtgtgactctcttaagactagatgtgtactatctactcattcatggtatcaagcaaatttagcaatcaacatcttttgccacatcatcacatttccacttgttactcaatgcagtacaatggatcaagcagtctcgttagctacgagaagcagacgattcgaatcgagtttttatcatccttgcaaggtaaacctaaacacacaacgtggcgaggcactccgtccccacacacatcaactgtccccatcgattccctggcaacagatcagggctcaccgccttggcgtacaatgcctcactgaccccgactgccgtcgtgcagtgaccgcacttgtacccaccataaccggaatgggagaccacgtattaggtcgcgtgaggggtaaagtctatggacaggttcactcaggtactaggcttaccgatttaccatatttctcggtatgtgtttagtacgttcaaacgcttgacacaggtatccgcacgttgatccttattccaatttccgtctcgtagaccacacgtccccatggacccgtgtccacagaccatcatcattctgttatcaaagtggatacaaccaattgctgtcctcgcacgagtgctaaaaaaatcactcgacttctatcgagatcctaattaataaagcagctactcgacctagcatactagtattcttctcaatatgattcctgagatcatgcaactagggtttcaatcaactcctacacttaagtgcacaatacaagcctacaaacattaatgtagtaaaatatcatatagaacaggttatgcataaaaccgaggcttgccttccaaagctggggtaggcagatcctctggggcaggctctggtgctggatccggggctacctccttgctccggcacgaggacgtactctccgtcagcgaggttgcaatctatagaatgcaatgaataagaatatgtatgctatgattatgcaggatttaataatcattatgctaagtggagaaaaactaagttagttagtaacttagggtttcctggttatacgtgactcttagtggtttatgcttatcaactttaggtttgggttttgcctagggataagcatagtggattgaaacttggatttcccttatatgttttagtaggtatttaaggggttttgctggttgggttagggtgacattaatctccactattaatttccctttttcattttctatttatgaattctagtgtgggtttgaactacaacaatggtttaactttttccaaaacttctataaaaattacagtgggttactatttgtcactgcaggctgtcctataaatttaaggtggatactgattcagatactacttgtgcaaaattaacaaaaataagttttaaaagggcattttacactatagctgtgatttaattgaggtttatgtaccaaattgtatttttgtccagatacataggtgatattaggcctctgtgttaaaaatcacagaaaaaggcctactggatatttagttgtgaatttctaaagttttatgccaaaaaggtgcttataactaacttattatttgaaaaatatcaaacaacagatttactatttttcctatgttcataataacaaaacattagttatcccaaggtttggggtgttttctcattgggattatttttctagggtttttctaagttttccttgttttcgtaaaataaaaggtatctcatttattctttactaaacaagggtataataaatttttctagtgaactatactgaacaagtaaactaacaaaaatgtgggtgctccctagttctttatttaaaccaccttttgtattttctctaactttaacaaaaagtgttttaaatggcaaattctatcttaatggggtgtacagaggggtttattattttcaaacaggttaggaaatgattaagtacctctctaaattttcttgaccccagtcaaatagtgtagctatttttccttatttcttttagcttttgaccagttaatcatttaaatcaaaactttaaagttttctgtaacacttaggggttttatatttttcctaagtagtttacattatttaggatccggcaaaatttttttgactcgatttgggtaaaccaaactgaagttatgaatttttcaagttctgtttggatttaaatcagaatattttaaaaggtttcctggaaaactactttgcaccgaagaccctgggttcttcctaaatcaatccactcatttctacccctgcgccactattcccttgagtcactgacagcgcacaaaaccccctggccttttcttcttctcccctgaggtccctccccttatgtaaacagtacacgtggaaaggaaaagggcggcgcggcttaccggcggtgagagaggtccggcgaggggcggggttggcttcgggaggtcctggcagtcacagcgaggtacggctcgacggtggtggtggccggaatcgatcgatccacgggcgcaggcgggtgatctcgtcggcggtgagtgttccggcctaaccacggctatctagtccaattaaatggcacaatgagctccacgggatgacgtagaggctatgtgcgcaaggaatcgaaaaatggtgcagagacttggactggcttctccggcgaggcaaagtctgattccttgctcggggagcttcaccgaggcatgcacagtctcttccgagggtcgggcgtggctgggaagggctctgcaggccggtccatggtggcaggggatcgggtggccgcgggcacgccgtttgcagcgcaaatgccggtgatctctagctccggtgaggtggagagcacgcgggggagtacggttgaagcttcggtgggctttataggcgcgggcgcgagcagaagacacgggcgcggctcggcgcggcgcggggcatgcggggtcgggcgctgggcatgctcttgcgcgctcagagtgcgtcgaacacgtggaagtgttcttctgcccttgttcaacagctcgccgagatcgcaaacgtgcgaatcttggcaaaaatccggcgcaggcctcctcctagcacctagggctgtctcttgtatgtgagtccccatggtagatatgccttaggtagggagatttgtggacgccaaatctggcttgtccctctatccacctcgcgacaaaaaccatgccaaatcttgtcaaacgtcttgggctcggtttcaaacttttccagtaggtgccttaggtggtatgacacataggtgataattgcataaatgcttggtcattaacattcttggttaatacatggttcccaaggttttggggctccctctcttccacttaaccacatgagataacaggttataggtgcaagtagggagtcagggccttggtaacacctggggtgttacagtatcaacggtgggtccggaccccagcatatccggaccggacctccgggcagcgtccaggacctccgcggatatagaccagactcccgggacaggtcctggacctctctatgtagggtccgggccaccctcagtggggtcccaggattctaggacaaagaatacataggccttaatcaaggccaggcgggggtccggggccgacacgtgtccggaccataccatgtacacttccgctccccgctcaggcggaggcccgatgcagccacgtggcatatcgcccgtgacgtaagccagcgggcggagcctgacgtaaggcctttggggccgcgcggtctctgcatttattgcggagaagacgcgccgcctgactattccgctgacaggcaatgtgccgcctcagcatttaatgtgtcctatccactccgctggcaggcggcgtgcctgtccagtccactgccaaacagtacgcccgtgctgcgaggtgcactgtgaccatcatcacttgtacgttgctagggaggcttcccctgcatgccaaagctacgcagatcgcggatatcagggcgcaagaagattgctccagcaacgagtatcagttgctccaagtattacatctgttatgtccctgggcccgcatgtcggggctcagcacccttgtacgtgcccccctttagctataaaaggggaggcacgcaacgttatagaggactcaagtcaagtaaagacaactcagctcaagcggatctaggccaacagacacagacacacttagacgctcacaagttcatacaagctcttgatctaaatacatcacacagtggagtagggtgttacgctccggcgacccgaaccactctatatccttgtgtgttcttgcgttctgcccatttcgacctaacaggcaaaacgcttaggcccctcctcatctaaggatttagggtgggtgcattccgccacccggccagagatttcctctccgacatttggcgcgccaggtaggagcctaggctttcggtttttgcttgttttctcgctctacatgatggtgcaaatcattgagcaccacaccgagactttggtggatttcctggtggaggaggaagctgcctcttccatgccacaggttcccaactgcccagtgccgggcactgctgctgtgcacgctgcacggcagtatacaaccgcacagacatcctggactccgccgagggcggctccgggggctttgtctgcagccagggagttgctgcgtcaccctccaagctccacggcctcaccgggggccatgaagcagtggcgagacgacgtagaccgactgctcggcatggcgcactctgcctcgaccagattgaggccacggtcatctcgacgccaacatgaggcgtcggcgtctgtgcgctcgccctcagtgaggggtgcacagaccaacgacctccgggcgaagttcaaccgtaggcgtgcgggggaggatgcctgggtctctttggagagggcgcgggagcgccgacaaaacttcgagggtcgtgatgacgctcgagtctctctggagagggcgcgtgagcgccggcaaaacatcgagggtcgcaacctcgatcaagactttgctgcggtagcaccgcaagccccagtgggtgcccggttccagacgggtatccccttggctggcgtgggttgcgccactctcgcagatcatctccgcgcggcatcctggccatccaagtttcggccgcacctgccggaaaaatacgacggtacgtcaaacccgtcgtaatttctgcaggtgtacgtcaccgctatcacaggtgcaggtggaaacaccgctgtgatggcgacatattttcatgtcgccttgtctgggcctgcccgggcttggctcatgaatcttaccccaggatcaatctattccttggaagagctctgcgtgtggttcacagcgaacttcgccagcgcttaccaacaacacggcgtggaggcccacctccacgcagtgaggcaggaacccggagagactctccggacgtttatctcccgcttcaccaaggtacgaggaaccatacctcgtatttcagatgcttcaatcatcacggccttccgtcagggagtacgcgatgaaaagatgttggagaagttggccacgcatgacgtggagactatcaccacgctcttctctctggccgacaagtgtgccagggccgccgagggccgggcatggcactcggctccaaacaccgggatcgcccagatgggtggctcgggtaccgtccctcgggatggtaaaaagaaaaaagaagggtcgtggccacgagaagccgcggtcaaccgctctagtcgttgcagctgcgactgggggccgaggcgaccacaacaaacgcccacggccgcagaggggtaacagcggctcatgccctatgcaccctaacagtcgccacagcgccgcggagtgtcgcgagatcattgacctcatgaaacgcgtcagcgagcggtgtgagcagtcttccaaggatggctccccacctcatcgccgacctggcaaggaaagggtcgacgacggcgaggtggccgcggctgaacgggacctcgggtattagtcacccgagggggtcctgaaggatgtcatcactggagactcctactccggtggcgacggctagacgggccaccaaggggaccccacactccctagtctacggggctgaagcctgccttcccctagaaacctttatggactcaccacgggtctagtcttttgataagtctgtacaggagcggccatagcgcaaggatgtgggctccatcggcgaacgcaaagggcaagcagcgacccgaaatacacgttgcaaccaggcacccaggcactacaaacggttcgtgcatagtagggaaccctgggtcaggacctagcccaatggtgagtactgaaccaaggagtgttccataaacgctccccagctgagaggaacttttcaaggtgacggaaatgtgccgacccaagggtaaccaccttgctacagctggagcacctcttcctaacccctggagcatctctgtaagttctatccataggagcaagtctgtggggtttagtctttctcccttttgtaactaggttgcgcatacgtgtacgccagcccggtgaggtccgccctcataaacccggcctgttggcctgcacccatgcatgtagagttataaagagaagatttaccccccaccccagatgcgctcctatgacagtcttatcctcctgcctccacggttttatcctgcagttcccggatattattttttacctaacccacccgcacagttcccatttgtcctggcatgatgacatccgaattgagtagccaggcctgcagtttaggacccctctacaaaagcagggggtccggtagcctggggaccggttctaaagaataggagctcgttccatggggtggtccggagcagtgtggccgcttagcctggttccgtacccaaaagcctacacactccaccactctgtgacgggcacccgagtatttggaactatagtcctgtgggtccgacaacctgaggtccggccctagagaatggacacttgtctcctggggtggtccggagccgtgtagccgctcagcctggtcccgtaccgtgagcctgcacgctccaccactctgcgacggttgtcctagtatctggaaccgcggtccagggggtacggacacacaacttggcttcccagactaaaacctgtaggtcccgtgcttgtatcaaaggatggctaatgatagatgatgggtcctatgggtgtactactaacgctccctagccgaagttgtgttcaggcccaggtcccagtcgaggctacctcctgggggtcattgccaactctttcttaggtatgctggtatccaacctcgtcacaacgagcctgcatcctaggggggcacataggtaccaggaaggagtcggtaacaccacacacaacagggacaagtggtacacagataagtgctaatactgcttgataaatagtactcaaaagtaccttacaaaaagcaaaagttattacatccgccttcaagaggagtcctagctccatctctactctacaggtatggactactcttcaccagcagggtcgcgttgaaagctagctccgagcggcttgccagcggcagtgaccacctgtgcaccagcagcggtgaccacctctgcaccagcggcttgtcagcggcggcgaccacctctgcaccagcggcggaaaccacctcagcgtgtgcaccatggcgaggaggccctctcccccgtcctcctacgggggtgacaacaagaccatccaagccaaggagctggaagcacggtggcagacggcgcttgcggtctggccggtgccgcgtagccgaagtttgcctccaaccttcacaaggctagtgatcatccttccctccgaatgctggagggagaggcgggtcaccagctcatgtggaagacggagccgcagcccagcttgctctccaccaccgcaaggctgatgaacatccttgaagctaagcaccggtggaagagcgccgcccccacgaggccgtgcacctccagcgaaagaaaggcaagatcggcaacaccaacccgctggggaggctgaagacaaagagcacgaactctcaggcggcaagttcgccgaggaggatggcgccggcgcaaatcttaccaccgaacgtcggcgcatcccatccaagcaggcggcacaccatgtcgagcacccactcagtctaggcacgctcaagatgaacttacaaggccatggcaaactacggcgatgcagagcagagaccttgaaggcaaaggggcgcagagagctcggaggcgaaagggcacagcgagtgggagagaagcaaggcatggctactactcgagggatgaacccctttttaaaggtagactcccctactcgcgccccgaaacgccacgagaagtctcccccgatgcacaccagagtacccaacctatgacacgggggcccggtcccacaagtcatacagctggtgcgttggtctccgagtgtgaaggaggcgaaccgacacgggagggcgaaccgccgcccgtggtagtgtgcctcttcatctgccaaaacaacggcccagcctctggcatgggggcctaggcccacttatcatgcacctggtgtgccagttcctgggtatgaagaaggcaaaccaccgcgcaaggtgcatgctaccgacccgcggtaacacgcctcttcaccttcgccggaagcagcggaccagtccctggcgcgggggcccgggcccacgagtcatactccttgggcgtcgatctccatgtgcggagaaggcgaaccgccgcgtgaagagcacgccaccgtctgcagcaatgcgcctcttcacctccgacgaaaccaacagcccagtctcctgcacaggggcccaggcccactagtcatcctccatgggcgccggttccagggtgcagaggaatcgaaccgccgctcgcgccagtaccgcgcctcctcggggccgccgcagaggacagagaaggtgaattttcaaaaccaatgcagcggtatcgaggcaccccgcgcatggctcagcaaagccattaagtgcggaggtcatgggtcagtcagccacagggacaggcgtggcagttggcgtgttcaaaggcgggctggcagtaatttcgccagcaagcgctcagaagcaacgcgccaatcgacaatccagctttggccccacctgcaggctcgtatcctcccctgaggcgggcccgagggccactgtcagtaccttggaaaaggggtacctgttactacagtatggaggtgcgatgtccatgcggctatctttagtcgcgtggtgaacaaacacctgaccccaccacgtggacggctccagggccaccacgtggctaggagagacaatatcctccaaggtatcaacggtgggtccagaccctagcatatccggaccggacctccgggcagggtctaggacctccgcgggtacagaccggacccccgggacgggtcccggacctctctgtgtagggtctgggccaccctagcagggtcccgggattctaggacaaagaatacacaggccttaatcaaggccaggcgggggtccggggccgacacgtgtccagaccataccatgtacacttctgctctccgctcaggcggaggcccgatgcagccacgtggcatatcgcccgtgacgtaagccagcgggcggagcctgacgtaaggcctctggggctgcgcggtctctgcatttattgcggagaagatgcgccgcctgactattccgctgacaggcgatgtgccgcctcagcatttaatgtgttctgtccactccgctggtaggtggcgtcaaggacatcctgcaggcggcgtgcctgtccagtccattgccaaatagtacgcccgtgctgcgaggtgcactctgaccatcatcacttgtacgtcgctagggaggcttcccctgcacgtcaaagctacgcagatcgcggatatcagggcgcaagaagatttctccagcaacgagtatcagttgctccaagtattacatccgttatgtccctgggcccgcatgtcggggctcagcacccttgtatgtgcccccctttagctataaaaggggaggcacgcaacgtcacagaggactcaagtcaagtaaagtcaactcagctcaagcggatctaggccaacagacacatacacacttagacgctcacaagttcatacaagctctcgagctcaatacatcacacagtggagtagggtgttacgctccagcggcccgaaccactctaaatccttgagtgttcttgcgttcttcctgtttcaacctaacaggcaaaatgcttaggcccttcctcatctaaggatttagggcgggtgcattccgccacccggccggagatttcctctccgacagtatctgtggagtgaggcagtaatgacggccacatacctcatcaaccggatgccctcaagaatacttaatatgaaatcacctgcagaacttctattgggaaagtgtgactttcgtgttccaccgaaggtctttggttgtgtctgttttgtaaaagatcgtcgacctatggtgagcaagttggatcctcaagcagtcaagtgcatttttgtgggttattcatctacttagaaaggatacaagtgttgggaccctattggtaagagactattagtgagtatggatgtaacatttcctgaggaagacccatactatagaaagaaagttgatccatatcaaatcctggaggacttctctccggtcgatggaggagaccgtagagagggggaggatgacagtagtcgaggtagtgatgaggccagtggtgatgaggctagtggagcttcaggaggggtgattgttggaggtatgattccaccagaagtggagaaagggataacttgtaaagcccaaaatttgtatcaggaaaataaataaataaatataattattcttagtgtttgagaatttatggaaccttggagatcatttgaactccttctatttgtgcatacaagtaatgaaattatattggtcagataacaaataaatgagtttagaaatatgcatctcatgccgatgattttgtgatgaatattttttttgcttgaacaaaggaattaagacttaatttgacctcaattcacataaatatatatatatatagtaaagaatttgagaaaggtaattatgataatcctttattcctttttgaattaaagggtgaggaggaaaataaataataaaaataataatagtaacagtaataagaataaatatgaagatacgatttctgtccacatcaaaattttgcttgaaattcaaaatcatggttgaatttgaaatagaaatcataaaaaaagaaaacagaaatgggaccaaaacgcatctgggccctattttcccgcttggcccaagactaaatcgcacctcactggcccatcagcgcccttatctttttctctgagtcacttacgcgtggggccactccttcaagtcggtcttcaacctcacggactctgccccaaatctcaactaggcgccgacctacacgccggggattaggggggtgttgttggctaaatctccgcatgggtggttgtaatctggtgtcgtcccatgtctatttaactcgggctcctctggtcctatcgtcgcccaaacaaaaccaagggggcgtcatggtccgccgcggagggaaattgggcgctgtcgtcaacctgcattttcatcaaccggtgaaccttggactcctccttcgccatagctcttcggtaggatctcccccaaacctctgtgtgcccaggcgtgcttgtcgtgcggtgtttggagaaccagcgcgaacgctccgttgtgcaccatcctgttcgcgaagacaagcatatcgaccccttcatctccggtatggaaacacatgcgtgaatcaccgtaccccctgctgcgcgtagcatcgatcatccgatggttgggagttctggtttgctggggcgtcgaggcccggtgtcgtggccatggcgccgtcgcggttgggactggacaccgctgctcagcgcggattgaggtagaagatggccggtggccgttcatcagaaaatgggtgctctggattagatcccgggcgtattggctcatcgtccaatctgggccgttgatcccctgatggacgaattctaggcagatcaaatatccaccactgatcgcgggatcgatggctctgttagctgctcaatttagatctaatctgagctgtcgaatggcgatccaacggtgcaatctgctcatacccccttcgccgtagtcactttctaagtgagcccctcgggtttcgttgaattaacccgccatccgcgagagaggtaacatgagtctgccagatctttgctagtttaaccctgagtttgtctgtaataatgtgggtggcccaggaacagagaaatctgatatttaaatatagaaattgatttttagtacacaaataaatccagaaacttgtataattcatatttaattcatttttagctccaaattgatccattccagttgcaataattttgttttaatattgttcatcatctagtacctttgtttagccatgaaacttgaattaaaattattcacttgaattactttatcctaggtactaaataacttcggaaaatcataattaattcattttaactctgtttcaatccgttcaagttgtgttagcttcgtataaatatttgctacacagtagcaacattgatcatataatatcccatacttttataattaggtgactaatttgattaatctatgttttctgtattagcttttctaatattaatataatattccgatcttataattataatttgactaaaagataatcaataatcaagaataacttagattaaaggttgggttaattacttatagaatattctctcatatgatgaatactaatcaatttataatatagtttaatatttaaatcacgtagatcttccataaaccttaaccgtaaccccgaatttagcggttctcgaacccacgatctcgtagcgacgcgtagattgttattacgcaatttattcttatgattggtgtgatgttaatcttgcctataccatgtttgtttgtattactatgactagcgtgaggacacgtgtcatctgaagagcaagttggtacctggtatctcaagtcccaggcaagttgtgcccttgatcacttccttttacccactcatgttctaattaatcataatgatctgcataggttaattttgatgggacccaataggttaccctagtttgattatctttataccttgtttaccactgaactttttgggtagtacttgttagtgctttatgtggttttgggtatgaagatacattattcatgatcacactgttattatccgtttattattactgttcatgataagatcattatgttaattggaacatggagcgaccacccgggaaaacagtgctaccacaagggaggaatgggaccccttggctgattaattaggaaagctagtggaagactaccttacccgaaaggggcaagagcagtaggggagtggtcagtgtagggaggccctcgggaggattttgctgcgatggcggtcctgcaagggattcctgtattggagcttcctataaactgtagcgggttttctgaagctagtggaactttgtaaaggcctcgtagtgttaccctgcctcgcctcctcggtagaggtgtatgggaagtcgcgatcccttggcagatgggtaacatgacttgtgggtaaagatgcgcaacctctgcagagtgtaaaactggtatactagccgtgctcacggtcatgagcagctcggaccctcacatgattaatttatggaacttaaattcaatttgtcatatgcattgcatcgcaggtgatgttgttacttctgttctactatttaattgggttggtatttacttatacttagtaattgctaataaaattttgaccaactttaaaagcaatgctcagctctaaccattctctttggtaagccttacacttcacgtgggctcccacctttggcgagttcatgcacattattccccacaacttgttgagcgatgaacgtatgtgagctcactcttgctgtctcacacccccccacaggtcaagaacaggtaccgcaggatgaggcgcatggaggatgctgcgatgagttcgtgagagagatctaggtcgtcgtctcccagtcaactttgggttgctggatcgtttcctcatatgatgtaattatttaattattttgtatagaactcctgttatatagtaaagatgtgacattcgatcctgtgccactatgcatcatatgtgtgagacttggtcccagcacacctggtgtttatgttcgcgcccgggctttggacccctaaaacccgggtgtgacagaagtggtatcagaggaatgttgactgtaggacgaaacctagatagaactggacaaccattatctacttacctttgctactctgatcctttctaaacttttcttaatcaattctcgtctatttccgctttactctgattattcttaccttttctatctaaagacaaatgtggatttcacactttgaaatcatgtgcctaaagtgactttaggactaggagacctaatcttaggaacaaaaaaacaaaaatatttttatagatatctatgaacttgaatgcttgttcttatgatacttgtttgatttggatctttgattgagtgtgatgagttgtggagtaatgtccacaattacatctgcatatacatataggcataaaggataatatgtataaaataactagacaaactagattatccctcattaaaagtatctagcctaacaatattcatcccatcttaaaagattttatcctacactcatagatccatctcatcccaaaagatcctaacttattctaacatatctagcgtaatggatccatcttatcttaaaaaggtactctattacctttatagattcatcttatcttaatagatctaactgacctcaaaagattctaccttagtcttatggattcatcttaccccaataagcatatttatcccgcactagtgtaacaaccatgatctaatccaaagtaattagatattatctggtctaatctagtcacacaaatataacttagatctgatctaatgcgatctaatctaatgtggtctacttaaacggattagtgatacttgtgagatagattagaccctacccctataaacatattttaacctaaattgatgcctcagatgaactcggccatacacaactacttgacctacctgatgggttgcctaattcatctagtccaacctaaagtcaaagtaaaccaagttttgacctatcctaggtttcacaaacaactacctatctaaagcttccaaactctagatggcgacaccaacacccaagaaggaagataacgacctagtcaagaaaggataaagagtcaagccaagtctccaaataagtcaaaatccaccatctcggatggagtcttactttgcccaaatatttctcacccaacctacccttgatctgactatctcttgtcctgcctatcggatggctcgacataaaaagaagttcatactttcctaatcacctatacattaatattaagaaaagaaaacctttgattcttgaactaatcagggaataaaagctaaactacaaactaaactgtcagcattcattgtctactaatctcgaggacgagatttctgttaaggggggtaggatttgtaaagcccaaaatttgtatcaggaaaataaataaataaatataattattcttagtgtttgagaatttatggaaccttggagatcatttgaactcctatttgtgcatacaagtaatgaaattatattggtcagataacaaataaatgagtttagaaatatgcatctcatgccgatgattttgtgatgaatatttttttttgcttgaacaaaggaattaagacttaatttgacctcaattcacataaatatatatatatatagtaaagaatttgagaaaggtaattatgataatcctttattcctttttgaattaaagggtgaggaggaaaataaataataaaaataataatagtaacagtaataagaataaatatgaagatacgatttctatccacatcaaaattttgcttgaaattcaaaatcatggttgaatttgaaatagaaatcataaaaaaagaaaacagaaatgggaccaaaacgcatctgggccctattttcccgcttggcccaagactaaatcgcacctcactggcccatcagcgcccttatctttttctctgagtcacttacgtgtggggccactccttcaggtcggtcttcaacctcacggactctgccccaaatctcaactaggcgccgacctacacgtcggggatcaggggggtgttgttggctaaatctccgcatgggtggttgtaatctggtgccgtcccatgtctatttaactcgggctcctctggtcctatcgtcgcccaagcaaaaccaaggggggcgtcatggtccgccgcggagggaaattgggcgctgtcgtcaacctgcattttcatcaacctgtgaaccttggactcctccttcgccatagctcttcggtaggatctcccccaaacctctgtgtgcccaggcgtgcttgtcgtgcggtgtttggagaaccagcgcgaacgctccgttgtgcaccatcctgttcgcgaagacaagcatatcgaccccttcatctccggtatggaaacacatgcgtgaatcaccgtaccccctgctgcgcgtagcatcgatcatccgatggttgggagttctggtttgctggggcgtcgaggcctggtgtcgtggccatggcgccgtcgcggttgggactggacaccgctgctaagcgcggattgaggtagaagatggtcggtggccgttcatcagaaaatgggtgctctggattagatcccgggcgtattggctcatcgtccaatctgggccgttgatcccctgatggacgaattctaggcagatcaaatatccaccactgatcgcgggatcgatggctctgttagctgctcaatttagatctaatctgagctgtcgaatggcgatccaacggtgcaatctgctcatacccccttcgccgtagtcactttctaagtgagcccctcgggtttcgttgaattaacccgccatccgcgagagaggtaacatgagtctgccagatctttgctagtttaaccctgagtttgtctgtaataatgtgggtggcccaggaacagagaaatctgatatttaaatatagaaattgatttttagtacacaaataaatccagaaacttgtataattcatatttaattcgttttagctccaaattgatccattccagttgcaataattttgttttaatattgttcatcatctagtacctttgtttagccatgaaacttgaattaaaattattcacttgaattactttatcctaggtactaaataacttcggaaaatcataattaattcattttaactctgtttcaatccgttcaagttgtgttagcttcgtataaatatttgctacacagtagcaacattgatcatataatatcccatacttttataattaggtgactaatttgattaatctatgttttctgtattagcttttctaatattaatataatattccgatcttataattataatttgactaaaagataatcaataatcaagaataacttagattaaaggttgggttaattacttatagaatattctctcatatgatgaatactaatcaatttataatatagtttaatatttaaatcacgtagatcttccataaaccttaaccgtaaccccgaatttagcggttctcgaacccacgatctcgtagcgacgcgtagattgttattacgcaatttattcttatgattggtgtgatgtaaatcttgcctataccatgtttgtttgtattactacgactagcgtgaggacacgtgtcatctgaagagcaagttggtacctggtatctcaagtcccaggcaagttgtgcccttgatcacttccttttacccactcatgttctaattaatcataatgatctgcataggttaattttgatgggacccaataggttaccctagtttgattatctttataccttgtttaccactgaactttttgggtagtacttgctagtgctttatgtggttttgggtatgaagatacattattcatgatcacactgttattatccgtttattattactgttcatgataagatcattatgttaattggaacatggagcgaccacccgggaaaacagtgctaccacaagggaggaatgggaccccttggctgattaattaggaaagctagtggaagactaccttacccgaaaggggcaagagcagtaggggagtggtcagtgtagggaggccctcgggaggattttgctgcgatggcggtcctgcaagggattcctgcattggagcttcctataaactgtagcgggttttctgaagctagtggaactttgtaaaggcctcgtagtgttaccctgcctcgcctcctcggtagaggtgtatgggaagtcgcgatcccttggcagatgggtaacatgacttgtgggtaaagatgcgcaacctctgtagagtgtaaaactggtatactagccgtgctcacggtcatgagcagctcggaccctcacatgattaatttatagaacttaaattcaatttgtcatatgcattgcatcgcatgtgatgttgttacttctgttctactatttaattgggttggtatttacttatacttagtaattgctaataaaattttgaccaactttaaaagcaatgctcagctctaaccattctctttggtaagccttacacttcacgtgggctcccacctttggcgagttcatgcacattattccccacaacttgttgagcgatgaacgtatgtgagctcactcttgctgtctcacacccccccacaggtcaagaacaggtaccgcaggatgaggcgcatggaggatgctgcgatgagttcgtgagagagatctaggtcgtcgtctcccagtcaactttgggttgctggatcgtttcctcatatgatgtaattatttaattattttgtatagaactcctgttatatagtaaagatgtgacattcgatcctgtgccactatgcatcatatgtgtgagacttggtcccagcacacctggtgtttatgttcgcgcccgggctttggacccctaaaacccgggtgtgacataactacacaaatattgagtaatgatgaaagtagtggggatcatggtgatccaactattaatattcaggaggagacaaaggatgatgaggcagtgattgttggatcaatcccatgtcctactgcagggaagttgaatgagaaataaggggagcgacatgattgttcaattggggtaaaggtgaatgacaaacagggggagcaacctatagtatactatcgaaagcagacgaagaagcagggggagaaaccacaacctggatgtgttgaagctccagtcccatatctctcttcagactcctctccagacccagctggtaatgtctctccaatccatatttctcccattcctgaacatgaagaattacctcttgcgcaaagaagagttcctagagtaaatgctgggaaacctccttctctttattgttatgaacatgacattgctaagtatgtctcatactctagtgtctctcctacatatagaactttcattgcatctctacaaacaatatctattccgaaggattggaggtgtgccaaacaggatccaaagtggaacgatgccatgaagaaagagttgcttgcccttcagaagaacaagacatgggaacttgttcaccttctagaaggagagaaggcggtggggtgcaagtgggtcttcacagtaaagcagactcctgaaggaaagattgacaggtacaaagcaagactggtggcaaagggatatagtgagacatatgggatcgactatgataagacctttgcacctgtggcaaaaatgggcacggtgaggaccttaatctcatgtgcggccaactttggttggcctcttcatcaactggatgtgaagaatgcatttctccatggtgatctgaaggaagaggtctatatggaaattccatctgaatttgcaaataaacagactattgggaaagtgtgcagacttaagaagtcgctctatggcctaaagcagtcaccacgtgcatggttgatagattcaggcaagttgtgtgtgatatgggctatcatcaatgcaatggagatcacacagtcttctacaaacatcagggctcttgtatcactattctagctgtttatgttgatgatatagtgaccactggagatgatgcgaaggagatcaagaaactgaaggaaaggctaagtagagcctttgaggtaaagaaccttggaccactccgatacttccttaggattgagatagctagatcatctcagggaattattctctcccaaagaaagtatgtcctcgaccttttgtcaaagataggaatgcttgggtgtcgcccatgtggctcacccattgataggaatcaccaaacttgtgttgagtcaggtgaccctatagatcgggaaatatattagagggtagttggtcatttgatatatctttgccatacaagaccgaacattgcttatgtagtaagtgtggtgagtaggtatatgcatgatcctagaactgggcatatgaagatagtttatcaaatcctgagatacctgaagggaaccactaacaagggattgtggtttagaccaaatcaacatatgaatttggagggggtattgtgatgcggactgggcaagcagtagggatgatcggagatccacttctggatattgtgtatttgtgggaggtaatctggtttcatggagaagcaagaagcaagttgtggtatcttggtccactgcagaggctgaacatagagcaatggctctagcagtgtgtgaaatgatatggttgaagggcctcttgaaggagcttcaagtgttgaagaatgagacaatgttgctccattgtgacaatgtggcagcaatcaacatagcaaataatccagttcagtttgatcgcatgaagcatgtggagattgataagttctttatcaaagagaagattgatagtgggactttgaagttgaagtatgtcaaatctcgtaatcaagtagcggatagtctcacaaaaggtttaggtcctaatgataatgagttggcatgtaacaagatgcgaatgttaaatatatttagcctattttgaggggtagtgttggtgtaattatgaacaagtgtaagggtctacttgtaaagtggtgaagtataatgtgagtgagaaggtgctgtgtgaaggtaacacacaccaaaaaaactacaatttccatctatggctttgggcagaaccatgagtgtctgctttgttttttatgtttagctggtcctctcattgacaattggcttggcaggttttatatc

SEQ ID NO: 387 - DNA, 8157 bp, Zea mays
  Intron number 7 from transcript GRMZM2G029979_T01 (locus G RMZM2G029979) derived from phytozome v7.0 (chr-ID 5; pos 1 22643086 to 122651242)
ggatcggcggcttccgcccttcagagctcatcaaggtcagtattaacttgaacgaacaactgattatattggtactactagttgactaaatttctaccacctaattgcattgctaccggcccggccggagactggaaattaaaaaccgatagatcgcgacattttttagctggtgtactatacatacctcaaatcaatgacacacaagaagttgactttgtttttggccaccgtgtacgaggcatgcatgcatgtctcacgacgactcacggctcacgactatgcatataggcttctccctgcgtacgggccgatgatgtaggggacgacaaccatgcaaattcactagcttattaattgatatattaacatatagaccattgctaatattatgattctagagagaggtcgattatggcggcgcgagtgaggtggagggggaagcaaggacgcgaagtgagtgggggaggcttggggcggcgaggagagagatgagagataatctaagtatagtaataatgtttattggatttgagtgagtaagagaggcggttatccaactattcgaactgttggttctgataatgtgttaagtctatgtgtcataacatcaaaaaaagtttagatgtcatttgtttggtggatttagtataggttatgagtgtgggagtgatttgatgggtgagttttgcaaagtcgtttaaactgatggattacataatggtatagatagcaaaatacgtataataagagctagtttggaaaccccattttttcaaggagtttttattttccaagagaaattagtttattttacttggaaaaaaatagaaatttcttagaaaagtagagttctgagactagtcttaaaaggttaagaattcaggtgttgtttggtaataatggacagaggcattaggtacaagcagcatcctagtaattggacaggtgtatgtatattatgggttagctagctgattaggtaggtaagaggtcccagttacgttgacagggacagtttaggtctttggaggaattgtcttcggacttctctctacgtactacatagtagtactagccgccatatctactacacactcctatatatatctgtcctatgtgattggtacttaccacaactactgcaacagggggtaggttagacgggagatggagacggggttggttaactcacctacaacgatgccagggacctgcttgacacatgtatcctttcggccgcttctagatggattggttggaacttgggaaccacgccaacagccctgtgttttcacgatactacacaagaagtccctgttacacctctagagtattattggtagatgtctctgttctcacaatattaaggtgatttcttccttaaactagcaaatgataacacgatctaatatagctatatttgttggacttagttaggtttggtctaatcttattattccataaaattacgagtgaactagacttctataaaaaaatcttgcataaagtaattcctatttgcaagctcaacatcaccgagtgtctaatgtattaatagttttgcactctaatttctaaccgtatactcacatggcagttctaagaccataaattcttgaagtaaattgcttaaacgtaaatgtatataatataacaaaagtttgaagacttctcaatgtttttaccaacgtcttagagagtcagcactctccactaattctcgttattagagcacccgggtgtcactcccccttgttccaaataaagactaagtgctctttacaagctggttctttgccgcccacagtgagccgctcatgatcatgtataagtcttgagttgggtcacccacaaactctatcagtgttcaccgcactcttgatcaccactaaactgtctaagtgatgtcgatcatcaagagtattaaactctcacttgactctacgtaccaagctcaataagattaatgggtgcacactcattactctcttatatactaatgaggctccaaaccaagagaatttcaactcttaagtctctcactaggcaatggctctttctgacactcaatatgggttgctttagctattaaattaggtaggagcactagtatggttggttagtgaggtaattataaccaccaactggacaactagccattatatatagtaactctaggcaaaattcgtgagcatcaaatcgtctaacgtacacccgtatgaccatattgcatggtccgatgagacacaacagtaattgtatatgtactgtgccagaactagccatttgaattactattgcgagcgtatggtatgacactcattgtcggatcagtttgatgtccgcgaaaccccctatggtcacttagcagaggtcagcagactcaactcattgatccaataaggccactatttaaagggttcgatgaccctatagaaagaaacataactcaaatagttgtgtcatatggtccgacgcatgccaccatactagtctaacgcaccctagagctctctagtttgttttccacaaattgtcaaactcaactcattggtattacgctctatagttcatagagtccaacattttttctctctcaggctgactacatagaggcatcaacctagtcatctatgatctgacgaccctaaaatcaaagtatgacgcctcaaaaaaccatctaatttgtcaaatttggaaactttataaacgggttttgatccataattcttttggtcctctcctaggcaacttagagataaagacaaatattatgcgccacacttaactcattagacttatctaggtcaagctactagttcataccgtctttatagtatggttgaagaaaaaacaaaatcctaaagtattctaagtgtctctcaactccaaacttagaactagtccatccttaaactttgttttccattctttaaaaacaaaacaaaatccataatcatgggcatcaaaaccatatattgtcaaacaatctccatcagggacataacttcactttgcctccacaaagcacatgttagtcacaacaatcttgtgttgcaattaatcatcaaaatcactaaggccacatttggatcctttgaattgattctaatattcataatttatgcatagatcaattaagcagatatagttttatgcgaaatatatttgtatactattgttgaccatatgagggagatatttatgtgctacatttttactatagggtagcccgtaagggcctagatgctttcaatctcccccttttggtaattgatgacaacactatctcaagtatttgaaagaggatttttaaaggggccttgtttgtatgaacttttagagttgaaacataagatgttagagtaaatcatataaccgagatccaagtcatgcaccatgtaaaaatgattttttagctcatgtacattaaaggataacgttgttttttaaagatatcagtcataaaacaagaacttatgacatgctttagaatatgaagtaaaaagtgtacatgtcacaatatcatacataagagtatgcaacaaacacaaattatatcatacaatgcaaaaatatgtaaatcaaagtgcatattatacatagaaaataacaaaacatataaaaccaaatatatctcaaactcatcatactcaccctatccctccctaatcccatgctcccccaactcacatactcacactaccactccccatttgtaatgaaggaccaaaacctaacggtcaaaaccaaaggctcaagaagtggtgaggacatagacatgtgggcaacgaaagtgcatgaaacgagcttaaactacttgacttaagtgtgtagaggatgatggaggtgataattgtggagaagagaatatcatagaaagcgtgaccaccttctcatcttcatcatcactatcaaatgattataagccactcatagagtcgatgttggtaagtcaatcaccaacaatgtaggcttttccaccctttgtcttgtgaaaactgtcttttcttgccatatcttttcttgaaggcattttcccttcttatcatcttcacttgaatcatccttcttaccattgaactttttcttcttaggcttggtgcatcgatgaggaagatgtccaagctcaccgtagttgtagcaatccatctcagagatgggctttctcttgctacttgtgaagaatttcttctttcttgagtcaaatttgacgattgaccttctttagcatcttggtgtacttcttcaccataagtgcaatcttcaaatcattgacttcattatcgcttgagctttaagtctcttcttgcactttagctctactattcttcccatgattggcttagataatcaaatccttcttcttgtttgaagaagagccatcttgattatggatatgcatgtatacctcatgagcattgatcttctccatgatttaagtcaatgtagtgctgggaagatcaatttggtgaagcacggttacgatgtggccatacttctcaattgagagcacactcaagattttcatcacaacattcgatgtctgagttccaattcattgacttcctctaaaaggacattcaaatgtgggtacatgtcattttacattttcatgatgaagcatttcaaaataatttaatttattcatgactatgtggtaatgctcctcacgctcgctcttggtccctccatgtagtgcacaaatatcagaccaaagagcataagtgtccttgtgaatacatactctattaaataccttcttgaatgggcctctaaaaagagtgctattagccttatcaatccattttttgtagcaaatttcaacacctattatattagtgggatccttaggttttggagacccttgagtagcagctttaaaactcctatgtctatagccacaagatatgcttccataagttttttctaatgatgaaaattgtcaccctcaaaaatgggaggaggtctatccccaccggacattgtaactcaaagtagttaagctaaactaatgagcacgaggctctaataccaactaaaaagaccataatgtccaagagagggtgaattgatctttcctaaaaaaattaattccaagcccaacttcacttgagcgcctaatgtgtaaaagaagttttgcaccctaatttataatcctatgctagcatggaaattctaagaatgtaaatttttgaagtgcattactcaaaagtaaatatgtaaggttacaagactcctcgatgttttgggccaaagtctcaaagagtcagcactttccactaatcatcattggagcacccatgtaagggtgtcactcactcacccccccttggtttgtgtaaggaccaagtgctctctacaaggtttttctttgctacactggaacgatgaaccgctcacaaccgtgtacaagctctgaccctaggtcacccatactcttcgagtgatcattgcaccgttgatcaccactgaaccgtctaggtgatactaatcaccaagagtaataagcacaaactctcacttgactctatcaagctcaatgataccaatgggtgcacactaattactccttattactaatgaggttgttaaccaaatagattttaactcataagtccctcactaagtaatgactttctcgcactcaatatgggttgcttcagctattatattagctagaccactagtacgaattggttgatgaggtattttatagccttcaagcagccaactaggcgatacaataactctgggcaaaattcatgtgtcagaccatctgatgtgcacccataggaccatatcacacggtccaatgagacatagtgataatgataattgtgtacttgctatgtcagaactatccatttgaattactattgcgagcatatggtctgatgctcactatcgaactagtcaaatggtcacttaacaaaggttgtcggacccaactcattggtccaacgatttcactatttaaaggtttgatgatcctatagaaagaactcaaacccaaacagttgcgacatatggtctaacacatgccactggaccaatctaacgtgcctaagaactctctggtctatttccacaaatcgtcgaactcaactcattggtctgagactgtagctatactttcaagccacccatcctggcatgacccaagaatgaaaaggcctagcacgtttaaatttaaagccaacatgactcgtaattaacatgggtcgtgtcgggccaacacaagagctcagtccttagtccacgacatggcaagttattgcttacacgtgtcaggctcatttcaggcggagaaagcacaaacttcaaatttttccataaaatggagaaaagtctaaaattcaaattttgtcacgaaatctataaacaacaaacaaatatggtcataatttagaacaaaaaacataagtacatagcacacttcgagagttcctaatactcttttaaactatcatacatgttgcaatccagtttactagttacatcacatcaaggatataattcacttgggcttgtttctagtcttgtgtcttaaactttgcttgatacttataggtcttctaatgtattttttgtggtgttgctttctcaatgcctcaggggtgtttgaacacactagagctaataattaactgtcaaaattagctaaagacatccaaacaatctagctaataattcatctattgactacttctagcaaattagctaatagttagctagctctttgttaactaattccactagtactttttttagccaactaattattagctctagtgcattcaaacacccctcaatccaagtccactttgcatcatgtgaactacgaacataaacactcgcaaacataatagtccacatgttatgttgatcatataacaccaaaattaattagacaaatcagacgatgtctattttccttatagaataaaaatgagaactcattgaaggacagaaaaaggtatgggtgtgacagacaacaaatagggaggagagtgatggactaaggcatgtttaaatgcattaggccattagagctaatagttagtcgtctaaaaattgattgtagaattagctagctaactattaggtgatttttgttgggttgatcagctaatgaactaaagggtagttgagagtggagctaataattagctagactattagctgaggtgtttggactatcagcttggctatttagatgtctacaagtaattttagcagttaactattagctctcgtgtatttaaaatacgccagaacaagaggaagataaaagagcactaattctgatattataggtaagatatagatattacggcctcctgacgttgttgatgttcgttttctatcctgtcgatagctcattcatctagtgataaacatcacgctggagtatattcgtatgtataatattgaagtttatgtttctaaacatctgctataaaacctgctaactactagttctattagctggtctgaaattgctaatagagtaatagatagatgctagtttatatgcgccttcaatttattgtctaataatgtattagtaagtggattcaaatagtctcttgctaaaaataagttataatagctgctattttttgtgctgtttggtttacgaaatgtaacataaaaacctgctaactactagttctattagctggtctgaaattgctaatagagtaatagatagatgctagtttatatgcgccttcaatttattgtctaataatgtattagtaagtggattcaaatagtctcttgctaaaaataagttataatagctgctattttttgtgctgtttggtttacgaaatgtaacataaatgataataataatgattcacactcgaatgccggtgataacaagtttgaagagaccggtatagtgtggtatctaattacggttggatttaaacaaacatgatttaaagttaacggttacccgttacattaccaatatatggcactttagtgtcagtcaggtacaattctcaactttgattatttagttctgctaatatcttctttttctaaaaaaaaaaaagcacaatagaagatatcgtttacagtactaactagtatgcacacgcagatagcggcccggcacgcggagcccctgacggagca

SEQ ID NO: 388 - DNA, 2016 bp, Zea mays
  Intron number 2 from transcript GRMZM2G064875_T02 (locus G RMZM2G064875) derived from phytozome v7.0 (chr-ID 1; pos 8 0054726 to 80056741 reverse strand)
aactgccggaaaagcaagattttcttcatctcctggtcagtgctttctttcccactgttcttctcttgtctgcacatctgatttgttgaatgagcaatgctctgaattgatacatctaatagccatatgctttgttcatgcattactgctaacgcagtagtcgtggctcgtgagttgttcgacttgagaaggatgcctccgtttttttagtcctgtggaggattgctttactgaagttcaagtcttggccctagctgacagcatctgctacgttcgtttcagtgttctgaatgtgcaaggtaacgaacgcttcgtagggtcgcaataagactatctccggcagcttagccgtacccatatttaaacttcacttcgcggtgtaaaacagtgttttagatgaccacataagtaaactgttgaacacgatataaccgtagctgctcagtactgccaccgctacgaggcaacagcaacaaggtgtctcacaatagtgttccaaaattgaaacactacattatttaaacagattagaacattaaaaacaaattaagctccaacagataagcctatcttaaaaataaattaaaatgctcggaaagaaaaggttgaggatgagatagaaaataaggataggcagttatgcactagtctagtctagggtgtagtatatctagatcactttatgatgtgtcctatatttttatagaaatttgtaaaataagacaccgttagagctaattttcacgaggcgcagttggagatgctatattagctactgctatttgggttagtggaccgttattgtggcccaatagtgctttttagacggccattgcatggtggtgagctgtgatgttttttaaggatcatttttggaaaatgcaacttctaaccagctttagacatcccataagactcatcaattggatgtctagttttattctcgagttataggcatattgatctaccattatttaatttttatataggtttttaatgtgatagaaaaccatgttccatacttacatttataagtatctctgctctggatcccgctattggaagttgggacttagcgtccacaccaatccgctatctgctatttgttaccttgtgaacgtgggagatcatgtcatcttgatctgtccaatgtctcagaatccggatagaaaaaattccacaatcctagatttgtatttaagggctagtttaggaactccatttttctaaggaattcctatttttccaaggtattcctaatttctcttgaaaaatgaaaatgcctttgaaaattaggatttccaaactaatcctaagggctagtttgggaaccccatttttctaaaggatttctattttctcaaaagaaattagttcattttctcttagaaaaatataaatcgcttggaaaaatgtagttctcaaactagccctgaaccccgttttctaaagggatttccattttccgaagggaaaatgaactaatttcttttgggaaaatggaaatcctttggaaaaatggggttcccaaactagctctaaacgggctatatttcatagagattttatcttacagatttctagaatctcaaaatctaaactgttgggattctgtttatccggattttgaaattcccttgggattctattcacatcaagcttacagtgcacagttgttgtactgagagcagagtcgttgcaaaacggcactctttgcttggacagttgatgcgttgaatacgtacggattggaacgcagttcatgtttgtttgtttttttgcagtaggtaaaggtactatgaattcgttgtattgtgtgtattgtatagcagtcatatatttttcatgttgtcagactgatttttggtttcagtatgactactactaagtggatatatcagatatatgatgcaatcatcatctgacaactacattctcatagcacgcatgctcgcgttaacggtgtctccttcctgtgcaggtctccttcagattctcgcatccgtgccaagacca

SEQ ID NO: 389 - DNA, 9749 bp, Zea mays
  Intron number 7 from transcript GRMZM2G045234_T01 (locus G RMZM2G045234) derived from phytozome v7.0 (chr-ID 10; pos 118087564 to 118097312 reverse strand)
cagaacgaggagggtaagacagtggacctctacgtccccaggaagtggtatgtttgtcgtacttgtttaaacctttgccctctgcatggttaattatgttgtgttaatattgagtttctgttcttgcagctcggccacgaacaggatcatcactgccaaggatcattgaaagggaaataggcttacaccttttcctaaatgattttggtggttgaattgcccaacacaaataattgaactaactagtttgctctagattataagttttacaggtgccaaaggttcaacgcaaaccaataaaaagtccaagaaagggtttaaataaaaagagcaaaagacaacccaaaggcagccctggtctggcgcaccagactgtccggtgtgccaccggacagtgtccagtgcaacagggagctcaactccaaacttgccaccttcgagaattcagggaggttgctccgctataattcaccggactgtccggtgtagcaccggactgtccggtgtgccagcggagcaacggctactcgcgccaacggtcgtctgcaaaggaacagtgaaacgctacagtgcgcgcctacgcgcgcagaagttagagcaggcgccagaaggcgcaccggacagtgaacaggacctgtccggtgcaccaccggactgtccggtggccccgttgtcataagctccaacagtcggaacccaacggcctggtgacgtggctggcgcaccggacagtgtccggtgcgccatatgacagaaggcctcaccaatggttcttttggtggttggggctataaataccccccaaccaccacacttcaatgtatctaagttttcagccatcaaacctcatacaagagctctagacttcattccaagacacaaacaaagagatcaaatcctctcccaagtccggaatcactccaaacaaattagtgactagagagagagacttttgtgttcttttgagctcttgcgcttggatcgcttttcttcttcctctattcttgtgttcaactcacttgtaatcaaaacaagagacaccaagttgtggtggtccttgtagtggactaagtgtcccatttgattgaagagaaaggctcactcggtctaagtgaccgtttgagagagggaaagggtcgaaagagacccggtctttgtgaccacctcaacagggagtaggtttgcaagaacggaaccttggtaaaacaaatcaccgtgttcatccacttcatttctttgttgatttgttttacctctctttcggactcgtttatatttctaacgctaaccctggcttgtagttgtgcttaaactttatagatttcagatttgcctattcaccccacctctaggcgactttcaattggtatcagaacccggttcttcattagagcctaaccgctcgaagtgatgtcgggagcatccgccatgagggagatcgggaccggtgacaagtccgcaagctcggggagaacacacttaagggagtccgcccacaagcacaaggaggaatcctctttctccatcaagtcccatcggaagggtgacaagaagaagatgatgaagaatgtggtctactacgagactgactcttcgtcaccctccaccttcggctcggaatcggcatccgccacttctaagcgccatgagcgcaagaagtatagtaagatgccccttcgctaccctcgtatttcaaaacacactccattactttccgtcccattaggcaaaccacctatgtttgaaggtgaagattattctatgtggagtgataaaatgaggcatcacctaacctcactccacaaaagcatatgggatattgttgagtatggagcgcagataccaaaaaggggggacaaggattatgatttggaggaggtcgaacaaatccaacacttcaactcctaagccactactatactcctcgcctctctaagtcgagaggagtataataagatgcaagggttaaagagtgcaaaggagatttgggacgtgctcaagaccgcacacgaaggagatgaggtgaccaaaatcaccaagcgggaaacgatcgagggggagctcggtcgcttcatgcttcaccaaggagaggagacacaagccatgtacaaccagctcaaaaccttggtgaaccaagtgcgcaacctcgggagcaccaaatgggatgaccatgaaatggtcaaggttattctaagatcacttgtatttcttaaccctacacaagttcaattaattcgtggtgatcctaaatacaagctaatgtctctcgaggaagttataggaaaatttgtgagctttgaattgatgatcaaaggctccaagaaaatcatcgagcaaggcgtctcctgcacacccgatgtgcaacccgtcgctttcaaagcgacggaggagaagaaggaatagtctacatcaagtaggctccccatcgacgcctccaagctcgacaacgaggagatcgcgctcatcatcaagagcttttgccaaatcctcaagcaaaggagggggaaggactacaagccccgctccaagaaagtttgctacaagtgtggtaagcccggtcatttcattgctaaatgtccattatctagtgatagtgacaggggtgacgataagaagggaaagagaagagaaaagaagaggtactacaagaagaagggcggcgatgcctatgtttgccgggagtgggactccgacgagagctccaccgactcctcctctgacgaggatgccacaaacatcgtcgtcaccaaaggccttctcttccccaacgtcggccacaagtgcctcatggcaaaggacagcaagaagaaaaaggtaaaatcaagatcctccactaagtatgcaacttctagtgatgatgataattctagtgatgatgaggacaacttgcttactctttttgccaatcttaacatgcaataaaaggaaaaattaaataaattgattagtgctattcatgataaggatgaactcttggatagacaagaggatttccttattaaggaaaacaaaaggcatgttaagaataaaaatagttatgctcaggaggtagagaaaaatgaaagattaactagtgagctaagcacttgccatgacactatttccaaccttagatttgaaaatgacaaattgattgctaaggttgagaaattaaatgttagtgatgattctcttgtcaacctttggaatgacaatgctaatttaattgctaagattgattagttgaatgcatccctctctagccttaaaattgaaaatgaaaaattaattgctaaggctaaagacttaaatgtttgcaatgtttctatttccaatcttagagatgagaatgctattttacatgctaagattgttgaattaaatgattgcaaaccctctacatctaccgttgagcatgttactatttgcactagatgtagagacattaatgttgatgctattcatgattacctagctttaattaagaaacaaaatgatcacatagctcacttaatgccaaaattaatgagcatgacttggaaaatgaaaattttaaatttgctagaagcatgctctatagcgggagacgccctggcattaaggatgacattggcttccaacagggagacaatgtcaagcttaatgccctaagaaattgtccaactttgttaagggcaaggctcccatagttcaggataacgagggttacattttataccctgccggttatcccgagcacaaaattaggagaattcattctaataagtcccactctggctctcatcatgcttttatgtataagagcgaggcatctagttctaggcaatccactcatgttaaattgcctaaaaagaaaactccaattgcatcaaatgaacctaatatctcttttaagacttttgattcttcatatgttttaactaacaaatcaggcaaagtagttgccaaatttgttgggggcaaacacaagggctcaaagacttgtgtttgggtacccaaggtgcttgtttctaatgtcaaaggatccaagaccgtttgggtacctaaaaacaaggcctaaattgttttgtaggtttatgcatccgggggctcaagttggataattgatagcgagtgcacaaaccacatgactggggagaaaaggatgttttcctcctaaaagaaaaaccatgatccccaaagagctatcacattcggggatggaaatcaaggtttggtcaaaggacttggtaaaattgctatatctcctgaccattctatttctaatgtttttcttgtagattctttagattataatttgctttccgtttctcaattatgtaaaatgggctacaactgtctttttacggatttaggtgttactgtctttagaagaagtgatgatttagtagcatttaagggagtgttagagggtcaactatacttagttgattttaatagagctgaactcgacacttgcttaattgctaagactaatatgagttggctctggcactgccgactagcccatgttgggatgaagaatcttcataaacttctaaagggagagcacattttgggactaacaaatgttcattttgagaaagacagggtttgtagcgcatatcaagcaggaaagcaagttggtgttcatcatccacacaagaacatcatgacgactgacaggccactcgagttactccacatggacctattcggcccgatcacttacataagcatcggtggaagtaagtgctgtctagttattgtggatgactattcttgcttcacttgggttttctttttgcagaataaatcccaaacccaagagaccctaaagggattcttgagacgagctcaaaatgagttcggcttaaggataaaaaagattagaagcgacaacgggacggagttcaagaactcacaaatagaaggcttccttgaggatgagggcatcaagcatgagttctcttctccctacacaccacaacaaaatggtgtagtggagaggaagaatagaactctacttgacatggcgaggaccatgcttgatgagtacaagacttcggaccggttttgggcggaagcagtgaacaccgcttgttacgccatcaaccgtctctaccttcaccgtatcctcaagaagacatcatatgaactcctaaccggtaaaaagctcaatgtttcatattttagagtctttggtagcaaatgtttcattcttgttaaaagaggtagaaaatctaaatttgctcctaaggctgtagaaggctttttacttagttatgattcaaacacaagggcatatagagtctttaacaagtctactggactagttgaagtttcttgtgacattgtgtttgatgagactaacggctctcaagtagagtaagttgatcttgatgagctagacgatgaagaggctccatgcatcgcactaaggaacatgtccatcgggtttgtatgtcctaaggaatccgaagagcctccacaagcacaagatcaaccgtcatcttccacacaagcatctccaccaactcaagatgaggatcaagctcaagatgatgaggatcaagaagatgagccacctcaagaggaggataatgatcaagggggagatgccaatgatcaagacaagaaagatgatgaggatccaagaccgccacacccaagagtccaccaagcaatacaaagagatcaccccgtgaactccatccttggcgatattcataagggagtaaccactcgatctcgtgttgctcatttttctgaacattactcctttatgtcttctattgagccatatagggtagaagatgcattaagagattcggattcggtgttggcaatgcaagaggaactcaacaacttcacgaggaatgaggtatgacatttagttccatgtcctaatcaaaatgttgtaggaaccaagtgggtcttctgcaacaagcaagatgagcatggtgtggtgacaaggaacaaagcccgacttgtggccaagggttattcacaagtcgaaggtttgaatttcggtgaaacctacgcacccgtagctaggcttgagtcaattcgtatattacttgcctatgttacttaccatagctttaagctttaccaaatggacgtgaaaagtgtcttcctcaatggaccaatcaaggaggaggtctatgttgagcaacctcccggctttgaagatagtgagtaacctaaccatgtctataaactctctaaggcgctttatgggctcaagcaagccccaagagcatggtatgaatgcctaagagattttcttatcgctaatggcttcaaagtcggaaaagccgatcctactctctttactaaaactattgcgaatgatttgtttgtatgccaaatttatgttgatgatatcatatttgggtctactaacaaatctacttgtgaagagtttagtaggataatggttcaaaaattcgagatgtcgatgatgggggagttgaagtatttcctaggatttcaagtgaagcaacttcaagagggcaccttcatcagccaaaccaagtatattcaagacattcttaccaagtttgggatgaaggatgccaagcccatcaagacactcatgggaaccaatgggcatctcgacctcgacacgagaggtaaatccgtagatcaaaaggtatacccgtcgatgataggttttttactctatttatgtgcttctcgattggatattatgctttccgtatgcatgtgtgcaagattccaatccgatcctaaggaagttcaccttagggccgtaaaacgaatcttgagatatttagttcatactcctaagtttggcctttggtaccctaggggatccacttttaacttaattgtatattcaggtgctggttgggcagggtgtaaaattgatagaaagagcacatcagggacttgccacttcttgggaagatctctggtgtcttgggcttcaaagaagcaaaattctgtagctctttctaccgccgaagccgagtacattgccgcaggccattgttgcgcacaattgctttggatgaggcaaacccttagggactatggttacaaattaaccaaagttcctcttctatgtgataatgagagtgcaatcctcatggcggataatcccattgagcacaaccgcactaaacacatagccattcggtatcactttttgagggatcaccaacaacggggggatatcgagattgcatatgttagcaccaaagaacaattagccgatatctttaccaaaccactagatgagaaaacttttaccaaacttagacatgagctaaatattcttgattctaggaactttgattgacttcttgtacacatagctcatttatatacctttgatcatctctttcatttactatgactaatgtgttcttcaagtgcatttcatgctaagtcatagattgaaagggaaatggagtcttcggcgaagacaaggcttccactccactccatcgaataattcatccttcgccgtcactccgcaccgttctccaatttggtataatcttcactcctatattatttaccaaagggggagaaagtttgtcgaagggcttatatttcactcacacgtatctgtttatggcgattcatgccaaagggggagaaagtattaaaccaaagcaaaaggaccgcaccaccaccaatttcaaaaatgtagtctttcaaatttgtattaaaagaaggttttttctattggtatcttatttttgatagaattttcaaattagtataacccctttcaaaattattatccaaaaccctcttgaacactaagaggagaatttgattgagggggagttttgtttagtcaaaggaaaagcatttgaaacagggggagggagaaaatttcaaatcgtgaaaatgcatctcaaaatcttattcatttacctttgactatttgcaaaaaagactttgaaaagaatttccaaaagaatttgcaaaaacaaaacaagtggtgcaagcgtggtccaaaatgttaaaaatgaagaaagcatccatgcatatcttatgaaatgtatattggtttaattccaagtaacctttgtgcttacatcttgcaaactagctcaatcctgcacttatatatttgctttggtttgtgttggcatcaatcaccaaaaagggggagattgaaagagaaataggcttacaccttttcctaaatgattttggtggttgaattgcccaacacaaataattgaactaactagtttgctctagattataagttttacaggtgccaaaggttcaacgcaaaccaataaaaagtccaagaaagggttcaaataaaaagagcaaaagacaacccaaaggcagcccaggtctggcgcaccggactgtccggtgtgccaccggacagtgtccggtgtgctagggagctcaactccaaacttgccagcttcgggaattcggggaggccgctccgctataattcaccggactgtccggtgtagcaacagactgtccgatgtgccagcggagcaacggctactcgcgccaacggtcgtctgcaaaggaatagtgaaacgctacagtgcgcacctgcgcgcgcagaagttagagcaagcgctagaaggtgcaccagacagtgaataggacctatccggtgcaccaccggactgtccgatggccccgttgtcagaagctccaacggtcggaacccaacggcctggtgacgttgctggcgcaccagacagtgtccggtgcaccatacgacagaagccctcgccaacggttcttttggtggttagagctataaatacccccaaccaccacacttcaatgcatctaagtttttagccatcaaacctcatacaagagctctagacttcattccaagacacaaacaaagagatcaaatcctctcccaagtccggaatcactccaaacaaattagtgactagagagagagacttttgtgttcttttgagctcttgcgcttggatcgcttttcttcttcctctattcttgtgttcaactcacttgtaatcaaaacaagagacaccaagttgtggtggtccttgtagtggactaagtgtcccatttgattgaagagaaaggctcactcggtctaagtgaccgtttgagagagggaaagggttgaaagagacctagtcttcgtgaccacctcaacggggagtaggtttgcaagaaccgaacctcggtaaaacaaatcaccgtgttcatccactttatttctttgttgatttgttttccctctctttcggactcgtttatatttctaacactaaccccggcttatagttgtgcttaaactttataaatttcagatttgccttttcaccccccctctaggcgactttcaatcatgcctctgtctagatcaacattggccacttggatgagaatggcctgtacgatgtcacttcaccacgtttgctctctctgggtttgtccgtgctcaggtgatagtccatgatgtgatgcctacatgcaactttctactgcaattccgtgttttttgagttcacattactggcacctgacacagtgaatgactgaatggatttggaaagaatttataatgtgtggctaaattgactttcaggaagtccaaagttatgatctttatgtgttgctaggttgaccaccatccacggttaactaacacattttcatgctatggtttatgtctttatcactgttagtcaagtgaattgttacatgttgcttctgctgtgtcatggattcttctgcttggttatggttctgattgcatattttttgttgtgcctagggtg

SEQ ID NO: 390 - DNA, 18642 bp, Zea mays
  Intron number 1 from transcript GRMZM2G178681_T01 (locus G RMZM2G178681) derived from phytozome v7.0 (chr-ID 2; pos 2 7872041 to 27890682 reverse strand)
ctttaatcagctggtatgttttccttccatatgggtgtaattgattgtgtacttcagtaccactgtttgtatgtgattgctgatcatttgcttgtgtcactcacttcctaattatgcactgtgacatttgttttttgaactaccaagtggtagtattaactattaagttcttgtatgtgtcaagttttggttggtgttactctccttgtcttggtaaatagggccctttaacacaatgcaagacctatagaaaggactgtaatatgttaacatatttttttgattgcctcacacctctttctttgccaagccattgaatgtttattcctttttccattaccatttatggaatgtcgaatcagtttgcacccaaaccttttgaggaacttgaataaagagagaactcacatttgattcactgaatgtagcttgttccctcgcctttgatctaatgactccatggttatgtccttgttctaggcttttccgtttttcctcttataactatcataagctatcttggtcttaccaaaatttcttacaagtcaagcgatcttgatattttgattacctcgcaaggcaagcgattcatgatctaattcaattctttgagaagaaaacctaagaacctacaatatggactggacaacaactttgagaagaaaaaaggcaaatagaaggtgggaagatacacatacatgagcaaatgtactccaactgtgatcacagtcagaagtcgaacaagaaaggctcacaattatctttgctagacattggagctcgaatgtattagcaccatatgatccccatcagttaactgcatgtattaccaccatatactccaaaatagccagataatacttataagcagagactggtgataggggaagtctaaaaatcacaacgtattaactgaaaaattctagcagccctagaggaggacgcatgagggcttgtccgattagaggtggattgaaggggattagagaggattaaatttcttcatagtcaaaattgaatagaaagagatttaatccccttcaatcccctccaatccagatgcaatcgaacaaagcctgaaagggaagactgacatgctggcctaactgacaagcatggcacaaaggagtggtagcacttttagtacaggaaataacacaagactgtgctaggtgagataaggcgatgtgatcgggggtgcccaagacgctggtgccacaaggacgaagtggacacatggagtgtagaagtaggaagccacagaggctagagggtatgtgcgatgaatatgcagaccaagcgtgaggaagcgctcattgaggccttggacaatgttgaggacgagggtcctgttagagacaggctcgccaaggtcgcgaaggtcctcgacaagcttcttatagcgatgacaatattcagcgacgagaaggtcgccctaggagaaagagcggaactcttggtcgacgtaaagggcatgggtggtgcggttccctaggaattgggacttcatggagatccacataatgcgggtagtggcgccacgctaggagcctggaacactgtgtcgacgaattcgttggagatggtgccgaggaatcaggtgcggacaatgacgtccatgtgtacccaatcatgcgaggcaggagcgacgatgctggggaggaaatggtgttccaaggagaacttggtgagggtgagaaggaatgtgtcataccatcgagcgtagaacgtggagttgatgtcgaggaggagcaacatgaggacgcggatgttcaacatggtgacgacttgtgcatgcagatcgaacagggttgtgaccccttgttgtcgaacggcggcgttcagggacgaaacaagggcctcgttgtcaggatcgccattggaggcgacattgccctttgggaggggcaccgctggcaacatgttctagggtcgcgctcgcgcgcatgcgagcgtcggccgtgtcgctttcctgatgggaaagggctgcctctcgatcagcatcgggagcacaagccaaggcgtcatcgcggacaacttgggccaggcgctcgcgttcctaggcagcatcgacattgtcgaggacgtcggtgtcctgaggaagctcggggtcgacggatcatagtcacaagaaacaggtacagtggtagcgacctccgacctggatacacgtggtcatttttgtttccaccatgtaaaagtctctcacaggcagcgtaccacgttcatcgaccctatcggttcgggaactttgtgactatgcgacaaattcgatgccggatacgacgtgaggcgacgacggaagaccgacagccatggagcggcgccggaacggggcttgctggagcggaagcgtcagacaggtataaaaacctagactcgtgatactatgaaagtaatgtagatttggaggaatagtagattgattgagagacaatacatatacatatatgggtggaggacgtgaggcaaaaggaaacctcctgaatctaatgagccagtaggatcctacgtcctacccaatcttgcagggcctggactcctccccccaaatctctctaaccaactataccagaccggtcggttggaagctaggctccaagccgcacaatacacgacaacatataactgtctaacaatcaccaaacccccaacaatatattgtttgaacgttttgattcttgtagggacaactttttggcaaaaatacattgaaccaatctgtctagaatccataattccatcccgagtctgaagatcgagcctttctcttaagatccttagccatctcaagcatttctagggataatgcagaatttgctttctcttttatgtaagaactagttgaagttgcaacattagatgaagttgttgcaactgattcacatgtggcttgaattgtgccatcgcgctggggcaacacaaattctaaaaagatcgattctatgtcattacgtcgggtcctatccctatctgtagcggcataataagcaaaggaggaccagacttagcaatggaccaatggtagaacaagcaatggaactagtatacaacagagaaggatcaaggatcctaagagaaggatgagaacaaagaaggtgaggattactgtctgaagaggtgcttattttctaggaggcaggcgacacaaccacgcagggacgacaattggaggcgagtggcataggggtggcggtaggcggagggcgccgtactggagccgacgataggaggcactagagctgacaacaacaacatcctggatacggcgagactagggtggggaccacaatgtaaagataaataaaaagaacccttacccattgcgtccaacaaaaaaaagactagcggttcaggctagaaactggcccaaaaacttgcaattagtcggttaaactcttaatcagacgactaatcatgattaactgatgattagttgaatgatcataattctagtcgccctagtcgtacaccctaattgaacttacaatggggataaggccgacttatcgtaactaatcatgatgacctctattttcttcatttctcttgcacaattcaaccataaatattttagattcgtagatttgatccatagttgttaaggcaacaaggcgaggtaaggcgaccgtcctcctttttacctttaaaacgataaggggtaaggcaaggcgaaaccttagtaatatataaaaatagaaattataggaatatagtctcaaatagagggataatagtactatagcaactaatagtattatagcgatagcaatgagaagagaaagaggaagactgaagttgacatgggaaaagacaattttaggagacttgaaacgatgtgatatacccaaagatttagccttgaataggagttcatggagaacaactatccatatgatcgaaccttgatttttgggttttgttgggtttttaactctagcctactccaatttgtttgggactaaaaggttttgttattgttgttgttgtgtgtcgtgcttgtcagcttggtcgtcatgacctcaaacaatcaaagccacttaccattttgttttgatgcaaactcaatcataagggccacacaagtactagcagtaaaatcattattggtctggtgtatattcaaagtggtgcatcgttattggtctggtgtatattcaaagtactagcagtaaaatcattatttgtctggtgcatattcaaagtactagcagtaaaatcattattggtttgatgcatgggcaatccttaaacttttcacattatgccatctaggctgcattccctagcatttattcttttcaagtgctgcatcactagttcatacccccttgacatggggcctagcgtcggcctaacatgctaactaggtttgtcgcatgaggcatctgagcatagaacaaaaagtgctcttcgtcctttgctttacaatgcgagggaggatgatgaatgagagcccaccacaagtgagaccttgttcatgcgctagttgagagttgtctcgtggagaccaatcaacatgccattttagaactactgcctacatggagggtatggtcctatagtgcatctactaaaaagattagggacactagaatgcactttcattgtcggtggacctaaatgacacatttaagggctacttatgtatttttctcttttctctaaatgggtatttagagaaccttgatgaagataagcggcatatatggtgaaatatgaggcataacaagcaccaagcaatattcaacacaaggcacatatgtacttgacataacgtagtcattagatgcaaggttgaggctcagatctgatcagggatcaatcttagatggtttgcctgaaacaatgtcatcatggcttgggcaaaaagcgagaaagagagagggagtagcttgaccaactcttgttggctatcatggttgttgatagctgaagttgacatggttgccatcattagtgtggagtaagaagcaagaaaagacacgagggagggatgaaaggttgtgcgagtggttgaagcaaaggaggacgacaaggcaagagaggcagcactagggttgaaagaggtgacatggtgctagcatgtagtgaggaaagacatgctcaaccaaagaggagttgaaaggagatgacatgaagaacaaaggttatgctcgttgaagttgattgactatttttccatcttccaatggctctaattctcattttccattttgttttgatttaggggtttctcatctcttctccattagattttgatcatataattgttatctagctttatttgtgaaaaggatattcatgcttaattaattttttctatcggtttagtgagtcatgtttagggatggcaatgggtcgtgttcgggtcgagcaaaaacctgcccacgatcgcacctgaacccgtcgggttttcgggtcacccgcgggttttacttattgtacacttttaaacaatagttttgctataagcaattaagtagcagcaataattgagttacatgtacgaagtttaagcattttcacgttgaacaacaaaacatttcatgaatcattagccaagttacttatttaaaataattactactgtatcttaatcatttttgtgcaaaacaaataatgaaccaaatttcaggtcgggtgcgggtcacccacgtgttgaaatagaaacccgcacccacacccacacccgcgaaacttcgggtcgggtgcgggtgcacccttgggtcaaaatcttcactcatactcgtgttttggattcgcgggttaaaatttgtgatatcctggccccagtggatagtgatatcctggcccaaggcttaatagaattaatagagtattcataccaacaaggtgcatcttcttttttggaagcctatctcggaagaacctccaaattagaggtcgtaaggacattatatcctgccccagtggatagtgcatcttcttcaatatgaggtcgtaaggacattatatatacaccgatacatgagggtaaatatgcactaaataaaatttggtcggtgggggaaagaccgtccccaccacgatatttcactaagaagaggacaattagagctcagccgagaaaagcacgaaagatgcccccctcatacatggggatgctgtgctttgaggcctaacacacacgaccaaccccttacatgagggcccgcccactgtaggtcggttcacccatgccgacaaggaaactagcaagtgactttttttaatcttagcctgaaatccgctcccacggatagttgaacccaagacctaaggagtgctattgagaccatctaaccaactcagctagagactccttcgcaggtaaatttgcattaagccccttctacaatgtggaaatatagaaaacataaatatacatctaacaccctctctcaaactcaaggtggatcaaccacactgagtttggacaattagaactgatgctgagctctggtctatgctttggtgaagaaatcagctaattgaagctctaaagacacataacaaagatcaatgacatcatattgaactgtgctcgtgtataataagcatcgacaccaatatgcttagtaagctcatgctttaccggttcacgagcaatactgatagcacttttattgtcagacaaaaggggagtcgatgtagacacagaaacatcaaaatcagccagcaaccatcgtagtcaagtcacttatgcggtcgcaagagccatagcacgctgcacgcaactcaacttatgtactctaactgaaaactactaatttcttcttagtctttgaagcaatgagggaaccactaagaaaaaatacaataggtagaaacagattgacaatctgaggaatcactagcccaagtcgcatcacagtaggcatgagagctagatatcgagtcagctcagctcggttcgaccgagcttgagctggctcgtttagcacgtgagtcacaacaaaaaacaatatgcatatatagacaacaatataatcaattgttaattaattatgcactaatttaacactagaaatagagtaatagtactcataatttcatgatcacatcaattcaactccaaatcaacaaatcatcacttattagttcattcaactcaagtgaaggcttcattttgctgacaaatgctagcttgttcgagctaacgagctggctcgagctcgtcttgagctgactcgttaacaattcgagctgagatactagctcagctcatgacaaaattgaaacgagccgagttgagctaactacgagccgagcgaactgacaagccacgattattttgtccagcccttgaagctgcaaggatctagagcgaggaaagaacataatcgagaaatagttccacgccgataacgtagaacacggagatgatgtagcgaagctgagtgggggcagatacaaactgactcagaatatgcatagaatacgagatatcaggacgagtgacaccaatatagatcagactaccaacaatgtgacaatagcaagtaggatctgaaagaggctcaccatcagtggcatgaaggcaaacgttgagctccataggagtcttaaaaataaggtgatcattaagagaagtccttttaggaaacctcaatcccaagaaaatactaaggaggaccaagatcagacataagaaactgcttactaagacatgccttcacaaaggcaatatactgaggatcatcccctgtaataattatgtcatcaacataattaaggagaagagtcctaccacgagatgatgtgtgcacaaacaaagcaggatattgagtactggcagaaaaaccaccaatagtgatcatagaagcaaatgttgaaaccaagcctgaggagcctgcttgaggccataaagggaacgacgaaggtgacaaaccatgcccataggaacagaatacctaggtggtggctgcatataaacctcctcatgcaacttgacatcaaactcagagatggaccactcacgattagaagccacaagatgggtgtgaacaatgttcatgtgagcaacaggagcaaaagtctcatcataatcgcgcccatgctcatgctggaaaccacgggcaacaagatgagccttataacactcaagagaaccatcagagcagatcctatccttatagacgcacatcataatcatgcccatgttcctgccggaaaccacaaccaacaagacaagccttacgctcaagagaaccattagagcgggtcttaaccttatagacccacttacatgtgataggctgtacatgaggggatgatgaataatcaaccaagtgccagtacgctcaagagcaacaatctccctgacattgcaagttgccattcaatatgaagaataacatcatgatagggagtcggctcagaaagagcagttctaacaaaaccctgccatgtaacagggccaaaactaagcgatctataggttgacgagtacgaagaccatgtcgtgtaatcaactcgggagagctatcactagaagaagacaacctagccggagaagatgaatcagcgggagaggctgaaacatcaagagaagagggcacatcagtggaagccaatggggaagtagtcaaaggacaatgtcatgtatagacgtgtgtcacaggaggcttgacaatgtagtcgggaattataacagaagtctctgaagaaatatatatgggcatatgaggaggaacatgaggtggtaggcgggagagcaacacacatgctagcagagtcagcgataaacatgacagatagaggatcatcaaagatgcagaggaaacaacaatagaaggacaaggatagaaaggatgtcagtaaagacaacatcccgagaaatccgcattcgatgagcaactggatcccaacaacgatagcccttatgctcaacattgtacgaaagaagacatactcagctgactgcacagtcaacttatagcgctcatgatctgcaagaagcacataacacacaataaaaaagacgaagcctagagtaattaggcatcttgctacaaaggcgcgctcaaaaggaatgccaacttgaagagccgaagaaggctgaattttggtcaaataagcggtagtagagacaaccttggcccagaagtgagggaaacaaaagaagcaagcatgggagcacgagtagtctcaagaagatgatgatgctggcgctcaacaacatgagcaccagaacaagaaaactgagcaagcatacagtgcgcaacaagaacattacgaagagacccagaaagttattcttctgcagaatcagcacgaaagacacgaatggatgtgtcgaattgagtgctaaccataacacagaaaatcctatagatggataaagcctcactacgtttttttcataaaataaatccatgtatggcgagaaaaatcatatatgaaaaccatacaatattgatgacccccttttgaagcaaagggagtcgagccccatgcattagagtggacaagattaaaaggacactcagacacagactcagtagaacgataacgaagctgaatctgcttgcctaatcgacaatcctgacactaagctaagaactcattacctgaaaccgaacctaggagaccacgacgaatcaatgtactcaaacaagagccacaaatatgacatagacgatgatgccattgagcaaaagacgacatggacaaagcagctaacacagaactgccaaaactgggaggtgcagcggaaggaagatgaagctagtcaagcttccaaaggcgccgagggtgacgacggtgagggccagtaccaaccaggtgacccgcagtacgatcctgaacataacaagaatcaagataaaaaataacacaacaacaatgaccagcaagcagatcgatggacataagttgcatggtgacgaacataaccctattttattaaaattaaagtatttgaaaatttgaaataattgattttcaaaatttatggttggatttatgtcatacttgtactctaaacttttatatcaaagtgagggaaaatttgcaaacaattgataataagaggggcaatggtgcaagggtatgaacgtctttttatggtctgagttactgttatgtgcttataacaaaataggggcaagtagaggtttcgtttcaagaaaagaggggcaacgatgcaaagttcgaaaaacaagggtaaaaaatggagttagagtgtcatgtttaataattggcaaaggggaaccatcgtcaatatgaacaatgagagaatgagatggagcctgcatggaagaaagatggtgaaataaggtgtcacatgtaaagaagcactagaatcaagtatcgaaatatgtacctggagtgataggtggtccctcagtagaagattgagaggcagcagcagaatctgtcgaagctttagactgagttaccgagtcagcgactcccagtggtgtagacgtagcaagtcgacgaagtagcatgaacatctcctgggtagctgcaacaatagaactcttagaacctctagcagtggaactactagtagtatgtgaagaacgatgagcagactgatgattcttcttcctgtaacagaaagactccacatgtccatcccatccacaatgaagaccactaccctttccatgtgcaaaatgataaggtgatgaggacgacaacatcatcgagggggggcaataggctgggaaggcgaacacgaagaccgagcaaccaaaaccgaaatcgaagaaggcaacataccagctgtacgaatacggtcaagatgtcatatgtgcgacgaaactcaaggtcgatcttctaaccaaggcaaaattcacatgtgtaggagacatctgcggaccaagagtatcaagatgacgccagacaacaaacatttgacgatagaactcatcaacaaacattttacggtagaaatcatcctgtggtaagggctgctccttacaaatggcagcaagataagtagagtgaccattatgtttgtagcgatcacggagaagggtccacatgtgatgataattgtcatactcaatagactctacaacaaagatcctccatactagcagcgagaatagaaccggctcgagcatcctcatctagccatgttcgatatgcactatattgagcatcatatgttgccagttgaccataatctgcaagcagcgtctccttagactcaagaggacgtgagcatctgatagctggatggcctatgggtgttagttgcaagtggtgggtggtagattgttagcaggtcgattactggcaattagtcgatgcgcgccaggcgggcttgtcagtgggaggacagactcgagcaaaccgacgtcgtccgcggacgcgcgaacggatgtgaggcgcacacaactggaggtggcgacgcacgcacgagaagaggagacagcgtacacgcgtgcatgctcgagtggaacggagcaacacacgcacatgcaacttcttcgcaaggcgaatgacaaccacgagcgacaaaagattagagtgagtaagcaagtgcaaggtgcgtaggaaagattagagtgaaaaaggctaaccctaatttctcgcttcgataccatgttatgaatagcacttgtattcattatgaggccctaaggccagtgtatgtgcacctgtacatgagggtaaatatgcactaagccccttacacaatggggaaatacagaaaacataaatatacaagtaacaagtcattgtagtcactccaagtcatgcactagccctaaagaacaccacattcccaatcattaacaccacattttcggcggtgcatggccatgctcgttcttttttcttgccaacatggaggtgaacccgtgggacaagatttagttgcatgtgcatgggcaactttgtgattttgtcgaataacgtggagcacgaacctaatgtcccctaccctcttcggccttcatcttaagccttcgttttagtggctcgacttgtttttattttgtagtgtgtcgagctagcgttctagcttggttctctaatgagctagctcgggccagtttgcgagccagataaaccaagctaagccacaacacaacttcgtattgtcgtcggtgtgtccttgtctcatttttaccctctcatagttacgatctgtgatatggacatatgtagatgtgccatgtgatgaaattttgcattattgctgtattgcattattgcatggccacaaacctgcattgctattgaatatttgattattggttgcagttttgtgaacttgtggttgctagcagcatacaacattagtgttgtgcaataaaatgttacacatttgtgaaatggatgatggattgctctacaatgatgcttgttgctatcttgttataataagggtttgtaaatttgtactctaatgcatacttggttgtttgatttaatgttggaagttagagtctaggatgatagtacgacaataatgttatagtgattttgtatttgcagtgttaaacactttaactatgattgtattttgtgttatatatatttctttatatggatctgtgtttagttggtgtggcttgcaagcctatagagctgctcgagctctttaacaagccgagcagagccagatgtttaacttgtttgtataacgagtcgagccgagctggctcattacagtaacgagccataaagagtcgagctgggttgatatccatcactaccccgcaagcacaactctattctgtacaaatgttgagactggaccgaaaccctttggtgaagatgtcggcgaactgcaaagtggccaggaagcgaagaacgcgaacattgctgtcaacgagactcacagacgaagtggaggttaatctccacatgcttcatacgctgatgctgcacaggattggtggagaggtagaccacgctctcgttgtcgcagtagacgagggtggcacacacgaggggctgcggagctcatgaagaagctgacggagccagtaagcttcgaccatgccattggccacaacgcgatactcggcctcaggagacagtgggagacaacgggctaccacttcgaggactaggagatgaggttggtgcccagggacacaacatagccagaggtttatcagcgtcggtgcagaccactcgttcagaagtcggagagggtcgaaggaggctgaagtcgattgagccacgaaagtagcgaagaatctacttgacaatggtgaggtggggctctcgcggggtgtgcatgtgaaggcacttctgctagaccgcataggcgatgtcgagcctggtgaagctgtgttactggagagccacagtgaggctcctataggtcgtcacgtcgttgacctaggaccttcgtcgtcggacaacttcacttgagtgtcaacagtcgtggagtaaggcttacagtcgaacatgtcagtccgctccaaaatgttgatggtgtattggcgatagtgaatgaagaggcccaggggtgtcgctccttggcgaccccgaggaagtggtgtagaggacccaggtccttcaccatgaactcacattgaagtgcgatgatcgtgcgctcgaggagggcgacactagacaccgtgagcacaatgtcgtcgacgtagaggagaggtagatggtgtcatcgccgcgctaatggatggactaggacgtgtttgacttggcctcgatgaagctgagggagaccaagtaggaggcaaaacgactgtaccaattctgcggcgcctgcttcaggccatacaaagaacggtttaacttacacaccatactcgtgcgagcggagtcgatgaagtcggtgggctggctacagtacatcgtctcggttagagtgccgtgaaggtggtggaccgctcagtcccggtagaggacgagggagaggattgttcgaacggtggcgagcttgacaactgggctaaaggtcttgtcgtagtctactctggggcgctgagtgaaaccccaaaggacccaacgatccttgtacgcatctagggagtcgtcggacttgagcttgtagcagaagatccacttgctggtgaccaactcggtgctaggaggacatgacaccaagtcctaggtgtggttggccagtgggccacattttcctccaaagcgtgatgccaatgggggtcagcgagcgcgacacttacagaggaggggacatatgagggagccagagtagcatcgtccgtgagcaccagtcggtcgataggtcggagaatatcggtcgatcgacatgtcaccattgggtggacgtggcgagggttgtggtggatagcgactggatggtgcaccgacagctcgtcacgggaacaggcggaggcactggccagctcagcagaggggacagagggattggattctacacgccgttggtagacgcgtgtgagatcgacaaagcgagccgaatgtggtcagggaggtgaggtcaaacgaggtgcgagcgggggtgacaggcctgcgtgtggtgcagttgaaggtgactgtgccgcatgtggcggaggcgatgaggcgtcacttggtgcagtcaaaggggaaggtgccgcacatggcgtgggagaggatggcgggaccgaggatgggagaagtgatggaaagatgatgagattgaaatcgaggagactcgaggtcgaggggtggggaggatccagcaagggggaagacatcaccaaaaacgacatgttgagagatgatgacgcggtgggtgagaaagtcaaggcatcggtacttcttgtggtcagagcactcgaggaaaagacagcgcgtggatcagggggaaagtttgtgaggagcactggtataggtgttgggatgacatgcacaaccaaagacgtggaggtgcgtataggaaggggcggtgccgaagaggatgaagaaaggagtgggatgattgacccaccttgaagggggaggcagttgagatgggtggtagtattcagcacctccacccaatagctagcagagagacacttggaagagaatgcaacatatcatgttggtggtggtgtgagtcttgcgtttggctcgaccgttcttaggaaaagagctggagatggtgttgtcgaactcgcgaccattgtcgcactggagagcacgaaccgaacgatcaaactgggtggagacccaaacaaaaaagtgcgaaagattgcgaaaagtatcagactgggtggagacccaaacaaaaaagtgccaaagaaaatgggaaaagtatgttagtgtggtgtcattgtgtcctatcgttataatgggccttggcccacctatctaattatatatcaatacatcccttacccaaatagggttagggtttttagtctatccacatggtatcagggctagggtctcttctctcatccccagccgccacctccctactccacctcactcatccaccgtcattagtaccgggcactcgggttagcccaaaaatgcaggtcgagttttttgggcttttcaaaattcttgtatctagaaatgatgcctcaaaataggtttcatgtattgcatacttgatatttcgggtacccgaaagtttcgggttcgggtagcccgttctacctaattttaaagagctggctcatggaaaactttggtgcaaaggttaccagaatcaccaccactgtagcttttggtcattggaaataacacatgccgacaaattaagaagaaagaactgagagcaaaaggatcgtattgttgctggtttcgacaatctaatagatacaagtagccttgtgaatttaacaggaaactctgaagactgaaccacggtaacaacaatacaacatgaccaattttgtttagggcgcagaacaacatcaccagttcaccaccatctctatctccatgcccaccctgaaacgatcatgtggaggcgcaccatagctacatgctacaatgggcaggcgagcatatataattatatatcaatcaacatgagtagcaaactgaggacatggtgaactggcgtggtgcctagtgcgcttagtgcgctgaacgactagagcccaaaggagaggagaacgacacggatggaccatgctccggagcctaaggccgaatagctagagtccgaggccgaacgacgactagatttcgtggcagtgggggcgcccgcaccggcacatcgttggtggcaggctgacgactcaggctccatccggtcttggcgtctagtcttggaatcgtggatgcctgtgtctggctgatcattggtctgtggacaccagaggtccatcgcttctcgctagggcactggagggccgtcggcgtggcctggctgaggcattaaagcctttacgttggtgggctgtgtcggaattaggaagtcttatagatctacatcaaaaataatttcgggcttaatgggtatttcgggtaccgtcgtgtgttacccgattaggcttgaattaaaatcgggtatttagttttgttactcgctggaaccatttgggtactgggtttcaggctaaacgggtatgggctcaggtattttgggttttgggcttcgggctcgggttttatgcctagtactagccgtcatcctctcaccttcggtggccgttctgtcggtccttgcccgctcatggaggtcctccccgctaacatctgctgcggacgcaacatcgctctcctctgctctgcgccaccctacccgcccgtggttgtctgctgttcgtcgcttagatcttccccatggctggaaccactggctcacagcccccgcctgtggtggacgtcgttggcaggccatcttcgtctgcttcgccaaccccacggtgggctccatccgtcctccgctcgtcgtccccatcccgccagcggacatcctcgccttcctcgcatggaccttcctcaggtagtatgacctcgcggttggtgtcgcttccttacctttcgccccggctagaccgctagagccagtccgcactctcgccgcaccctacagccgaccccgacgccacgctcaacttagcctccaccatgcacgcccctgctaaacatgtgctcccctctgctcgggccacgccactccttgctccgcctgtgccgcataccgtagtcctagctgtcggcctccactggtctctgatgcctaccccgtcgaggtgttcctctatcgcctcgtcgatgcggagcttgctgcggcatcggcactccctgcaccttcttgcctcggcttcctcgacgcccgtccttcgccatgtcgtggttcacgtgcctctctactgtgtgcatgtctcccttcacgatgaccagcttctctggagcacgttcgtggccttatatcaagtcatgaaacctgttctccgtgactgcatcgagctctaccacccctctcgcctccctccaccctcaggagggtcgccacactcttggaccgttcgtgttctgcagtgtcgagattgtctccataacgcttgaggccttgtcgtctccaccacccatgtccgtcatcagcatgctcactactgtcgaccctagcacccctctcgatggctctgtgggggtgccttcccttgctctcttctcgtatcccatgtcttcgcagcccagtcctcctaccgactttgttgttgactccgacgtctcgtaccacaccactcctaaccctagtattgtttctttaccccattctcttagccccaccttcccttctttcatcattgttggtaatgggtagactatgtctgtcacctcagtagatgacacggttcttcctggtcctttgtatctcaacaatatcctcgttgctctcaatatcattcagaatctttttggttcatcgcttcaccattgttaaccactgctctatggagttcaatccttgggggctcaccatacgccatcttaccactcgtgccgtgatcgcccgttgcgatagttccgaccccatatattctatccgccttcctgccccttctacatcttctcgtgttgccccagcctacgccatcgccgttgttgcctctggctccacttggtactgtcgtgttggccatcccggtcacaacatcctttccagactcccgagcacctctgacatcctctgcatctgtggcaatgctgccatgtctatcagcttgggcgccacgttcgcttacccttccccacttccacgtcccgcactgctcacccctttgacctcatccattgtgacctttgcacatcgctgatactgagccttgcctttctggttaccgatactatctggtcatcctagatgactaacttatctcactgacaccttcaaactctcctaagttcagttgtttttatttattgaatattaacgtcagcctgtaacctatgaaaacttggatggttagtattattgattatactgttaaaggtcatatggacattttctatctttgaactgtttttgttgtcttcaatttgctaagtaaaggtgcaatattagtttttttggtggcacctagaatggtgaatattctggattatgatgctaaaggttaacaaaacctttggtaaagccagctatttgttgtcttattttttacaagttaagaaatcaccaaacatttatttgaattagccattatttatacattccattgtaactattacatttgtcaattcatttgtttgacattaacatgtacagaaactttgcggctcacggggtagaagtttaacgcc

SEQ ID NO: 391 - DNA, 3113 bp, Zea mays
  Intron number 1 from transcript GRMZM2G176358_T03 (locus G RMZM2G176358) derived from phytozome v7.0 (chr-ID 5; pos 1 75649991 to 175653103)
gaaggaaatccggcaccgagattcgagtcgaaaaggtgagctgccgtcccgctccttgtcttgtctggaaacagtcgtttcgcgtgacgttggcaggctagccgcgcgcgcttgttggaggttagggtttcgctcgaatcgactgatgcgttcgatgatgattcacgggggccatcctccacgcccttttcttgtctgtttggtcgtgccttcgcgtatacttgctatttttttgcgatttgccgtcctattattctttctgacgtaatgtcggtccttcaatctgatgtttcatatacaaactcaaggattagattcgaatgtatatttttttagagcggttgttattaggttggagattctgtgccatggcggctgcgtctcgtcccgttcgattgatccaactagatggtagatgcggttgcgaatatgaaaggtctgagagcacggatgcgcgatgtttaacagcacgtacagcagaatcatagtcgtagaagactcatatggagttccgagtttggttgggccgaccacgatgtagctcacccgtagccagaaagttgtacacccttagcagaatcatatttgtttgaagaaggattttgctatttttgtagccagtatagatgaatatgaatatactccctgcttcccaaattagtattcgctttagcacttagtatattcaaatagatgatgatgaatctagacacatacaaaacacatacattaattgttgtatgagtccattaaatgtctaaaacaaattttaatttgggacgtagagagtactattgatcctcacttgcaagttagcttgctctgagacgtcagatttgtttaggtcattactgggtgaaatgttccatgttttgtctggaaactcctttgcaatgttgctaaattatgaaactgggattcttgcttaggcacatttgtggtatggaatatgcagtttcaaacgctcaagtatttgaatgaaacttctgattatcttactttgtgtcctgtgtttgttatccaagccactaatgtactaacaatctggtgtaaggtgtttagtttttacgtgttcgataatcatgcattggttgaaccataattttttccctgtagtttattttcttggaaaatacttcatgcttatgtgcacctgcttttctgatgttcattaagatagtagttcatgcgacactgctcttgctatttatacatttaatattacaaagtttaaaatcaacactgtgcacacaagcaagtacataactaaattttatatatattcatgatagtgtgtgcaaaagtgtgaacaaaccaaacaagatctgtttatgaactagtttctgtagccagctaaccttgatgcaatgcaaggtaaggttgtgaggagaataagtattgttgacgatagtataatttattagatatggtgaactttgttggactttcttttttatttgaaacctggaaccatgcttaattgtttagctttatttacaaaactctttctatctttaacatttatatacagcaaacagttaggtaaactagtagcttatggttatgggtagatgcaacctgttaatggagatggaaaatttcgctccaattggcctttatgcatcacctttatgacactgctgttgctatttatgcattgaatattacaaagtttaaaatcaatactgtgtgtgagtacataattaaataagatatgcattctttcatgactgtgtgtgcaaaagtgtgaacaaaccaaacaagatctgttttgaactagtttttatagccagcaaaccttgatgcagggtaagattatgaggagaataaggaggtgtttggtttctagggactaatgtttagtcccttcattttattccattttaatatataaattgataaatatagaaactaaaatagagttttaatttctatatttgatgattttgtaactaaagtggaataaaatgtagggactaaaaattagtccctacaaaccaaacaccccctaagtatttgtgaatagtgatgatagtataattcattagatatggtgaactttgttggacctccttttatttaaaactgactaccatgcttaattgtttaactttatttagaaaactcattctatatgtaacatttgtatacagcaaacagttaggtaaactagtagcttatgcttatgcatagatgcaacctgttaattgagatggaaaacttccctctgcattggcttttttgcgtcaccttttcgcactattgcggagtaagagcatctccaagggaacctttatttttgactctcaatttagctctccataaagattaaactctatatgtagcatctcattcgaactgacttcaacatgcaagttagtttggctagccggagtggccagccaaatttgcctagtgagggagccaatttagggggtgtttgggattgcctccaggttccaactccagtgtggagctgtagtttataatatcaatttaagtagttttaaaaatatttttaatataaatgataaacaaaatgacttatctaaatgtcttctaaagactcacagctccagctccacggttttctagagcacttaatgacctgctccaccaactccaccaaattttctggagctgtcccaaatagggtcttagagagctggatagattggtgagttggatggctggtccgttaaagatattttgctattaagtagctaaaatttagattgacaagtcatttggctagtctcttggagatgctctaactggattacttttgacacatcgccttttattttcatgttattgtgtgtggagtacctgacttttttatatttatcaccctttttttactttgactgtcttaggtgatgagctgtgactgccaaaataaaaaaagaataattatgctttgatacttcctttaggtaacatatataccaggtgtgaactaacctgagacttgtggactttgcttgaatctcttttgtggggaagatctgttcactgagcatgatctgtagccagagcttcattgtatatgctcatttcattgtgtggttatttttgtaattcagtcttttgtgtaggacatcatttgctag

SEQ ID NO: 392 - DNA, 14779 bp, Zea mays
  Intron number 2 from transcript GRMZM5G844096_T01 (locus G RMZM5G844096) derived from phytozome v7.0 (chr-ID 4; pos 1 8442231 to 18457009)
ggagcacccttggtctgcaatttgattggtcaaaggtatgtatccggttgctttcatggcaatgctaattgctaacaataagttcatttatattattgcttgaattctggtttgtggtgatattgatgtattatgaatttctgaaacattattctgcaataaaaatatgttcggaaggttctacaattgtttcaaaagtgttctattcagatcaatcatattattattacagatatagaattccattggagtgttaagtgtatgtcaaggcacatcctataggaccatacaacagatgaggcttgaggctctccatatatagttgtcattccactagtggagatcattctctcaaatcccaaggttagtaacatggtataatagcaaggattagggttaggttaggattagttcaatcctccaccatgatccaaatcaattcggcaaccaatttttttgcacgcaacacgcatttcttctggcttgcggcccgttggccggcgtttctttgtaggcgactgtcacagatgtttgtctggtcaccaatagtcgatgatcactgttcatggatatcttttgtttctgttattttggctgctgttttttcacctagcactcatgatcctgctctatgtattcttttccctccacgtgggtgcactttgctgttcattacgggagataatgtggaacatatttctcatgtgaagaaacaagttggtgtgcaattattttgggtactctcagtcatctcttaggaattaagttttttacattctccaaagggacattatctttctcagtctaaatgcatacaagaactttgcttattcagccattactgattcttagacagattgccggccaggccaggggcggacccaggcccatggctgcctgggccacggctagagatggccaaacgggccggcccggcccggcccggcccgggcccggtgaagcccggtcaaaaccgggccgggcctgctgagcccagcgggcttaagtttctgtccaagctcggcccgcagcgggcctaaacgggccgggccggcccgtttagcacgaaaaaacgggccgaaaagcgggctaaacgggccggtaagcacgttttagtgtaaaaaaacgggcttaacgggcttagaggtaaacgggccgtgccgggctagcccgccgtgcctagtttcctgtccaagcccgcccgcttattctaccgtgccgggctcggaccgggcccaaaaagcgggcttcgtgccgggctcacgggcctcgtgctttttggccatctatagccacggcccggggcgcaggcccaaattttttttagaagagctctgtcctctggtctctgccggttttccctctggcttctggcctcgctgagtcatagttatatgtatgtatatgcatccggcacactgcaagcttcacaagcacaggataacacacatgcaaacaagagcaggctacgaccacctacatgtgtcctacatatttacatactaggctagtagcaaggcctcggacagcacatgataggctcctgctagtctagagagatggatagagggagaaactagagaccaaaccatcgagctaggataagcaaaaaaaattccaagctagcaaatgattctaaatcgaagaggcaaaaaaattacaagccacagggcttacaaactactacctccattttcttttatttgacgcatgatagttcaattttacactagcaaacgtcaaataaaaaagatcggagagagtacgaaacaagatatttcatacaaccatctaataccataatcaccaaataaaatttcaaaaagttgcgaccaaataaacaagatcacatggctagaaattaagtttgagattgagcctctgtggagagacctttctcatttatgaatatcattaaaactgagttgcagaataagacaggaaacaaatggcttaaccatcgtatgatttccttcaagtcgcgttcttaatatgatttccttcaaggttctggagcaagaagcattaatgttgatgttgacatgacacatttggaaagagctacatcataacttttatgccatctttagcatctatgacaacattgtttctgtaacgccccgaatttttgcagttgaattttttcttttctttactcgccaaaattcgggcgttaccttttccttttctttttcccctcgctaaaccttgaccttttccaaagtttagcgggattcggtttggaattcccgtacgtataaaaaaccctaaatgctttatgtttgctcgatgcaccatgccgaaccttgcatttcttttgattgctttgaaaagtgcaatgcattcatgtagaaagatcggattttgaaaatgtggagaagatcttttctttctttttcttcctccctctctttttctctcctcttttcctctctctcccgcgcccgtgggccgaccccggccggcccagccgccccctgcgcccccccccttgggcccaataggcccaaccgccccccccccccttctgtttttttttttattttttttatttttttttattttattttatttactttctgtgatcataattactgtattttaagtaggctaatcactgttcatgctatggaaaataggaagtttaatttaaaattccgttatgttattgattcacgtagttaattgtttaccctgtgcaatgttgatcaactaaaagtgattaggtttccattagtatatataaatatgtataacagaattattttgttaaaaaccaattgtgtcattagtgcataagatttaacccccccctgcgagacctttcccgtttctttctagccataacaaatgcgttatcgaatgtcatacttgatgcatattcgctttatttgttatcttgtatggtgtactgttcttttgtattaaatatgtggatggatgtatgtatgtttgcgctcgcatagagaacgatccggtcgaagagcccgaggaattcgcaggagaagcccctgagcagcagtcgtttggtggaggcaagtgtcctttgacctatctctgtcctattcattctttaattcacctcccgctttacacatttatacctaaggattgactagcttttgttatccatgtccttgtttacctatttgggtcggattattactacttagtctgatgctattgctcaactctaatcaatgaacatgatgtgattatctatgatacgttgttttcccgttcttctttatgattatacttgtggttttcaaggggactcgagcggtttctcgagtgcctctccgtaaggacctgttctatggatgaccgcccgggaaaacagtgcaaccatgagggtggaatggggtgcccttagctgaataattagaggatccggggtgtagttcacttagccgtcgtgccgtcaatggggctcggtgtatgcggctcgctctgccaagtttgggttcgccccttggggaggagtgcggtgcatttaggaaacctaacgggtggctacagccccggggaatctttgtaaaggcttcgtagtgaatccctggccattcacctcgggagtgaataagggtcttgcaagcccgggccagagagggaatcacggcttgtgggtaaagtgcacaacctctgcagagtgttatgaaactgatatatcagccgtgctcgcggttatgagcggccaagggagctccagagattagtgatacttgatcagagatattgtggtacaggtggcaatgagattgatggttctggttatgattatggtattggtaagtggtattctttccgtttggaaaggatacatcgggttaataacttgggttaatgctaaaacttggctttctactagtaagtaataacctgaccaactaaaagcaactgcttgacttatccccacataaagctagtccactacagccaaacaggatacttgctgagtatgttgatgtgtactcacccttgctctacacaccaaaccccccccccaggttgtcagcattgcaaccactgctcaggagaagatgaagctgtggaaggagacttccaggagttccaagattacgacgagttctaggtgtgggttagcggcaacccccagtcggctgcctgtgaaggccgcgttatctacgtttcttttccgcactttgatttattgtaagaactatatggacgtctcagacgtatgatgtaatcgactatttcccttattaatactattttgagcactgtgtgatgatgtccatattatgtaactgctgtgtacgtgaataactgatcctggcacgtacatggttcgcattcggtttgccttctaaaaaccgggtgtgacataagtggtatcaaagccgtgctgactgtaggaccgctaacctagagtagaatggtcgttctaaggattatagacctctgtctcttccttgactttgatatcccttcaaaagttggtcctactgaccaaacctatgttctactatatattataccttgctgaaaatcatgttttattctaatccttcacctacttatgattcattacttgctggtcatattaattctgttctcacccttttgcttgcgatgtcttttgtagatggctcgacttagacacactgcacgaaagtcagtcatccccttcttaccctcccgccttgctgagcgtccgcttcgccgtcccgtggccggacagtccagccacttggagagactgcaccaccgcctgcgtgaggagcaggaacgtcgacgacaggagcagcagagctcttccctctcgctccaccaggagatagagtctgtgaggagctgctcccctgtgcttcctctggagccgccccctgcaccaccactgggcgccccagcttctggagtagctgctggaggagacccagacgacggagatggcgacgacagctcgagccacgacaccgacttctctgctaaccctgagccggaaggatgggttgctcgacccatcactcgcgacgctgctcgcgggtgtcacttccacgatgcgctcgacaccctgctacgtcgggcatttgaccggcatacttggtccgtcgagtatcgctgtgtggtctaccagcatagtcgcggggtctacccggaccgctgggaggcgacttgcttggtgcgctgcccggaggacagtctccagggtgcagaggcctgttcagagcactattctatctctgagcgggactcagctgaggcagccatgcaagatgctgcacggcgtgcgctttcgcactactgctcggttttcggtggggcagctgacggtcttgacctgaagtattacccccgccgttcatctggcagcacaggaggcgtgattgtctcacccgtcggtgagggcaatcctaggttgagcagcacagtcaacctagccgccgtgctaaacacggagctggaccatgcattagacgagctgagtagggctcgtgctgagatcgccctgctgcgggctgagcgcgcggaacgtcgttttctggacggtggttcccccgctcccgttgggactcagcacccgtaccgctcacctcagcgtggacaccagtcttatggcaatcccgcctgcaagaccaagataaacctagaaccatagatcgttagagttggatcttgtaattaatacgaaataaatatatacatagaagcttcagtcttagcgttagtctcggtcttagttagttttagttagacagggtagtttgctatatcctgtgcatttatgtttgtcatgatgaactatgtttggtttggatctttgtaatgattgtcaccagagtgtgggtatcccctgcattttggtttacatactatgtcaataaagttagttatatagttgggaaacccattattctcctttcctctttatctgagaagctgtgtggtctgtgttggagatcagtgaagatgctcatctgttcagtgctgttggagaattctatactcttttcttatgctgcaagctttgccagatcagttctgatgtgtggttgcgttctgcagatgtcagagaacaggcgtagaggaggaaggcgtgctcagcaggagcgagccgctccgcaggatgaggtgccccagcagcagcacctgccgcccccgcccccgatgtcgatcgagcagatgtttctgatgcagactcaggcagttcaagctatcggtcagactttggccgccattcagcagcagcagcagcagcagcagcaagcaccaccccagcctcagatgcctcagatgcctagagataagcgtgctgaattcatgagaggtcatccaccaacgttcgctcattcttctgaccccatggatgctgaagattggctgcgcactgtggagcgggagttgcataccgctcagtgcgatgaccgggagaaagtcttgtatggtccccgtctgttgagaggagcagcccagtcatggtgggagtcttacctcgccacccatgccaaccccgacaccatcacctgggaagaattcagaggtagctttcgtcagtaccatgtccctgcaggtctgatgacagtgaagaaggaggagttcctggccctcaagcaagggtcatcgtctgtcagtgagtatcgagacaggtttctgcaattgtctcgctatgctcctgaagatgtcaacaccgacgccaagcgacaataccgttttctgagaggcttggttgaccctctgcagtatcagctgatgaatcacaccttcccgacattccagcacctgattgacagagcgatcatgacggagagaaagcgcaaggagatggaagatcgtaagcgcaagatcagtggaccccagcctggaagcagcagccgtccccgtttctcaggcaatcaacctcagcagttcaggcagaaccagcgtccacctcagcagcatcagcagcgtcagcagtatcagcagttccaaaggcagtaccctcagaatcagtaccagaaccgtcagagcaatcagtcaggaggtcagtttcagaagcagaatcagcaagcacctcgtcttcctgccccagcaaatcagcagaacagtcaggcagcaccagctcaggttggaaacagggcgtgtttccactgtggagagcaaggccattgggtgatgcaatgtccgaagaaggcagcccagcagcagtcaggccccaatgccccagcgaagcagaatgtgcctcagcctggagcaggcaatcgccctcagccgcgttataatcatggaaggctgaaccacttggaagctgaagcagttcaggagacccccgacatgatagtaggtatgttcccagtcgattcccatattgcagaagtgttatttgatactggagcaacacattctttcattactgcatcatgggtagaagcacataatcttccaactactaccatgtcaacccccattcaaattgactcagccggtggtagaattcgagctgatagcatttgtttaaatgtaagtgtggaaataagggggatagcgtttcccgccaaccttatagtaatgggtactcagggaatagatgtcatcctagggatgaattggttagataagtatcaggcagttatcagttgtgataaaaggacaatcaagttagtgtccccactaggagaggaagtggtgaccgagttagtcccgcctgagccgaagaaaggaagttgttatcagatggctgtcgatagcagtgaagcagatccaattgagagtatcaaggttgtgtctgaattcccagatgtgtttccaaaggatttaccgggtatgccaccagagcggaaagttgaatttgctatagagcttcttcctggaaccgcccctatcttcaagagagcttacagaatatctggaccagagttggatgaacttaagaagcaaattgatgagctgtcagagaaaggttacatccggccaagcacctcgccttgggccgcccctgtcttgtttgtggagaagaaagatggtaccaagaggatgtgtattgattatcgagctttgaatgaagtcacgatcaagaacaagtatcctttgcccagaatagaagatctgttcgaccagttgagaggagccagtgtgttctccaagattgatctgaggtcaggttatcatcagctcaggatccgaccttcggacattccgaagacggcattcattaccaagtatggtttatacgagttcacagtgatgtcttttggtttgaccaatgcgccagcgttctttatgaacttgatgaacagtgtattcatggattatcttgataagtttgtggtggtattcattgatgatattctggtctattctcaaagtgaagaagagcatgcagaccatttgaggatggtattgcagagattgcgagagcaccagttgtatgcaaagttgagcaagtgtgagttctggatcagtgaagtcctgttcttgggtcacataatcaacaaagaaggattggctgtggatccgaagaaagtggcagacattctgaactggaaagcaccaacggatgctcgaggaatcaagagcttcattggaatggccggatattatcggcgattcattgaagggttttcgaagattgcgaagccaatgacagcgttgctaggcaacaaggttgaattcaagtggacccagaaatgccaagaggcctttgaagcgctgaaagagaagttgacaacagcgcctgtcctagtcttgcctgatgtgcacaagcccttctcggtgtattgtgatgcttgttacacaggtttgggatgtgtgttgatgcaagagggaagagttgtggcttactcgtcccgacagctgaaggttcatgagaagaactacccaatccatgatctagagttggcagcagtggttcacgcactgaagacatggaggcactatctgtatggacagaaatgcgatgtttacacagaccacaagagtctgaagtacatattcactcagtcagagttgaacatgaggcaacgaagatggttagagttgatcaaagactatgagttggagattcattaccatccaggcaaagcaaacgtagtggcagatgctctgagcagaaagagtcaagtcaatctaatggttgctcgtccgatgccttatgagttggccaaggagtttgacaggttgagtctcggatttctgaacaattctcgaggagtcacagttgaattggaacctaccttggagcgtgaaatcaaagacgcgcagaagaatgatgagaagatcagtgagattcggcgattgattctagaaggcaaaggcaaagattttcgagaagatgctgaaggcgtgatatggttcaaagaccgcttgtgtgttcccaatgtccagtccattcgggagttgattctcaaggaagctcatgagacagcctattcgattcaccctggcagtgagaagatgtatcaggatctgaagaagaaattctggtggtacggaatgaaaagggaaatcgcagagcatgtggctatgtgcgatagttgtcgaagaattaaggcagaacaccagagaccagctggattgttgcaaccgttgcagatccctcagtggaaatgggatgaaattggtatggatttcatagtcggattgcctcgcactcgagccggctacgattccatttgggtagtagtggaccgcttgaccaagtcagcccacttcatacctgtcaagaccaactacaacagtgcagtattggcagaattgtatatgtctcggatcgtttgtcttcatggtgtgccaaagaagatagtgtcagacagaggaacgcagttcacctctcatttctggcagcagttgcatgaagccttgggcacgcatctgaatttcagttcagcttatcacccgcagacagatggtcagactgaaagaaccaatcaaattcttgaagatatgttgagagcctgtgcgttgcaagatcagtccggatgggacaagcgattgccttatgcagagttttcctataacaacagttatcaggccagtttgaagatgtcaccatttcaggcgctgtatggaaggagttgcagaactccgttgcaatgggatcagcctggagagaagcaagtgtttgggccagacattttgcttgaagccgaagagaacatcaagatggtccgagagaatctgaagatagcgcaatcaaggcagcgaagctatgcagacacaagaagaagagagctgagtttcgaagtcggagactttgtctatctgaaagtgtcaccgatcagaggagtcagaagattcggagtcaaaggcaagctggcaccccgctacattggtccgtaccagattcttgcaagacgaggagaagtggcttatcagctcagtttgccagagaatttgtctgctgtgcataatgtctttcatgtgtctcaattgaagaagtgtttgcgtgtgccagaagagcagttgccagtggaaggtcttgaggtccaggaggacttgacctacgttgagaagccagctcagatccttgaggttgcagatagagtcacccgaaggaagaccgtcagaatgtgcaaagtcagatggagtcaccactctgaggaagaagcaacctgggagcgtgaagatgatctgatggccaagtacccggagctctttgctagccagccctgaatctcgagggcgagattcttttaagggggataggtttgtaacgccccgaatttttgcagttgaattttttcttttctttactcgccaaaattcgggcgttaccttttccttttctttttcccctcgctaaaccttgaccttttccaaagtttagcgggattcggtttggaattcccgtacgtataaaaaccctaaatgctttatgttgctcgatgcaccatgccgaaccttgcatttcttttgattgctttgaaagtgcaaatgcattcatgtagaaagatcggattttgaaaatgtggagaagatcttttctttctttttcttcctccctctctttttctctcctcttttcctctctctcccgcgccgtgggccgaccccggccggcccagccgccccctggcgccccccccttgggcccaataggcccaaccgccccccccccacctcccctttttcccccaattctttctccctccctctcattttctctcattttctctccctctccctaagccgccgcccctacccctgccctaagccgccgccgccccctgcccaaccgccgccctcggccgcccctgccgccggccgcccctcgccgtcgcgcccctccccggtgagctcccccctccccctctcctccctcccccatcccctctcccctttccccatggccggttcggccgcctccctgcccgcccggtccggccgcccgccgcccagcccagccgccgtggccggctcggccgccccgcccccccccctgccccgccggttcggccgccccacggccggctcggccgccccctgcgccgccccctgccccgccggttcggccgcccctgcgctccgccggttcggccgccccgccctcgccagctcggccgccccctgcgcgccccgcctagggccggttcaaccgccctagggccggttcaaccgccccccccccccttctgtttttttttattttttttatttttttttattttattttatttactttctgtgatcataattactgtattttaagtaggctaatcactgttcatgctatggaaaataggaagtttaatttaaaattccgttatgttattgattcacgtagttaattgtttaccctgtgcaatgttgatcaactaaaagtgattaggtttccattagtatatataaatatgtataacagaattattttgttaaaaaccaattgtgtcattagtgcataagatttaacccccccctgcgagacctttcccgtttcttcctagccataacaaatgcgttatcgaatgtcatacttgatgcatattcgccttattgttatcttgtaggtgtactgatctttcgtaataaatatgggaagggatgtatgtatgtttgcgctcgcatagagaacgatccggtcgaagagcccgaggaattcgcaggagaaagcccctgagcagcagtcgtttggtggaggcaagtgtcctttgacctatctctgtcctattcattctttaattcacctcccgctttacacatttatacctaaggattgactagcttttgttatccatgtccttgtttacctatttgggtcggattattactacttagtctgatgctattgctcaactctaatcaatgaacatgatgtgattatctatgatacgctgttttcccgttcttctttatgattatacttgtggttttcaaggggactcgagcggtttctcgagtgcctctccgtaaggacctgttctatggatgaccgcccgggaaaacagtgcaaccatgagggtggaatggggtgcccttagctgaataattagaggatccggggtgtagttcacttagccgtcgtgccgtcaatggggctcggtgtatgcggctcgctctgccaagtttgggttcgccccttggggaggagtgcggtgcatttaggaaacctaacgggtggctacagccccggggaatctttgtaaaggcttcgtagtgaatccctggccattcacctcgggagtgaataagggtcttgcaagcccgggccagagagggaatcacggcttgtgggtaaagtgcacaacctctgcagagtgttatgaaactgatatatcagccgtgctcgcggttatgagcggccaagggagctccagagattagtgatacttgatcagagatattgtggtacaggtggcaatgagattgatggttctggttatgattatggtattggtaagtggtattctttccgtttggaaaggatacatcgggttaataacttgggttaatgctaaaacttggctttctactagtaagtaataacctgaccaactaaaagcaactgcttgacttatccccacataaagctagtccactacagccaaacaggatacttgctgagtatgttgatgtgtactcacccttgctctacacaccaaaccccccccccccaggttgtcagcattgcaaccactgctcaggagaagatgaagctgtggaaggagacttccaggagttccaagattacgacgagttctaggtgtgggttagcggcaacccccagtcggctgcctgtgaaggccgcgttatctacgtttcttttccgcactttgatttattgtaagaactatatggacgtctcagacgtatgatgtaatcgactatttcccttattaatactattttgagcactgtgtgatgatgtccatattatgtaactgctgtgtacgtgaataactgatcctggcacgtacatggttcgcattcggtttgccttctaaaaaccgggtgtgacagtttcgtcgtacaatttttctttatatgctactattagagtttatggtcgcttcggccctggtcttggccaatttctgggtccgccactgggccaggccttattggccgtgcctattggtcaagcctaggtcttgagcccatatggttttttatagattggtttctatcttgataggcaaagatatccaacggtggtgatactaatataaactaacccgagttgatccttgcctatatatcaatgtttacaagtcgggcgaccaggcgactaatcgcgattagggcgacgattagtcgacctaatcggtcctggttgacctctggtcgtccgttagtcgtcctatggatttaaggacatatatatatatatatatatatatatatatattgcatcagcagcagcactgacgccgctggacggctggagcacttggaggctggaccgctggagcagagacgtcggcaaggacagaggagaggagagagacgtcggcaacgacagaggagaggagtagggttttctggcggttgggaaatgttctggcggctggaagggtcctagcggctgggagcctgggagggtttttgaaggggcggctactgtagatgggccaaaaacaagagggaagcccagtaccaaaagtccaaaactgcaacgaccaaaaacgaccagacagtgctcgaccagacgactaatcgttcaggtcgacgactagtcggacgactagaaaccctaatcgcgtcgtcttcctaatcgcccacttccaggtgaccagtccgactaatcacgattagtcggacgacttgtaaacactgctatatatgtacatttactccatggctctgtaatctgtctattttttactgtgcaattcgtttgctttcactggtaattgctcagctgcaacacctatagatctgcgcttgcagcatcatgctacttatactatgtctcttgaggattcttgctatcgtttgttatggataactgttgtcgagtccttccttggtcaacagtataggcggcgccataagtctaggatatgggcccatgaggttctctatgtagttgtcatctccactaatggagatcattctctcaaatccccaaagttagtaacatagagatagagcacataacagaatattacaactgtaaggacatttagtaggagttgacttaaggagctattctgccagttcaaaattgttcaggtgaagctatatctggagacaactgtctctatcacaaacaatatctcccattggccatataacctgcatttggaaaaataaactcctacaaaccattgctagaagtagcatattatgtcttcgtttttcttttgtaaaatccttatgctttggcagcggaactacg

SEQ ID NO: 393 - DNA, 11219 bp, Zea mays
  Intron number 1 from transcript GRMZM2G107901_T01 (locus G RMZM2G107901) derived from phytozome v7.0 (chr-ID 9; pos 3 4465466 to 34476684)
taccagaccactccgaggttcacggcgggtttgtgagcttgagattgtggccgagacctgggcatggacgcggagtccgggagccgttgcaacgaaccggaagtcctggccgaggggttgcgcgagcgatccggtttgaggggatagagctgacgagggcttgaatccatcatccaacgagcgaggccgaggcagcggatctcgcccgccatttacgcatttggtttgggaggatgaagaagatggtggagctgaccagtgggtcccaacgaacagcgacgcacgtgcaaacggcaggagtagacagaggctgtgcagtgggctccacgcgacggtgtctggtaagcaagcgcgcgcggatgggcagcgcagtggggtaagtgggccgaattggcgcctggtggcccaattagggttttactccttttcttttttttatatatttcttattttcttttcgtttgaatctcaagtttgaatttgattcttgttatgaggttcaactttgagtcaattatacaaattcaaatcttaatgtggaagtaatatattctttatatatatatttttataccatttttaatcacatagtatttcctttcttcttttccaaactctataatttcttttaggatttaatttccccatttggatatttaacatatttcttttcacattactgtaatattgtcacaaaaatgcacataagagaaaatatcccagcatgatgcatgttttttttgtgtcctttgttatttattattattttctcttgtgtaagtgagatgtacacatgaaataataaatagagataacacacatatctatagggtaatataatttctctttctagatttttcttacaaagtgggtattacaagcgtggtatagcttaattggtcgagtcaacgagcatcacaagcatgcgagagtgctgaaacatggacaaggagggtgagggcggacctaagagcggctggtcacggtggggtgacacacggtggcgcagacggccgatttggtggaagcaagaaattctccggctatggtggctaatcgacgacgagggttggtgctctggcttcgtaacaatctagtggagctagttgtgcactaaatttatagtatccgtgagcggtggctccgaatttggaagagggaagctggcggccgaagagacgggtgagtcacaggtgcgaacttccgtggcgttcaccgggcaaaaggttacaactgtcacttggttatcctacacaacccgtgacgacatggtagaatagcttaaggcgtgtcgtgaccgaggtaagtggaggcacaacgacaacggtcgagcggccacgtcgccggtgcaagtgggtacgatgaagccggctcaatccattcccccttcgatctttttgcgtcctcggtaatatcctacccgagctgagcatgaatcgtggcagacagcacggatcgcagcacggagatctctggcggcgaagttcattgaatctgatcttgttcagttactgtaccatcgcgaacacccatcagtgcgtctgccagagcaagttagatggctttgttctccaatttctatacaacaacccattaatccatctgcagcaaagttgctctcctataaaccagctttggttttgttatagaaaccttaatcaaacatccaatgcatcttactcaaaattgctctcacagtttgtcccagttcactgtcagtcataattcagcttcagggttgactgagagcctgactttaagcccatttatctcccattttcatacagcatcaatgcttagtctcttaatcaaaattgtacccctaacatagctctataagtttgatgtattgacctagagcaaaaccttcatggattaagaaatacaaggccccaaacttggcctaattacactgatttttccgagttaacaacatagatgctcttgaggctttttgcaattaagtccaatttgttccacattacttgaaaaatcctccaatgtaaaagttacttagtttttgatattctaccacttctctatatacactttggtccaaaagtgtatataaactgaaatcaccatatagggcacaaattagggtttctagggttccatttagggttttggaggtactttagggtctttgtgccactcaaatccatcacacttaatctcttgtcaacatttccaacaacttttgaggtaatactcaatttggcctcacattcacccctatacccccaaacccagggttaagtaccctactctagggttcagaacacttcaaatcaccacatcacactgattttgaagttttacctagtggatgcattctaagtataacaaacataatgacatgtcaatgcatatgatgccatgctcaagtttttgttttggtaacaccaggggtgttacatccttccccccataaaagaatctcgtcccgagatttaaggtcgtagggtaagtaatggaaaaggaaacacgtcacaactttatttccttatttatcttacagagcagggggtggtatggggcttgttccagctttacaataaaatatacaaatcttacaggttacatgaagctaaaaacctaggaaaatttttctctaagaaatcttgagtttcccgggtagcttcgtcttcagtgttggttccattgtaccttatagaacttgagagtcctttttcgagtgattctgtccttttgatctagaactcgaatgggatgttccgcataagtcaagtctggttccaaagtaacatccaccacatctatggttcgatcaggaatccgaaggcatttctttaactaggatacatggaacacattatgcaccgcaaataatgattcgggtagttgaagtctgtacgccactggtctgcattgttcaagaatgggaaatgggccaatatatcggggtgccaactttccttttaccccgaactggttaacacccttcatcggtgatactttcaggtatacataatcgttaacttgaaagaccaaaggtcggcgtcgcttgtccgcatagtttttctgtcgagcttgagcttctttcaagttgtgtcttttccgttgaactttttcctccgtttctttaaccaagtcaggcctgaaaaaccatcgttctcccggttcagaccaatttaagggtgttcggcatcgtcgtccgtacagtgcttcaaacggtgccatcttaatgctttcttgatagctattattataagaaaattctgccaatggtagacaatcatcccatttctgtggaaattacaggacacatgctcgtagcatatcttcaagtatctgatttactctctcagtttgcccacttgtctgaggatgataagccgaactgtggagtaatttagtacccaaggatttgtgcaactcctcccaaaacttggatacaaattgtggtccccagtccgacactatcatctctgggattccatgtaaactgagaatacgagccacatatatctgagcataagtaatgaccgggtaatatgttttgactggtagaaaatgagttgtctttgtaagccggtcaattatgacccagatagagtcaaatcctgtagttgtcctaggtaatcccacaatgaaatccatactaatatcttcccatttctaggttgggattggtagagattgcaatggtccagcagccttcatatatatcgctttgacccgtctgcaagtgtcacactttgccacataacgtgcgatttcaatcttcattttagtccaccaataatgttgcttcacgtcttgatacatcttagtgcttctaggatgaatggaatatcgactaagatgagctttgtccaagatttgttggcggccttcaacatcttttggcactactatgcaatctttaaaccatattactccctgataatctttccggaagcaatttgacttgtcggccttcattttctcatgaatatacttcatacccttatctgttctttgagcatcaataattctttgtagaagaactgactcaagcttcaaattcgtcaaagttcctttttgcactatccctagatttaacttctccatttcttgacataaagtggtgtcaggtgttcttattgtaagacaatgacaagaagccttgcgacttaaagcatctgccaccacattagcttttcctgggtgataatgaatttccaagtcataatctatgattagctcaagccaccttctttgtctcatgtttagttctgactgggtaaagatatacttcaaacttttgagatccgtgtacaaatcacatatattccccaacagataatgatgccaaatcttaagggcatgaaccactgcagctagttctagatcatgagttggataatgttcttcatgccggcgcaactgccttgaagcataggtatcactcatccttcttccatcaagacacatccaagtccactgcctgacgcatcacaatacacatcaaaaggcttttcaatatccggttgagctaaaaccggtgtagtggtcaacaacactttcatttgctcaaaggcttcgttgcatttcgaggaccaatcaaacttagtatcattcttcaataacccaataatgggtttaacaattttgggggaagtccagaataaatctgcggtaataaccagccagtcaaaggaaactccgaacttgatgtactgtagtaggtgagttccattccagaatatccttgactttgctgggatcaaccacaatcccttttgcagacaaaacatgtccaagaaactggatttcctccaaccagaacgcacatttgctgaatttggcatacagttgatgtccccttaagcgcgttaacacgatccacaggtgttttgcatgctccttctcattcttagaatagatcagaatatcgttaataaagaccaccacaaacttgtctaactcgggcatgaatatcgaattcatcaagtaggtgaagtgggctggagcattggttaatccaaaagacatgaccaaatattcaaataatccataccgcgtggtgaatgcggtcttgggtatatcctcgggtcgaatacggacctgatgatagctcgatctgagatcaattttagaaaacactctcaggctccagtgagttgatcaaataaaatatcaatccgagggagaggatacttgttcttgatagtgacttcattgaggggtctatagtccacgcacattcgaagagtttgatccttcttcttaacgaagattgctggacaaccccacggcgatgaacttggcctaatgaaccctttctccaacaagtcttgtagttgtgtcttgagttctgccagttcattaggtggcatacggtacgatcttctggaaataggagtcgtaccgagcttcaactcgatcacaaattccacatccctttccaaaggcaatccgggcaagtcttcgggaaatacatctagaaattcacatacaacaggaacatccttgagttcttgtactatggcctcaaaaacatgtccagatgctttgattgggacagttatagggatggacaattggacttcttcatgaccataactcaatttaatggtcctttggtccgcattgatgattgccttattctgggctaacaagttcattcccagaatcacatctatatcttgtccatttataacaataatgttggtagggaattctcgtccggccaaggttacgggtacatggaagactacttcctttgtaaatatctgacccccaggtgagtggataacaaatccctcccttgattcagtgctaagtatgcaatgcttatccacaaaagtcttgatcataatggtatgtgatgcaccagaatcaaaaaggataactgctgggtggttggcaacgaggaacgtacccatcatcaccggttcgccttctggtgtagtagccacctgggtataatagactcgcccagttttcttcagatttttgctcgctcgtggattcgtcgggtttccctttccttgatttgtgttctcgaaagtctgtggaaagttggatttgttctgcttcgggtaggggtagtctttgatgaaatgtctggacttgccacaactgaagcaacaactcgaggaactggaaagggcagggaaacgagcgccaggggcactcggctgatttgtctaggcgggggcaggagtgggacgaatgaacatgggttgtctgaagggatatgttggcggacgaggagaagaatgattggaattgaaaggtcagattactaaccttgtcctctttttaggtccctgagttgatctttcacccgcatatccttttgactttccttgcctgcatttttggcttcaactgacagtgttgtgctgacagccctgctatatgtaaggtccagacacgtagccatcttacgctggagtctatcatttagtcccctcatgaagcaattcttctttttcaagtttgtgtccacttgatcgatggcgtattgggagagatgattaaatttgttgagatactgcatcacagaatctcccccttgcttcaaacgtatgaattcttccagcctcatctgtagcactccttccagaacataaagttccctaaatgctagtttgaactcttcccacgtgagctggtgtcccataggttgaaaggaggaaaagtttgcccactaggtgctggcggggcctcttaattgttgagcgacaaatatgggcttccatatctcagtgcatcggatgagcctaaacttttgttccatcactcgcacccattcatcagtttccaagggttcctccgccttgacaaagagtggtggacgggtctcggagagctccagatatgtggtgtctcatggtccctgaggttgacctcttcctccgtgttgttgaaattgatttcccaccatttcacgcaggaagcacgtgttgttggtggtagcgttgaccaaggcagcgatagcctcggccagggtaggaggtacaggtggtggattgggagtgtcctccccgctgcaggatgtacccaccccatcatgagcacgagttcgcgatgacatctgaggaagaaaacatcctgaattattacatgccaacacaccacctttattacattgcggaacagtaatgattacacatactcagtatacaactcaagcttccttatttatgatacataagtacattacttaaactatactactctaatcctcttcatccttagctgctccactgcccgcttcaggagaccgttcatctgcaaggttcatggaaggaggggccccaaaaaggtctagctccccataagatcctcaatttgctgttccagatggtccagctcccattgctacaacttctggtggcacgttcgggtgcaactgatcatacaacacatgcacctcttcatgtagggtgttgcagtacgcttgcaggttttccagggatgcgctaagttctgctactcgagctagagctttggcttcacaatcccaagcgaaagagcgtgagtttacgacccattcaatggccatatcgtgtttcgtgatttcttgctgcaggcgagtaacttctgctgatagttcagcaatgtggcagctatcgcgcgcatgctccctacacccgttgcgtagctcagacctgagtcgctccactctggtctccaaatccccgatagggttgttgcttccactgctgcttccttcatgcctagaggccagctggtgccggggtacaccatgtggtccggttgatttgcgctgagtggtcttggtttgtgccatatctcgataagagggaaaaaattatttagtgtagtttaatcatgatgcatgcataacctaataatcatgggatcaacttttcattgatcccctatttcctacatataccttttatttagcactctgttacccgactttaaaaagtgactactagaaagtggtaagataagaatgaaagaatattttaaggtaagtatttaaaaattcttttgaagtaataagtaatgttcgaagagacaggcttcgctccgataccagctgtcacagaacctcctaaggttttaggcccacctatagatgttcttgtcctaaggacctcggacaaccatgtagatgcgcataatcactcgacaagttcgatcatctgtatcatcatcatatcagccaagagcgcttcacccatcaagcagacattacacacataatcggagtaagaataaggggaaggattacaataacataatttacattcatataaaatatagagagagtacttattacaacatcgagtgtctgagtgcataacttattattacatatcagggaggtaaaacatcctcccaccaacaagtttactgatttttctcctgcttcggcaccaccttcgagcagaaacaacaaaactcagttgtttcatcacctataacattatttgtttgaaaaccctaggtacgaagtaaacttttgcaggtattacccgacaaaggaaaaagacttctcaaggatatgatggcttatgtgattcaaggtaaagctgatcaataatcaaagactctgtttgcagaaaagcttactaacattggatccttaaaaatccagttttattatcaggttaagtcattacctgtatctagagttctttctatcctagttcaggcacttagcatacactagccatcttttatcaccccttcagttcattggattgctacgtgtaagtcagtgaccaagtcttcatgtccgagaagtaacggcgatccaaatcgattaatacccagctggggatctccaaccacacgacatatgtagcacttaacccttgcatatgtcaactcgccaccgggtttctcaagaccagaacgggttcacgctaaccgagagcacagatacaccaccgtccagcctcttgccacggagggtacatgctactctcgccatctcaccactcccattgcatggtggcctttctggtattggtccgaccgaagcaaagcttaaacatgacgaggcatgtggctagttaagaggtcctcgatcatcaagcctacatcgacacagaccttaattgactcagacggagacactacaccgagacttcttgtcgtgcaagtcacccgctcgatctcgcctttatcatttacaacccaaaatttggtacctgacagaggtacatcttttcagatgttgaacccatcatagccatgatggattcaccatcaagtcttttctttgaaaacttcccatcccatatgaagcatcatctttgtttaaaacaaaacattttgttttctaaggcaagactaagcatcagaaaacttttaagtaaaataggtttcaaggaatggtaatcagttccaaggaaggaaatgcagcaattgtttagcatacaactcctatcacctaatgcatcatctcaagtggtaaagagtttaaacaacaaggaaaggggtgaatgcatcgtggctttccttgtgttgtaggaggcactgggtctgtcccgcagatgtcaaaatagaagttgatctcgacaggtgaatttcagcttgtggggcaacttcttctttgactaccacttcttcttcgttttctatacataacaatacatatacatgaatgcttatgtgatgctatgaatatgtagttataatagaaacacactaagttgtatcttgaatacaaccttccttcatggtacacactagtcactagggtttcctgggttagtactctattattagggttaggcaatcataccctacgaagctagttatttaggtttgggatcaaacaatgtccaaaacatgttaaactctacccttatgctgatagttcagcaatgtggcagcaatcgcgcgcacgctccctacacccattgcgtagctcagacctgagtcgctccactctggtctccaaatccccgatagggtcgttgcttccacggctgcttccttcatgcctagaggccagctggtgccggggtacaccatgtggtccggttgatttgcgttgagtggtcttggtttgcgccatatctcgataagagggaaaaaattatttagtgtagtttaatcatgatgcatgcataacctaataatcatgggatcaacttttcattgatcccctatttcctacatataacttttatttagcactctgttacccgactttaaaaattgactactagaaagtggtaagataagaatgaaagaatattttaaggtaagtatttaaaaattcttttgaagaaataagtaatgtccgaagagacgggctttgcttcgataccagctgtcacataacctcccaaggtattaggcccacctacaaatattcttgtcctaaggacctcggacaaccatgtagatgcgcataatcactcgacaagttcggtcatctgtatcatcatcatatcagccaagagcgcttcacccatcaagtagacattacacacataatcggagtaagaataagcggaaggattacaataacataatttacattcatataaaatatagagagagtacttattacaacaccgagtgtctaagtgcataacttattattacatatcagggaggtaaaacatcctcccaccaacaagtttactgattgttctcctgcttcggcaccactttcgagcagaaacagcaaaactcgactatttcatcacctataacattatttgtttgaaaaccctaggtacggagtatacattcgcaagtattacccgacaaaggaaaaagacttctcaaggatatgctggcttatgtgattcaaggtaaagctaatcaataatcaaagactttgtttgcataaaagcttactaacattggatccttaaaaatccagttttattatcaagttaagtcattacctatatctagagttctttctatcctagttcaggcacttagcctacactagccatcttttatcaccccttcagttcattggattgctacggatgtgtttggttgcctggtccaacccacaaccaggcccgtttggtacagtgtagatttgtttggttgactggcccagctcggcagcctggctgaggcgagccagaaacaaatttgggcctggctgagtacaaacgtgaggtttcgaggttctcagtgcggcctggcccgactttggttagggtttgcctcaattgacgtcttctctctcgcctctctcgtcgctcgcagaactcgtcgtcggagggcaactcggggtccgccgc

SEQ ID NO: 394 - DNA, 7532 bp, Zea mays
  Intron number 2 from transcript GRMZM2G409309_T01 (locus G RMZM2G409309) derived from phytozome v7.0 (chr-ID 3; pos 5 6469218 to 56476749 reverse strand)
cgggggagaacccgtcgaccacggtgcgtttcgaggtacgtacgttcttcgtgccgtcactccttccgcccttgttcaatcactgttcagtgtgcgctatgatctgatgaggttgacatgctgcgtcggccgacggccggccgggccggggacggtgaaaaacatgggagagaggaagagataagaaacccatgtagctcgctgcttcctatctgccggtttctctcctcgtgttttctccatttcttgcgagtatggactcggctccttgtagttacctgaacgaattaagccgagtgacattctactgcgagcgtcatgtgctatgtgtgttgacgcagcgagagagtttgccgattcggtgctcgcgtgcagctagcaggctctggccgcgaactctaagagtcaacgtacgtacatggaaaacctgtcgccgtgagtttgggatctacagcctacaagtttaaccttgtgtcagaagacaggcttaatttgatcgtgcacatggtactaagtattcaaaattagcctgtgtcagctcgtcattagtgttccatataaaaactatatttttgttccgtataacacacaccagtcagatggtcaggagtgaaagtgggaactagaagtgagatggaactagaggtttgacctaaaccatatttttgttccacaacaaaccgagacgacccgtacctgtaggatgcatgtgcatatgttgaacagtaacatggaaattatacagagcaccacttggtgttagttaaacccctgatgccacggcaaagcacccctgcagtccatcggtgcagccatggagaagcagcctattggaaacgccttacagtccaataaaaaaaaactccatagtttagtcgagcaagtatataatgatagacggccataaatggtgtgtaaaatctatcgtatcttaggacttgtttggtttacctacagattttttcaaaatctgattttgttgcgagaaagttgttgtgtggaaaagctaagagtggtttggttaaaatgaattctacaagaatgtaatgacgtgacaatctgggaggagctaacctgcagatttgacagcggaccatcaccgacgatcgggggcagcacgccatatgccctagggctctaagccggcagcgttagcacgtgcatgatgagcagtgtgcacgacgacagtagtagctaaaccgatagatgttacgttattgtattatatgggaatggagcctcatcattatggaagtgttgaaggggacaatgttcgatgggataaacgatgtggatgttgggtaatgagcagtgttgaatgatcgatgaagaagaggtgcgacagtttaaaaacgactaagccacgtcaccgatagccgaaatcaggacatagggaggcggtggcaaccatagccaccgttgtgaggtgtcgttagttgagagtcaagcaacgggtcgagtggatgccacgatttgatactataaataatggtaggtaagtaatattttgagaaaaaaatagatgataggaattaaattttttgggtgacagaagattatggattgaattagagattctgtagattttttagaaatagactcatatcttacaccttttaaattggggattctctagatttgtaacggcaaaatctggctcggaaagttaaacaaaagatccctcaataagactagcatagtcgtgcgtcgccatggtgttaatataatttataaaagcagcatgtatgcgttgtttaatacgactaaaaaaaggtgatcagcacaattgtaggactagcatatctatcaattttacacaacttagttcctgtttgatcctcacgactaattatttaattacgagtgctaataatctggcaaataattagctactaacaattagccatgatatgtttgaagtcttgactaatatatgtcttttctctttacacgatctattaacatctattagcaagatcaaatgactaatgtgcaaacagtttgtcagctttccggctaacaattagccaattattattagccaatctatttagaggccaactaataaaaattagccggcaaactgtttactacaccgatccaaagagggccttagttttctttttcttatatgttttttttactatcttcctactcccaacttaatagcttcgttaatatttcctatcactgtcatcagcattatttgttcacaccatgagtgcttgttatacctctctcgaccaccagctatatatgtggggccaagcttgatataatacctcatatcttgcatatattgatggatcccatcaatgtccctcgtcattgtgagatttcaaagttttattagcattatgcccatagatacatcacgccttcctgagttgacacgatattacgttgattgatctcatcaacgtctattgtgactgtgaggtatatatcaaagtttttagcattatctctaccgattacgccttccttagttgccacgatattgtgtcttatctcgtaaactttttctatttttattttctctattatatttatacataccgaaacataatttaaattataattttgaatctagtttaaattatagttttcaatctttttccaacacaaatatttaatcacttagccaaacataatgcaacattttttactaatgcactgggttcgtattagattaattttgtataatgatagtgctagctaatttattatcatgcagaggggtacctcaatttttgttgttgttaacatggtaacttataggcctttagaattaacatggggacatcctttaaaggcaaacaagtacaaaaagaatatttttttctacactaacataatgttaatctctactatgcgttttcattcatgcaattgcctagcctacaccaaacagggctttagaagaaaagctatgggatataaagagggtggtgagagatggaaaaatggcaaggttagctcgatggtggacagtgacgatagtcagttagacaccaataatatttttttttgtcaaagatgaagtaacaggaccggtcatcatgtttttcaggccgaggaaactaaaattcagggcctccttttatgtaaacaggatatataataataataacaatacttaataaatataaataaaatgttacttatcaacaattaactacatatacaatcaatattatcataaaatccacactatgtatacacatgagtcatcaacactatgaaattccatagcgttcgtattaaataccttgctcacaatcacttacattgtttttatcgtcttctcactactagagaactacaattcatgccagttgaaaactacctaactagtagtagttaatcgagactaaaagcattaatctttagtctcagttgcatggtctggtattaaaactggcttttagtatcggttcttgattagaactggcactaaaggtcaaactttagtatcggttcttggttagaaacggtactaaaaggttgtttattagtgtttcttaaccaagaatcagtactagaatgaattttaatttttcgtttatataaattaatattgaagcatatttagggtgtgtttggtttggcttttattctccaaaagccaaaagctaaaaccaaagggtctgatctaagaatcagtttttttctaaaagtcagcattctcgtagtgcaaaatagaaagctcctctagacctgctttaagtggccattggatggaactgtgcaaatatatatggaagaacttttagtggtttccaccaaatagattttagcatttttacaactcaaggcctacaataaattttttttcacagctcataacccacaacggttttttcatatccaaactccaaccaaacgtacccttaaaatatagatgtacattaatatgagcacatacaaacgtacaagttctttccaatgggacatgtccaaatgtatatgtggttccttttttccttggtaaagttgagatactgtaggaaatggtgatgcctaggaaggtgaattagatcttctaaaactatttctaaactaggccataaataaatccctagaagaaacctatgaaaataacttaactagattgtgcaaactaggttttgtctatgtgttggtatctctactgtaaaaggagttatgcaacctaagttctaatcctatataatctacagtaagaatagtaaagattgcaacttaagtagtgagagtaaatgcgaaagattgaagagctagtagagacagaaaactctcgtggacgacgccggtattttccttctctacgcgcaagtggtgctccgcttccagctcctctcagacgctccccaccgtcttcactattgagcttccaactgaaacgccgcaggtctcgttccatccggtacacggtggcggccgtgacacaaacgcggttgtcatagtctctcaatactctcacccactcgatacaatattacaacggctagcacaagagtcgaaggttgtggtggggttttcttacctcactcaactaactagcattacactagagtaagcacaatagcagtctaattagtctaagcacctcgcaaagcacctatactaatcaccggatgaatcttttatgcacttgtgtgttggagctcttggaaatgtccctatatgtgcttgggatttgtttcttgtgctccacacccttcatttggtcgcctaggggtacttataatcccccactcaaaaactagctgttggacacaagtggcagttttctgtcttcgggtgcaccggaccgtccgatgcaccaccggagcatccggtgcaccactggactatccggccggtcccaccacgttagctagttgttgtctcctcctaagaatatagacagtccggtgcgccactcacccagtctggtcccaaactaggcattgacagagactgttgccgactgttggacgcgttccggtgtacaccgaacatgtccggtgcaagggttgcccaggagctagtttccaggcctatctgcgcaaactgcccgatgcacactggatagtcctgtgtgcccccggtaaactagtcgacaaccccttttcttgatttcttcaatctttttctttgggctctttttgtgttgaatcttagacttatgcttgatagttattgatcttctaagtatctttaggtcttctttttaggtgttgtctccttagagccttagtccaatcctctttttcatcctgtacactacataggtagctcagatagaggcggtggacaccatcctatgtgactttgacgccttccttatggaggtttgtgagcaacttctctaggccttgcagtttgccaagtgctattacgacaaccgtcattatgatcttgagttcgtggtgcactactcggtgtcgatccgtctcctccaccgacttatgcactcactaagtcctgtcacaagggtaagcttaagatacgctatatctgtcccttctaggtgctagaacgcattagacaagtggcctaccgccttcaacttctagagagcgctggtctcgtggtgtgttccatgtggggctactcaagctattttgtgggaaccccagatgactcaactgcccatgccacctatacaggataaccaactactgcctgagccagagagtgtttaccgtgcccaactacaccatggcacctgtcacgtcgtcattcagtggtagggcttgcctagcgacggcaacacttggaaggtgcttcaacaattcaaggacctctaccttgatgtccagctcgagaatgagctatttgaaggggccagggagagatgttatgaccgacactataggtgacgggtagttagggacgtaatgctaaaggtttttcttcgatattttgtattatttctataaaataggatcatagttatttttttgttaggatcaatattgattcttggttcggaggtttttgttaaaaataaggataacatgcttagggttaggtaagcctctctatacaaggaaagagatgtatcaatctaatcaagcaagaaattatcttgtctggcctcaagggccatcttctctatctctttcgtctcgctcacctacttatgtgcgattatggatcttgtagtgcgccgccgaaaatacacacttgtccatgtggatgtcctacccgtacaacttagggctcgtttggcaaataggttgtgaagtgattcctgagaggttagagagtgggagtaggttgggagcggtgggaagcatgtttttttggggcgtttgacaaagctcctacagctccactcccagcgagaatcactcccgcaaagccaaacaggaaaaatctggactgctccatgatgagagtggagtgaatgtagtctatattttatactagaaagtgggggctaaaaaaactgcttcccaccgttcccaacctgctccccactctttaaccccttaggaatcacttcacagaatatttgccaaatgattttcgttaaatagattcacttctgctagagaatcactcggaaccactctattagagaatcggttctcggagctagagaatcatgaaacggaattctgtcaaacgaacccactttataatacaaaatagagactagattgactccactcccaccatggaacagttcagatttttaccgtttagctttgcgagagcgattctcgctgggagcaaagccgagctggagcaaagccgagggagctctgcccccacatttgcggtcataggattccggattctattagaggaagtcaggagcgtgtgaagtatctaatgacaaatgatgtgagagatgattgagtggtcataaggatacaagatgtggtcaaatgtgggaatagaaaaaatgtagggtcaaaatatttagccccacctctaacatgatatattggtagattggattagtccagttatttctagaagataaggcttttgttcgtttacaccaatccagttttgtattagcatggattggaattaaatccatgtcacaatccatatcccaaaataatccataactacttaaatttttttattcggttaaacccatcatggaatataacccaagggtttggtaattttttaaactatggaagacatggattctatcatagctcattaggtatggaacaaatccatgagacaatccacaagtttacgttagaatccatggatcaaaagaataactagctttgaaagacacatgaattagttggtggatttaatcccaccatgagattgggtgtgagacatggattcagccaatacatacccggattaaatacatggtggaattttatcccatataaccgaacaaggcctaagcagggtgaatatgagttgtcggattcttttccagctacagttaatcaaaaaagatcatggattatttagaggtaaaaatcatctgaaatagacaactgtgcgtatcctcagatgacgaatgctaggctctttcaggactacggtgtgactctggtgtactacttgtcgca

SEQ ID NO: 395 - DNA, 3114 bp, Zea mays
  Intron number 4 from transcript GRMZM2G007381_T01 (locus G RMZM2G007381) derived from phytozome v7.0 (chr-ID 1; pos 1 80013424 to 180016537 reverse strand)
tccacacatttacagcaacgggcacatctgcttaggtaaaactgcttcctagccatcttgtctgatggagaacatttgcacatgactccatgtttgataatgcttttcattagctttgtggcggtggcctaatgggaatgttctttgcctgacctaataatgttccatctagctgtcagttaggtgctaagattctatttgttagaagaaagttgccaacttaaccaattgtgcttttatagtgctatttagtaggctcacgactgagatgcctcaacacacatttccttttgttactaaaaggatcttgattggattgccatatgtgtgtgaaattgctatgttcaggagttctgtatttggccttctaaagttatcttaatgcctggatgctggtggcttgtccagttgttcttttatcatgctcatatcatattacgcctatgcatctgtaccacctagtgattagcacaatagtggctaaagtcccagctagtcattagcacaatagtggctaaagtcccagctagtcattagcacaatagtggctaaattcccagctagtcgttagcacaatagtagctaaagtcttgttttgtatctatccttacatcatgagttataacttcttttaacaacctcatgatctttcttgcctctgaaattgattagggtttgataaaatcgtgttgtaggggttttccctacagcctttcccttaaaaatgattacttgaggtgtctagatgctactcttgtttatgacttcacgcattgttgtctgtcagtttgttagatttgtgagttgtgataattgtgtattattggaaaattgttgctaaatctcctttttcttggttatttattggagaatatattccatcttatctcatattaacccgtagaaaaaattcctattagcatactgttatagtactatgcatgtgtgcataaaaaacaacctttttatttcgcgccaaatgttttttttttttgtcatgttccttgatgacagtagagagttctaaacatgaagaaaaagtaaagtcagaattttcagtaccttctttaaaaagtcatttgagcatccagttatgactatgagttatgagcctggatatgaatatctaattgtgcagatgtaggcagaacgcagaatgtagcaggggataatgtgttaggtagggaagcatgttaggttggctggccattgcagccgtcttcagcaaattaacttattggaaagtttgtgacagactaacatcttaatgtgaagatatagtttgagaattaattacagaacacttctttagtttacttctaactattatatggcttgaatccttgttattcaggttccatcgttacttacattctatgaaagcagatgctagtacattggggaataaatgaacagttattcataatttcatataaaacacttcaagtaactatgtgaaaaggttgtttttggcattattcttctcatttaactatttaatgtatccacataggttatgtcctcggttccttgctctatgtatatattgtttcaagtaatagcaagtcaaagggaacaagatatggtatacacatacacatatactatttcaatccatcacatgcagagtgaccaggctgcatgtgaaattagatagattgtctcatggatggacttgtttatttgttagtaggagattcttattcatctgtttctgtgctaaatggtgtcatttactgtctcatttcttatacagattgtagctactaaatcttaactacaagttagctgttggtaattgtaagtgcaatcctgaatatcagttctccataatggactaatggcatgccctgtattgcttatatcaatgttttccctcttgtgcccataatttcaatgatcgatccaatagtatgcgactaagccatatattttccccaccggtacttagtagttctcttgacatgcatgtcagtcctgttatagctgctattgtagaaaatgagaattatgagctttgtcattggagccatccctctttacaacacttctaaacatcaacacctagatgtgaatggaaatctgtgcctctcagcagtggttgctaagtgactcttgcacagttttcctttgttatctgttatgtcaataacctactcagctttgcaaaatgctctaaaattccagtttagttgtctgttaaatatatacctagtgccctctctgaagtgaggtgagaaacttaaataccccctctgataaaaaaaaacttagttcaggatataggcaaggtgaaactttaaccattaatttctgtaaaaaatattttaaatagaaagttatatgttataaaattacttatcatgaaatatctagtagcactaatcttgtgttaaaaaactatttacatttttaaggtttaaagaaaatgacttaggacaaacctaaaattatgaacttatatttctgatcggagggagtagtttttttatggacatacaacttatggaggagacatgactaataaaatattgagcaccaaaataatgtttcaccaggatttaaatttattggttgccatatctcatgatttactgtactgaatgtagtctaccagagatcaattttaagttgatgtaaccaatggatctgaaattcatgtagctgaaaatggttcaaaaagcagcgtagcggcaccaattatcaccttactattctacattagaaaatctatactgagtgtgaaaggaagcatataccctgttggacttgttttcacaagttctttgttgaccttggtggatttttctcagtttgtgaatgagatgaaaataatgaccttggagccccgtcaaccatggtctacaatcgccttgtaaattgtataatagctaaagcctacatcaaagtatttataccctttacatttgcgtctggagaatttactctcttctgttttccattaatccactgtccacttactcatgagttctctgagatattgaatggaacgtaaacaatttttgtggagccttgatggatgtggattacagtttactgtatggtttgtgattaacaaattcctgctgttactcttgtctgcagatattctgt

SEQ ID NO: 396 - DNA, 749 bp, Zea mays
  Intron number 4 from transcript GRMZM5G855361_T02 (locus G RMZM5G855361) derived from phytozome v7.0 (chr-ID 4; pos 3 9792063 to 39792811)
ttgttaaattcaaggtatgttgatccaagtacttgtacaccctctacgtctttgatgctgagaaagcaaacaagttgaagcaatctcttcccttagatagcgcagctttaattgacatgatattgtttctattctggtatatgaaaacttcattttggtagtattgtctttttggttggattggtgtcattttctttgttttaagtttctgtcaattagcggttccagtgaaatatgtgattggcttaaggaagactggttttagcttcaagtcaactaacatgtcattctcgattaatgggtggcttgtggctaaaactaattttgagaaccatccatgatggccaataatagctatgagatccgagggacttgtatgatcacttttttcagtttcttttctgaatcaattttgagaaccatccatgatggccaataatagctgtgagatccgaggtgttagtcatagacgtcgcttgtgccagcggctcttgtcgaagtaagaggagcgtgtagcagtttgttgtactacgctgacggctccaacgaagaacctcgacagctagcgtcgcgccgacgatagcggcagccaccacgggcggtggcactagcaaatctgaatcaagctaaccaacacaaatatctgacattactatgataagagtatctaagtgcactattaaattgatctatgtttgaataaatatcttatttaaacaatatttatttgtgcctctgcagttacccaa

SEQ ID NO: 397 - DNA, 3283 bp, Zea mays
  Intron number 1 from transcript GRMZM2G307825_T01 (locus G RMZM2G307825) derived from phytozome v7.0 (chr-ID 4; pos 4 4807657 to 44810939 reverse strand)
gaaaggtcgcggccccatcatgttgccaagtaataatgcccctattcgttttagttttttggagcttctggccaccaaaagctgatgcggactgccaaacattcagcttttcagttagcttctataaaattcattgggtaaaaatcattcaaaattaacataaacacataatcggttgagtcgtttcaatagtaggaattcgtcactttctagatcctgattcctacggacacctttatcttcctccgcacgtaattctaataatactcagattctctatacagccagattttctccatagccagattcccaaaaaaactggtcagaaaaaagctgaaccaaacagacccaatatcgttgccctcgcttccacaacgaaattgatgaggactagaggggactgtgaggactctccgattctcctcaattcaatgatcactaaatcagtttatgtacaactcatataaatattcagtattttaaagggtattaagagataagtgtaaaaaataaaatattttggtgaatgaacgtctataacactgttgtctaagtctagatacggttctatctatacaacccacataaataagttgtatcttaaaagtttctagtgaataagatataaaacttaaatatattaagttatatgaaaggattttttaaatgtatctagtgcttggagaaccacaacataatatctaggttgtacatgcccttaggtggtgtttaattgtagaagtaacatcaatgaaatcaaaaactatactttgtttggctcacgtcactaacaaaaccaaataatgtaagcgaaaacatactttgtttggttcctctgcactctgtggatctgaaatgtccaatatatgacagcttaattagtcacgttcactagttgccgtcaggtgctgatcaatctcctatgtccgtagcagattatataaaataaaagatttatactatatatgatattgtttggagaatgaagttttaaatagaggacacgaaagaaaatgagataggaaagctattggagaccatctcacaatcttgttttctcactacaccaacttcgtcctgagttagggatggcaatgagccctattctcgattcctgcgcggaaaatccttctaccatgggacagcgataggacgaaaaatagcccgcacggaaaaagatacggagaaaaacaattcccattagatctgcgcggaaacggatacgttccatttaccccatacccccatccccaaaagtgctccctcgcctaggctcctgtgatgctgatgttttgagtgtttcttcaaagccgggccagtgcgatgcaagtgtgagctttgtggccacagttcactacattaaaatcatacacttcctacggtttttaacttcttacaacttttataataaatcgtaagaaataaatagctttcgagaggcaactggtagctctaggaaataaacctaacttcctacaatattttataaaagttgtacgaagttaactttcacatgcggacccgtgtgttcggtcaaacgagccgctaacttactaaaagcagccgtaggaagttagcatgggcatctaacttcctacggcctcctctaggaagttagcttttagttactgatccacggttgtggtcaaaaaaaaagctaacttcctacggtcggctctaggaagttagaatgggtagctaacttcctacggcctcctctaggaagttagatttcagcttttgaccagtcaaacaaaaagctaacttcctacgaccggctctaggaagttagctgtccagctaacttcctatggtatcctctagaaagttagatttcagcttttgaccagtcaaacaaaaagctaacttcctatggtcggctctaggcttcctacgacatcctctagaaagttagattttagcttttgaccagtcaaacgaaaaactaagttcctacggcggctctaggaagttacttaacttcctagagtacatatacaaactctaggaagttatgtaacttcctactgctttactctagaaagttatattttttattttaaacctctcattaaccttatgtcttctctcacctttctcaccccgtctctctctcgcgtctctatctgcctcggtcctggccaccccctccaccggccgccccagcccgcacccgccgcggtcgcccctggccccgtctgccgtggtcgcccctgccctcgggcttttctttttgtacatcttttattagtgcatgctttctgctagggctcaaggattggaactctttcagtcttccccatatatttaggttcctagagcttggaaatacatgttggttccttcttccctacaaagcttttgagagcaaatacttgttttctattctctttaattcattatttatgatgatggtctgagtcacgtctatgcattttcattttttcttcgtttccttcattttggacttatcaatatctgggcacatgtggatggtctgtacatacttagctaatttgattgtttgagatattaaagtaaataagtaatgattagagctgagattttatcgcatagtgtgttccatattttgtgcatttggtcagcttggtttcattttttatgcagtgtatgaaaacaacattatgtatctttagttttcctttgtttccttcaatttggacttaccaatatctgggcacatgttcatggtctgtacctacttagctaatttgactattagagatattaagtaaataagtaatgattagagccgagattttattgcatagtgtgttccatattttgtgcattggttcagcttggtttcatgtgttatgtagtgtatgaaaataacatttttttgccttggatcaataaatatttttctacataatttcttcttgcttattctcttaggcagtttatagccgcttgaatccgatatttacctgtgttttggacctgtgtctaagttcactaatgtttttaccaataccaagattcttcataatcgctctctgatgtattctattctcttatctatatatatgatgtattctattctcttatctatatatagcacgatatgtatgcacatttttcatttgtagatggtctaattgttaaaaatgtgttaacctattaactttagagactggtaggcttttctatggtagccttaatttattagattttgctattcattaaatcttacaatttgttgccttcacttttttgctttcatttacagtaccaaattttcaaggagcttcgtctgaga

SEQ ID NO: 398 - DNA, 8929 bp, Zea mays
  Intron number 2 from transcript GRMZM2G117823_T02 (locus G RMZM2G117823) derived from phytozome v7.0 (chr-ID 5; pos 1 16349583 to 116358511 reverse strand)
ttgcagtggaggccccgctgaagagatcatttcaggtatggatctggagtgcactatatccatttcgttgggacagcatggatcttggttttgtttctggtagaatttagctcatgtagtcacatcgtagtgtagctttgcaagtttcagcgagatttgagctgatttagagagagtgaggtactcactgtatcgttaatccttatgaatggctaaatcggcataggtcaaattgggggtgatccacttcatatctgatcgtttcttgggtaataatatatgctagagatatgatgatgcagctattactgctaggaagtgcatgctcggagatgttgtttgatctgtaacaagtagtatgttctatgtgaatttgctgcattgtcaatggggtagtcaggtttagtggtgcttgtctgcttgaccttacccataatggctctgtgaaattcgttatagttccctgggttgacatcagttgtgagcccatggatcgtcttctactgtcattggaatagcagaatcatgctgatcccagactatcaaatactgtgcttagtcagtttggacatgtttaggctgagatcagttgggagccccgtggatcatgcttccaatccacgatgaaatgaatggaaagactactgatctctagtccattaaatatgttaagttgttttggacatattcgggcattctgcatgccatctgtatacgttcgtaactaactgccatctaggaacttttgtgtcttgtggcataatcctctcttttggtttttaacgtcaaccaaacttgcagcctggagtatgaaggcacatatccatctcaactaggttttcatcaccgcttaagagatgttctaaaggccatatgttttacatgtgtgctaaatcagttccattcattgctttggcgtgaatggaaatcttcagaaaccaacaaggttgtgagttgtgagttgtgactatgatttactaaacttaaacccaggccccattgattttaatggtcttgtcttagcagattttttatttggcttttcatttggttctgacattttcttaggggtgctggtgggcggggttaaaaactggacggataccactacaaatctgttgaatctcgatccacgaatccctcccaagaattaatttgtctactagattaacatgtaaatattgtaaaggctagtttttctttcctttttattgaacgcaaaccaaacatataggagaattgcttcattggtccttttccatgaaaatttgcacatatctcaaagcaaacaaattgtcggttaatatgtcacaggcctaaattgccatgatggggtacgaaggtgttgggtccaagtcggaccaactgtagcatgcaatctagcacgcactcgtgtagcgtattgcaaagcccatcttggttaggattaggaagagtctagaagctaggattacttgtgagtcaagttgagtcgtcgagtcctctctataaatataagggaggtatatcctttaagattaagcaagaacaatttagaggaagaccctaatcctctctcccccttcttctagtcgctagcctttctctctgcctatgctgtcctacctcttctagctgctgcatcatgtcgcctcccatgcacacagctgatcgtagcatcctgttgtcatcgacctcttactttgtaatggccagggccggagctgagaattaatgtgatctcaaaatattatacaaaataaattttactatacctcaaaagtttcttctaacatttctttaggcaaagttattaatgatcgtgttgatatcaatcactgttcttaaggcgtcgcctaggcgtccgggtggtggtctgacgcctaggcgccttgcccgcctacctcgcctaggcgtcgcctaggcgtccaggcggtggtccaacgccttggaccgccttaccgctttaaaaaccatgatatcaatagaatatatgagtggttctgacaagttaactttaaaactctaaactcagatattagattatataacccactatttactgttctattagctatacaattaactgcaagaggtgggggccctaagatttgggggcctagggcggccgcactggtggccctatgcccagtgccggccttgctaatggcgtgaccagccctagggcagctgctcccccctctaatctcctccaaacacccccagatcaaggactgttactcctggtatccaaagacagatcaattatttgggcatgttctgatccaccactatggttagcttcagcaacatctatgatttatggatgagagaattgcactagaatttgacacgacaccaatgccccccaacaatagatccgaaccaacctaaaaataagatgctggaggcgtatattgtcgtccccctaccaacacctccaacaaccctacatccaaactaccctaattttttattctatggatgcatttagggtgtctttaaatgggatcaacttctaccatatcgtcaacaacggttgcacatcaatcaacaaaccaacaccgacattgagaacatatacactgacaacaactccaccattgtcgccatctatgccaacaccctgtaattgtaaaaggagctagacagaatttttgcacgacaccaaaactcatcaacaacagatttaaatcagtcggagagcaacacatcagaggtgccaatccaactcaaaagaggtgcataggcaatgacatccattgcttctgataatcaaattacctctaattgttttctactgatgcatctaaagtgttttcagatgcgatctccttggtgcccacatctacatcagtagcgactgcatcaatgtcgcccaagccatattgcacattagataattggcaatagtaccatcactacctttggctaaacctaaaaaagcgaatcactatagcaaagcttaccacatctggacctacgtcacaagcttacaacatcataggccggtatcgcctatgtcgactgcaacacctttattgacaacaacatcagtggcgagcatcacttccactccattgctatcaccttcaacaactactacatggagggctttcaggagtttaggagcgattaaggatgacccctgcacatctggcctcgtgttttcttcattggtccccattgttagagtggatgcattatctagttcaacccaaaagcttaagctattaggagaaggtaggcaatccacttatacacttcaacaccctcactcacgtgcaaccagagggaaatgcgtaaacgtgaaattaaaggaataaagggacagagacacaaataaagcctctgccaggattcaaactcgaaacctatgactttgatgtcatgttaagagtggatgcactaaccagttcgcccaaaagcttaagctattagaagaaggtaggcaatccacttatacacttcaacacccatcaccacaaacaaataccatctacattgccaacctacgcgacaccgacgatatctatcatagatgctctaggcgcccaacacaagaaagacaatgacaaggctacaacaaggcaattatcatcgacctcatccttcaccatcaacatggtgacaccaatactagattcaatgacaaaaaccaccatcatgggacccgtcatctctatgtcacatatgcctaactctgcatcaacttcactcatcctcaaacatgaaaagacaaccaacacaaatcaattggttggttcttcatcaactagttctccatcatcgatcaacaccatctactatgatgactaaatagagctctaggccaaaatttgaagctaaaccagtgaacaaaagagctaaaaattgtttctatccctacattgttgattcttcctaccccatggcgattgtgctacgtgcttcgcaacaagaaccaaatgcttctacctcatccttaataatgcaaggtaaccgatcaaatcgactccacctcaactagcgaggtcaattcttgttgccttgcgtacccttccacaatggcaacctccgacctacactagtcgcagtccccttcaatagctaggtatcctcaagtttggcaatatacgaattcaagcttgaaaaattctctgcctactagacaatctcaatggcgagaggagaaaactcagttgcaacttcaccaacatgctatgacattgccaactctacgtaggggtggtaatggatcatggccctaatacttgcttcacaaaccaacaaagcccttaattttgttagttcaaaattgtattgttttatgatccggcccctaacttgattcgatccttaaatttgctaagctaaattaaatggcccgttaccacccctaactctacgtcaacaataacgatgtgtcaacacacctcatcaatagcagaggatgccacaacatgacactttttcaacacctgcaacaggcatcatctgcatcggaattttcgatgaccctctcccttcttaggcgacaaaaatagtggatatctttacctcccagctcgtcgatattttcaccaagggggggggggcctcccatccatggtgttctcggagttttggttcagtctcaacatggatagagttgtgactctgtgggggtgttagactgtgtgtgttataataatgtaatgggctttggcccagcccatgtacagttctaggttagggtttccaattccaatagggaggaggcaccgtgcgcggggaagaagatgaacagtgcccgcaactagggttagggtttggtagggagaagcaggggaagaggtcttctgataccatgatagaagggaaattccacaggaaatcgtagatacattacttaggaaagggttacaaatatatagtgcagccaacaccactaaagggctgaactaacatgaggccgacgtccagacacaacacagtctaacaaggcctatatgtggcttgcatcctatccttccctatgacttcaaactggactcagtcatcttgtggagatgaggtgccatgagcaatgaaagtggatcaggaggatgatcctatctgggattttggttaggaagtggctggctgggcatggcccgagccggaccatatgagattcaagatgaaaatgatcaatagaacatttaattagcaattgattcaatttgagatttgtgtgagttttatggaaggaccactgaagcagttctcaacaaacaaaccttattttttggcccttcaaaatttctcaacaatcaaatgctccttcccagtttggaggatttatttccaaactaaaattttaggtgtgtaaaagaaagtgtctaatataagtttattttattggagattcgagattgtgattaagaagtgatgtcatgtggaacaaccagacatgtaaactttaatttaagctcaataaccattataagaaaaagggcagacccagtgctggagtcttccacatgagcgtggtttgaggaagggatgaaccgaggcctgccttcccctgcaaatgctgagagactacctcaagccctcgaacccatgatccggtgactcagtgagacaactctcaccactgcaccaggtctgcccttctaaccactataagaaaaaacattgattaatatttgttcatctccatccaacccattttaagttttcacatattttgttatgatgggtagttgcaattatacttcataagtttggattcaacataggagagcattcaatgaatagagtcaacattctgtttctgatatgtgtttctttcattatcgcaattactggaatcacaaaactccctacagaatacagagactacctttgttcatagtattttggttgccattgctccatagtctgtatcacccacatgttcatacttcatatatgttcttacacgcttgactatatagacatgattaaatttccgaaaatgtttggttgctaccttcgcttcagtgttgttagatataatacatgattatttgttcaacttaaactgtaacttcttgagtgattccgggacaatatgtgcatgtcttcgtttatttcagaatatgcaccagggctatcccaaagaaacactggtgcgtttccttaaggctagagagtggaacgtaccaaaggctcataaaatggtaacatttcatacaagtttctcatccgtgggtcaagtcataactgaatttagttactaatatatttgtttctatagattgttgattctttggattggaggattgaaaatgaaattgatagtgtgctagaggtgagtcatcccgtctagaatgttatttttcgagatattaccgtatatgttaatcagaaagctaccgaagattcccttctagttctgtgattctggtcttcccctaatcatttctgattttgattatttattttattattgcagcaataccactctcaatgatctttctatttgtgtatgtttgtatagcaaaattcttcatttttttttctgatcaatgtttgcattgtccatctgcagagacctatagtcccagtagatttatacagatcaatacgtgattcacaacttattggcctgtcaggatacacaaaggaggtatagtttacttccagtaataaaatctgttggttgaaccattaccctatatgaattgattatgaaccattcatttgtgtgtttgaaatatatatgcctttgtactgtagtattctaaggctacccaattcttggatttaatttgtcatctcctcgttgaaattcttcgtatagagttgtcgttgtgtaacaacaccagatgagcatgacgcaggtcggtggtcttagtgaacttggatacgagtaggagccaacatgcaggcaattagaaaggttcgggccacagtgtgtgtaaaccctacatcctcttgctacttggtgaacacaaaggagacaaagattacaaactcgaacacgagtaaacatcaagaccttctagctcctcaactcttcgttgtggtgggagttctagcctaatcgtcctaatccacctttatgcttgcctaatgagagatctcttgtgtaagagtgtccggatctgattgaattggtctaaccccagcctagtgtgtgagccctccaaaatgtaactcaacccctcccttttatagttcaaggaggagaggtacatgaaccacgaattccaacggctaagacctaactaccttgttcttattctgtttttagagtcgtaccggggcccatgcccccggttgtagcacattgtcagagatgtcctttcctaggcggctgttgtacctggctacctgccgcatcaacagacgatggggcacgtgctgaacagtacaatatagttggtagccggtgtagatacttgataatgcttcatggtacactttgcgtgcgcatgctagaaggccgatacatgtactacatagtgttcttaagcatcatgcagcaaatcgtggcaagaacacacttgttaggcctgtaatgttggatatcacacatttaatgtgttgtactgagacttatccgttaagctaactctatggactagtctttatgcctttagatgtggagtgcctcccctgggttgcaccaccatcggtgggcctaatcatattcttctgccttgcggtaggattacacttagtcgcgctgagtcccttgttcccatgtggcttcggggtcccaaagggttcggggcctgacctctttctggatgcgaggtcgaggacttttagggacctagggaccagtagagatccccgagtctaagcgccactagtgttgggggttgagggggggggggaggcaccgagtacctatagtcttcataacgcctcagagcacaagggaccccgtgggcttaggctcgagacatgaggggtctagatctttgactagtgccccagggcacaagactccttgggaacttaggttatttcatccttggttgtcccagggcgctaggagccctaggcgagcgctctgagctctcagtacctccatgtggcttagtagtgtgttgttatttctttggagtgccctattatcaagttaggtagtgttaagccccaggagcggtagcttcttgtatcggggccttgaatgcatcttaaaagaggttaaacttttaacttatattgtttgtcaaactttcatggaatgatgttctactaacaacgacatctctactatattaagtggcaatatcgtcggctctgcccgcgcgtcagcgcagcacacgcccagcgaaattcatagcaaaaaagcggcagaatggggcttcaaacccgcgaccagtgactagaagagttgagtctctaacactgcagctgaagttcatttgtgttatactaagaatagatattgtatatatacaaggtcaactacatataagatatatagaaaccatagcaaatgtaaatgtacgggtaactgactagtgtgtattaaggtctgtagtttcaaagtatgatatggcgccatacaagttttacttgaactgtggtaactgcagttgactgggcattgtttggttattatgtctgtaggatcataggtgatgttttcacttgggatctgtgataactgcagttgacccgacaatattttgttagaaaactgtagggatcttatgtgaattcttaccttcggctttgggtttgcctttcttatatttctcacgtgtgggcaacatcagagagtcattagcttcccatttgtgtactatagtagtttgtgttccttgagacttagttttttttttcaaaaaatattagcaaaccttctaccacaattgttaagttgcatgtggtagttgttaattgttataataattcccttctttctatctttgtttcatttttttctttgtttctctcattggcagggtctcccagtttttggcattggtgttggacatag

SEQ ID NO: 399 - DNA, 22303 bp, Zea mays
  Intron number 7 from transcript GRMZM2G139024_T01 (locus G RMZM2G139024) derived from phytozome v7.0 (chr-ID 5; pos 3 2439046 to 32461348)
ccggtggagtggccttgccatttatactagttcaggtaaaaataatgcttcatcttcttcaaacatggatctagagatacttcattgtatcattacctttcaatgccggtttaaaaaagaacattttgagtcattttagagatatcatagcaagcgatatgttgttggaagcaaatggattccattgttgatttgaacagaaaggttccaccatccaaagtcttatttgatggaataagtcatgtgtggaggacagtccgcagtccgcacagcatctctgctgcaggacagcagcaacacagcagtttttgactgcaaggaatgcagcagacagcaaggactgcggcaggcagcacagcagcagtcttttgactgcgaggacagcctgcaggcatctcctttggcagacagcaatgactgcggcaggcagcacagcagcagtcttttgactgcgaggacagcctgcaggcatctccttttttcagtttcagcttttggaggacagcagcttgctgcagtttttccttttgactagagtacaacagcacctagtggttagtgcagtttgtaggacagcatattcgcaactctaggaagcatatgctgcagccccttgggctataaatatgtatcccgacccttagacgggtatggcattgtgtagtgtttgaagaaataaacagaaaattgccccaactcatagtgtcatcctctgatgagagttagagtccctctacttacaattggtatcagaggcaaactatcctgcagcctaaacatctcgtgctcatctccttcccgtgtctctccccacactcagtcggtagcaagagctccaactgttccttcctcccctgctcagacgagcagcctttcgtctgagacagcctcttccacacgcagcgacccctcactagcccaccatgtccctacgctcggccacttcgagtgcgcggcgccagcaggaggccgaggtcgccgcggcacaagaacgcgagcgagcagcagcagcggctgcagcgacagcggcgagggcagcacggttggcggcggcggaactggcagcggcgagagcggaagtagaagcagcggaggcggcggatgctgcacgtgcggcggcaacagagctcgaggttctgcgcggcagtagagctggcagctctgcttctgtcgacgacaacaccgacgacgagctcaggctggcgagggaagcagcgcgagagcaggcggcacagtgggcagccgcgcatccccatgggggcgcgcgtggcggcaacccggataggcgccgacacgctgacggcgctccaggcgggggcgcacgcggcggtagcccagacgggcgtagacgcgccggcggtgctcccggcggcggcgaccgagtcgacggagatcgcggcctctacaggcggcgcagttctccctccccggatcggtaccatggtcgtcgcatggcccaagccattgtcagggacatcggtcccggcggtgggtggcctaccctcaccaagaccaactacgtcgagtgggccgcggtgatgagggtacggctccaggttcgccacatgtgggaagcagttcgttacgacgacgtcgactaccacgaggatcggcgggcgctggatgccctcattgctgcagtcccgcccgagatgcagttttcgctttcccagaagcggactgccaaggaggcctgggacgccatcgctgcgacccgcatcggcagcgatcgtgcccgcaagaccacactgcaggcacttcgcaaggagtgggagaacctggccttcaagccaggtgaggatgttgatgactttgctctccgcctcaacactctgttgcagaagatggtgcagttcggcgacgacacctacgatgaggagagagctgttgagaagctcttccgttgcatccccgagaagtacaggcagattgctcgctcgatcgagtctctgctagacctctccacgatgacgatcgaagaggcgattggtcgcctcaaggtggtcgacggcgacgaaccacaggctctctctgggcctatcactatcggcgggaagctacatctcactcgggagcagtgggaggcctgccagggtgacaagaagcagggggagttctcctcgacacgaggccgcaaacgcggcaagccgcgcaaggcgcgtggaggcgcccaggccggggcgcgaggacatgctgagggtggtgcacgtggaggtgcccaaggcggcgccgtcggcaacaagaagccggcacgagacgacggctgccacaactgcggcaagcttggccactgggccagggattgtcggcagccacgacgtggccaggccaacgtcgcacaggcggaggcggaggaggaggccctgctcctggcacatgcaagcatcgagccatctccagcggcaccggccgcagcggcactcctccaccttgatgagtcgaaagcacgcgctttcctcggcgacggctccaacaaggacatgatcgaaggatggtgcctcgacaccggcgccactcatcacatgaccggccgacgggagttcttcaccgagcttgactctagcgtccgaggctccgtcaagtttggggacgcctccggcgtagagatcaagggcgccggctcagtcgtcttcaccgccgcgtctggtgagcacaggctgctcaccggagtctactacatccccgcgttgaggaactctatcatcagcttgggacagctggatgagaacggttcgcgcgtggaggtcgagcacggagtcatgaggatctgggatccctctcgtcgccttctcgccaaggtacgcaggagtgcaaatcggctttacatccttaatgtgaaggtggcacaaccttgctgccttgctgctcgtcgagacgacggggcatggcagtggcacgagcgcttcgggcaccttaacttcgaagccctgaagcggctcagcgccaaggagatggtacgaggcctgccgtgccttgaccatgtggagcaattctgcgatgtctgcgtgttgacaaagcagagacgactcccctttccccagcagtcgagcttccgagccaaggagaggctcgagctcgtgcatggggacttgtgtggcccggtgacaccagccacaccaggaggacgacgctacttcttgctgctcgtcgacgatctctcccgctacatgtgggtgatgatccttggcagcaagggagaggctgcgaacgccatcaggcgtgtgcaggtcgctgcggaggcggagtgcggccgcaagctgcgcgtgctgcgcactgacaacggcggcgaattcacggcggctgagttcgcatcgtactgcgcggatgagggcgttcagcgtcactactccgcgccgtacagcccgcagcagaacgacgtcgtcgagcggcgcaaccagacggttgtggggatggctcgggctctcctcaagcagagaggaatgccagctgtcttctggggagaggcggtggtgacagcggtttacatcctcaaccgctcgcccaccaaggctctcaacgggatgacaccgtacgaggcttggcatgggcgcaagccggcggtctctcacctacgagtcttcggctgcctcgcgttcaccaaggagcttggccacatcagcaagctcgacgataggagcaccccgggggtgttcattggctacgcggagggctcgaaggcctaccgcatccttgacccaagaacacagcgtgtgcgcacggcgcgcgacgtagtgttcgacgaagggcgaggatgggcgtgggacaaggcggtggacgacggcacgactccgacgtacgacttcaccatcgagtacgtccactttgagggagctgggggagtaggcaactcttctccgagcaggtctaccccagcccccaagtctccaccgactccagcgccacactctccagcttctgctacaacgagctcttcaccaccacgcactccagccacgactccggctacagcgagctcttcgccaccacgtactccagcaccgacggtaccctctccgggaacgtcctctccgacaccagctcgtgtcgagcacgacccagtggagctcgtgacccctctgtcccgcgacgaggagcgcgtcgacgcgtgctacgacggcgagccgttgcggtatcgaagggtggagggccttctcatcgacccgtcggtgccaggccctgcatctcgcattctggcaggagagttgcatcttgcatgcgacgatggtgagcctcggtctttcgcggaggccgagcaacatgcggcttggcgtgccgcgatgcagtcggagatggacgcggttgagacgaaccgcacttgggagctcgctgatctccctcatggtcatcgcgcgatcacccttaagtgggtgttcaaactgaagagggatgaagccggcgccatcgtcaagcataaggctcgcttggtggcacgcggtttcttacagcaggaggggatcgacttcgacgatgccttcgcccctgtagcacggatggaatccgtgcgactcctccttgcgctggcagccctggagggctggcatgttcatcacatggatgtcaagtcggcgtttcttaacggcgacttaaaggaggaggtctatgtacaccagccgccaggttttgcgatccctggcaaggagggcaaggtgttgcgcctgcgcaaggctctctacggcttgcgacaggcaccaagggcgtggaatgccaagctggattccacgctcaagaggatgggcttcatgccaagcccgcacgaggcggccatctatcggcggggcaatggagataatgccctgctggtgggtgtctacgtcgacgacttggtgatcaccagcgccaaggatgcagaggtggcagcgttcaaggaagagatgaaggccactttccaaatgagtgacctggggcatctctccttctacctggggattgaggtgcaccagggagactccgggatcacacttcgccagaccgcctatgccaggcgcattgttgagctggctgggctcaccgactgcaacccagctctcactccgatggaggagaggctgaagctgagtcgcgacagcacgacggaggaggtggatgctactcagtaccggcgtcttgtggggagccttcgctacctcgtccacacacgacctgacttggcatactccgtcggctacgttagtcggttcttgcagcgaccgacgacggagcatgagcaggctgtgaagaggatcatccgctatgttgcggggactctcgaccacggtctctactacccgaggtgccctggggaggcacaccttgtcgggtacagcgacagcgaccacgccggcgacatcgacactagcaagagcacaagcgggatcctcttcttcctcggcaagtgcctcattagctggcaatcggtcaagcagcaggtggtggccatgtccagctgcgaggccgagtacatagcggcgtccactgcttcgactcaggcgctctggctggctcgactgctcggtgatctcctcgggagagacactggagcggtggaactcagggtggacagccagtccgctctagcattggccaagaaccccgtgttccatgaacggagcaagcacatccggctgagataccacttcatccgagactgcttggcagaagggagcatcaaggcgcgctacatcaacaccaaggatcagcttgcagacctgctcaccaagccccttgggaagattaagtttgttgagctttgctccaggtccggaatggctcaactttcccacaaggcgacacacaagacttagggggagaatgatggaataagtcatgtgtggaggacagtccgcagtccgcacaacatctctgctgcaggacagcagcaacacagcagtttttgactgcaaggactgcagcagacagcaaggactgcggcaggcagcacagcagcagtcttttgactgcgaggacagcctgcaggcatctcctttggcagacagcaaggactgcggcaggcagcacagcagcagtcttttgactgcgaggacagcctgcaggcatctccttttttcagtttcagcttttggaggacagcagcttgctgcagtttttccttttgactagagtacaacagcacctagtggttagtgcagtttgtaggacagcatattcgcaactctaggaagcatatgctgcagccccttgggctataaatatgtatcccgacccttagacgggtatggcattgtgtagtgtttgaagaaataaacagaaaattgccccaactcatagtgtcatcctctgatgagagttagagtccctctacttacactatttaattgtttagacctttgtaatgtccactttctgaccacggagatgatatccctgatcaatttgtaacccatgatcaattggtaactcatcagcaacaactggagactccacctgtaactcaagagacacaacatgagactcattattgtcagtatatccatcaacaacaggttcaacaagactggccatgggattagagtgagagtgacgaatgtaggtttgacgtttgagtgacaggtagtttcaaagaaaattatgaaggtggtgactgttgaaatgttgtacctaggccacatgggcctagacacatagcacatatactctaacacccccccgcagtctgaacttccgtcgcaacggagttcacagactggactcaaaaaggaagacgtaaccacaccgtacatcacaccataggatcccccatagccgcaactagccactactgatgttgaggctggagcgaaactcggcgaaggtcgaggacggaaggcccttggtgaagatatcagcaaactgggaggtggtcgggacgtggaggacccgaacgacaccggcggtgacataatcgcggacgaagtgtagatcgatctctacatgcttggtccgctggtgctgcaccgggttggtggagaggtagacggcgctgacgttgtcccaatagaccaacgtgctcctggagaggggactgtggagctcggcgaggagctgccggagccacgcaacctccgccacgccgttggccacagcacggtactccgcctcggcactcgagcgggagacgaccggctggcgcttcgacgaccaggacaccaggttgccgcctaagaagacggcgtagtcggaggtggagcgccgagtgtccgggcacccggcccagtcagcgtcggtgtagacgaccagctcggaggaggtagatcggtggagaagcagcccgtagtcgacggtgccccaaaggtagcgaaggaggcggttgagagccgcgaggtgaggctctcgggggtcgtgcatatggagacagacctgctgcacggcgtaggagatgtccggcctagtgaaggtgaggtactgaagggcaccgacaaggctcctgtacccggtggggtcctcgactgggtcaccagtggcccagagagcttcgcctgcgtgtcgactggggtagagcagggcttgcagtcaatcatcttggcccgctccagaatgtcaagagtgtactggcgctggtgaagtaggagtcctgagggccgaggctcagcagtgacccccaggaaatggtgaagcacgcccagatccttgatcggaaactcccgttggagcgcgtcgacgaggcggcgaagaagtgactgactggaggcggtgaggacaatgtcatccacgtagaggtgcaagtaggtagtctctgctccatggtggacgaacatagacgtgtctgacttggcctccacgaagcccagtgtcaccaggaacgtagccagtctggagtgccacgcccgggggcctgcttgaggccgtagagggacctgttgagccggcagaccatgtcagggcgagaggagtccacgaaccccgccggctgacagcagtagacggtctcggtgagggcgccgtgcaggaaggcgttcttgacgtcgagctggtgaactggccaggagcgagcaagggccagcgagagcaccgtgcggacggtggccggcttcacaaccgggctgaaggtctcatcatagtcgactccggggcgctgagtgaagcctcgaaggacccagcgagccttgtaccgctccagggtaccatcggcccgccgcttgtgcgtccagatccacttgccggtgacgatgttggtgcaaggcggacggggcaccagatcccacgtctggttggcgatgagcgccgcgtactcctacatcgcccgacgccagtgggggtccagcagggcggtgcggacggaggagggtaccggagaaacctgcgagtctccggtcgtggccgtcaggactcggggcggcagggtaccagccgcgtgccgcgtcaccatcgggtggacgtgacgcgggtcgcggtgaaggagcggtgggtggtacaccggcgtctcgacacgtgccgcgggtggccgcggcggaggtgtaggtgtccctggcggggactgggccaccggcggtgccaccggaggagaaggcaccggtggggacggtggcggtggcggcgacggcggcggtggaggggcaaaccccggcggcggcagtcggcgctggtagacccacaccggctgcgcgaagcgagccggaggggttggtaccgacgaccccgtaggcggtgcagtcccaccacccccgctcggcccgggggcgatcggagacggggctccgcggagaggcgacaccaccgtaggtgacaccaccggacccggtcaaggcaccgggctgggagtagaaccgataggcggtgagcgagtacctgtagagagaggaagaataggtggcgcgacgaccgcgttagtcggaaagagagtgaagaggtcaaggtcagggtcggaggagggtggtgtggtggtggagtagggaaatgcggactcatcaaacaccacatggcgagagatgaggacccggcgagaggagaggtcaaggcagcggtagcccttgtggtccggggagtacccgagaaacacacagagggtggaacgaggtgcgagcttgtgaggagcagtggcagcggtgttcgggtagcaagcacacccgaagacacggaggtggtcatagcgcggaggggaaccgaagagtgcctggtgagtgggggccgggcacgcagtagaagggagacggttgaggaggtaggtagaggtgtggagggcctcggcccagaaacgtgccggtaggtgcgcctggagaaggagagtgcggatggtttcgttggtcgtgcggatcatgcgctcaaccttgccgttctgggaggaggtatatgggcaagacatccgcaactgcatcccgtgggagaaagaagtcgcaggaggtggagttatcgaactcccgaccattgtcacactgaacgaccttaatggggaggccaaactgagtggacacccaggcgaagaagtggcggagggcggggaaagtctcagacttggcacgcaaaggaaaagtccacacataatgagaaaaatcattaagcaccacaagatagtatttgtagcctgacatactggtaataggtgaagtccacaaatcgcagtgtacaagatcaaaggcatgagtagcatgcgaggaagaagaagaaaaaggaagacgaacatggcgatctaactggcacgcatgacaaagatgctcatcttgtgatctagtacatgggatagtggcactacgagtaagctgcatcaaggcatcgcgttcggggtggccaaggcgacgatgccaggtggtagaagacgtggtggcagcaaaaacagcagctgggtcaggtgacgaagacgaagaagatgtgtcgtgcggaagccgaagggtgtagagggggccggtgctgtcacatcggaggagggggcgccgagttgccgagtccttcacagtaagaccagaagagtgaaactcgacagaacaagaattatcagcagtaaaacgacgaatagagagaagattgtggaccaaagaaggagcgacaagaacatcgggaatgcgaaaagagccgggagggccggtggcacccacagatgtgacaagaagacacgagccattcgccaccatgatggacgaagggagagaggaaggagggcgaatagaggtcagtataccagggtcgggagtggtgtggtaggtagcaccggtgtctgcgatccactcgggacccatcggcggagtcagagtgggagtctagaaggcagccagggcggtcgcgtcccaaccaaccagcccggacggtggagtagccggcggcgtggtccacgacgaagcggcaggcgtcgaggtccagggcgacggagaggcgaaggcgaaccccggctgcgcaccagcgaacatggccgccgggggacgagcctcagaacctggcccctggaacggccacatggagatgcgccctgaccacgggtggtggtaagtgggccaaggcgcaccctgctggggtcccggcgccggtgcgttgccacgggcaccatcgccggaaccgccaccaccactgccatcgcggccaccacggcgtcgacgaccaccaccgcccccacctccgccacctcgacccccgccacccatactcggcccaggaggacgatggccaagggtagactgtgacagagtaggtggacgggtcggggtgaaagccgccagtgcagtcgaggaggacgaggaccctgggccggagatcgatgcaacctgagcacccagagtgatctcctctagggcgaggtcgtcgcagacctggagaaaggtagggaagggcctctggcgcatgatcaatgaccgtaggtgggtgtagcgatcgctgaggccgcggaggatgttgaggacgaggacgcggtcctccacggggcagcccagatcaccaagtgagtctgccatggtcttcatcttgcagcagtacgcactgacactgaggtccccctggacgaaggtgcggaaggtcgcgtcgaggcggagagcacgggcctcggcgttgcccaggaactggccctcgatggccagccaaacagcccgagcgtgaggaaggttccggaggaggctgtggaggtcgacggagatcgtccccacgatccaggtgagcacgatactgtcgaggcgcacccacgcagcagtcggcgccacgccggtggggtcggagaggacgtgatcatccagggcgtagcgacgaagggtgaggaggagtaggtcccgccagcgtgcgtatgacggcgactctggctccaggacgacggggaccatgaggcgaatgttctggacactcctagcctgaaggtggagctgagccacgagcgggtcagccgggtcatgccagagcaccgtggtggtggtgcggggctcggttccgacggtcgggacgccgtacatgccgcccacggtgtcagaagaggtggtcccgccgtcgggcgccgcaatcgaagcgagtagctgtacagccgcggcaatttgagcagcgatagcgtcggcggcctcgcgctcgcgctcccacacgagggccgcttcccgtagacgggcctgtcgcgccgcatgttccgcacgggcagcggtgagggcggcgacggtgtaaacctggtgggagaccggtggaggaggcggctgatcgacgacaggatgtggatcgacgaccaacggaggggggatcggagggggagggtcctccggaccggcaactcccaccggaactgcacccgccacagcagtaagggcagaggcggcgcgcgcggcggtgaaggccccagcggcggcacgaggccctgctccccacgccggcccgagcacagaggcagcggcggctgcagggggccgcgcactaggggcaggggaggcagcgacgactggggggggggcgtgcgtcccccccgccggcggcggcagcggcgccagaccccgcgcctgcgcggccgggtggagcagcagcggctacgacggcgcatgcgccaggggcggcagcgcgcgcccaagaggaggaagagaggggagggaagtgggggtcgccggccatgggttcggggcggccgcgcacgtcggtagagggcggcggcggcggccctggccgcagctgggcaggcggggcggttccctggcgcggggccccggacgcgcgcgtggcggggcggcacgagggtcctggcgaggcggcgcacggccgcctggcggggcggcgcacggccgcggcggcgcgggccctagcgcgagcagaggccggcgacggcagcgtgcctgacggcgctggagggcagaggagaggagggaaggaaagaaaccctagctgataccatgttgaaatgttgtacctaggccacatgggcctagacacatagcacatatactctaacagtgacatatggaagggtgatgtgatgggaatgagaacatgtatggatgtagtggatggtggtgttgtagatgaagcatcaagattaggaggaaagcacataaaggtggattctgtgggattatatgaagtgtgtagaggagttgtaaaagaagggacgattttcatcaaaattcacatcccatgagatactaaggcggcgagaagaaggatcataacatcgataactaggactggacggaaaacccgacgcccgaagcctgaatccgaaaacctcgaaaccgaacccggataacccaaacccgaaaaacatttcgggtacgaactttcgctacccgaatttttttagcacatttcgagtcaaccgtaccggtacccgaataggcatactacccgaacttccacacaccagcgcaacgcttcaccttcaccttcaaggcctcatgggccagggtgccagaccacgacccacaccgccacacggagtcacattcacgcatcacgcccacgccctggtgcctgaagtctgcaatcccagctatagcagccggccaaccgtcgccggccagccgccgatcgccggccgcccaactgcccaagcaccaggccgctctgtccaccttgtgtggtactctgattatctgtcttgtacaagctgtactgtttgttgcctgcctctgcttgttggcttgctaccgagagtgctgctgtgctgcctggtgcgtggtgtggtgcctgcttgcctgcctggtgcttgctgcagatgtgcagtactgctgtattgtagtgtagcctgcagatgtgcaggacacagacaacataaactatcgggtagttcaagtttacccatacccgagcccgatattttgggcacccgaaaaattcgggtcgagtttgggttgacctgctagatacctgaaatatataaaacccgaactacccaatccgaattttcgggtatacccgaacgcccagtcctaccggtaacctttatgctcgggactacaacctagaaaaacaaactcaacagattgggcaaccaatttagtcctctcatgtggtgctagcaagacatagcagatacatctaaagactcaaagatgatcatatccacggagtacaaaaaagtacttctctaggacgtttgctggagagcttggatgatagttgtctatttatgagatagacattagttgagactgctccactcaaaaaatgggaccatgggagggaataaaagaggaatcaaaagagtgcacataatctctagaatatgatgatgtttgcgtttaacaacaccgttctgatcatgagcaccagagcaagaaagttgagcaagagtaccctctgaagtcaaaaactggtgaaaagcatcgggcgaatattgtccaccagaatctagatgagaagttatgatgggagtggaagaccgagtatgaaccgtgcgacaaaagatttctaaagggaaaccaattcagagcggcgtttcatgaagtaaatccaagtataatgagaatgatcatcaataaataccataatatttataaccaccttttgaaacaaaggagcaggaccccaaacatcagacaaacaagatcaaaaggtatagtagaatgagagtcactagaaaaatatggtcattgtatttgttttccaagatgacaacccttataatggaaactaaatttaggagatgtatgacctaaacatcccaactttaataaggtggacaaccgagatccacaaagatgacctaaacgatggtgccattgggcaaacgatgtagcagaaggcgatgcaacaaaaagcacgtgagccgaagacgtggtggatgtaggaagacaatgtccaagataaggtgaggagcacttttactgcgacggccaatcccaatcgcatcctctgtgcaatgatcttgtacaaaacaagatgagtcatcaaatccaacaaaacaactatggtctgtaatttgtccaactgagaggagatccatagacaacttaggtacaaagaaaatgtgaggaacatcaaagttagaattggagaaagaaccctgatgggtaatgatgcataaagtaccatcaaccgttcgaagcaactaactttgactgattagtcacgtgaaaagaagccctagagtcaagaacccaagatgatgacgatgcagaggcaggtgatgtagcagtaatgtggagatagatcccacaacagctaaagaggatccaagatggggcaacaacaacgataaaaaacgaagcaacaagatccaatgtgagatggcttgattggagtcgtcacaaaggccggacgtgatgggcagaggagggccgccccgacggcattgagggtggccgtgacaacggtgctgaggaccgccacaacgacgagataggtggcaggagggatgatcacgacggcttcataggagacaaccgcaacgacgacacggtggttggccgcgatggcggcgcaggggaacgagtggcagaggcgacacaggggacgaccgcgacgacgacacaggagcctgccacgatgacaacatagcgtttggttgtgacaacagtggggaactagaggcggagagacgatgtcgcgcagaaaaaagtgattaggaaagtggatttaccctaaccctaacatgactttggtaccatgttactaacctcgggactagaggagataataatgataattaatgtccatgactttgtggaatgataatatgggcctcatgggccttaacattaacatctccccttttagtttctactatattgttctcgcaatcttggcttgtttatccctacgagacacactttgaaaaatgaaagaccaccactagaaacttccaagagacaacacactccctatgtattaccttgcaatctaagcatactcatttatcctctcttgcttgtgaggacaaagtcaatctgactagagtgttggccactaatgtaggtcattaaatggcattctcttgttaaagaaagtgttggctatcaacaagtcaaaagctatcgcaaagtccaagacttccttctaattcgaactaccatacccaaaacctccatgaaccgccttgaaacctgcacttgttgtacctacatgcccattaagattttcttcaattaaatgaaaagcttctcactaataagtatagctctaaccatgtgttggaaaccaaaatggccgtgcggacggtccggccctgaggccggacggtccgcggtccggactgtccgcggtggtggcgcggacggtccgtgcgtgcgcagagtcaattagggttcctagtttctcgcgggatttgttacctaaaaccgcgggattaactcggaaatcagttggaagcggatccagacctccccctttatatagataaagggctacgaccgattgaagcccccaacaatcgatcaaatcaagtctattactcgtttttaccttatgcattaggagtagttctagtttaggcctagtttagtattccaatccccaaattctctgcctctcctcgactctacgtcgattagaggagtctaggtcggtctgcccgagcctagacaactcctaggatctctcctccccgacggggtccctcccgggagcgagatccaggcgccgccggcgatcttccgccgcccctgcgcacgcgcggaccgtccgcccctagggcgcggaccgtccggccgtcaggcagggaatcctagctcctgcaccaggtcgcggaccgtccgcgtctgaccagagagcaccgccgcctcgcgccaggtcgcggaccgtccggccctgtgccgcggaccgtccgcgcctgaccagagagcaccgccgctggttcttttgagtgattggcgcctccaaaaaggtgtcaacatactttttggcgactccgctggggattaggtgtctagacctgctaaaaatcggcccatagatggccggttctaaggatcacaccaagatctccaccaccaacatcatcaagccggccgtggaggcgctcccggctgatgaccaaaggccctttgaagacctcgtaatgcgcgatgaggaggtgatgcggcaatggaacgaacaacgcgacaaggaagaggcggaactgctgcataaactctccgaacggcgcaaatgcacgctttcgtgtcaccatcacagccgcaaccactaggcacgcggcaggtactggacgcgaccggaccgtccgagcatcatctcagacagtccggttataccgcagaccgtccggcgtatttcgccggaccgtccgaccagatgcaggcccgcacacaaaacactcaggtcgcaccgtacatggccggaccatcagggtacaaccctgaacacttcggccccatcacggaccgtccggtacatcacgccgggccgtccggatatgttgcggaccgtccgccgtcttacgccggaccgtccggatatggcatgaaccggccaacgtattacgctggaccatccgactctacacgagtccacgcgcagactgcccaagtcgcgccatatatggtcgatccgtccgggtacagccctggaccattcggcccgatcacggaccgtccagttctttatgacagacggtctgggtatgagactacccacgtagcaccatatacggctggacaatccggatataccttcggaccgtttggccaggtcgcggaccatccggcttcttatgccggaccgtccggatatgcatacgcagaaccgagagctgcgcaatacgcacagttcccacattcatcgcagcaacattatggtgccccaccagcaacacattataatcatgtcataccacctcatggacatagggctgaatactattcggccacaagagagcctgagaggtatagggcaggagctggtgacattaataggacacctaacacacacctcaaacatccctgggaggaaagccgacagagtgatgtcaggcaacctgagatttctacccacaaactcaatggatggtcgccagacatggcggagagggtcagagacgaggtagctaggatgttcagggacaaactcggtgttagtgtgtcaggtacagggcaatcgtatcggaagccttatagccaccgattcgacaccgtgccatatccgcagggaactagaataccagacttctctaaattttctggtgaaggtgggaaaagcacacacgaacatattagccaattcatagcacacttgggagaattggctgatggggaagcctactgcgttcgtttattctcgttgtcccttactgatactgcatttgcatggtacgcagctttgccaccaaactctattaactcttgggaagaattagagcagaaatttcatgaacacttcttctcaggagaacatgagttagaattggctgacttagcttcagttcgacaggggcctgaagaatcggttaatgactatatccggagattccgggacactagaaaccgatgctttcagattcatgtcgcagaaaaacaactaacatggctagctttcaatgggttgcgaccctacttaaaagaaaaattagatggcacccaattcttttcgctagtgcacttacaccagcgggctatgacctgtgaaagccggagtaaggaaacatcaaaatcggctagccataaagatgcatctagtgggatacgataattcggacgatgaatccacggatgtatacaccgccgaactggtttggccaggataggctaaaccttcagcgtgttctgctttacagtcgattagaaagaatcgacaagaagaagttaagtttacttttaatgttgccaaatgcgataaaatatttgacgagttactgaaaaacgacaacattaaattaactcatactattcctccttctgatgaattaaagaggcgtgcttattgtaagtggcataattccttttctcatgccaccaatgattgtaatgtttttcgtcgacagatacaatcggccataaatgagggtcgattggcttttcaggagatgcaagtagacacacaaccttttcctgttaatacaatagaactcacatgcaaaaaggtcttggttcggcccgaaatggccgataaaggcaagggcatggtcattggcgatccccgcacgtcagataaatcacaaaaggagattgctcgaaaggcttcggacgagaaggctaaaaagtccgaagacgccggggggcaggcacagttaatgaaccaaacacgtcagcctagcccgagcatcgtagatggtccggcacctacgtgcggacaatccggtgctcagacaaacggtccggctaactcagccggacagtccccctatgaccaaaggcgtcaacctctacacaaagcaaggaaaaagacgcaaggtcaaagcacatataatcggctgatcaaagccgatcctacttttgatcagttgctctccaaaaatactagcaaaaagactgttccacgtgatcggtcaacaaagaaacctcggtcacctgctaaaacaaaacggtcaaacaaaatggcccaaaaggcgacacaacaagcatcgcctattcattctatgagaccagggtactttccacctatttactcatcgtcggtatattatcctgttcaaacatggaatggcacgatgatgaatccatggtacatgtatagtcccttcgtctatccagactggggggcacctccattctattccttttgatccattgatcaaatggtcatggccgagaaagatacaatccgaaacggcctttatattggtgctttattgaataatctccatatcgaaaagccggtggcctccatcaggtttagttcatatgcttttggttcgtcaaccttcaccaaaaggcagggggcatatgttggaaaccaaaatggccgtgcggacggtccggccctgaggccggacggtccgcggtccggactgtccgcggtggtggcgcggacggtccgcgcgtgcgcagagtcagttagggttcctagtttctcgcgggatttgttacctaaaaccgcgggattaactcggaaatcagttggaagcggatccagacctccccctttatatacataaagggctacggccgattgaagcccccaacaatcgatcaaatcaagtctattactcgtttttaccttatgcattaggagtagttctagtttagccctagtttagtattccaatccccaaattctctgcctctcctcgactctacgtcgattagaggagtctaggtcggtctgcccgagcctagacaactcctaggatctctcctccccgacggggtccctctcgggagcgagatccaggcgccgccggcgatcttccgccgcccctgcgcacgcgcggaccgtccgaccgtcaggcagggaatcctagctcctgcagcaggtcgcggaccgtctggccctgtgccgcggaccgtccgcgtctgaccagagagcaccgcctcgcgccaggtcgcggaccgtccggccctgtgtcgcggaccgtccgcgcctgaccagagagcaccgccgctggttcttttgagtgattggcgcctccaaaaaggtgtcaacaacaccatgtcatctaagtcttaccagaaaagtctcttggcacttctatcgtggcctactttggggggggggggggggcttacacgctaattacgttcgaaatcaaatcacccacgacaagcttgactaaaattaatctatctccttgccttctcacatccaccacaccatttttaagttcttatctgttggaatataatataagcgaattgctcacccctcctatcagcttgagcttttaggttggattggttggtgcatgcaacttaatatggtatcaaagctagaggtctcgagtttgaatcctagttagcgcaattaaataaaataattgttgctcgctcctattccacgtctgaaaccgaagagaagctcgccgtgagggggagtgttggaatataatataagtgaattgctcacccctcctatcagcttaagcttttaggttaggttggttggtgcatgtaacttaatattatcaatcaaaacttaacgtttctatttgcagttgtccttgtgtaccaaagcttgaagttggtattgtgtccacctcctttgccttctgacccttccatttagtcttttggacgtatagatatttgtctcaactaactttcctttgccttctgacccttccatttagtcttttggacgtatagatatttgtctcaactaactttcttaactgtaatggtttgactagcttccttacccttcacacccatcaatgatgtgaagatccttgcacatttttgactatactcgggtgctgatgtagcgaccactaagaaagcagcgacccgatcattgctacttgacatcgtacctagatgacgacatggcgtgtcaccaaggggtgccgacccagcccttgcccatttaacaccatacttgggttttgacatggcacgtctctaagagagttaagccttaatgatttctttcgggtttatcttcattataatggctgggtttaatgttggcttgccaagcctatcacaaccctccacttttactagggtttgggacttgctatgttgagacaacacagacggaggtattatccttgcggatatatgtgcaaccttttatcccccacaattaatccattgattccatccacctgcctcctttgtttcttgcggatatatgtacgccatgacttttgcagctgccaatagtgggcgctcgacagccaccaaagttgaggaagctacatgcaccctagcacatcactgcttctgctaaggcacgtggcgacaccctggcaccaatgatgctgacacccttgaggctgctgagcatgaagccgctacctctgccaaggatcgctatgacgctgttgaccacaagcatgtctcttcggagtgtgcagctagggagagcaccggagcacgtcaccatccagggcaacaaagaccgtgctgagtccgatggggagtcatgcacatggaccccttccccttcctgatccgcttcttgtccataagacccttgccttggccaacctctatgcccacgcctacactcacaggacgtccatacccgggtgcctctcatccttgacctcacctctggccactactcttggtggcatgaactcttcccccatctcgggaagtactcccttgagccccttgtactcagcaacgaccctgacccaaccagtgttcttaaggcgtcgcctaggcgacgcctaggcgtccaggcgcccgggcaaaactggccgccttgctcgccatacccgcctaggcgctaaggcggttggctggtgcacttgctcgcctaggcgccttaagaacactggacccaactctaccagattggatgtccatggactgcgatgagtttgttgggatggtgttgaaatgttgtgcctctgcacaaaccacctagcccgccattgggacctagtttctcggcaatcaggaatatgtgccatctaccttgatgcagagtcttgctacttcgatctcttgatcgtggactactgctggtgcttcaagatcatagctgatgtcctctctgttctcgacgagtctgtggatgactgcaccctcgtcatcaatgtcatccatggcctcactgagaaattcaccgccatcagcatgcatcttcaacgaagctggtccttctccaatctccacttcccctgagtcaaacctgttgctggaggaactaggcattcgtgccatgtgtctgttgttatgacgtttgaattggtctgttttttagtgaactataatggcaagaatcattaacattgggccatgcagcattctttgtgaacacttgttgctttgctaccattacctctgttcatcacttttaactccctgtgttatgccttctcaacttcattatgcaagttcaattttttttggccgtgatgtgctaaatgacagttacttccatttgttgtgtaaccagacacgtcctc

SEQ ID NO: 400 - DNA, 3903 bp, Zea mays
  Intron number 2 from transcript GRMZM2G130095_T02 (locus G RMZM2G130095) derived from phytozome v7.0 (chr-ID 1; pos 1 67865330 to 167869232)
tgggaggccagaacaaagtggaccaagctacccccacagagcacggcgaggaagctggggtgaagcagcatgatgctacagttcctgatgacaagaaatggcctgggtggcctggagagagtgtgttccgtatactggttcctaccacaaaggtgggtgccgtcattgggcgcaaaggggatttcatcaagaaaatgtgtgaggaatcaagagcccgcatcaaggttcttgagggaccaccagctgtgccagaaagagctgtaagcctttcactatcttctttaactggttgcattactattacaaatgctttgcagtcagtatggccagaagagccctctaggcatgttagtgttcatgtgaaagaatcactttcagttgttgcctacaccaataactatgctatgttgtttagttagaagacctagattagacatgtatatagtttgtggcatattgatgattatttcctttttatatgtcttgaagattgaatcagctagaaaacgtttctaagcatataaaaatgacagacttagtgccagaggctcccacacgagtagggtctggggaagggataaaccgagggtcgaggcaagcctcccccacgaatgtggggaggcatcttcaaacccgctacctggtgactgagtgagacagctctcaccactgcaccaggtttgcccttctagttttcaagcatataaattgctattatattttcttgaccgctgatactatgcattccgtcaactgatgctttgtgaacatggtaattaatggatctgcaatagtttagtccttaatatgtattatctggacgttcttgacttgatttcaataatctaaactgttatttagtagtgaaaaaggccttgttgaatctggaaaacttgctggaagttgtataaatgaacaggaactagttactaaaattttgtaccttacaatgtaattggacatgcatctgcagctgcagattattgcctcctttctgaagtgaatgctctgataatattttttataagctgaaacagttcaacttaaggatcaggtgtatatagtgccccagataattggaatcatgtcatcatattgactcctgtgcaattttatattaagatgagatttgatcatccaagttactacagtggaagttgtatactagtaacattaggtacctgcccatagggaatggctatgtgctggaaagtttagaaaaaaaattgaacatagatttcaagattataagtgaaatccctttaaggtttgctgtggaatggaaatagttatgcataattttggattttttacaatgaccacaaaacttggatgcaagcaaatgaaaggggaaaaatctctcgtctgtaagaagtatgactataattgattatcagacagaaatagtagctttgccaaattgtacactattctgaagatatatattgtgtacactagttaattatcaataatgttcgatgtctgcatggaccaaatagttatgattgcatacatgaatgtccttcattctaaaagatcggatcgattattaaatgatatactgattttgaccaactcagtagtaacgcggactaaaataaaataatatgacatggttctttagttaactgtatattgtggggcctattaacacattctagttgctaaccctaaaagttagtgcacaaataaaggcactcaaactaacaaggaacagattgttagcaagatggctttcaagtacagaacataatagtcttgtcaaaagtaacaaactaatctttgcaggttcttactgctgtctaaggcctcaagttgagtcatttgtgtatccaaatcccaaaatagatgtacaatcatggttaccaaagtacagtcttgtgctcctctgctgcacatgtggtttaagccttatgaatattggatgaagatccctgtgaagaagctgcactttttgtctggtaattccatgacctgtttgctttgaccaaaaaggcatcagtatttaacaatggaagactaaaatattgcacagaaccttaatattaagtactaatcatttcctaaataatgctctgatattttataaagaattgggaacaacaaacaaagaatatgaatatatagtcctcaactcgatgcttccccttatattttgggggacttggttttgctgaaacaatattgtaatataacattgtcatttatcaatatcatcaaacaatacttacactgactttaaaaatagatctattgtttttgctctttgggattaagagctgcctatgataaaataaaaatgcagattgaagtagattgcttgtatccgaaattccattatacatacacattagcaagtagcaacaacagtcttgatacatgtacaatagttaaggaaaactattgatgcagttaaggacatgtccgttgctttaatcagagggcattgcctcatgttggtgagtgactgcatgcaattatgtatgtttttctcagaaattgtagttggaacccagctaaatgtgtataaatataaccattaccatttcctctacctacagcaggatggaaatactgtccttacaccatcgttttctttcataataaatactgtccttataccatcaattcctttcataagtctttgggcatgttgctattaactaatctttctctgtctaacatacttttgttcctacttgatgagatcttgatactgctttcctgttcaaaggtaatgatttcagcaaaggatgaaccagacacagagctacctccagctgttgatgggttgcttagagttcatagaaggataacagatggtttagaaactgaaactgatcagcctcaacgagctactgtcaacactgggccgacaaggctactggttccagcttcccaagctggcagcctaattgggaagcaaggagcaactattaagtcaatacaggatgcttcaaagtgcgttctccggattgttggtaaggttttacatttttccctttgttaactttgttagggcaaggctttatgatttcatgtcctagcagtcctgctgataatatggattttgtagttctttgcaattctttttcaaaccaaggattaatcttggcaaatgtgtgtggcctatttgttctactaggagtactgtctgctttcaaatatatttttgcacatcttcatttgtgcacttagttactagatattgatgttttgatgatctttgataaccggacttgacaagattgaccgatttagtttatctgttacatttgtgaatgcatgtgtatctgtgacagaaatcggccttagaattccactcttctgaactgatagtcttatgtggagtatgatttaattaactgcatgcaaaggtgtagcatttgctgatcccctttgttttttaggctatctatttttttctttttattctctagtattctttctggaccatgtttgatcatttgtactttcaacccttatttctgcaaaatttcactggaagtcctgcattgcacatatttgcatggtacaccagccatttcactaatatactagttttccttcacagagaatgttccacctgttgcattaaacgatgacagagttgtagagatacagggtgaacctcatgattctcacaaagccgtagaactgattgcaagtcatttaagaaaatttcttgttgaccgcagtgtcctccctttgtttgaaacacaggcaagttgtattctactatgcagcatattggttacttacatgaaaagtatttggtagtcataaaacataaatttccttgacagattaaagcacacaatatgcacagagagcaacctatgcctcctccacaggcatggggcccccctcctccgtcaccctggggtcatccaccaccaaacc

SEQ ID NO: 401 - DNA, 3108 bp, Zea mays
  Intron number 3 from transcript GRMZM5G893976_T01 (locus G RMZM5G893976) derived from phytozome v7.0 (chr-ID 8; pos 1 5274795 to 15277902 reverse strand)
accggtacgctgcctccgaccgatccccactgccttacttctctcatcacagtgtttctgttaggatttgatgcttcctgttttctgcttatttgatctgtggacggaagtttcagaagggcagcgggttcttctttccttagaaaaaggaataactgaattcataaattcacgatggatgaaatgggattttggagtatgtggccagatagtggatgtcatagagcaattgttttgatcacaaagatttgtgattcctgcctgccagtgatgctaggtgcataagtttgattgatgtatcctaactcactaggattatgacctactcaagtgaggtgaatcttattgactctcccatcagtagtttgatacaaagggcactgctgtttatgttttcagtgataggttactcgttgtccaagtcttgggcactaggggaccttgctttctaaagaaacacacagcttcagagacttgcacagcctcataaagcagactctgacattactgaacggttacgagctcagaaagtgatgacatgatgagaaggtagctagtttcatggcttcctgtgtctatgtgatgatagtgagttgactgagttctgaattctgtggccacatgcttgtgctgaaatcttcttcatcaatttacatcttcacacattagccatcgcagtatttctacggtctctgtagacagtggcatcaaattccatgtgtgaactttggctagctgaaggctggctaaggcttcaatgtttatgtcatgacaactttctaaaagcccgttccaccgtgaaaaataatatttggtggaagctgtgaatctgactagttttgcacttgctgtgcatcttatttaacttttgggatattttggcatgacatataacattaatgtcctggttggggtctggtttactttctaccaataagcgagtgcatgctggtttattgtatagtgtgaatgtgtgcgttgtattttatgaggtcttcagttagttagtgatcatgtaggagccgccagcaccgggttgtcctttttttcagttaattagtgatgtcctggtctcctgtatggttggatacacccaaacagtgatgtagtaaccgggaactgggaacttggccacgttcctcgttccaggaacattcgttccgttccgggaacgtgggaacaatctcgttccagtagtgttaaatcctagttttagtagcgtaccgcgtaccacgttcccgttcttcgaccccatcgatccgggaacctggttactatggttacgaccccggcgatagggaggtaacggggttggactgggcgtcggtccctagctgcgtaggcaagagactagagtagtagaagagggattagattaaacttcttgcttgccttttccttcacatccgattacattaaatagtcccaaggggacctgcggctactccttatccctaacttttctcaactaactcaatctatcttttatccctaaactctctcaactaattaaatctatctcttatccctaaactctctcaactaactcaattctaacttctcctattctttctcatctcttacttcctgctgtggccggcacttatacactgcgccccacataacagagagcaaagaaaggaatttcgtgattcattcccaacaaagagaacaaaagatggattctgttttcaacagttgaaagttgtatttcatcaatgcaagcttgagtacgtttatttatgatctgaagagcaatagagtcccggaaaaatcataccatactaaaaacttggctggtaggggaaagaccgcccccccacgatattatattaagaagaagctcaatcggagccctgaccaagaaaggtcacgaaaactggccccccgtgcagcatgaaggtccgctccctataggctagatctttactcgtgctttgagcccttgcagcccctacacaaggagccgcccccataggtcagtccatctcatgtgcacacaaccaagggaaccagcgagtgaccttttttaatctcagcctgaaattcgctcccactgggattcgaactcaggacctaaggagtgctactcagtccacctaaccaactcagttagaggccctttcacaaatcataccatactgaaatatatgtaacaccctgtttagagtcacaacacaattatatgtgctcccacagtttgaaattggtaggagtatttcatttcgttaggacaagcctttgaccaacaatttgtgttaatacaattttgtaatgcaaattcaatgccactagattttttatcacataaatgacattagtagagtaattgttggtcaaagtttgtcctaatgaagcaaaatatggctactaatttcaaatggagagagtatttacaaaaaaagcaaccattctttgctcaagagatatatgtattagtgaaataaggagcacatgtttgatattcacagcctgttatcttattcaatttctgtgttcttgatttttatatggatttaaagttcttgagttgtgttttgcactgcaccttttcttttttatattaagtgtactaatgcacatgcctatggtagtttagagtctgcaatctgcagttcctttttttcatgacgatatttgtacaaatagttaaatactgtaatctgtgtgaatgctgtactagcaacttggaggataaaccttttccttcttttaataagtgattttttgttgttcttgcagattagtcgttttacatcaatgtgaaccctcactagcatgaaactttttgatattgttgcaccaagagtagcactctagaatctagatttggcctttctataccatgcttctatggattccgctggcaatagcctgtttctttttcagttgtatgatgcctgtttttgctgtgatgataatgtcgtcgcatttatctgagtactgtgaacatattctttgattatgtatttatttatgtaaatttgaaaggatagatatataatattgcatcccataagtttgtttaaatcttgttttcttaagctagtctatgttgttaatatctcgctgctttcactgtcatccaacaggaagcgcttatttggt

SEQ ID NO: 402 - DNA, 2528 bp, Zea mays
  Intron number 1 from transcript GRMZM2G037150_T01 (locus G RMZM2G037150) derived from phytozome v7.0 (chr-ID 2; pos 1 76024676 to 176027203 reverse strand)
ccgggggaagtagcggtaagagctcacgatcccgatccccaagttctttgcttcgctaggcgatccgtgcggatggaatcggggttttcttgggaaactacggttcctcagtctcaggatttctaggcctcttgtgaggtggcgatcttgggatggctttgtgcagcgcagtgcggtactggttgcgttgaagggaattgcgaccgatcatgtggtcggagctcggaagggatggggtcctgggtggactcctttagttccagttgggtaagattatgaattcgaggtctttgtaattttgtgaagtcttgtgggcgataagagtgatgccgttaaggatcaagtcgcgtgcaattgatgtcctggtttcctgctcgaaagaattgccagacggtcgacgttcttggagccgtagtgatttgtggaatcctttgttctctagtatgccttttgtagacatttgagtttgtgaggaaacattcctgtgaatgggggatgggcggttgggcttgtactgctcctgtaatggcaataggccaatagcagagtgttccttctgaaatatcttagtgccatgtgacgtgagcctgaattggaactgccttttgcttttcaatatcagatttctgaatactgtgtggatcatcatgctataaaaatttctgacatttaggtagaagagcaggatcttagattccatgaggaggcattggattgtcttgatgagttgtccttgtttgtcggtagtgtcgtatctagagggtggacagggtggaccctctgattttgatttgctacagtagtcagtatatagatggttttaatttatttttccttttgattctcatatgtcgtatgacttaaaatgcaaactcatttatttattttgattttcataagattggaccaccctaacttaaatcctagattcaccactatttgttagtaccatagctgtgtgcggtaatatgatgagctgctgtgagagatatatggtcaacttggcagtgtgtactgtgtagtgacatacttgtctctgaaccttcaagacgactgatgacaatatagtgtgtgccgttgaattctatgaataagtggccaaaatgaagcatggatattttttttttcaaaactgccaaaggaaaatgcatggcctgtattaatgtagaagggagaagcatggataataagcatgcttatccttcagagtgatccttgggtaaaatcttttatgcttgatctgtctgtttctctatttgataatatgcacattcatagcatcatcaaccctttctacatgcgctcacgctgtgttgtacgttgaccatcaacccttgggggttgaatgtaaatgtagcgcccgcccatagtagcctgtaatagtttgccaatagggcccatgtgtggttgtggttggtgggtttaataatacctttgatgcttaggtgggtgattgtcgctccaaacgtagcacctctgggctaacccttttacacgaatcgatgatgaaagtgtaagggaggtgctatgcatatacaagcctgtttcacgtgagacgttaggagctagtccgtaagcagattttggacgcggggtgttaaacctatgcatttgtttagagcgactcatagttctgattttggatgcctatacagttatgaccaaataaatttacaattgccattctttctctggcattttttcttacagcaatgcaatgagcaatattatatgtttagatgtggcccatttccatatttcaagtaacatggcacttcatgaagatttaaatattaggaatataaacataatattctttctgtttacattacatagaattatacttctgtgggttcagctgagcacagtagcttattttctgaatcataatagtcaatgtttattgagtaatattgttgaagttgtatttacatctggttctcagccatactacagttgccctcttggtttctggataatcagctggtttgctcacgcaatcggtactatgaattggcaggaagaataaacttgctagttgccctagaagatgcatatatttgtgttgactagactacacagtaaggaagtagttacaccaggtgccctcttggtttctggacaaccagctggtttggtcatgcaattgataccatgaataggaagaataagtttgctagttgccctagaagatgcatatatctgtgttgactagactacatagtaagaaagcagttacctagtacaaagaataatggtaggaactataaaggttaaatctaaagatttgcattttttttgttccttcaaaatgtgtgcaagggaatctctgatttgcttactctcagttttatttatgtatgagcatgtccctgccttgtatcatgttctttcacagcatccttgtactatcacagtcatggcacttttactgatttactacactgattaaactttgaagattctacatgcttaactaagatgatgtttgtcaccttatctagtgatgtttatgttattatatgcag

SEQ ID NO: 403 - DNA, 36705 bp, Zea mays
  Intron number 1 from transcript GRMZM5G860302_T01 (locus G RMZM5G860302) derived from phytozome v7.0 (chr-ID 10; pos 123299697 to 123336401 reverse strand)
cgccagaaggcacgaggggggcgggggcgacgagggtattgtcggggaccataattaggtgtaccctcaaggctcctaattctcagctggtaacccccatcagcacaaagctgcaaaggcctgatgggtgcgactaagtcagggatcagtccattcaagggacccgatcacgcctcgcccgagcccagcctcgggcaagggcagccgaccccagaggatctccgtctcgcccgaggcccccctccagcgacgaacatacatccggctcgcccgaggcccagtcttcgccaagaagcaaccctggccaagtcgccacgccaaccgaccaaatcgcaggggcatttaatgcaaaggtggcctgacacctttatcctgacgcacgtcctccagtcgacagagccgaagtgaccgcagtcacttcgccgctccactgaccggcctgacagaaggacagcgccgcctgcgccgctccgactgctgctccactcgacagagtgaggctgacaggcagtcaggcccggcctcaggcaccataggaaactccgcttcgcccgacccagggcccggactcgggctcagccccagaagacagcgaactccgctccgcccgacccagggctcggactcgggctcagccccggaagacggcgaactccgctccgcccgacccagggctcggactcaggctcagccccggaagacggcgaactccgctccgcccgacccagggctcggactcgggctcagccccggaagacggcgaactcggctccgaccaacccagggctcggactcgggctcagcccctgaaggcgacgaactccgacccacccgaccccagggctcggactcgggctcagccccggaagacgacgaactacgcttcgcccgaccccagggctcggactcagccctggcctcagccgacggtctccgcctcgcccaacccaggggctcggactcgaccttggccacggaagacagactcgacctcgacctcggaggagcctccacatcgcccaacctagggcgcggaccaaccacgtcaacgggaggcgccatcattaccctaccccaagctgactcaggctacgggggacaagaccggcatcccatctggctcgctccgccagacaagtaatgatggcgccccgcacgctctatgacgacggcggctctcaacccccttacggaagcaagaggacgtcagcaaggactcgacagatccgacagctgtccttccgccatgctccagcgctcctccgacggccacgacaccacacgaaccgggtgccaaaacctctccggccgccacgatggcgtgtacttagggcgctagctctcctccgctagacacgtagcactctgctacaccccccattgtacacctggatcctctccttacgcctataaaaggaaggaccagggccctcttacagaaggttggccgcacgggaggacggggcgacgcgtagagtccctcgctctctcccacgcggacgcttgtaaccccctactgcaagcgcacctgacctgggcgcgggacgaacacgaaggccgcgggatttccacctctctcacacccgtctccggctgcctttttccccccttcgcgctcggcctcgcgtcgacccatctgggctggggcacgcggcgacatttcactcgtcggcccagggaccccccggtctcgaaacgccgacagttggcgcgccaggtaggggcctgctgcgtgttgacgaacagcttcccgtcaagctccagatgggtagtcttcagcatcctttccagcccgggacggtgctccgtttcgggagtcttgagttcatgtccctcgacggcagctacgacatgatactccttccccgccgtgcgacaacgacaatggcggccgacaacccgcccgccggcggcggaatcgacgacgtcttccccgcgtggtggaagaacaacattcgagctcaccccgtcctctcccccgccgacggaggaggaggcagggcaaccaacgccaagcatgaggcagcgcctcatcggctgtcgagcgagtcaacggcgccggcgccccaacagggggcacgtcgggcatcgacctcgcgtctgagacgaagacgagcgtcgtctccccgcaacgcgccaatcccaagcaaacggacgacgccagcacgctcgcgaaaggcttgctgggcgtcaccctcgtacctaagacgacggtgcagtcagtccctgacgtgacttcgtcaccgcccatcgaccaagaggtacccaccgatttccatatcacgcctttcggattcagcctcgacccgccaagcggcttcgctttggcggacgctctcgtagaggcaagtccaaaccctctggggtttcgtatgcggtcaccctaggaccggctgacggatgtctcgacctacgggccctctgggtccgaggaagacgacgtgcccgacttctgttgggatttctccggacttggtaaccccagtgccatgcgggacttcatgaccgcgtgcgactactgcctttctgactgttccgacggtagccgcagcctcggcgacgaggactgcggcccaagtcgcgaatgtttccacgtcgatctagggggtccctctgaaggcaaccatcttggtatgccggagaacagtgatctccctaggcctgtgcctcgcgttgacatcctacgggagctcgctgtggtccccgttccggcggggggtcatgacccatagctcgagcaaatccgcggggtgccggccaggctcgacgagggagcaggagcacttgagccgatccgccgggacctcgggcaggaatgggcgggccaacctccggccggagaaatgcgtcatctaccccagggcttccagcaccgcatcgccgacgatgtcaggatgaggtcgccacccgcttccagtggagtcgggccagaacctggctgcagcggcaatgctcctccgcgcgatgccggagccatcaaccaccgaggggcggcgaatccagggagagctcaagaatctcctggaggactccacggtccgacgggccaaaagctccgcctcccgaaggcaggggtacccctcggaacatcgcgccgcgacttcccaattcatgcgggaagcctcggtccacaccgggcgcacgcgcaacacagcgcctgcggccccgggtcgcctcggcaacgagcatcatcaccgcgaccgtcgagcccacctcgacgagagggtgcgacgaggctaccaccccaggcgtggggggcactacgacagcggggaggatcggagtccctcgcccgaaccacccggtccgcaggctttcagccgcgccatacgacgggcgccgttcccgacccggttccgacccccgactactatcacaaagtactcgggggagacgagaccggaactgtggctcgcggactaccggttggcctgccaactgggtggaacagacgatgacaacctcatcatccgcaacctccccctgttcctctccgacaccgctcgcgcctggctggagcacctgcccccggggcagatctccaactgggacgacctggtccaagccttcgccagcaatttccagggcacgtacgtgcgccctgggaactcctgggacctccgaagctgccgacagcagccaggagagtctctccgggactacatccggcgattctcgaagcagcgcaccgagctgctgaaagggaaatgtgcccttgagccatttctaagtattttggtaattgagtgtcaacacaagtgcttaaatgtgaatttatgcccattgatgaacaaagtgcaaatcataagtaaaggtatgtttctaagccttagtacattggttttgtgtactaatatacttgtctaagtgttagaaacagaaagaagaaaagaagagaagagtgggctgtgtacagccaaaagactgcttcggtctggggcaccggactgtccggtggtgcaccggacagtgtccggtgcgccaggctgcctcgggcgaagacgctgctctcgggaatttgccgacggcgtacggctaaaattcaccggactgtccggtgcccccgacgacagaaggcaaggatggccttccagatttgttttcaacggctcctagctgccttggggctataaaagggacccctaggcgcatagaggaggacaccaagcattccttgagcactcttgatcactcacacatcaatcttgcgcacttgttcgacattctagtgatttgagctccgttctagtgtgctagtctcttgagctcaagtctgggtcttgtgtgtgcgtattcgctgtgatctttgtgtcgtgtgtgagttgctaatccctcccttgctccgtgattctctgtgaacattttttgtaagggcgagaggctccaagttgtggagattcctcgcaaacgggattgagaaaagaaaagcaagaacaccgtggtattcaagttgatcattggatcacttgagaggagttgagtgcaactctcgtccattgggacgccacaacgtggagtaggcaagttttgtacttggccgaaccacgggataaccaccgtgtcatctctgtgattgatttcttgtggttattgtgttttgactcctctctagccacttggccataattgtgctaacacttaacaagtttttgtggcttaagttttgaagttttacaggatcacctattcacccccccctctaggtgctctcaattggtatcagagccgttctcttcaagaaagggactaaccgcccgaagagatggatcctaaggggaagggaatcgtgatcaacgacaaggagaaggagtccttcgtcaacgagcccaaagatgacaagcctaccgactccggctcgggtcatagacgaaaggaagggaagaagaagaagatgaggcgcatcaaggagatcgtctactacgacgacagtgatgagtctacttcttcccaaaaggacgacgaccacaacgactacgagcaaaggaaaccggttaattctaacttttcctttgactactctcgtattccgcaaagttcaaattcacatttgctttccattccactcggcaagcccccacactttgatggggaggactacggattttggagccacaaaatgcgtagtcacctattctctctccatcctagtatatgggagattgtagatagtggaatgcactttaatagttcggatagtcctatattcattaatgagcaaatctataagaatgcacaagctactactgttcttctagcttcattgtgcagggatgaatataacaaagtgagtggcttggataacgccaagcaaatctgggataccctcaaaatctctcatgagggaaatgacgctaccttgctcaccaaaatggagttggtggaaggcgagcttggacggttcgcgatgataaggggcgaggagccaactcaaacatacaaccggctcaagacccttatcaacaaaataaggagctacggaagcacgcgatggacggaccacgacgtcgtccgactaatgctaaggtcctttaccgttcttgatcctcatttggtgaataatattcgtgagaatcccaggtacaccaaaatgtcgcccgaagaagtcttaggaaaattcgtcagcgggcgaatgatgatcaaggaggcaaggtacgtggacgacgccttgaatggaccgatcaacgaaccacaaccttttgctctcaaagctacaagaagcaaggaggcgctacctagcaaggtggcacaaattgaggcggtcggacttaatgatgaagagatggctctcatcatcaaacgcttcaagacggtgctaaagggtcacaaggggcagccaagcaagaccaagacgaaggggaagcgctcatgcttcaagtgcggtaagattggtcattttatcgctaactgccctgataatgatagtgaccaggaaaaggaaaacaagagggaaaagaagaagcattacaagagggcaaagggcgaggcgcatctaggcaaagagtgggactcggattgctcctcttccgactccgacaatgaagaactcaccgccaccgccttcaacaaatcaaacctcttccccaacgagcgtcacacatgccttatggcaagggaaaagaaggtatgtactcgcaactctacctatgcttcgtcaagtgaggatgaatctagtgatgaggatgaagtagattattcatgtttgttcaagggcttagatagatctaagatagacaaaattaatgaattaattgatgccttgaatgaaaagaatatacttttagagaaacaagaggatttattgtatgaagagcatgataaatttgtagaagctcaacgatctcatgctctataagttaaaagaaatgaaatgctttcttgtgaattatcttcttgccatgagacaatttcaaaattaaagagcattaatgatgatttaaatgctaaactagtagaagcaaataaatccaactcttgtgttgaacatgttgaaatttgcactagatgtaaggatgttgatattaatgcttgtagtgaacacttagtctccatttcaaaattgaatgatgaattagctagtcttaatgcccaacttaagactagcaagagtgaatttgaaaaactaaaatttgcaagggatgtctacactattggtagacacccctcaattaaggatgggcttggcttcaagagggaagccaagaactttacaagccataagactcccatctccaccaaggagaaagggaaggctcctatggctaaaagtgttaagaagaatcatgctttcatgtattatgataggagatattctagaaatgcttttagaggtcatgatgtttttgattcacatgcttatgactcttatgctatgactgcttctagttctcatgttatgcatagtagaaatgttgtttatcaaatgcctaggagaaatggtattcataattctcctaggaaagtagtgaatgaaccttataaaatttattgtgcttcaaatgcttcctttgctatttgtagaaaggataagaaaattgttgctaggaagctaggggcaaaatgcaagggagacaaaacttgcatttgggtccctaaggatatttgcactaaccttgtaggacccaacatgagttgggtacctaagacccaagcctaaatttgccttgcaggtttatgcatccgggggttcaagctggattatcgacagcggatgcacaaaccatatgacgggggagaagaagatgttcacctcctacgtcaagaataaggattcccaagattcaattgtattcggtgatgggaatcaaggcaaggtaaaagggttaggtaaaattgcaatttcaaatgagcactcaatttctaatgtgtttttagtagagtctctaggatataatttactatctgttagtcaattatgcaatatgggatataactgtctatttacaaatgtagatgtgtctgtctttagaagaagtgatggttcactagcttttaagggtgtattagacggcaaactgtatttagttgattttgcaaaagaagaagccggtctagatgcatgcttaatagctaagactagcatgggctgactgtggcatcgccgcttagcacatgtggggatgaagaaccttcacaaacttctaaagggtgaacacgtgataggattgactaacgttcaattcgaaaaagatagaccttgtgcagcttgtcaagtaggtaaacaggtgggaggaacgcatcacagcaagaatgtgatgaccacttcaagacctctggagctgctgcatatggacctcttcggacccgtcgcctatctgagcataggagggagtaagtatggtctagttattgttgatgacttttcccgcttcacttgggtgttctttttgcaggataagtctgaaacccaagggaccctcaagcgcttcctcaggcgagctcaaaacgagtttgagctcaaggtgaagaagataaggagcgacaacgggtccgagttcaagaaccttcaagtagaggagttccttgaagaggaagggatcaaacacgagttctccgctccctacacaccacagcaaaatggtgtgatagagaggaagaacaggacgctcatcgacatggcgaggacgatgctaggagagttcaagacccccgagtgcttttggacggaagccgtgaatacggcttgccacgccatcaacagggtctaccttcatcgactcctcaaaaagacgtcgtatgagctactaaccggtaacaaacccaatgtatcttactttcgtgtatttgggagcaagtgctacattctagtgaagaagggtagaaattctaaatttgctcccaaagttgtagaagggtttttattaggttatgactcaaatacaaaggcgtatagagtcttcaacaaatcatcgggtttggttgaagtctctagcgacgttgtatttgatgagactaatggctctccaagagagcaagttgttgatcttgatgatgtagatgaagaggatgttccaacggccgctatgcgcaccatggcgattggtgatgtgcgaccacaggaacacttggagcaagatcaaccttcttcctcaaccatggtgcatcccccaactcaagacgatgaacaggaggcgtgtgatcaagggggagcacaagttgatcatgtgatggaggaagaagtgcaaccgggcacctccaacccaagttcgagcgatgattcaaagggatcatcctgtcgaccaaattctgggtgacattagcaagggagtaactactcgatctcgattagttaatttttgtgagcattactcctttgtctcttctattgagcctttcagggtagaggaggccttgctagattcggactgggtgttggccatgcaggaggagctcaataacttcaagaggaatgaagtttggacgctggtgcctcgtcctaagcaaaatgttgtgggaaccaagtgggtgttccgcaacaaacaggacgagcacggagtggtgacaaggaacaaggctcgacttatggcaaaaggttatgcccaagtcgcagatttggactttgaggagacttttgctcctgtggctaggctagaatcaattcgtatcctgctagcatatgccgctcaccattctttcaggttgttccaaatggatgtcaagagcgctttcctcaacgggccaatcaaggaggaggtgtacgtagagcaaccccctggcttcgaggacgaacggtaccccgaccacgtgtgtaagctctctaaggcgctctatggacttaagcaagccccaagagcatggtatgaatgccttagagatttcttaattgctaatgctttcaaggttgggaaagccgatccaactctttttacaaagacatgtgatggtgatttgtttgtgtgccaaatttatgtcgatgacataatatttggttctactaataaaaagtcttgtgaagagtttagcagggtgatgacgcagaaatttgagatgtcaatgatgggcgagttgaactacttccttgggttccaagtgaagcaactcaaggacggcaccttcatctctcaaacgaagtacacgcaagatctgctgaagcggtttgggatgaaggacgccaagcctgcaaagacgccgatggggaccgacggacacaccgacctcaacaaaggaggtaagtccgttgatcaaaaggcataccggtcaatgatagggtcattactttacttatgtgctagtagaccggatattatgcttagcgtatgcatgtgtgctagatttcaatctgatcctaaggagtgtcacttagtggcagtgaagcgaatccttagatatttagttgctacgccttgcttcgggctctggtatccaaaggggtctacctttgacttgattggatattcagactccgattatgctggatgtaaggtcgataggaagagtacatcggggacgtgccaattcttaggaaggtccctggtgtcatggaactctaagaaacaaacctctgttgccctatccaccgctgaggccgagtatgttgccgcaggacagtgttgcgcgcaactactttggatgaggcaaaccctcagggactttggctacaatctgagcaaagtcccactcctatgtgataatgagagtgctatccgcatggcggaaaatcctgttgagcacagccgcacaaagcacatagacatccggcatcactttttgagagaccaccagcaaaagggagatatcgaagtgtttcatgttagcaccgagaaccagctagccgatatctttaccaagcctctagatgagaagaccttttgcaggctgcgtagtgagctaaatgtcttagattcgcggaacttggattgaattgtagcatacatgtgtttatgcctttgatcatgttccttctgcattttgttgcttattatggtgctcaagttgtacaaacactcccgggacctcacaagcccgttgcaaagtgatgcacatgtttagggggagttgtgttacaacttgacccttttgagactaaccatatgcttgagtttgcttgatttagtctcgaaggagaattgaaagggaaaaggtggacttggacaatgaaagacttccactgcactccgatgagagggtaactcattccaagttcatctcatgaactcttattgccatttgctcttaattgaagattttggtgaggcaatggggttaaaagggccaaagttgatcctgttttggtgcttgatgccaaagggggagaaaataaaggctaaagcaataaatggatcagctaccacttgagaagttttgaaaatagtgaaatagagctttttgttttgtcaaaactctcttattgtctcttttgtcaaaagttggtttcttgtggggagaaggaatgattatgggaaatagggggagtttttgaaatctttgatcaatctcttttggaatgactctctttatgcttcaacatgtgtgtttgacttagagatagagatttgagtttgatttgcaaaaacaaaccaagtggtggcaaaggatgatccatatatgccaaaaatgaatcaaaatagatttgagttctgtttgaagtgtttttgcacttgttctagctgctttatgttgtgttggcataaatcaccaaaaagggggagattgaaagggaaatgtgcccttgggccatttctaagtattttggtgattgagtgtcaacacaagtgcttaaatgtgaatttatgcccattgatgaacaaagtgcaaatcataagtaaaggtatgtttctaagccttagtacattggttttgtgtactaatatacttgtctaagtgttagaaacagaaagaagaaaagaagagaagagtgggctgtgtacagccaaaagactgcttcggtctggggcaccggactgtccggtggtgcaccggacagtgtccggtgcgccaggctgcctcgggcgaagacgctgctctcgggaatttgccgacggcgtacggctaaaattcaccggactgtccggtgcccccgacgacagaaggcaaggatggccttccagatttgttttcaacggctcctagctgccttggggctataaaagggacccctaggcgcatagaggaggacaccaagcattccttgagcactcttgatcactcacacatcaatcttgcacacttgttcgacattctagtgatttgagctccgttctagtgtgctagtctcttgagctcaagtctgggtcttgtgtgtgcgtattcgctgtgatctttgtgtcgtgtgtgagttgctaatccctcccttgctccgtgattctctgtgaacattttttgtaagggcgagaggctccaagttgtggagattcctcgcaaacgggattgagaaaagaaaagcaagaacaccgtggtattcaagttgatcattggatcacttgagaggagttgagtgcaactctcgtccattgggacgccacaacgtggagtaggcaagttttgtacttggccgaaccacgggataaccaccgtgtcatctctgtgattgatttcttgtggttattgtgttttgactcctctctagccacttggccataattgtgctaacacttaacaagtttttgtggcttaagttttgaagttttacaggatcacctattcaccccccctctaggtgctctcagctgcccaacatcaccgactcggatgtcatcggcgcattcctcgccggcaccacctgccgcgacctggtgagcaagctgggtcacaagacccccaccagggcgagcgagctgatggacatcgccaccaagttcgcctctggccaggaggtggttgaggctatctttcggaaggacaagcagccccagagccgcccaccggaagatgcccccgaggcatcaactcagcgcggcgccaagaagaagggcaagaagaagtcgcaagcgaaacgcgacgccgccgacgcggaccttgtcgccgccgccgagtacaagaatcctcggaaaccccccggaggtgccaacctcctcgataagatgctcaaggagccgtgcccctatcatcaggggcccgtcaagcacacccttgaggagtgcgctatgcttcggcgccacttccacaaggtcgggccacccgcggagggtggcagggctcgcgacgacgacaagaaggaagatcaccaggcatgagagttctccgaggtccgcgactgcttcatgatctacggcgggcaagcggcgaacgcctcggctcggcaccgcaagcaagagcgtcgggaggtctgttcggtgaaggtggcggcaccagtctacctagactggtccgacaagcccatcaccttcgaccgagccgaccaccccgaccacgtgccgagcccggggaaatacccgctcgttgtcgaccccgtcatcggcgatgtcaggctcaccaaggtcctcatggacggaggcagcagcctcaacatcatctacgccgagaccctcgggcttctgcgtgttgatctgtcctcggtccgggcaggcgctgcgcctttccacgggatcatccccgggaagcgcgtccagcccctcagacaactcgaccttcccgtctgcttcggaacgccctccaacttccgaagggagaccctcacgtttgaggtagtcgggttccgaggaacctaccacgcggtactggggaggccatgctacacgaagttcatggtcatccccaactacacctacctcaagctcaagatgccgggccccaacggggtcatcaccgtcggccccacgtacaaacacgcgttcgaatgcgacatggagtgcgtggagtacgccgaggccctcgccgaatccgaggccctcatcgccgacctagagagcctctctaaggaggtgccagacgtgaagcgtcatgccggcaacttcgagccagcggagacggttaagtccgtccccctcgaccccagcagcgacgcctccaagcagatccggatcggctccgagctcgatcccaaataggaagcagtgctcatcgactttctccgtgcgaacgccgacgtcttcgcgtggagtccctcggacatgcccggcataccgagggatgtcgccgagcactcgctggatatccgagccggagcccgacccgtcaagcagcctctgcgccgattcgacgaagaaaagcgcagagccataggcgaggagatccacaagctaatggcggcagggttcatcaaagaggtattccatcccgaatggcttgccaaccctgtgcttgtgagaaagaaaggagggaaatggcggatgtgtgtagactacactggtctaaacaaagcatgtccgaaggttccctaccctctgcctcgcatcgatcagatcgtggattccactgctgggtgcgaaaccttgtctttcctcgatgcctactcagggtatcaccaaatcaggatgaaggagtccgaccagctcgcgacttctttcatcacgccctttggcatgtactgctatgtcaccatgtcgttcggcttaagaaatgcgggtgcgacgtaccagcggtgcatgaaccatgtgttcggccaacacattggccggacggtcgaggcctacgtcgatgacatcgtagtcaagacgaggaaagcctccgacctcctttccgaccttgaagtgacattccggtgtctcaaggcgaaaggcgtgaagctcaatcccgaaaagtgtgtcttcggggtgccccgaggcatgctcttggggttcatcgtctccgagcggggcatcgaagccaacccggagaagatcgcagccatcaccagcatggggcccatcaaggacttgaaaggcgtacagagagtcatgggatgtcttgcggctctgagccgcttcatctcacgcctcggtgaaagaggcctgcctctgtaccgcctcttaaggaaggtcgagtgcttcacttggacccctaaggccgaggaagccctcgggaacctgaaggcgctcctcacgaatgcgcccatcttggtgcccccagctgccggagaaaccctcttggtctacgtcgccgtgaccactcaggtggttagcgccgcgattgtggttgagagacgagaagaggggcatacattgcccgtctagaggccagtctacttcatcagcgaggtactgtccgagaccaaaatccgctacccacaagttcagaaactgctgtacgcggtgatcctgacgcggcggaagttgcgacactactttgagtctcatccggtaactgtggtgtcatcctcccccctgggggagatcatccagtgccgagaggcctcgggtagaatcgcaaagtgggcggtggaaatcatgggcgaaacaatctcgttcgcccctcggaaggccatcaagtcccaagtcttggcggacttcgtggctgaatgggtcgacacccagctcccaacagttccgatccagccggaactctggaccatgttcttcgacgggtcgctgatgaagacaggagccagcgcaggcctactcttcatctcgcccctcgggaagcacctacgctacgtgctacgcctccatttcccagcgtccaacaatgtggctgagtacgaggctctggtcaacgggttgcggatcgccatcgagctaggggtccgacgcctcgacgctcgcggtgactcgcagctcgtcatcgaccaagtcatgaagaactcccactaccgcgacccgaagatggaggcctactgcgatgaggtttggcgcctggaagacaagttctacgggctcgagctcaaccacatcgcccggcgctacaacgagactgcggacgagctggctaaaatagcctcggggcgaacaacggttcccccggacgtcttctcccgagacctgcatcaaccctccgtcaagatcgacaacatgcccgagcccgaggcaccctcggcccagcccgaggtaccctcagctcggcccgaggcaccctcggttcagctcgaggtaccctcggcccccgagggtgaggcactgcgcgtcgaggaggagcagagcagggtcacgcctaatcgaaactggcagaccccgtacctgcaatatctccaccgaggggagctacccctcgaccgagccgaagctcagcagttggcgtggcgcgccaagtcgttcgtcttgctgggagatgggaaggagctctaccaccgcagcccctcaggcatcctccagcgatgcatctccatcgccgaaggccaggagctcctacaagagatacactcgggggcttgcggccatcacgcaacacctcgagccctcgtaggaaacgccttccgacaaggtttctactggccgacggcggtggccgacgccactagaattgtccgcacctgcgaagggtgtcaattctacgcaaggcagacccacctgcctgctcaggctctgcagacgatacccatcacctggccttttgctgtgtggggtctggacctcgtcggccccttgcagaaggcacccgggggctacacgcacctgttggtcgccatcgacaaattctccaagtggatcgaggtccgacccctaaacagcatcaggtccgaacaggcggtggcgttcttcaccaacatcatccaccgttttggggtcccgaaatccatcatcaccgacaacggcacccagttcatcagcagaaagttcctggacttctgtgaggatcaccacatccgggtggactgggccgcgtggctcaccccatgacgaatgggcaagtagagcgtgccaacgacatgattctacaacgactcaagcctcggatctacaatgacctcaacaagttcggcaagcgatggatgaaggaactcccctcggtggtctggagcctgaggacaacgccgagccgagccacgggcttcacgccgttctttctagtctatggggccgaggccatcttgcccacagacttagaatacggatccccgaggacgagggcctatgccaatcaaagcaaccaagctaatcgagaagactcgctggaccagctggaagaggctcgggacatggccttgctacactcggcgcggtaccagcagtccctgcgacgctaccacgctcgaggggtccggtcccgagacctccaggtgggcaacctggtgcttcggctgcgacaggacgcccgagggcggcacaagctcacgcctccctgggaagggccgttcgtcatcgccaaagttctgaagcccggaacgtacaagctggccaacagtcaaggcgaggtctacagcaacgcttggaacatccaacagctacgtcgcttctacccttaagatgctttcaagttgtttgcatacctcgttcctacacaaaatttagtcatcaaggaagggttagccttgcctcggcaaagcccgaccctccctcgggggctaaaagggggggaaccccctctgcgtcgaattttttcctctcgaaaaaaatccttcctgccagaatgtctttcgtgcttttcgactacttcgaaagtggatcctgaaaacgacggagtacacgtaagcagtcaaggctgaccgagctgagggactcctacgcctccgggatacggatacctcactcatcaccttcagcgataagtgactcgcgttcggataagcgattccgcggaccgaacaagtcttcacgctcaaaagctcctctgccgaagcgattcttcgagccttctcgactgactcggtgacagaaccccatggacgggcaagagcgcgcgtaagcggcaaggccgaccgagccgagggattcctacgcctctgggatacagatacctcactcatcaccttccgtgaaaagcaactctcgctcgcacagacaattctgtcaccgacggaaaagtccagatactcgaaacaagaggaaaagaagcgcagctttacaacacggcgagggtgtgtttgggcctcggcggccgcagaaaacacacgctacaagatgatccgatcctgcacggccggatcttgacagttgaagggagcagcagcaccctcggcatcgactacaccttcggcgaggtccgacctagcctcggacggcgacgcggtccgaggatctccactctgaaggacgacatcatcatcacgcccgggccatcgccgccagggtcctctccaagaatccggctcgagcagccggctcggctggtcaccccgaggcctcggccagctatcaatcgaagacatcagcccggcctaaggcctcctcagatcaattccggcgtcggtcccgctaacggacgacccggctaggctccggccgaccaagtcttcttttcgagccaactctgcctctgtccgtgctgacgccgctacccctggcctcggctcatcgaagagcggccgaggggttcctttaactaagcaagagaagcctcggacagcaaggccgaccgagccgaggaactcctacacctccgggatacggatacctcactcgtcacctttgcacggggcgactcacgcttggtgaagcggttcagacaaccaacaggcgagtcttagtgctcgaagatgaggaaaaaacacggctccgcgccaaaaatacatacacgttcaggccccgacaaccacaatgaacaaaagaccggcattcaaggtgccattacaaatggaactccggttccacctctgcaggtacgaacaaccccactcgatcggggggcctgcggagcaacagaagaccgacgaacggcacgccgtcacccgcttcagcagcgacgacgacgacaacttctgctccgggggaccgaacagcagcagcgatgacctcagggcggatgctgctgccaggaggcccccgcctgtgcccaaactcgtgaggcaaggacgggcagaaggccgtagagttggaggtcggtccgtgggcggccccggctatctcgtcggcggaagaacctcttctagctgccgtggcggaaggcggcgccgggagcggctccgaagccactcgggtccgagagccgggcacgcggcagctgcctgcgccacgaacggcgaacgcccttccccccgatcactgagggaaggagcggcccaccgcccacgcaggggccgaccccaactcggcacactcccctccccggcactaatgatgaaaatccttgaggctgagggaggggcagaggccgcagcccggcttgctttcccccgccatcgaactggaggtcaccgtcttgggtgaccgccggcggaggggtgcagccgggctgcatgatgaaaatctttgaagccgaacgatggctgaaaggtaccaactcccgcggagttgcgttcctccaacgacaaggaggaaggactgcgggcatcccccattcgggggctcggaaggtggaaagacacgatgcataagggagcgcgaagacatggtcgcctttcaagggggtcaccctccttttaaaggcgactctccctacttgcgtccccagccgtcgtgggctgagtcctctccaacacgctccaaggtcttccccctacggcgtggggactgggtcccacgcgccatgcaagctggcccagggcagaagaagccaaaccaccgcgcgcggtgcatgcaaccgtccaacggatacaagtgtccctccactttcgcccagaccagcgggtgaaagggcgggcagccatgcaggcagcatgcaaccgcgccaagtgggcgcacttctccgacttccaacacgcccagcatggaggcccaggcccacgtgtcatgcaaccggcgcgccggatgctacgtgcgagcaactgcaccgccactcgcgccactgccacgcctcctcgactgcggaaccagtaccgcgactcgaggcaaccctacgcacgacccagcagcgccagcctggtgcgatggtcaatacagccaaaaatgggccggcagtaatggcggtggcaggcgggcaggagcagcggtcacgtcgtcagccaagcttacgtcccatccgggggcagcgagagatccctctctcacggcgtgaagacgacgcgcccgtgttccgttcctcgaacggctcgcgcacgcgcaacggctaccccgcaaaccactcgccccgtcacattaactccgcggcgggataggcggcgcctctggcaggagaagcaagcgacgcttcgccttcgccataatgaccgcgtcaaaaaaaggtacaccatgtcgttcgatttcgtatcctttttccttttcctctttctctctcttacaacagggatcgggaaagggggataccccgaaaaggatccttctccgtgaaggaactaggctccgagcctccctactgatcaaaggttcgaaggttggcccctcggaggggttcaacagccgcctcagagcgcgtgggctccacacccactactggtcagaggttcgaaggccggcccctcggaagggttcaacgaccgcctcaggctactcgggctccgcgcccactactgatcaggggttcgtaggctggccctcgaagggttcacaaccgcctcagacacagagcgagggatgaccatgggtacgttcgatacataaccaaggctcgggttgcgctcccgaggtaccctaggacatttccgagactagcgggaacgatcttgtaacggaatcccatcagagggaggcatcgagccctcggaccccgtcgaaaggggaccgggtccggcagatcacccgcaggtacttttgggcgcgcctctgggcctctagccgacccctagcaaatggggcacggacgtccgctcggattacccgccagcagctcaccggagacaccatgttcggcgccctccgagggcaacatggcgctttcccccctcctccttgcagaaaggcgacgcaggggcgtatgtaaaaaagtcgagtctgtccctgaccgtccactcgccctgtgcagaggctcgggggctgctctcgcaaacccggctccggccaaaccgttgacagcgtcaacataccagcccgagaacttgggacctgaccgtgcacccaggctacagccagctcgcatgagggaacgaccagaccagccaaagcattgcgcgaggcattaagacctcggaggagtcaaaccactcctccgaggcctcgggggctacacccggcgggtgcgctcgcgcgcacccaccggaacataatgcaaccgagaaaggctggtccccttgcaaaaaagtgcgacaaaagcctccaagcgagtattaacactcccttcgaggctcgggggctactgtcggggaccataattaggggtaccctcaaggctcctaattctcagctggtaacccccatcagcacaaagctgcaaaggcctgatgggtgcgactaagtcagggatcggtccattcgagggacccaatcacgcctcgcccgaggcccccctccagcgacgaacatacttctggctcgcccgaggcccagtcttcgccaagaagcaaccctggccaagtcgccacgccaaccgaccaaatcgcaggggcatttaatgcaaaggtggcctgacacctttatcctgacgcacgtcctccagtcgacagagccgaagtgaccgcagtcacttcgccgctccactgaccggcctgacagaaggacagcgccgcctgcgccgctccgactgctgcgccactcgacagagtgaggctgacaggcagtcaggcccggcctcaggcaccataggaaactccgcttcgcccgacccagggcccggactcgggctcagccccggaagacgggcgaactccgctccgcccgacccagggctcggactcgggctcagccccggaagacggcgaactccgctccacccgacccagggctcggactcgggctcagccccggaagacggcgatctccgctccgcccgacccagggctcggactcgagctcagccccggaagacggcgaactccgctccgcccgacccagggctcggactcgggctcagcccctgaagacgacgaactccgacccgcctgtgggggatagatatcccctgggtccactaaagaagtaaaaggcctaacgaaaggcccaagggcccgataattcgtaaggtcattctttcgtgggcctaggaaaagacaaccaacaaagaagacgtgagactgattagtgcaaacccaggcggcccacaacgctggacgaatgaatcgcaacagagacccgactttcccgcgctgaagcccccaggcaacagagccgtgcgaggataagtcggcgaggggtacgtagggataaactcaagaggttcactatcttttagctacttgttgttatcatattcacgtgtactgccccacggtcgagtatataaggcctagggggcaccccttcagatcgatcgaccctgctctacttagccacccacataaactctctgcgccctctatccagagaaccctcttgtaaccacgctcgtatactcaccaggacgtagggtattacgcacttctaagcggcccgaacctgcaaatcttgtccattgtccctcgtgcgatcggcacgaaccattttgctacagtcgttgacaccgtcctactcctaaaaacaccttgaggggcaaccccgggtgtgcggtcggacccaaaacaccgacagctggcgcgccaggtagggggtgtgtcgacgatccaagctagctcaatggccgtcaccttccacagcaagatcgccgtgcgtcccggatctgtattctgcttcgggacaatctcatccgtggcggacgaagagggaattctacaccgcctcgcagatctgccgaaacagaagcctcctccaacaaactccgaaaatgctggaaagacgctacctccggctcttcggaaaaagatcgtctccggggaggctggagctagaagctcgctgacccggaagactccgctgtctacttccccgacgagagaatggacacgggtcgtgagaaagaaggagaccagggagagggaagtcgttcttcccgttcctccgacctcaaaggagaacggaaagaaagtcgccgcggcagcaataccgttctaccccgacgtcctcttcatcgggagagcagagtcgcccgccgtctccgacgatgaaccgaccgcgcctggagaagaaccgcctcagcgagaatctcgccgacgaaggaaccgacgcaggaacgttcgacgacatcacgcagctggagaacgggatccggagcagcctgtctcgcgagacgaggtctcagagataggagaaactccggaagaacgcgtcttcagggaacgaaggaactcccgacgacgtgatcgccgtcggactcaggagcaagccgagcaagatgcaaggcaacgacgcgagaatccactcttcgggcgcaacttgaaccccgacttcgcccgagctatgaacacgccgagcgaagtcggaggcgttctagcccggatagctgacggacttcctcggactcccgacgccgagggataccgacgcctgttcactcaagcagccaaccatcttctaccactcgctcacccgccgaacgatttgcgacacgccatcaacagtcgccgagacgcgtgaagctctatcaatgcttcgcgcgaacggcggcacgagaacgaaattcgccgtcgggaggagtatgaccgaaatcatggcttcccgactcaaagccaggccacccgaactgagtcggcaacagcttcaactggtggaaccacccggggacggtcgaggaaccaccaccgccactcccctccccgggacagacgacatcctcgacgacaggaggacacgtgcggagtatccgcccttactccgcgccttagggccatccaatggcctcccaacttcaaggtatccaatgtcgacaaatatgaacctaagcaggatccagggggttggttagccgtctacaccaccgctgctcgggctgccggggcatccgaagacgtcatgactgcgtatctgcccatcgtcctcgggcaagacgcgctgcagtggctacgacatctaccccgacactgcatcgacgactggggagacttcagtcgacgtttcaccgccaacttccaatctctctccgacaagccagcgcaaccatgggacctcaaatccatcaagcgccggggggatgagactctccggtcataccttaaaaggttccagaccatgagaaaccgcatccccgaggtcacggaggcggccgtgatcgaggacttctacagaggatctaacgactcggctttcgtccgagccatactgcaaaaggcgccgactacctccgaggagctgttccgggaagccgacctctacatcaccgctgacgagcgggcccaggacctcatcggaggagcaaagcccgcaccggcagcaccacgacgtgacgcgaaccagccgcccgacaagcgctgggagaagaggcctcgcgaagaggtacacgccgccggaccacccgcctctcgcgcccgaggaggacctcgtggaggcgaacgcacgctggacgacatcctcgacgcccagtgcccgtaccacaaggacatacgccacactctccgcaactgccgggatttcaagcactgcgtcgggcatggccgacccttccaacctctaccgcctccttcgccgaggggaggaccagatgaaccacgacagccccatcagccggaggaggggggaggaggagctttcccgcgcgttgacagggaggtcaacgtcatcttcggcggacatgggtcgcaggagaacaagagacaacaaaagctcaacgaccgccagatactggtggcgaccaccggccctcccgccccgtaccggtggtcggagcacccaatcacgttcactcgggaggatcaatggctcaacttcgaccacccgggcaaatacccgctcctcgtcgatccggtgatccgagagagccgggtgaagaaggtgctagtggacggggggagcagcatcaacgtcaccttcccccgtacgctccaaggcttgggagttcacctcaaagagctccacgagtcagacactcctttcttcggcatcgtgccgacggaaggggaatacccgctgggccacatctacacgccggtcaccttcaggactccggataactacagaaccgagttcctgaggttcgaggtggcgaacttcgactgcgggtacaacgccatcatcgggagaccagggctggccaaattcatggccatcccacactatacgtacatgatactgaagatgccaggaccgcaaggaatcataactgtacgcgccgacttccaaggcgccgcagaatgtttccgagtggccatccaagcagccctcaccaccaagccgtcaacggttccttctacaccggcgaactctaagcctgaagaagacctcgccgtgccggcaaacgaagctcaggccgcgacctctatgcggccgactgaagacaccaagcggatcaacttggggtttgctgatgagcgcaaggcggccatcatcagctccagtttaaatgacaaataggaaagcgcgctcgtccagttcctgcaagataaccgagacgtattcgcatggcaacctgcggatatgccgggagtcccgagggagttggccgagcacaaattgaaagtctatcctcaggcgaggccgatccggcaaaagctgcgtcgtttcacgcccgacaagagagaggccattcgtgccgagttagcccgcttggtcgcggccggatttattagagaagtattacaccccgagtggttagccaaccctgttcttgtactcaaaaagaataaagtggattggcgcatgtgcgtcgactatactgatctcaacaaacactgtccgaaggatcccttcgggctcccgaggatagatcaggtggtggattccaccgctggatgttcgatgctgtctttcttagattgctattccgggtatcatcagattagtttggcaaaagaagacgaggaaaaaacggcgttcatcaccccgtttggtgctttctgttatacctccatgccgttcggcctcaaaaacgctggagcgacttatcagagagctattcaaacatgcttagccgatcactggggcaagcgtgtggaggcttacgtagacgacgtggtgattaaaacggagaatccggaaaacttcatcgaagacttacagctggttttcaacagcctgagaagatatagatggaagctcaatcctgagaaatgcgtcttcggggtaccagcaggaaagttactcggatttattgtcagccaccggggaattgaagctaatccagataagattgaagctatcatgaagatggaagctcctcgatcgcaaaagaaggttcagcgactcactggatgtatggcagccctgagcagattcatatccaggctgggagaaaaaggtctgccattttataaactgctgaagaaggtggataagtttcaatggacttcagaggcacaagaagctctagacgcactgaagaaattcctgacaacaccgccagtattgaaaccgccccggcgagctacgccgactcagccggctgaagatttgctgctatatatctcttgcacgactcacgtggtaagcactgcgttggtagtcgagcgagtggaagaagggcatgcctacccggtacaacatcctgtctacttcatcagtgaggttctaggcccatcgaagaaaaagtatcctcaagttcagaagctattatatgcagtacttctaactgcccgcaagctgcgccactactttgacgatcacaaagtcatagtagttactggttttccaataggggacattcttcacaacaaggaagccattggccgaatagccaagtgggcttgcgagttgggatcccatgatatcgagttccgacctcgcactgccatcaaaactcaagcactggtcgatttcgtatcagagtggacagaacaacaagtgccggataatccagaaaccgcagaagtatggcgaatgtattttgatggctcgctgaagctgcagggagcaggagcaggaattctcttcactgcacctggaggcgagcacctcaagtaatgctctccagttgctattcccggcctctaacaatgcagccgagtatgaagctttgatacacggattaaacatcgccatatcactgggtgtcaagagactgatggtgtacggagattctctggtagtcatcagtcagataaacaaggaatgggattgttcaagtgattcaatgggaagatactgcaccgccgtccgaaagctagaagataaattcgaaggtctggagtttcatcatatagaaagagatcggaacacggcagctgatgtactgtccaagctcggatccggtcggactcaagtcccgcccggggtcttcgtgcaagaaattctccagccgagcatctcgacggatcaaatagaagagtgcattatcatagatcaacccgagtcagactctgacgactggaggcaaccgattattaagtatataaagaatgaagaagaaccagatgacaagaactcggtagagcgcattgccagacaatcagctcactatacactcattggggaggtattatacaggaggggcgcatcaggcgtcctcatgaaatgcgttctcccgtccaccgggaagcaacttctggaggaagtccatgcagggcagtgtggagtacacgcagcatccagaacattagtcgggaaggttttcaggtcaggattctattggccgacggcgaagaatgatgcagccgagttagttcagagatgcgaagcttgccaatacctgtcaaagcaacagcacatgccagcacaacagctacaaaccataccagtaacttggcctttcgcatgctggggattggatatgattggacctttcaagaaagctcaaggaggatacacccatgtattggtggcaattgacaaattcactaaatggatagagttccagcccattgcctctttaacctctgctaaagccgtggaattcatacaaagcataatatttagatttgggataccaaacagtatcatcactgacttgggatccaacttcaccagttcagaattctttgacttctgcgagcaaaaaagcattcagatcaagtatgcatctgtagcccatccgagagccaacgggcaggttgagcgagccaacggaatgatattagaggcacttagaaaaagggtctttgataaaaatgaaaaattcgcaggaaaatggataagagaattgccttatgttgtttggagcttgagaacccaacctagccgggccctgcatggaaacactcctttcttcatggtctatgggtcggaggcagtgctacctgctgatctcaagtttggggcgccaagattgatcttcgaaagcatagcagaagccgaagccactaggctggaggatattgacgtacttgaggaagaacgactgaatgcagtgattcaatcagcacgataccagcagactctaaggcgctaccatgacaaagctgtgcggcaacgtttcttttcgatgggagacctcgtcctccgccgaattctaacgggggagggacggcacaagttatcacccttatgggaaggacctttcatagtagcagaagtcactcgtcccggatcatatcgcctcacccaaatggatggcacggaagttgggaactcctggaacatagagcacctccgaaagttttacccctagctgtatttcaaaacagccggagcgaccatgtattctgtataatggaaatacgtcatcaataaagagagatttcaaagatacttggctcatttatgattgacttgcattcttacttaactcggggtgaccactatgccctacaaacggagcaatcgacttaagtcggtaacgacttaaggcggtgcaacatgctcacgcttacttaactcggggtgaccactatgccctacaaacggagcaatcgacttaagtcagcaacgacttaaggcggtgcaacatgctcacgcttacttaactcggggtgaccactatgccctacaaacggagcaatcgacttaagtcggcaacgacttaaggcggtgcaacatgctcacgcttacttaactcggggtgaccactatgccctacaaacggagcaatcgacttaagtcggcaacgacttaaggcggtgcaacatgctcacgcttacttaactcggggtgaccactatgccctacaaacggagcaatcgacttaagtcggcaacgacttaaggcggtgcaacatgctcacgcttacttaactcgaggtgaccactatgccctacaaacggagcaatcgacttaagtcggcaacgacttaaggcggtgcaacatgctcacgcttacttaactcggggtgaccactatgccctacaaacggagcaatcgacttaagtcggcaacgacttaaggcggtgcaacatgctcacgcttactttacctagggtgaccactataccctactaacggaagttaccggctaaaagtcattgacggcttaaaccagtatagcatactcgcgcttatgcagttcaagggatgatctccatatcccacaaacaaacttcataatcatcgtgcagcgttaccacaaacttgcgaactaataaattctgatacaataagggagtaatcacgtcattcgaatgataagccgataacctctaacgagtacttgatcatgctaactgcgcgctcagagcacgcgaactgtttctttattttccaatgtctttctcaggaacgactgacgaagaagggcgattcgaggaatcaggggcagcattcacatcggctcttatatcttcagggacaaccacgccgggtcttctcatcaagattcgtcccgcccgaatggccttgtccagggccttatcgcgctgagctttgaaagtgacagcagcttcttcagcaactttaacagcctgctgagcagtttctaactcctgagcaatggatttcttagaagctcggagtcccttgatggtggcatcctttgccgatagcaactgtgtaagacgggccacttcgtccgaggattcttgcagctgacggcgctgattgtcaagctcctccatcgtaaaacggtggctcctctccaagatggtcagcgagttgctggaatctcggtacaatctgtccaagttgtcgcgagaagcagcaaggatgcgtttttcttcctacaagcaaaaatcaactcattcagaatccaagagtattataaggcgaagcacgggttcgtaagctaccttctcagagtcaagctgagcatgaagagaagaactcagagcgttggcgtcatccaaagctgcagagacctgactcaactcgatctgactctgagaatacttctcctcgaagtcagcgcatcgtcgagccatttcagcttgatcttgggaatgtttttcttcaagaactgtgatccgccgagtcatccctatcaagaggtattcaaacaaaatgaggtcagaaggtaaaacaatccacggacaagaacaaagaagaagaagaaaggacacttaccagcattagttgcctccaactcagatacacgaccccgaagcaacaccggattccaacgctcaagagatgaagccacctccgggatggaagcaccctgcgacttcagctggtcgaccattccatccaccaaagcctgataagaagagcggatgaacataatggcaacaattcatgcaacataaagatcaaactaaagcatagcacagcacctggaggttggaaaaaagcgaagggatccccaagtcaggagaaatcagctgatgaccaggtgccagaccaccgctcgaagtagcttgcagcagaccagcaggaacgagctcagtacattcagcagagcttaacgccagaccagtggggatgctgccctctaaagcgaccccctgatccggagtttgagccaccatcatgccgccagagtgtggaggtgaacccacatgaacatccatggaagtgcaggagggagacctcgctcggacaccctcgggggctgggtcaaggttggcactgcccactcgagccgggtcacccccggcaacaccctcgggggctgggtagtggcctacactcctcacccgagctgagtcctccccggcgacaccctcgggggctgggcacatgtcagcgctattcaagggatccaagctctctgccgtgaccacctctaaggttgacgggccttcagctacttccataggatcaggacgatccaggtcagcatcccgaccctcgagatcatgctctaaggtcgacgaggcacgggatgacctcaacccagcatctggcacggctgcacaagtttctgttgcatcagcatctgcgggttccagcaacaagttctcagggaccatatcctctagagcttgatcaaaattggccatggacagttcttgcagaccaataagagcagacaaggcaggagaaggaaccccactactaccaccgctagcgacgaactgccgactgtttttccgagttaatggagtttcattctcttcctcctcatcttccacagcaacagcacaaacagcatcctcattggggtcagcagcaggcggagcacacccattgggatcaatgtcagcaaggcccgttgcagtcacttcttcggcagcaggagccaaggtactggcatcctcgtcaaagctggacactcgccggaggcgtcttcttttcttcttctgctcatcagcagaaggctcgggctgactggttcggttaggacgcctcgggcgagtattgacaggtttcgagacatccaaggtcgcatcaacctctggaaggggcaccactgccaatgtaccatcaggagcagtatcagatgaatcctcagctagcagatcgagcatgtcatttatgtctgcatcactagggttcaggggcacttcaaaataaatctgtcgttcatcatcaggtatttccccgagtgaagcaactaaggaacggacctcttcagcagagggtcgcactctaagacccaaattgctatctgtcacgggcggattggacacaaaaagggtgaaagctttgggagaaggtaggttccaagccgagtatgccactggagcaccaacgtttgaaactttacccctgaggatcatttcgagtcggcttaccaaatcaacagaaggaattctcctattggtaactcgggttgagtcggccagccctcggtaaagatatgccggataggccctgtctttcagcggctgaatatttttgaaaacaaaatctgtgaccacagcttcggcagtcagacctctctctttcagtaatacaacttcagtaagcaacacgcctgcctcggccacttcttggtccgtgggagactcagtccaactcggagtacgaacgtccggctgtcttcctgagcgggaagggagagaatttccataattatccattataaaccactccagacgccaacctttaatgctgtctttgaggggtatctcgagatactcggtcttccgcccacggcgcatctctaaactggcacctccgaccaactgatgttgccccccggccatcccaggacggcagtgatatagatacttccataagccaaaatgcggcagcacgccaagataagcttcgcaaaggtgaacgaaaatagagatttggagaatggagttagggttcaagtgagtcaggttgatgtgataaaaatcaaggatgccacggaaaaaaggagatatgggaaggccgaggccgtgaagaaggaaaggagtgtaaaccactgactcgtgggtatcttcggttgggacagtagtcccgtggcaagcccgccaagaacagagttcccgtggagggagaaccccgatggagacaaggcggagaagctcagcttcagaaattacagacatatggttacctgcgaagggtaactgactgttggggtcgatggcggggatcactgcggcagacgagttcgcagtcttcctcttgggcgccatcttgcttctcgctggtgaaacagagtaggaggcgagtggcagagaagattcagatgcggaaatgcaagaactagggcacggaaagcaaaggcggctaaaagcgcgactcttaagtgatattcttgagccagataccttttcaaaaagtgcccagtcatcacccggcggtcatctccgaaatcccagcatgccacgtggatatccaacagttatttccaagaaagccgatgtgccacctcatcactcggtcattttcctcaaagtaacttgagaagctggctatcactcggcgctgcctctaaaacgccgaccacgtgttcaatcgctcggcattacttctaaaatgccgacgccgaccttcaaatcactcggtgttgcctctaaaacgccgaccacgtgctcaatcgcccggcattacttctaaaatgccgacgccgaccttcaatcactcggtgttgcctctaaaaaaacgccgaccacgtgctcaatcgctcggcgtcgcctctaaaatgccgaagccgaccttcaatcactcggcatgtcctctaacacgccgaccacgtgttcaatcgctcggcattacttctaaaatgccgacgccgactttcaatcactcggtgtgtcctttaacacgccgaccacgtgttcaaacgctcggcattacttctaaaatgccgacgccgactttcaatcactcggcgtgtcctttaacacgccgaccacgtgttcaaacgctcagcattacttctaaaatgccgacgccgacattcaatcactcggcgttatttctaaaatgccggccccatattttgtcgcttggcattacttctaaaatgccgatgccgaccttctatcattcggcattgcctctaaaacgctggtcttgtgtttgattgctcagtgttacttctaaaacgctgatgtcaatcttcacatcgctcggcgttgtttctactatatcaaaaggatcagttcaacattcagcaaaagcaatgacaagtcatcaaaaaggggggataaacgacagtcttcattaaagggaagttaacgagtttacaaaccaactcttcacgagttggtacttccctaattctactctacattactactactactaaactacaatatactactctacattactactactactaaattacactaattactactacattattctagctatactaaactatactaacatctaagaagaccagtggcgtctagccactggccctgcccctgccgccgccgccgcccttggtgctgcccctgctgctgcccttggtgctgcccctgctgctgtcgcccttggtgctgtccctgctgccgtcgccgccgcccctgccactgccgctgccgtcaccgtcgccgccgtcgtcgtcgtcgtcgtcgtcgtcgtcttcaccctcgtcgccgccgtccgagtcctcctcatccgaggagtactccgactcatccgagccttcgagcccggagcgctcgacggcccggatgtacgtccagacctccgcggctatcccctgggagtcgtccgagtcatcggacgacgccgggggagagacgggagccggagacccctcggactcggaggagaactcctcctccgagtattccgagtcaccgaaatcctccgatggaggagtcggctcgcgcttgcgcttgttgttcttgcccatggcggaagcagacagaggggaggaaaaggaagcagtaaggagcagcgaagagatgtgaagaaaccagagaagcaaaggggttatttatagaagggaaagacaaccgctcacttctaaccgcggtcactgaacagtcgcaaggcattcaataagcactttcacccatctgaagacacgtcagacggcggacgccgtttcatgcaacactacacccattgggactccagtcaacagcgcaaaggatatgattacactagccgtcccatcgcattactactcagaggcaaccggctaaaacactcagcgtaccaagctgtcccttgcccacacccattggggggggacgcccaggaattatcagtatatttttcaaacggtcacatccgtgcagagcatgcagtgaatacctcaagacaaaaatgagatatcagtaaggatcagaggaaagccaaatataaccagcaaagtacaagatatggccgacagaagcgacgtgaagactagacagagaacgtccgtcaaacgtccaatcaatcgcagaagcaaataaattgcactacctagcaagatatggatggattgcaaactcggctgctaaagacaaaatatacgctgaccttggcagcaaaatattgatgacataatgctgatctccaaagcataatgcaaaatagcctcatgccagtttccacaagcgaaaggaagaccttcgaatggattattcttaaaaaatccatttgaaggtcgggggctacacccattgggtgcacctccagtgcaccccatggaatattattctaaaccgatatggcgccgacttctaaggcgtagagcaagattgaaaagactaatcctcaaccgagatgcaggagcgcgaatggagataacctttggaagaagaccttcgagtagattatcttctaaaatctactcaaaggtcgggggctacaccccattgggtgcacctccggtgcacccaatgaagtccagagtcttacaatccaaaaatgccgacctctaaggcacaagcacaaaaccaaactttggtcggacgagtgatcagagtcagagaagacagcaggaagtcattttttggaccttggatctttgagttgattacctctaaatcaacccaaagatcgggggcttgtgggggatagatatcccctgggtccactaaagaagtaaaaggcctaacgaaaggcccaagggcccgataattcgtaaggtcattctttcgtgggcctaggaaaagacaaccaacaaagaagacgtgagactgattagtgcaaacccaggcggcccacaacgctggacgaatgaatcgcaacagagacccgactttcccgcgctgaagcccccagacaacagagccgtgcgaggataagtcggcgaggggtacgtagggataaactcaagaggttcgctatcttttagctacttgttgttatcatattcacgtgtactgccccacggtcgagtatataaggcctagggggcacccccttcagatcgatcgaccctgctctacttagccacccacataaactctctgcgccctctatccagagaaccctcttgtaaccacgctcgtatactcaccaggacgtagggtattacgcacttctaagcggcccgaacctgcaaatcttgtccattgtccctcgtgcgatcggcacgaaccattttgctacagtcgttgacaccgtcctactcctaaaaacaccttgaggggcaaccccgggtgtgcggtcggacccaaaacaccgacaccgcccgaccccagggctcggactcgggctcagcctcggaagacgatgaactccgcttcgcccgaccccagggctcggactcagccctcgcctcagccgacggtctccgcctcgcccgacccaggggctcggactcgacctcggccacgaaagacagactcgacctcgacctcggaggagcctccacattgcccaacctagtgcgcggaccgaccacgttaacgggaggcgccatcattaccctaccccaagctgactcaggctacgggggacaagaccgacgtcccatctggctcgctccgccagacaagtaatgatggcgccccgcacgctctatgacgacggcggctctcaacccccttacggaagcaagaggacgtcagcaaggactcgacagatccgacagctgtccttccgccaggctccagcgctcctccgacggccacgacaccacacgaaccgggtgccaaaacctctccggccgccacgatggcatgtacttagagcgctagctctcctccgctagacacgtagcactctgctacaccccccattgtacacctggatcctctccttacgcctataaaaggaaggaccagggccctcttacagaaggttggccgcacgggaggacggggcgacgcgtagagtccctcgctctctcccacgcggacgcttgtaaccccctactgcaagcgcacccaacctgggcgcgggacgaacacgaaggctgcgggatttccacctctctcacgcccgtctccggctgcctttttccccccttcgcgctcggcctcgcgccgacccatctgggctggggtacgtagcgacatttcactcgtcggcccagggaccccccggtctcgaaacgccaacaggt

SEQ ID NO: 404 - DNA, 6703 bp, Zea mays
  Intron number 1 from transcript GRMZM5G891783_T01 (locus G RMZM5G891783) derived from phytozome v7.0 (chr-ID 6; pos 1 46886509 to 146893211 reverse strand)
tactccaggccatcgccaaagccatcaagttcccggtacgcatcagccatcgcttcaaatcgataggtcagtttaattcaaaatgccctgcaattgcgaggtatttagtgaatcaacgatagcttactgaaacagaggtttcggtacgttgaacggtaggattgagcctgccatcttgcttaaaagaacagtaggcttcagacttcatgcattcgacgtgttggagataactctgctctatatctgctctgttagccagaggcttttgattatggccctgtttgggacagctgctgcttgttgaaaaagcagcttatctgataagctggtaaaaagcagcttctgcttgttggctgcttttagttcattttgagaagcagttgaactgataagctgctgcagaagctgcctgtttggcagaacttcagcttaaatttgtgaagaagctgaaaataagctgtgccaaacaggccttatatagaggtacagaaccttggcagccccacacctcttgggctgcccaaggtctttaaagactgtaattaactaacacagttatctaggaaatgcttaggaagcagggcttattaactacatttctccccctaagacctgcttcaactagtcttgatctccttgatcccaatcctgctcctcatctcttccagcttggtcttgcccaaagctttagtcaatatatcagcgagctgatctgcagtgggaatgaactctgtcttgatgctaccttcttccacacaatctctgatgaaatgatgcttgattctaatatgcttgctcctgtcatggaaaacaggattctttgctaaagccagagcagacttattatctactctgagttccaccacttcaatttttcttcccagcaaatctgcaaacagccttgacaaccacaaagcttgggttgcagctgttgtcatcgccacatattcagcctcacagctagacagagcaacaactctctgtttgacagactgccagctgaccaggctggttccaaggaagaacaaacatccagttgtgcttttgcttgaatcaatatctccagccaaatctgaatcactgtaacccacaaaccatgatttgcctgttgttctggtgtagcatagcccatgatctagagtaccagccaggtacctcaagatcctcttcacagcctgaagatgttcagttgttggcttctccaggaatctgctaacataccctacagcaaaagccaaatctggtcttgtgtgcactaggtatctcaagctgccaaccagtcttctgtactgagttggatttacttcctttgctgtactttccttgctcaatttcagcctttcttccatgggtgtagtggctggattacaacctgccataccaccaagttcaagtatcttcttagcataatgggtttgcttcagggtaatgctcccctctgattgtcttacctcaattccaagatagaaagacagaagacccagatcactcatttcaaaggtttgcttcatctttgccttgaaggattcaatcttctgctgattgactcctgtgatgatcaaatcatcaacataaactccaattaccagtagggagtcacctgatcccttcctgtacatagcagcttcatacacattctgctcaaaacccatctgcttgagagtcagatcaagtttagcattccatgcccgaggggcctgtcttaagccatacaaagccttgtgtagcctgtacactttcttctcctctcctgatactgcaaaacctggtggctgagtaacataaacctcctccttgagttctccattcaagaacgcagacttcacatccatgtgatgtactgcccatccttcttgtgctgctaaagcaagcaaaacacgtactgattccatccttgcaactggtgcaaaaacatcttcataatcaattccctcctgttgaacaaaaccacgggccacaagtcttgccttgtgcctaatcacagctccatgctcatccttcttcagcttaaacacccattttagtgagattgggcggtgaccgggacggggagaaacaagttcccaagtcccattccgctctactgatctcagctcctccattgctgcttgccaatctgaatcatccttggcttcttcatagcttgtaggctcaccagaatgggtgagattcagttctgcaaacagccgctgcgccgacagaggggttggctgatcaccaataatgtcatgaatctttcgataacggagttcttcaccgtcatggtaggcatccaccctttcatcatcatcctccaagggggtcacatgctctacctgaggacttgctggagctggtgtgggtgttctgggcgacgtagatgcctccgctgccgactcctctgcttctgctgcatgctctcctgcactttccggagagaaaccaggtgatgcaggatgtggcgcaggaaatggtgaaggcgacgctgaacctcctgcttcagggaattcctccgcccatgggaattcaacaataaattctctgtccgctgcttctgatgtgcctgctgccggtgattcccagtcccagccacacccttcgtcgaacaccacatcgcggctgacacgcacgcgctgggatactggatcatagatacgatatgctttggccccttccgcatagccgataaacacaccagcctcgccgcggtcatcaagcttgtgaagttgagtgagccgtcgggtataggtcacacaaccaaagaccttgagatggccgactgttggtgcccggccatgccacgcctcataaggagtgacattcttcagtgcctttgtcggggatcgattcaaaatgtgcacaactgtcatcacagcctccccccaaaaccgagagggcattcggcgttgcttgatcaaagcccgtcccatggccaccactgtttggttcctgcgttcaacaacaccgttctattgcggtgaataaggggcactgaaatgccgtttaataccttcgtcagcgcagtatgcagcaaactccgcggcggtgaattcaccgccattgtcggtgcgcaggaccttcaacttgcgcccgctttccacctctgctgccaccttgaccttcttgattgcttctgccgctgcgtccttggatggcagcagcacatcccacataaagcgggtggcgtcatcgacgagcagcaagatatagtggttgcccgccggtgtcgctggcgtgaccgggccgcacaagtcaccgtgcaccagctcaagctgattctgggcacggtatgctgctgcaactggaaatgaacgccgcctctgcttggtggtaacgcaggtgtcacacacctgctcaacatggtcgaccaccggcatcccgcgcgccatctcttccttgctgagtcgccgaatggcgtcgaagtgcagatggccgaaacgctcatgccactgccacgcctcaacatccttgcgcgccgtaagacagataggttgtgcagcctcaagatgcagaatatataacctgttcttccctctatgtaccttagcgagcagacgacggttcttgtcccaaatgcgaagcacgccatggtcaatcacaaccttggaccctccttcatcaagctgtcccagacttaggatagagttcttcagcgccggaatgtagtagacgccatgaagaaccctctgctcaccggtcttggcttggaagatgatagacccaacgcccttgatctctaccttcgacgcgtccccgaaccggaccgttcctcgaacgctagtgttcagatcagcaaagaactcttggcgcccggtcatatgatgcgtcgctccggaatccaggtaccaaccgctgtccacttcttcgtccacgccaagataggcacaagcacgtggcttggagaactcgacgtgctgtgccgtgtagctgtgcgccggcgtgctctgttccaggctgataaagccatgtgccaggaacaaagcgccatcttcatcacactcggcgtactggacgcgtgcctcatgccttccttggttcccgccacgctgtccagcctgatttctaccgccgcggcctccaccacggttgccaccgccgcggccagcacagtttccacctccatcgccgcgctctgcatcttcacggcgcggctggggacactcacgtgcccaatggccctcctggttgcagttgaggcaggtgttggggccgacgcggccagcaacattgccatctcctcgtccgccaccacgtccaccgcctctgcctcgtcctcgtccaccaccgcagctacgtccaccgccaccgcgctgatttctgaaaccagaaccacctgcatcttctcccttcttctcctttctgcagcacgctctccactgctcttcggtgtacaacagcttgccgttgatggccaccggctcggtcagcacttgttcctcgcgattgtccaccgccttgagccttccagtcacctcctcaagagtcagcgcctcgaagtcgagaaactgctcaatggcgacaacaatctgcgcgtacttggccggcaccgtgcgtagaaacttctccaccacacgctcctcagtgatgtccttgtcaccatggatgacaagttgctggtgcagggttgttaaacgcatggcaaaatcatccacttgctcgccggggttgacactaatgttctcccaatcgcggcgtaggcgctgcagcgttgctcgacggacccggtccacgccgatgcgggtcgcagcgatggcgtcccacgcctcctttgccgtagccttgtcgaggagtggaaggcccatttccttgggcacgaccccgacaatcacttccagcgcacgcctgtcatcgcgaaactggacagggccgccctcgatggcgtcccagagatcgcgcgcctgcatcctcagcttcatggtctggctccactcgtaatagttcgtcttgtccagcatcggccacgacgtgccgctgccggagtcgcggtacaccacccttccttgcggcgactcgtagcgaccgccgccacgacagcgcctccggtcccgcagtggtgactgcgagcgcctcctgtctcgcggtggagtccgcgtcctccgattcctctctgtctcctcttcctcctcttcgtcctcctcatcatctcccttctcggcggcgatttcggcccgcagctcctgcgccgtccttgccgccgcttctgcagcagccgccgccgctgcttcctctgcagccttcaaacgtgcggcccggccggaggagtcgcccagctctccttcaccgggtcccttggccttgagcctggcagcacgctcagcagaggtcgacatggagtggagaaggtaaggagatggccctgtggctctctggtgtctaaccaagactctggtaccaaatgttggagataactatgctctatatctgctctgttagccagaggcttttgattatatagaggtacagaaccttggcagccgcacacctcttgggctgcccaaggtctttaaagactgtaattaactaacacagttatctaggaaatgcttaggaagcagggcttattaactacacgacgatggttaactttgtatgctcgtagaaggtttaaccgaacttggttactgccatttagctaacacacgatcttatccactcttggcatgtgaacaatcccattttttccttgaagaagcaggagagctacatatcattgaattaagaagaaaaatgggcaagagcctttgcaaacacacaccacacaaaaagtaaaagccagatgcagtggtttaattagcctttcacgcaatcacgcctattgcagtgaagaacacatgaccacgacctaaactccactgtcgtctagctgaagtggaaagagataagatatgcctcacgttccatggccccatccaaaccccacaaatgcagctcctcactatgcgagcagaagagctgtagccaggttaggagatgccccatcaaacacacaactattgtggtgcagccacaaggtccaggctccgagtatgataagagaattgacacccatctggaatcgattgttaacaccgcaagagaaattgttccactcttccaacaagcaatcttctagctgtggcacaaagaaatggagaccaaccttctgcagtaacttaaaccaaaactcacgtgcaaatgcacaacatagtgaaagatggttgattgtttccacagattaatcacagtgatggcatgcagaaggatgtgggagtcctcactgagcaagacggccagctatccagcaataaccatgagtgatcagccataaaatgaaataacatccatttctttgggtgcctattttctttctaacttgttggtttgggatgtatgttcatgcacccgaccatctaggttcgattcaaatattgtccgtggtgaatgtaggtttgacactaagccactaaggtaggatttgcaagtggattaacatctgcatgttttaaggtaacgacaacattgtgaacctgcattgaatgaatgcggtatgttaactggtaggctgagtgttgtactgttgtactatccatctacaaaacttataatccaaatgatcgcctggttgaatctgccttgctctcattatttcatagtacagcgttcatcttttatgctgtcattattgtggtcaagacatgctatgattatgtctctaattgatgctgccatgcttcaggttccttct

SEQ ID NO: 405 - DNA, 1524 bp, Zea mays
  Intron number 2 from transcript GRMZM2G058098_T03 (locus G RMZM2G058098) derived from phytozome v7.0 (chr-ID 10; pos 143245520 to 143247043)
caggtggtgttgttcaagagagaggtaagcatggacagtgatgtccctgtgattcttgttagcttctgcacatttgctgattgattcacatgggatacctttaacttattctgttcatgttagtcttttgggttgttctattacttgtgttccaatcaaaattaggcatagttgtcgaccacttcacttccagaagtcattattcctagtacaacattccatatgtgaatttggataatttaataaatagagggatagtagactcatggaactcatgttatctggaagcaggataccaacaggctctattcgtataggggtcttggaactgacctgagctgcaatgcatttcttgtttaatgtgtggcctcatttaggtcagtgtaaatcatttatgtcctaaattaagttgattttattaagcttctggttctttgtttatttttttctgtgctatctctgattctgttttgtctatgtataaacttagttcacattttctttttgtacatcttttattagtgcatgctttctgctagggctcaaggattggaactctttcagtcttccccatatatttaggttcctagagcttggaaataattgttggttccttcttccctacaagacttgttggttccttcttccctacaaggcttttgagggcaaatacttgttttctattctctttaattcattctttatgatgatggtctgagtcacgtctatgcattttcagtttttcttcatttccttcatttttgacttatcgatatctgggcacatgtgcatggtctgtacctacttagctaatttgactgtttgagatattaaagtaaataagtaatgattagagctgagattttatcgcgtagtgtgttccatattttgtgcatttggtcagcttggtttcattttttatgcagtgtatgaatacaacattatgtatcttcattttttctttgtttccttcaatttggacttaccaatatcttggcacatgtgcatggtctgtacctacttagctaatttgactattagtgatataaagtaaataagtaattattagagctgagatttaaaaaaaaaattattagagctgagattttattgcatagtgtgttccatattttgtgcattggttcagcttggtttcatgtgttatgcagtgtatctaggcgtctaggcggtggtccaacgccttggagcgccttaccgctttaaaaaccatgtttatctgtgttttggacctgtgtctaagttcactaatgtttttaccaataccaagattcttcataaccgctctcttatctacatatagcacgatatgtatgcacatttttcatttgtagatgttctaattattaaaaatgtgttaacctattaactttagagactggtaggcttttccattgtagccttaatttattagattttgctattcattaaatcttacaatttgttgccttcacttttttttgctttcatttacagtaccaaattctcaaggagctcagtctgaga

SEQ ID NO: 406 - DNA, 4996 bp, Zea mays
  Intron number 2 from transcript GRMZM2G103909_T01 (locus G RMZM2G103909) derived from phytozome v7.0 (chr-ID 10; pos 22126883 to 22131878 reverse strand)
ccggggtaatttcatctcattcttttatgggaagatgcaaatttctagtcttttctactatgagctcttctagctgtagacgttaggttattcatcccacgaagtgccgcagaacatgttggatttttatttctgtattagtatatggagtatgcctgcgtttttgacctgatttagctgtcaatattagatcttacacgtatagttgtcatctttcggacgtcgagggtcctgctctttgcatatagcgtgtgagtgagctgcttttatctatgttggattggtagttgtaaagatagggattttgagctgtgtaagacgcctctgctagtacaagtgtacaacattgtatgtatcagctcattttagttctaggtctaaaattttagtagatggtgggatggaattctgggctgtgcaagttacgcttgcttttgtactaagcttgctatgctgcttttatttccagtgaacaaggtgcttatgcttatgtaccaaacattgtttggaggctccttttagttgttaagattgagattttagctgcaaatgttgtgtttttctagttctcttgtctccatttgagcctaattttagtcataggtcatggattctgttgcatagatgtgcttttggttttcaaggtgcttctgtgtatatagaagagtgtttgtgcttcttattttgctgctaagacaatataccagattcaaagattggatcttttttaggtgtctaaggttttcgtgctcatatgcatgatgtgtttcctaagttggtttcagttgcaaagaagggatttttgttaggaaccttaggtggttctgcttcagcgcacgatgctagtttgcttcacctgtttatggaagattttctcccatagttttactgtaccctgaaaatgttgttagaatatagtttttaacaacgcccttggatgtatatattagacattgcttgcttccatgatttagtgtttgtgtggttgggctaacattacatccaaggtgatttattttgtttggaaatttatgcttttgattgtatgatcagtttctgctttctgcttcttaattgtcaaaagtttggtgctttcttttttcttctaatgatatttttcagccaaaacatttgttctctatgttaaataactaggttgcatgcttgacttgcttgttgtaaccttttcattattccccttgctttgtggcgaagtagtctttcatgcgctttgcatgcactctctccgttaatctatgtccaagtagcaacaattgtttgttagtgtacactatattgatccatgttcttatgtaatgatataaacttgtggtttgtgaatttttctttgcaagcttggttttcaccttagcgccactggatgggaatattttatgttgttttgttagagtattgttgtgtttaagaacccttgagagtattacagcaagaatttgagtcataagggtggactttttttgggcaattaagtgctactatactgattgtgccattagctgtttttccttgttgagatttgaatatccctagtttgtttgggctatgcatatttctgctggtctagttaatactgccatcgggcctccattgtgatggtatatttttgatgccttagctgatgccgggtgtgatgctcgtgcagttgagatgatatacatgtaggatgtagtttgcacacttttattttggcatatagattatatgcatatgcaccacttggttaaaaaccaaaagttccatctacttttggtaagtatttgtgcatttcattgtttgtttgttggcaagtgtgtcgtattgatgcccccattaatctagattacaataacagcagtgtggcattggtacttctgaagaaatcacggtagttcttataaaatctcagttgtttttaacattgtcttaaaacaatgtgaacattataacagactaatgaattactccctccgggtcaagaattcttggcgtttggagcttagttggagagaacattaattcttgacgatttatatttatataacatgccagtacacctttacctctatgctttaatgcttctgcacaggtcttgaagtgctgcctcttgttccacgtttccaacacatgcacgcttgcctacttgcatgagtaaatgtgtggatgcgcaggatcttctgtttagcatggctggagcttgtttgctttctttgctcaaagcaccagacttacagtatctcactagctggatttatttgcattgcatctagtggtagctagccgagacttaaataggagtatactgcacgagttaattagcggcaatatgagcgcacacttttttctaacccgcacatgagcacattgagcagagacataaatttccagggcggcaacgcccgagcgaaaaaagggcatacagatgacaccgctcatccacatgagcccgcgagccaaaaaaatcattcatcatgcaaaaagggatattttagacgcaaggccaggagtcgaaccgggaaccaaaggtttgagaaacgtggggataaccacatgagctgcgatgtggtactgatttcaagtagcacatggtggtatttaatatgggtaaaacaggaaatatgcaccctaattaatcacttcttggtatatgagaccatgtccaaaacgtcaagaatcttagacctggagggagtaactaacagtcacctttaatttagagtcacataccttattaatcattagaccattaattgaacatcaagtcgtgtggttcatgacaatgatattcacatgacaatgatattcatttgacagtgagcagtatcaagatcaagacatgaagactaaacctcactatcatacagtgtcaagcattgaatatggctgcacataacatagttgcattcttgagttttgtatgtgggtataataatatgattttgaggcttattgaataagacgcttcacaattttgggcttgattttgttaccgctgtaaattttaaattcacccttgttgcaataagtgttcatttattgcttgcacatatattttctagaccaaatatgccttgatgtaagtgcctgctatgttcctattttttctgtgtcaatgatggaccactagcactatattatggtaatatcgttatggctgtgattttgtgcatttttgttaatgtttattgcttatgcaaagtaattgcagtagcaatgctcctgtggggaattggcaaactagtacatgtgaagaactgaagatttcttctatgatccatcaattattgattttaaagtggctatatatatgttattgattgctttagtctcatgtcttgtggtaagaaatatgttatatagctagcatgcatatttgaatgatggtataccatgtaaactgaacaattgagttagggggtgtttgcctgcagctccgctcctagtgagaatcactccagcgcagacaaatggcaaaaatctgacattctccatggttggagcggagtgaatctagtctacattttatactagagagtggaagccaagaaaacctgctccctgccactcccaaccaaccaggtcctcactctccaaaaccccttaggaatcacttcacagattgtttgccaaacttttttgtcagatagattcacttctgctagagaatcactctactagagaatcaaccctcggagctagagaatcatggtgcagaactctgccaaataggcccttagattttctttccactttcttttatttgcctgtgatttctagtatcaggaaatgtcctatttgttcgcagtggatgtttatggattttttcctttttccctgttattcgacttggcaaaacactgcatgctaactactgttgcgcccagtggtctgaacatttttttgtagctgcattaaattgggtgacgtgcatctttgaatcgataccttgttaaaagttttggtcatcacattttgtcttatcatgcaattttggtcttcatttgttccttttgctgaaattgatgaagtattgtttttcgtggagcgctaagactatcagacccactatttgtacttgattattggagggcaatgggcatttatactattctcattttgtgcagtttaatctatgtacagccctacaactagcttttcagttttgtgctgttcatgtacatacttacaactggctgatatgtcctgtgctgcttcaattcaaaccaggctattctttgtgatactagagaagttatggaaaagaagagacaatttgttttcgttgatgtggaagcctgcctatggatccaacacccacctttactgccctctagttagtataaaaatgatacagtataatctacactctaatgaatataatagtgactaatggaataaagtgttagtttgaaatattcaaagttttagtgagttatcacttttgactacggaataaagtgttaggtagaaatattcaaacttttagtgagttacactaacaatgcaaatatgcaatagctagggtactagttccatcttccatgcatatgaatggcttatatatgtcactataattatgacaataaggcctgctgacaagtttcattataggagggtttgtgggaaggaaggagttgttggcgtgaatataacattggagagaataatttgtggacctcatattctgtttattatcttgaaattaggatgttgaaatctttgaactatggtttgatcacatgttctgtagtttgtatgcatatattctactatggttgcatgttcaatgaaattatgtgccttaaattcccatgttccacaaatagttgaatgtggcaaaaataaatgcccgttgttcttgctccatctgttgtataaatccaagcagcataaatgtcttttctgttgcagtatagcacaactttgtaccgttttcagtagctaattttctgttcttttgttctttcaggtgtgtccaatttgcacagataaggttgat

SEQ ID NO: 407 - DNA, 768 bp, Zea mays
  Intron number 3 from transcript GRMZM2G150754_T01 (locus G RMZM2G150754) derived from phytozome v7.0 (chr-ID 2; pos 1 60802714 to 160803481 reverse strand)
attactcgtatcctatcattggcacgcgaaaacatgtatgtcttttcaacttgaagtactcttttactgaattgtttcaggtctttatttttgagcatttggaaatgatgaattcatctttttgctgattggtcattagtaatctgttttcaaatatattagtcaaataacaaactagatcttcatctcataggctcatgacctcataaacttcactcaagcttatggaggaagccttggtttattcctgtttgtgtgggatttgggtttggggagctacaaataattgctcaagattttgccagtaacataaccaatgtatcatagaatattctgtgtattttctctaatgcaaacatttaagataatgttctagaagcacttagggttatgcaaaaggaaaaaagtacaactgtctatgcttgtggtattttattcgccttacctcttaaatagccaagaaaagttttgataaaaacggcagccatgggactcgagctttgtcatgatctgatgaactgatgggtgaatgtaaacatcaagtaacagtagtttactggaagttcgtgattgaaacctagtagtcattttctgttcatataaataaatgaagtgatgttgaagggatactctcactgaagatgcaacaatggcatatacatgcaattcctattttatgcaaattattgccccttttatttagtaacattgtcaacaatctcaatggtttcaggcaatctcactggggggcatttactaaccggttgc

SEQ ID NO: 408 - DNA, 3678 bp, Zea mays
  Intron number 1 from transcript GRMZM2G019171_T03 (locus G RMZM2G019171) derived from phytozome v7.0 (chr-ID 1; pos 2 43333864 to 243337541)
tttacaaagagaggtatgcacaggcaggcttgtttagcttcagcactccttgatgggtttctgcctttgaccttgtagctgatgtagttggcatccacaggaacaggatctttgtaacctttttcatacatcagtttctgccccagctaatccatttctttcatttacatttggatcagtcttatgatctagaagatgataccatgcaaaagatgtcataccaataatctagaaacatcaaatttcagaggctgtccatcattgatgatgacagagcaagttattttggtcattttcccttgtctctgtctgcaacaaagaagtgaccatcttgttattagcgtgttcctaatatttgagttatcatatatgttgcactttgatggctttctttatgcatttatttggatgaatgaccttaggatgggtgagttaaactgtttgagtggaacatgattaaaaaatgactcctatttggagttggatcattatggctttccctcaaaattagatcagataaacctctggaaagttttcctgtctcacacaagctggttttgaatgcaattttttttattcattcagttgttttggaatgattttagggctcatgtggggtttcaactctagcctatctgaacttgcttgggactgaaaggctttattgttgtttttggttttcaattgttttggaatattttccttttaccttatctgctctgaaatgctgcgtttgttatgcactaatgctctttatttgaactttgcatgcttgctggttgttttggtgaaaacaactacaaaatgtgaatctgttgatgttgtttatggaatgatttggttatttgaaaaacatcaatctgttgatgttttttatggaatgattttggttgttatttgtcttataggtaagtttatcttatatggtgaataacgtaagtattattttgatcaggttgagtgaggatgagatgaaaaatcagatgtaggttttgtttctatattatggaatacatccttgtaatcacagccttaattatcactataaatgtctactgctgccttcttcccaaaagcatggtttagattaaaaaaatgttctaaaaaactttgttagctcttaggtgacgtttggttccaaaatgtaacgtaaatggtaacggtaatggtttgcattcgattaccaacggtaacaagtttgaataggctgatatcaatttctagtgtggtatccgattacggttatacttaaacaaacatgatctaacgttatttgttacctattacattacaaacatataaaccaaacagcaccttagagatagattgggcccatatcagcttagggcccgttcggttgtacaggaataagccaggattcgttccaactcattaaaatctatataaattaaagaagtaatccggctaggaatcaatccggggctgcaatccttaacaaccgaacaggccttaagattacagtctgcatgcatccatgcattccttttaacgaggggtctattccttaattagcatgtttcatattcaataaatagaaaagggtacatgggtaatttccattgaacactaacctgccctgaaaatactaaaatatggaaaaaggggtggagggagtataaatttgcagaatctgatcagtattgaaacccttaacttcacatgattgttcctctatttctttttcattagcggcatatgcatgatacggttttctttgtaggcactcttattatgtctttgtgtcctcttttgagtgttcattcaaggtgaagcataatatgataactgctctttcacaccttgcagaagctgatgttcatgaactgaatacaaacaaaaatgttacatgacacttaaaccagtgagtgccgggttatttttggacaaatatctctttgcactgtccattgcgtaacacctagtaagaaaaattcggccaatgaattctaattgaaacatgattacttgtgggtgtcaatttcaatggacttacatgatacattttttctttgtgaaatgtgatgccttaagtttggagggtgaatatagagatagaagtcatactgtatttgttacccacttgggaatcattcattgtttactaatatgagccaataataatggtttggttgctttacattactaaaatatccaagctgttaaaataataattgtttactataaagccaataataattgtttacattactataaagccaataataattgtttactataaaatatccaagctgttaaaataatcattcattgggaattctaatagccaataataattgtttactaatatgcccctatgcattgcttactataaagctacatccgtattctggtgactttagcaggattttgttatgccaacattagtttgattaaacctttatttttttaagaaattgtgttaatacacatggctgaggctgttcctaatgaaacatttcctataagcttgatatatattaacttgtaactttgtaagcttgtaatttaggattattaacatgctatgggttggttaatgagttgacaggttattgcatgtagaatagtttaattaattttgaactggctaccaatgttgttagatgtcaacctctaaaagtaaagcaggacatataacaagtttagcatcatgtgtaattaggaaagcaatcctttttcgagaaagcagaaggattttgattccttgttcttgatggaaatctgactggttcgagatgcccacctttttgtttgacaaaacaaacttgtatacttgaacctctgttgtgggagtctgacttacgagtactgcaaatatattaccatgggtttcctttcctcggcagcgcatggttattgaacatggtataatcaggtgttgttccatcactggttttccagaacgaacagtggactgctgcaccttttcgtttgtcctgtgggatggaagtacttgaagtgtgcaagttgtgcatgtatacattgttcttgcgtgtggcttaaggttcctcctgggctactgcttttgctctttgcgacatgtggatcacattttgtttggaatcaatgtctctattattttgtgctgaagttcattcttgtgcatagtcggttattgccttgttggaacagcaaagaaggtgaaatcaaggtgagctgtttactgaagctatgactacgaagtgtccactgcatccttcatccagtgtatctcagataagtttgcgtctgtcaggtcttgcacttccagtttcaactacgcttgattctgtgaatttttttcacatctctgcagcagctaatcgttttctgaacctgggcttgttcgttttcctatcaatccatgtggattgtgtgagattaagtgtatttaaatccaaaataaatcgaaatctttcatttattttttaattccatccaatatatatcggataagaataatcgaacaagcctctagcgagaatcactggttgtcgcacatatacgtcttatttttggttcgccagcgcaggaatatgttactaagaattttgtttaaggtagattataaaagggtgtctggtggaatatcatgatagaaatgtgtgtgaaagggcaaacattggatgatctggtctggaagagttacttttgctctcttgcaggggctgcggacat

SEQ ID NO: 409 - DNA, 24415 bp, Zea mays
  Intron number 1 from transcript GRMZM2G149330_T01 (locus G RMZM2G149330) derived from phytozome v7.0 (chr-ID 3; pos 1 08427575 to 108451989 reverse strand)
acaacgccaagaagcgccttaagcggctctggcaggttgactaccttcctcctcctctattacgttcccgctccggtgctatcgttcagcgttgtgggcagagataatgggtacttcttcgtctcttctacccattcgtggttcatgttggtttgattgttgcttgctgattcttcggcttgattttccaatggacttagctgatcagttattccgactcgtagcgttgtggtttgattttggagtgcatgcgcatgcctatgatttgagagggaagggttttttggcttctatgaggggacgacgatgacgaagtttacacaaagtttcttgcctacggattctgtgtagattagattacacaaagtttacacgaagttcacacaaagtttacacaaagtcaggaactcgtttgtattgtttgctttgttaaaattaaaacttcatttcgcaccttgttggtttgttcttcctggtacttggccatcaatattagggaaggtgataagctacctccagggaaaaactggaaaacttgttggttaccatgaacctaacctataaatgcaataggttctaagaaatggttaatggttctagattggattattaaagtcgacttgtgtcattcaggagttgcataaaaggtttcaattggtgatttgcgcatactattcctggaatttgcccccaaaattggcagccttttttacctgtatatgaggtttcctgataatcatggtgtcggggaccataattaggggtaccctaaagactcctaaatctcagctggtaacccccatcagcacaaagctgcagaggcctgatgggtgcgactaagtcagagatcggtccattcgagggacgcgatcacgcctcgcccgagcccagcctcggacaagggcagccgaccccggagggtctacgtctcgcccgaggaccccctccagcaacggacacaccttcggctcgtccgaggctcagtcttcaccaagaagcaaccttagccaaatcgccacgccaaccgaccaaatcgcaggggcatttaatgcaaaggtggcctaacacctttatcctgacgcgcgccctccagttgacagagccgaaatgatcgtagtcacttcgccgctccactgaccggcctgacaagaagacagcgccgcctgcgccgctttgactgctgtgccactcgacagagtgaggctaacagcagccaagtccggccctaggcgccatgggaaactccgcttcgcccgaccccagggctcggacttgggctcagccccggaagacgacgaactccgcttcgcccgaccctagggctcggactcgggctcagccccggaagacgacgaactccgcttcgcccgaccccagggctcggactcgggctcagccccggaagacgacgaacttcgcttcgcccgaccccagggctcggactcgggctcagccccggaagacgacgaactccgcttcgcccgaccccagggctcggacttgggctcagccccggaagacgacgaactccgcttcgcccgaccccagggctcggactcgggctcagccccggaagacgacgaactccgcttcgcccgaccccagggctcagactcgggctcagccccgaaggacgacgaactccgcctcgcccgaccccagggctcggactcagccctggcatcagccgacggtctccgcctcgcctgacccaggggctcggattcgacctcggccttggaagacagactcgacctcgacctcggaggagcctccacctcgcccaacccagggcacggaccgaccacgtcaacaggaggcgtcatcattaccctgccccaagctgactcaggctacggggaacaagaccggcgtcccatttggctcgctccactatacgagtaatgatggcgccccgcacgctctatgacgacggcggctctcagcccccttacggaagcaagaggacgtcagcaaggactcgacagccccgacagctgtccttccgccaggctccagcgctcctccgacggccacgacatcacacgaaccgggtgccaaaacctctccggctgccacgatggcatgtacttagggcgctagctctcctccggtagacacgttagcacactgctacacccccattgtacacctggatcctttccttacgcctataaaaggaagatccagggccctcttatgagggttggtcacgcggggaaggacgggacggcgctcgcgtgaggccgctcgctccctcccgcgtggacgcttgtaaccccctactgcaagcgcacccgacctgggcgcgggacaaacacgaaggccgcgggatttcacctctcacgctcgtctccctccggcttcttccccccttcgcgctccgtctcgcgccgacccatctaggctggggcacgcggcgataatttactcgtcggtctagggaccccccgggttcgaaacgccgacagttggcgcgccaggtaggggcctgctgcgtgttgacgaacagcttcccgtcaagctccagatgggcagtcttcaacaacctttccagcccgggacggtactccgtttcgggagtcttgagttcatgtccctcgacggcagctacgacatggtactccttcccccgccgcgcgacagcgacaatggcggccgacagcccgcccgccggcggcggaatcgacgacgtcttccccgcgtggtggaagaacaacattcgagctcgccccgtcccctcccccgccgacggaggaggaggcggagcaaccaaggccaagcaggaggcggcacctcgtcggctgtcgagcgagtcgacggcgccggcgccctaacggggggcacgtcgggtatcgacctcgcgtctgagacgaagacgagcgccgtctccccgcaacacgccaatcccaagcaaacggacgacgccagcacgctcgcgaaggacttgctgggcgtcaccctcgtacctgagacgacggtgcagtcagtccctgacgtgacttcgtcaccgcccgtcgaccaagaggtaccaaccgattctcatctcacgccttttggattcagcctcgacccaccaagagacttcgctttggtggacgctctcgtagaggcgagtccaaaccctctggggtatcgtatgcggtcaccctgggaccggctgacgaccgtctcgacctacgggccctcggggtccgagaaagatgacgagcccgacttctgttgggatttctccggacttggtaacccagtgccatgcggggctttatgaccgcgtgtgactactgccttttcgactgttccgacggtagccgcagcctcgacgacgaggactgcggcccaagtcgtgaatgtttccacgtcgatatagggggtcccaacgaaggcaaccatcttggtatgctggagaacggagatctccctaggcctgtgcctcgcgttgacatccttcgggagctagctgtggtccccgtcccggcgggggggtcatgacccacagcgcgagatgcaggccagggtcgacgagggagccggaacacttgagccgatccgtcgggacatcgggcaggaatgggcgggccaacctccggccggagaagtgcgtcatctaccccagggtatccagcaccgcatcgccgacgatgtcagggtaaggccgccaccgacttccaatggagtcggccagaacctggctgcagcggcaatgcttctccacgcgatgccggagccatcaaccaccgaggggcggcgaattcagggagagctcaagaatctcctggaggatgtcgcggtccgacgggccgaaagctccgcctcccgaaggcaggggtacccctcggaacatcgcgccgcgacttcccgattcatgcgtgaagcctcggtccacaccgggcgcacgcgcaacacagcgcctgcggccccgggtcgcatcggcaacgagcaccatcactgcaaccgtcgggcccacctcgacgagagggtgcgccgaggctaccaccccaggcgtgggggacgctacgacagcggggaggatcggagtccctcgcccgaaccacctggtccgcagactttcagccgcgccatacgacgggcgccgttcccgactcggtttcgaaccccgactactatcacaaagtactcggggaagacgagaccagaactgtggctcgcggactaccggctggcctgccaactgggtggaacggacgatgacaacctcatcatccgcaacctccccttgttcctctccgataccgctcgggcttggttggagcacctgcctccggggcagatctccaactggtacgacctggtccaagccttcgccggcaatttacagggcacgtacgtgcgccccggaaactcttgggatctccgaagctgccgccagcagccgggagagtctctccgggactacatccgacgattctcgaaagcagcgcaccgagctgcccaacatcatcgatttcgatgtcatcggcgcgttcctcgccggcaccacctgccgcgacctggtgagcaagctaggtcgcaagacccccaccagggcgagcgagctgatgggcatcgccaccaagttcgcctctggtcaggaggcggttgaggctatcttccggaaggacaagcagtcccagggccgcccaccggaaggtgtccccgaggcgtcaactcagcgcagcgccaagaagaaaggcaagaagaagtcgcaagcgaaacgcgacgccgccgacgcggaccttgtcgccgccgccgagtacaagaaccctcggaaaccttccggaggtgccaacctcttcgacaagatgctcaaggagccgtgcccctatcatcaggggcccgtcaagcacacccttgaggagtgcgccatgcttcggcgccactttcacaaggccgagccacccgcggagggtggcagggctcgcgacgacgataagaaggaagatcaccaggcagaagagttccccgaggtccgcgactgcttcatgatctacggtgagcaagtggcgaacgcctcggctcggcaccgcaagcaagagcgtcgggaggtctgttcggtaaaggtggcggcgccagtctacctagactggtccgacaaacccatcaccttcgaccagggcgaccatcccgaccgcgtgccgagcccggggaaatacccgctcgttgtcgaccccgtcatcggcaacgtcaggctcaccaaggtcctcatggacggaggcagcgacctcaacatcatctacgccgagaccctcgggctcctgcgtgtcgatctgtcctcggtccgggcaggtgctgcgccttttcacgagattatccccgggaaacgcgtccagcccctcggacaactcgatcttcccgtctgctttgggacgccctccaacttccgaagggagaccctcacgttcgaggtggtcgggttccgaggaacctaccaaacagtactggggaggccatgctacgctaagttcatgaccgtccccaactacacctacctcaagctcaagatgccgggccccaacggggtcatcaccgtcggccccacgtaccgacacacgtacgaatgcgacgttgagtgcgtggagtacgccgaggccctcgccgaatccgaggccctcatcgccgacctggagagcctctctaaggaggtgacagacgcgaagcgccacgccgccaacttcgagccagcggagacgattaaatccgtccccctcgaccccagcagcgacgccaccaagcagatccggatcggctccgagctcgatcccaaataggaagcaatgctcgtcgactttttccgcgcaaacgccgacgttttcgcgtggagtccctcggacatgcccgacataccgagggatgtcgccgagcactcgctggatatccgagctggagcccgacccgtgaagcagcctctgcgccgattcgacgaagaaaagcgcagagccataggcgaggagatccacaagctaatggcggcagggttcatcaaagaggtattccatcccgaatggcttgccaaccctgtgcttgtgcgaaagaaaggagggaaatggcggatgtgtgtagactacactagtctaaacaaagcatgtccgaaagttccctaccctctgcctcgcatcgatcaaatcgtggattccactgctgggtgcgaaaccctgtctttcctcgatgcctactcagggtatcatcaaattaggatgaaagagtccggccagctcgcgacttctttcatcacacccttcggcatatactgctatgtcaccatgccgtttggtttgaggaatgcgggtgcgacgtaccaacggtgcatgaaccatgtgttcagcgaacacattggccgaacggtcgaggcctacgtcgatgacatcgtagtcaagacaaggaaagcctccgacctcctttccgaccttgaagtgacattccgatgtctcaaggcgaaaggcgtgaagctcaatcccgagaagtgtgtcttcggggtcccccgaggcatgctcttggggttcattgtctccgagcggggcatcgaggccaacccggagaagatcgcggccatcaccagcatggggcccatcaaggacttgaaaggcgtacagagagtcacgggatgccttgcggccctgagccgtttcatctcgcgcctcggcgaaagaggcctgcctctgtaccgcctcttaaggaaggccgagtgcttcacttggacccctgaggccgaggaagccctcgggaacctgaaggcgctcctcacaaacgcgcccatcttggtgccccccgctaccggagaagccctcttaatctacgtcgccgcgaccactcaggtggttagcgccgcgatcgtagttgagagacgagaagaggggcatgcattgcccgtccaaaggtcagtctacttcatcagcgaggtactgtccgagaccaagatccgctacccacaaatttagaagctgctgtacgcggtgatcctaacgcggcggaagttgcgacactacttcgagtctcatccggtaactgtggtgtcatccttccccctgggggagatcatccagtgccgagaggcctcgggtagaatcgcaaagtgggcggtggaaatcatgggcgaaacaatctcgttcgcccctcggaaggcgatcaagtcccaggtcttggcggacttcgtggctgaatgggtcgacacccagctcccaacagctccgatccaaccggaactctggaccatgttcttcgacgggtcgctgatgaagacaggagcaggcgcaggcctgcttttcatctcacccctcgggaagcacctacgctacgtgctacgcctccacttcccgacgtccaacaatgtggctgagtacgaggctctggtcaacggattgcgcatcgccatcgagctcggggtccgacgcctcgacgctcgcggtgactcgcagctcgtcatcgaccaagtcatgaaaaactcccactgccgcgacccgaagatgggaagcatactgcgatgaggttcggcgcctggaagacaagttatacgggctcgagctcaaccacatcgcccgacgctacaacgagactgcggacgagctggctaaaaatagcctcggggcgaacaacggttccctcggacgtcttctcccgagacctgcatcaaccctccgtcaagatcgacgacacgcccgagcccgaggcaccctcggctcggcccgaggtaccctcggcccccgagggtgaggcactgcgcatcgagggggagcggagcggggtcacgactaatcgaaactggcagaccccgtacctgcaatatctccaccgaggagagctacccctcgaccaagccgaagctcggcggttggcgcggcgcgccaagtcgtttgtcttgctgggagacgggaaggagctctaccaccgcagcgcctcaggcatcctccagcgatgcatttccatcgccgaaggtcaggagctcctacaagagatacactcgggggcttgcggccatcacgcaacacctcgaacccttgttggaaacgccttccgacaaggtttctactggccgacggcggtggccgatgccactagaattgtccgcacctgcgaagggtgttagttctacgcaaggcagacccacctgcccgctcaggccctgcagaccatacccatcacctggtcgttcgctgtgtggggtctggacctagtcggccccttgcagaaggcacccgggggctacacgcacctgttggtcgccatcgacaaattctccaagtggatcgagatccgacccctaaacagcatcaggtccgaacaggcggtggcgttcttcaccaacatcatccatcgctttggggtcccgaactccatcatcaccgacaacggcacccagttcaccggcagaaagttcctggacttctgcgaggatcaccacatctgggtggactgtgccgccgtggcccaccccatgacgaatgggtaggtagaacgtgccaacgacatgattctacaaggactcaagccttggatctacaacgacctcaacaaattcggcaagcggtggatgaaggaactcccctcggtggtctggagtctgaggacaatgccgagccgagccacgggcttcacaccgttctttctagtctatggggccgaggccatcttgcccacagacttagaatacggttccccgaggacgagggcctacgccgaccaaagcaatcaagctaatcgagaagactcactggaccagctggaagaggctcgggacatggccttactacactcggcgcggtaccagcagtccctgcgacgctaccacgcccgaggggttcggtcccgagacctccaggtgggcgacctggtgcttcggctgcggcaagacgtccgagggcggcacaagctcacgcctccctgggaagggccgttcgtcgtcgccaaggttctgaagcccggaacgtacaagctggccaacagtcaaggcgaggtctacaacaacgcttggaacatccaacagctacgtcgcttctacccttaagatgctttcaagttgttcgcatgcctcgttcccacgcaaagtttagtcatcaaggaagggtcagccttgcctcggcaaagcccgaccctccctccggggctaaaaggggggaaccccctctgcgccaaaattttcctcggaaaaagatcttttctgccagaatgtctttcgtgctttccgactatttcgaaagtggatcctgaaaacgacggagtacacgtaagcagccaaggctgaccgagccgagggattcctacgcctctgggatacggatacctcactcatcaccttctgcgataagtaactcacgctcggataggtgatttcgcggaccgaacaagtcttcacgctcgaaagctcctctgccgaaacgattcttcgggccttctcgactacgtcggtgacagaaccctatggacgagtaagagtgcgcgtaagcggcaaggccgaccgagccgagggattcctacgcctccgggatacggatacctccctcatcaccttccgtgaaaagtaactctcgctcgcacaaacaattctgttaccgacaaataagtccagatactcgaaacaaggggaaaagaaacgcagctttacaacacgacgatcgtgtgtttgggcctcggcggccgcagaaaacatacacacaccacaagataatccgatcctgcaggctcagatcttgacaattgaagggagcagcagcaccctcggcgtcaactacaccttcggcgaggtccgacctagcctcggacggcgacgcggtctgaggatatccaccccgaaggacgacatcagcaccacgcccgggccatcgctgccagggtcttctccaggaatccggctcgagcggacggctcggtcgatcaccccgaagcctcagccagctgtcccccgaggacatcggctcggtttgtggcctcggcaactcaacaccggcgtcggtcccgccagtggacgacccggccaggctctggccgaccaagtcttcttttcgagccaactcagcctctgtctgagctgacaccgctacctccggcttcggctcatcagagagcggccgagggtttcctttaactaagcaagagaagcctcggacagcaaggccgaccgagctgagggactcctacacctccgggatacggatacctcactcgtcacctttgcacgagacaactcacgcttggtgaagcggttcagatagtcgacaggcgagtcttagtgctcgaaatgaagaaaaaacacgggccccgtgccgacaatacatacatgttcaggccccgacagccactatgaacaaaacaccggcattcaaggtgccattacaaacggaaccccggttccacctccgccaggtacgaacaaccccacacgatagggggcctgcggagcaccagaagggccgacggacggctcaccgtcgcccgctccagcagcagcgacaacgacccccgctacgggtgaccgaactgcagcagcgatggcctcagggcggacgccgctgcaaccttgccctcgccccacgccgacgctcgaggggcgaggacaagtacaaagagccggaggcccgaagcgcggatggtggcggtgatcccgtcgacgacggggacttctcgagccgcctccacctcggcaccgacgacaggagccgtcagcccaccggcagatccccactcggatcctcccggacgagcggagcaccgacctccgcgcggaggcgccgtaccggtgcaaaggcaggacagccccagaacacgaacgccgccctagcagcgcgtgacgtcttgggcggtcctcccgtgcgcgcggcgcgacaaccgcccttgcggcaggagggggcaccgggagccaagccggcgagcccaacgcgctgaagctgacgacgcccgccgtcgaccagccccgcgttgtcaaagtccgcccctctcgcagggccagtgagcgccctctcccttgaatgctgaaggagaggctgacccacgaactcgcgcgggaggtagagctccggctcagcccggcctccgcgaagacatggtcgcctttcaagggggtcaccctccttttaaaggcaactctccctacttgcgtccccagccgtcgcgggctgagtcttctccaacacgctccaaggtcctccccctacggcgcgggggctgggtcccacgcgtcatgcgggctggcccagagcagaagaagccaaaccgccgcgcgcggtgcatgcaactgcccggcggttacgagcattcctccactatcgcccagaccagcgggtgaaagggcgaacaaccatgcaggcggcatgcaaccgcgccaagtgggcgcacccctccgacttccaacacacccagcatggaggcccaggcccacacgtcatgcaaccggcacgccggttgctacgtgcgagcaactgcaccgccactcgcgccactaccgcgcctcctcgactgcggaaccagtaccgcgactcgaggcaaccctgcgtatgacccaacagtgccagccaggcgcatcgatcacgggccagtccgccgcggagaaggcgcgacggtcgatgcggccaaaaatgggccgacagtaatggtggtggcaggcgggcagaagcagcggtcacgtcgtcagccaagctcacgtcacctcgtgggacagcgagagaaccctctctcacggcgtgaagacgacgcgcccgtgttccgttcctcgaacggcccgcgcacgcgcaacggctgccccgcgaaccactcgccccgttgcattaactccgcggcgggacaggcggcgcctctggcaggagaagcgagcgacgcttcgccttcgccataatgaccgcgtcaaaaaaggtacgccacgtcattcgatttcgtatccttttcctctttctctcttacaacagggaccgggaaaggggataccccgaaaaggatccttctccgtgaaggaaacaggccccgagcctccctactgatcagaggttcaaaggctggcccctcggaggggtttaacagccgcctcagagcgcttgggctccgcgcccactactggtcagaagttcgaaggtcggcccctcagaagggttcaacggccgcctcaggccactcgggctccgcgcccactactgatcaggggttcgtaggctggccctcgaagggttcacagccgcctcagacacagagcgagggatgaccctgggtacgttcgatacataaccaaggctcgggctacgctcccgaggtaccctaggacatttccgagaccagcgggaacgatcttgtaacggaatcccatcagagggaggcatcgagccctcggaccccgtcaaaaggggatcgggtccggcagatcacccgcaggtacttttggagcgcgcctccgggcctctagccgacccctaacaaatggggcacgagcgtccactcggattacccgtcagcagctcgctggagacaccatgttcggcgccctccaagggcaacatggcgctttccccccctcctccttgcggaaaggcgacgcaggggcgtatgtaaaaaagtcgagtctgtccttgaccgtcctctcgccctgtgcagaggctcgggggctgctctcgcaaacccggctccggccaaaccgttgacagcgtcaacataccagcccgagaacttgggacccgaccgtgcacccgggctacggccagctcgcatgagggaacgaccagacctgccgaaacattggaaacacattaagacctcggaggagtcaaaccactcttccgaggcctcgggggctacacccggcgggtgcgctcgcgcgcacccaccggaacaagacgcaaccgaaaaaggttggtcccctgacaagaagacagcgccgcctgcgccgctctgactgctgtgccactcgacagagtgaggctgacagcagccaagtccggccctaggcgccatgggaaactccgcttcgcccgaccccagcgctcggactcgggctcagccccggaagacgacgaactccgcttcgcccgaccccagggctcggactcgggctcagccccggaagacgacgaactccgcttcgcccgaccccagggctcggactcgggctcagccccgggaagacgacgaactccgcttcgcccgaccccagggctcggactcgggcttagccccggaagacgacgaactccgcttcgcccgaccccagggctcggactcgggctcagccccgaaggacgacgaactccgcctcgcccgaccccagggctcggactcagccctggcatcagccgacggtctccgcctcgcccgacccaggggctcggattcgacctcggccttggaagacagactcgacctcgacctcggaggagcctccacctcgcccaacccagggcacggaccgaccacgtcaacaggaggcgccatcattaccctgctccaagctgactcaagctacggggaacaagacctgcgtcccatctggctcgctccactatatgagtaatgatggcgccccgcacgctctatgacgacggcggctctcagcccccttacggaagcaagaggacgtcagcaaggactcgacagccccgacagctgtccttccgctaggctccggcgctactccgacagccacgacatcacacgaaccgggtgccaaaacctctccggctgccacgatggcatgtacttagggcgctagctctcctccgctagacacgttagcacactgctacacccccattgtacacctggatcctttccttacgcctataaaaagaagatccagggccctcttacgagggttggccgcgcggggaaggacgggacggcgctcgcgtgaggccgctcgctccctcccacgtggacgcttgtaaccccctactgcaagcgcacccgacctgggcatgggacaaacacgaaggccgcgggatttcacctctcacgcccgtatccctccggcttcttccccccttcgcgctccgtctcgcgccgacccatctgggctggggcacgcggcgataatttactcgtcggtccagggaccccccgggttcgaaacgccgacacatgggtacatgatctgtgcgattttgcatttgtcaaccaataggaggaatctaatcccaccaatgtcatttttttcattgtcatttactgaagcattcttggagtagtatagatctttgaattatatgggcagttgagttggcttcgtgttaaacttcatttctaggctggaagagctcgggtctaactacagtggaagttctattttctttatgctgataaaagatataaccagcatctagcattaaatattacatagcggattctttaatggcagcagtgagggtgttgatgtattcctgtgttgttttgcacatggagttaattgctggattaatgtttatcttgcctggcaactagatttgtgcctgtgcattgctacgtgctcgcatcatgatcacataggcaacagattacatggagtacatcacattgataccaagttcaggtcactaagaagacagcatttcaacatcttgtttaaaatttatgccgtatgatacaccgttttgaagaaagtcctgtaccctaatgatcttctgtagcttcagcttgtagaataggatattttcattatttggaatagagcagacaatgcttatctatgatgatttattcttcctgcttcaggcaaaccttttcattttgactggtatagtagtttggttggatattgttggaatagcctataacatgtgactgtttaacaaaatgaaacaattcttttatcttttttcttcatagtgtgcttccttttctgaagcttggtgctgcagtcagtcagaatcattcactaccaatagtatcatcagttcactgctctgctacactctatacttgatttgtcctgctccaacttgaatcttttgcaagcatcaatagttgctcctgagtttcccctgttaatttgttgattttttaattgaaacttatgtgattcatgagtctagcttttgcagatcagagtgtctagacatgttggcaaaaactcttccagttccattacacatgtccacatgtgagatatataatacatgggaaaatattcagtgcaaaccacaccttcactggaatcttgaaaaaccccagacaaacatacttaggagctttaaaaaatattataatgctgttcattcatactgcatctatagatgtacattgccacaaattttgagatcaaaactcattttgtaaaaactgatacgaaaaacaaatttcaggtgtaattttgtcttcagtgcatatgcacctaaaatttgtttatttcgtcgtgtgaatttttgggttgagtttgaatctcaattttgtggcagtgtacatctaaagcatgcattatcgatgtgcattgttgtttcaattttatcttaaactcataaacatattgttcgaggggatttcacaattccattgaagatgtggtttgcactgaatattttcctgtgatacagtgcagccacaaatgcatagtccttttttggtgagatcagtgttaatgtccacttgtttggttcgatacatgcatagtgtcactgaagattgtatgttagggaaacttagatttaggcccatttaactgattgttaagaaaatcaccatctgtcaagtttttttgttatgtgctcacaaatcagaactatgcttttgtcaagttatgatccttctgttctattgcattttcctgatcttgtgttctattgcaattttgttgcatatgtattgaatggctgtactggtcacttgttttctcctgatcttttcttttattttgattggatatatctaatgcacaattattcaactattcaagttacttccatttaagggtgaaaacggtcggtaatggtcggcaaaaaaactctcaccgttttcacccgcataatttttcgtttgatcggaatcggtaaacgggaaagtcggaaatggataacggccggtaaattctggtatatcgaaaatggataaatctgagcaaaatagctcgaaattgatcgggaaacagtaactgtaatcggaaaagctcacaataaacaaatcctaaccacacagttgttcattcacatccacatacaagtctcattcacaaaagtacacaaaacacaatcttgtccacatataattggtcatacactcatacatgtccactcttaaattttaacacacaacacataagtcttaaaacacgattgttcattcacatccacatacaagtctcaaccacacaaatacacaatacatagtcatgaccacacataaatgatcatacatgttcactgaatttttaaccacatagtatataagtcttaaacacacgatacataaactagaaatcatgtggcatgtcgtctggatcacttgatatatcttctatgatatctgaaaccctaaaccctaacgggtatagttcttgcctccttggttgttttgtggaccaagaaaatacggttaaaatacgggaaaataccggattttcagtaccgttttcgtaataacatatctcgtttccgtcccgtttttcgtatatcccgaaaaatctgaaaactgccggaaaaatccggtaaacggtactgaaaatttaccgaattttacttaccatttacatccttacttccattagatgttccttacatttctgtaagaaaccgataaaagagtaacagaatagtataattgtgttttcttgctgctctaagctgatgcatcttactaactggctttagattaattttgaaacagaattttatgtacactgcatcacgattcagaatccttgtggtaaagcccatacatgaagagatactgatttcactatttaggttgctgactcctgaggcagtatttattcattttttgcaaccaactcttcctttatccagtggtatcaagttgtccctcgaccgataaattgcaattagtcggtgggcctcttgaccttgactaggctctatgattttttaaaaaactcgacctgagggataagacagccaccagacattatattaaaaagacctcacgcagatcgagaaaaccatgtaccccctccccctcatacatatcaacaccgtaagcccatgtgagaacgaccagggccgagccttagattcatgctatggtgtgtgacagattaggggattttttaaccacaacctgaaattggttcccagagggaatcgaacctaggacctgaggagtgctactcagaccacataaccaattcaactaatggccctttcgcggctatgatttaactgattagaaattaatttgtctgatcagaaatctacttgataccaaggaatgttatgttggtgggctttggacaaatataaagttccaacagagtacattggacttattaaggacatgtacaacaatgttattagtgtttgagcaagtgatggagacatggttattaaggcagcggtaaggcgagcctcaccacgcaaggcttcctatcgccttgccgcgggagtaaggcgagggcagagggcgctgcggcagcgcgcgtaggatgcggcggcggcgcgcatggagctgcggcgtgggcgtgggcgtgcggccccagccggcgagtcagaggaggaaggagacctgcgggcagtgagagaggagctgtggggagggagagagatagctgcgaccggtggctgcacgggagggtagcagcggctgcacctgcactgcacgggaggggagggagctgttttaacctaaaactgttgttgttgggctgggctagctgggcctttgggcttgtagatttttttctttttctttttttcaatttctctcttctactagactgaaatagactactaggcgtatagttgtgctagcttacttattaatttgaattattgttatataaatcaatatttggtctaatattttatattactatataataaaagcgttatattaatatataattaaggcgtctcctcgcctttacgctttaccgcctaaaaggtaaaaagtgggtcggtcgccttacgctgccttaccaccttaataactatggatggagacacatatggcttttcgattagaatagggctacatcaaggattagctttgagttcttacttttttacctttttgccttgatgatcgataaggtcacaagggacatacaagaggatgtcccttggtgtatgctttttgcgaacgatgtagttctagttgataaaagtcggacaggagtaataaataggaaattagagttgtggcgggagactctagaatctaaaggttttagacttagtgtaactaaaacataatatatgagatgtgattcggcactacacatgaggaaggagatgttagtttggaaggtcagataattcctaggaaggacatttttaggtatttgggatcaatgttacagagaaatattgatatctatgatagctatagaatcaaagcagggtggatgaagtggcgtcaagcatctggcgttctatacgacatgagggaaccacagaagctaaaaggcaagttttataggacaaccattaggcctgctatgttgtatggtgcagaatattgacctacaaaaagacgatatgttcaacaaataagtgttgcgtaaatgtgtatgttgcgttagatttatgatcatacaagaagggattgaatccgaaatgatgacatagccgagtagcaccaattaaagaaaagcttgtcgaacatcggtttaggtggcttgaacatgtccaacggagacctccagagacaccagtgcataatgggatcctaagggtgcgatagtaatgagaagagaaagaccgaagttgatatggaaagaaacaataaaaggagacttgaaagggtagcatataccccaaagatttagccttgaatgtgtccgaacggttttattgagtttttaactctagactaccccaacttgcatgggatagaatgctttgttggatgactaacctggagatttgagaccgcatactgagctgtagctgggccactagggttttccttcctttttgaccgcaacagggttccttcctaagacatcgtctgctcttgtgtctccactcccggctgcggttgatgatgcatttttggaagctactagttctactgtcgctactgaagatactttggctggctctcctcccacaatcttaagtcatggggctattcctgtggatggtggaacttgttcggaagctgttattagttctgatgctccatcccggattcccatggttgaatctgaattgcaggacgttaatgtcttctccgggggagtgggtcttcccatggttgaatctgaattgcagaacattctccctttggagtcttcctcatcaaggaagcatcttatgtcgccaaatttgttagtttattccaggaaaagaaatcaaaagctacagctgattgacggtaccgatgagaatggcattgtcggggctgcagcagatgctataatttctccagcttcggcgactggttttgctgctgatgagacagatcacgttggtcagggcccagtattttgcggggatgtggcggatggtttggtgtctcctaatttaagtttggttgaacctactgcggctgtggcagacattctgatgtctccagctggggtggttcacagtcttatttcctcacattctggcaagcaggaggcttcccaatctatgcagagagaagagttcatcaaatctgttactcggcaaccttctaaattgcttcctgctcctccagtcatcttgaagaagaaggacaacattctgccccccagatcggtaccacgacgcagctgcagagttgctggagtaggcgttgaatttaatgcctctgatcttgacagacgtgctaccaagaaaatcatgaaggcagttgggataattgctgataatgtaggaattgaccagagggctcaagaggagtatgctgatcttttcaagacatccttgtctgatactcatgtaaaagcccttgcagccttgtttggctggcagcttcctgaccacttgtagggtttgggaggatctgctttgttttttccattggttgttcttttcgcccttgtgtcaataaatccagaacgtgttctgatatggaatgtaagaggattaaattcctcggctaggcaagactcagtccgttctttagttgcttcctcaaaaattgatatcatttgcttacaagaaactaaattggatgtcgttaccagaggggtcctcctatcagccttaggctccgagtttcttaattttattaagctacctgctgttggcgccagtggtgggattttggtggcttggaaacaggatgtggttgtcacaggcacgcagtatatctggaataatagcgtctcagtacagtttctcaatggaaatgggagcccctggtggcttacttgtgtttatgggccccagggaaataatgataaaatcctattcctgcaggagctcagaaatctgagggggctgtgtcttggaccatggatgattgctggtgattttaatttgatctataaagctgaagataagaataccccacacttcaaccgaggtatgatgggaagatttcgcaatctgatcaacgaccttgctctgagtgagctccctttgattggtagaaaattcacatggtccaatcagcaggctaatcctaccttagtgaagttggatagggtcttatgtaccttggattgggaggagatgtttccgaattctctgcttcaaagtctggcttccaatgactctgatcattgtccccttcttttgggtttgagggataacatttcgggtaggcgcaggtttcattttgaatctttttggcccaagattgagggatttttggaggtggttttgttggcatggcattctgtcccagtttcgaattgtcctttttccactttgaatcttaagttgaaggctgctgctaaagggctgcatgattggagtgctaaaaaagttggaaatatttcgtccactttggctttggcccgagtgttgttgcatcacttggaaattgcccaagattctcgcctgttgtctccagctgagttgtggtttaaagtaaatcttaagaagcattctctggcccttgcttcccttcaaaggactattgctaggttgaggtccagaattgggtggctgcgtgagggggacgccaacactaaactgtttcatatgcactccagatttcgaaagaagaaaaattttgtcacaaaattggtgtccaatggtgcagtcctctctagtcatgatgacaaggccaatctggttgatgatttttatggcaggttactggggctctgcagtgatagagagcatactatatccttggaaaatttggggattccaaactttgatctgtcagccttggatgccccattctcagaaaaggaagtgtgggatacaatctgccttgttcccttagacaaggctcctggtccggatggtttcacagggagattttataaagtttgctgggatattatcaaggttgatgttatggctgcgttttcggctgttggatgcaggagattcattaattttcatgttctaaacactgcatatatcaccctcatcccaaagtttgaaggggctgatcaagtaaaggatttcagacctataagtttagtccacagcttcgcaaaactgctcactaaactccttgctaatcgtctggcgggtagattacacactatggtgtctcctaatcaaagtgcctttattaaaggtcgcttcattcaggataattttatgttggtgcaacagactactcgctttcttcatcaacataagctttctcgaatcctcctgaagttagatatctcaaaggcgtttgattcagttgcttggcctttcctccttgaggttctgcaacatttgggttttggtcagatattgagggacattattagtggtttgctatggacctcttcatcccaggtgctacttaacggactgcctggacagactattattcaccgacgtggtcttcgacaaggcgattctttgtcaccttttctgttcatcttggtcatggatattttggtattcctatttaaccgagctgaacaggttgggctgctgcagcccatcgccccacggattttgcagcaccggatttcgttatacgctgatgatgtggtgatatttcttcgtccgactgcgttggatatcaatattactttggatattcttcatctctttggagaggcttccggcttatgtactaatgtccagaagagcagcgtttatcctattagatgtgacgatcaagaccttgttgtgcttcataacttgctaccttgcgaggtggctgattttccttgtcagtacttgggtctaccgctagctattaaaaaggtcactagagatcagattcagcccatcattgataagattgcaaataaacttgctggttggaaggctgatttattgactaaatctggtcgtaaaatccacgtccagtatgttctcacagggatggtcatttatcttgctatggctgtggatcttccagcttgggcgctcaaagctattgacaagattcgccgtgggtttctatggagggaggaaagatgcaagaggtggacattgtcatgtggcctgggggactgtctgcaggcctattgagctgggtggccttggtatttcgagcttaaaagagcttgcttggtcacttagaatgcgttggttatggttggcaaaaactgacccaacttgcccttggacttctatttccatccaagttcctaagaaagtaaaagatttcttctcaatggctatgcaaactgatattggtaatggtgcttctacgtttttctggacagataggtggctgtcgggacatagaattgcagatttagctccacggttatttagaactatttctaagcaaagggctaatcggagaacagtattggacgctctttccaatcacagctggatttcagatattcagggggatctttcagtgggtgttatcaacgaatacctcctcctatgggatttattagatttggttcagctaagacctcatgtggatgacaagcatttctttcgccttgctgccaatggaaaatattcttccaaggaagcttataggggtttctttattgggtcaattgagtttgagccttttcatataatatggaagacttgggctcatccgaaatctaagtttttcatgtggctggtcgctcacaagagggtgtggacagctgataggttgcaaagaagaggtatggatcatccggagacatgtccattatgtgatcaggatcaggaaaccttaaatcatatgttgctgggctgcgtttttgctagagaattttggttcaagctgcttcttgttaatctacagcacttggcccatcagtcctgtgaaggggtttttatggattggtggcaagatttgagcaccaagattcctgggattgcaagaaatggtcttaattctcttgtcattcttggtgtttggaccctttggaagcatcgcaatggctgcgtttttgacaataagagtcctagtgttgctgttgctattaaaagtgttggtttggagattgatctttgggttatggctggtgcaaagaagctgtccttgcttactgctcccatcccaggtctccctgttagctagatagttgtagtgctgttttggtagcagtgtttttgtcatggatggtttcatttatgcttgttattggccgccgtagggcagccttttttgtaccatgtatcttggggtccttttggacctttatctccttcttaatatattttcgcgcagctctcttgcgctttcgagaaaaaaaaaaacagggtttctctgtacccacttggtctactgttctctcatggctcatgctctactgctgctgccgctgctctcttacataatacatacacatgtgcgtacatacatgacacttcaaagtttcacaaaactgaccaactggacatcaaatctcacaagaatctgctgctctagtgctttcatattcttgttgtttgctttatatatcgtgtagtatatcggttttgaaatatacaggactgagctggtcaatggctaatcacgactagtgggtcggttggtccattggaactagggtcggcttgataacattaccttcttaccataatcgcaaatactgttttcctaacctttaggtctgttcctttcgttgtattagagttggacaatgctaaatgcttcgataaacagcagggtttagaatactgttttccttattgaataacatgtaatgataaacagcagggtttagaagtcagttcttgcagaacttttctcgttgttgcctagcgtccagcatttcgacccgacaagcgagtaatattttgcaatgttttatcacaga

SEQ ID NO: 410 - DNA, 21240 bp, Zea mays
  Intron number 4 from transcript GRMZM2G000264_T01 (locus G RMZM2G000264) derived from phytozome v7.0 (chr-ID 7; pos 1 38095072 to 138116311)
tttctacaagctcgcggtaatccatgcagtttcaagtatcctttgtacaacatgcaagctgttgatactaatgtgcatttacagtcacctcaatacatatttcgattgtctcatactaatatgcatttaaaggtcacaattggaccatggtgctccattctgcttactgtgatatgtgcagcgaagcgatggcgatggtgggttttgatgttcaggacagaatcaatggccgcaccttcattgtttaaaaaggcgcggcctagggcgtcgcctaggcgacgcctaggcgtccaggcgtcaattgttgctaggcgtccgcgccgcccagggaagatcgagtatggcgtccgcctaggcgcggtaggcgtccgcctaggcgtggtaggcgtctgggcgacgcctttctccccctgggcgacgcctaacctagggtttttttggcgctggattttggtgcccgcctgtaaattggcgcgcgttctcctttgcgtgcggctggcggctgttcctgtgcgcgcggctattctctcccctttcttcctgtgcgcgcgactcttcctccctgcgcgcgccctgcacgcggctgctcctccctgcgcgcgccctgctcgcgacacgccaaagctgctcgccgctcgcggctgctgctcgcctgctcgcggctgctgctcgctgggcgcgcggctggccggctgctccccttccctggcgcccctcactggtaggtcctcccctgcttcctcctcccctgctttctctcaggtgtcaacacccaaaaatgatgttcatcttcccctgctttcactggtttggttgcttgttattttgtaacagctgtttgtaacagctactaaggcgtcgcctaggcgcccgcctaagtcgcctaggcggtcaggcggtggctgggcgcctagttccgcctagccgccttttaaaccatgcgcaccttatgtgattgtgatagcatagttgcttgcgaggtaattacaaagttgcaggctgccgcctggaggcagtgggaggccctgatgaggtttcttcaccctgtttctgaccctgctcattttgtttgcagtgcaaatttctcctgaagttactcttagctcgaaattgcagtacttatgttcatcatattctaataagtgtggggcgcccgaagggtgcatgatatttaaggtagccaatgcatcaaagggtttccaagcaactcctataaacttaatgcacatttcgctagacttaaagtgtgtaaaaatcatttaaaaatacaaggaaggggttgcatgcatcgggcttgcctgaaataaacactacattagtgtttgttagatgacgtccacttggcgatcatcttttgttccgatacttaatgaaatgagaaagcgtcggaatgtcatttctctaattccataatattcaaaaatattatagatagatacacatcaatatataatagaaaaagttaggttttttgattttgactttcttaaactttaaaaagaaaaataaatatatagtcaagaaagaagatctagaatatatccaaattcaatatttatataaaatgtgctccgtctgtccatcttcaggttcgtccatcagcatcacctcgcgagtggctcatgctttacaacatcttgtggtcgacttggttctggtcctccgcatatcgtgattaattaacgtacctaaatgaaatgcataatgcacatgaatgaatataaacaagaataacacacgcctaattattgctacacgataacaaattaaacacttagcgacaaggcacataatatacttaaaagcaaatactagatgtcaagatatcatttaagtacatcaattgcgttcttccagtttgtctaaatctagctacaacatcatagcaacaataaactatacgcacgttgtaccccctaagctaaagctcaacaccttaagactaataaacttagacttattagttttttacatctaaatttagaacaaagatggaggcatcgtggttatttttgtaaatccatatctggattaatgtgcataatacgccaattacatgaacattacactattctatagtctcgtaggtagagtattattaaggactatagacttttataagaccataaccttaagccctaatgacttaaaacattaatgaacgagggctgcttagaagttttcaaattttacgagaatagacctaatgacatcacttgcttcccaatatttaggacaagaataaatatttattcaagattattaatctaaatgacccatctatgatatttcatcaatcaaaaatcataaagcatcatggatatcatagcagggcatcgactctattttaataagtaaaagcgtcataaccctgaaaaaccgttggctaggcgataaaaatactaaacctatccttcacgctgagaactgacaaatactaaacgatacgattaattcaacacatatcactcttgttaaaaatacgagaataatcgcaactaatatatttaatcgttcttcttatccaccaaaaagcaggagtagtgacaactcaccagcatccaagcgaagctagttgtggagattcagagatgaaaatatgtaacaacccctaaatatactcacataactaatgcaatcatatcccggatcaaccagacaagagctatcttaaggatggatgctatattggagcaaaaccaaggaaggtatgaccgctcctgctatggactaaaccgatggcctaagcactagttgagaagggctccagattctcaacacaataggactcttcagttttcctgagaagccatttggtgaagcatactcatatgaaaaattctaatgtgaagttgaaactctaaagtaaacagaatataatctatggaaccagattatgaccggttgcaaaacaattggtgatctggtggaagtcttagcttttataaagttcatttctgtagagtttgtttaaaagaataaactctgatagtctgattacaaagttgtcaaatacaattatacaacatatactattatttttcagttggcatgagaactattaacattcttcttgctaaagtttgtgcacgtatttttttaaaataacacaactaacaatagtagagaacatatttttaaaatattaagcaacaggcgtatgaggcactgaagctacaacataatgaaaaatccgtacctctgaaagtgactgaatatatgcagaaagaggttcgccagtacgagaaattatattaacaagcaacccagtgcaatcaacaagaacaatcctttcctttagaagcttctggtcattccatttgaacctttctcccatctcaagacaaatgaaaacctcagtatacgctcattgataatgtcaaactcatctttcttattactgccatttatcttcgaggaacaacccccacagatcttcccctaagcagccagtagtaaaaccgcagactggataagttttacattctcaatgtagttccagagctcttcaagtagattatttgttttttcagcaagaagtctaattgtatccatgaagatcttctgtaaaacaacaagtaacacaaatctaagtgttatgtagaatttgtatgcaagcaagtagtgttgaataactttaaatgtattacttcatcttctcctatcaaagtaatgatggcttagaaacattctccaaggcaagggaaaaaacagttactaataacaatttttgtatattttattgaagaatcatagttttttgctataacaacatgcactaacacatgaatacagaagattaacaacggtaaactttactttatctaacaagtggagataaatgatgctcagcctttagtatcactaattcaatataacacctgtcttatatctatggcatgactaaaattacattttatgtcatgtgacataagaagagcttcgtacatagaagagaagcgaaacgaaccatttcaggtaaacacagcagatggataagcttgtagacataataatttaaattacgctgatagaaagattgtcctctagatacttatgcatgcaagtattcaaaactataacatggagcggaagtaggttctcaatgacatcattgccaactgtgtgtaaatcgaatggtgcaccatgacgtaaaagcaacttgatcatgtcacaaaagaatttgtcagcagctttatggattgggaagtatccatatgagtttatgcagttgggattagcgtgcattccacagagcttaggtgtcttgccctctaatacaacttttacacatcgaagagaattactattgaccatgaaggttaaggtttctgaggtgatgctaaaagtccatgtcattcccttgtttgaacagtccttcaataatcggaggaagcaccagacactatcattttgaaggatgggaaccaattttccatatatgtcaataaatacaccattcacccgctagatagatgcataacagttgaaaaaggtgaaagacatcagttatccaactataagaaaacatatcaaggtaaatttttttgaggtgtgtatatgacaataacaatagcagtaatgataagtacatgtaatccaacataaaacaagagaagagacagaatataaaagggtctaaagcgataatggttgaggcatgtgatcaacatgttgctaatcaaggttcatatatgacaatattcagtagacttaagataccttagaatattatatgattaaatgaaatgattaatataatagaacaaatcatcaatcaaattctattaacgaaggtaacagatacctgtggaacagggtctgggatgattatgtcatttgccctgtacttggcgatagaaacaaaatctagcataaactgatagagaatgccaagagtcagcgctataggaagaaaattgaaagaggagtgtaatatcacatagatggatagttatcatacctgcttgaccttttttttgtaattctcaacttcaaaaaagggaaagtgagttgtggacactcaaatcttaccggaattgattcatctttaccattaatattatcttctttgcaggaagctacctctttccagataatgtaacgaggaaccttaaattttaattctatcctttcgttttttttctaaaaaaggtttaatctggaattacgatttaaacacttactgcaaagacatgcgacagtcaaacattgatctaggagaccatgagataaattgagtcgttatatgcttacggtattgccttcgtttctgccaacatgttccgtttcctaaatcctaaaatccatggcacacacaaaacaagattaagaatttcgcacaagtaaaaaaaactatgctatggtagaacttatctatgatgagagaaaatgtatgcttacaataaactaggatgaactctaaccgagtaaatcgggattatccgaactcgaattacttgactcgattttttcgagtaccgctcatttcaggtacactttgggactttgggtagaggtttttaaaaaccgaaatttgaaaaacccgaattattcgacccaagtttttggtaacccgaatgtccactcctactcgacgcactgtaggcagggaccgaccgattatacatgaggccagatctgtaacaaaacaatgagttagcatgaacacaccatcgattggaggtgctctcggacaccaccgaggaggggctcggctcggtgggtgatcaagctcggctcggtacactcattgtacgagctcaaggatgaggcttggctcagctcgaagttggctcgcgagctggctcggctcgtgagaaacgctttcgcaaatataattatgtatatatatactaattattaatatttaaatatgaaatatagaattattatttaatattatagtaatctaaaatttgaattgtcatatatccattattaaatactaagaaattaacagataatccattataattttgtagattaattaattcatcacaattaatgtagctcatgagcccgaactagtcatctcggctcggctcgcctcaccaacaagctaaaaaggaggtttggctcgcctcaccaacaagctaaaaaggaggcttggctcgatcgaggctcgcgagttgctagtgacattagggggtatttggtttatatggattaaattttagtctcgcaattttattatattttggtccctaaattgctaaatacagaaactaaaatactgttttagtttccgtatttgataatttagagactaaaatagaataaaatagagatattaaaattaatttttaaaaactaaacacaaccttagctaaataataaataattaactatcaattaatttactaaaaatatttaattttagccattaactattatctctaatgtcacattttatataacttttctaactaagattagaattcgaatgtcaaaatgtggcatactccagacatgccctaaaatagcgatagatggtgacattcctccgctctcacttcgccgttcgtgctgtcacccttccttgctcgtggcgcaattgacgatcgcctccgccaccctacgccaggtgccccggtcttgttagcctcgtcgaccccttcgcctggtcttcgtcgtgcccttcgctggctacgaacacccatcaggtgtgcgcaccccctctcttcccttcgtgctgcgcgagaccacgcttccaaaccccaactttatttgtttgtgtatctgtattcggatctgttctaattaaaaggtatacatgtattatgcttactaaattcgattttgttgcaaaaagattatttggggtacttgtgaactcccatgtccttgaccactgggtccgcccatgattgtaagcatataacgacacaatttatctcagggtctcctggatcaatgtttgactgtcgcgtgcctttgcagtaagtgtttgaatcgtaattccagattaaactttttttagaaaaaacgaaagaataaaattaaaatttaaggttcctcattacattatctggaaggaggtagcttcctgcaaaaaagataatatgaatggtaaagataaatcaatttcggtaagatttgagtgtccacaacccactttctcttttttgaagttgagaattacaaaaaaaaggtcaagaaggtatgataactatccatctgtgtgatattacacttctctttcaattttctacctgtagcgctgactcttggcattctcttttagtttatgttagattttgtttctatcgctaagtatagggcaaatgacataataatcacagatcctgttccccaagtatctgttacctttgttaacagaatttgattgatgatttgttctattatattaatcatttcatttaatcatgtaatattctaaattaacttaagtctactgaatattgttatatatgaaccttgattagcaacatgttgatcacatgcctcaaccattataggctttaaacccttttatattttgtctcttcttttgtttcatgttggattacatgtacttattattactgctattgttattgtcatatatgcactttcatagattttaccttgatgtggtttattatagttggataactgatgtctttcgactttttcaactgttatgcatccatctagcgggtgaatgatgcatttattgacatatatgtaaaattgattctcatcctttaaaaagatagtatccggtgcttactccgattattcaaggactgttcaggcaaggacatggtatgaagttttagtatcacctcagaaatcttaaccttcatggtcaataataatgctctacgatgtgtaaaagttgtattgaagggcaagccacctgagctctgtggaatgcacgccaatcctaactgcataaacctgtatgagtacttcccaattccataaaactgctgacaaattttttgtgacatgatcaagttgcttttacgtcatagtgcatcagtcgatgtaaacacagttgacaatactgtcattgagaacctacttccgctctatgttgcagttaaaaaatacttgcatgcataagtatctggatgacaatctttctttgagcgtaatttgaattattatgtctacaagcttattcatttgctgtgtttacctgaaatggtttgtttcagttctcttttatgtacgaagatctttttatgtcacatgacataaaatgtaattgtagtcatgctatagatatgagacagacgttataatggattagtgatactaaggactgaacatcatttatctccacttgttagagaaagtaaagtttggcgctgttaatcttctgtcttcatgtgttagtgcatgttgttatagcaaaaacaaggatttttcaataaaatatacaaaaactgttgctagtaactgttttttccttggctttgaaaatgttcctaagccataattactttgataggagaaaatgaagtgatacatttaaagttattcaacactaattgtttgcatacaaattctacatgacacttagatttgtgttacttgttgttttacagaaaatatttatggatacagttagacttcttactgaaaaaataaataatcaacttgaagagctctagaactacattgagaatggaaaacttatccaatctgcggttttactactggctgatcagggaaagatctgtgggggctgttcctcgaagataaattacagtaataagaaatatgggtttgacattattaatgagcgtatactgagtttttcatttgccttgagatggaagaaaggtttaaatggaatgaccagaagcttccgaaggaaagaatgactcttgttgattacactgagttgcttgttaatataatttctcgtactggcgaacctctttctgcatatattcagtcacattcagagctacaaatttttcgttatgttgtagcttcagtggctcatacgcctgttacttaatattttaaaaatatgtgctctactattcctagttgtgttatttaaaaaaatacgtgcataaactttagcaagaagaatgttaatagttctcatgccaactgaaaaataatattatatgttgtatttgacaactttgtaatcagactattagagtttattcttttaaacaaactctacagaaatgaactttataaaagttaagacttccaccagatcaccaattgttttgcagccggtcagaatcgggttctatagattatattctgtttactttagagtttcaatttcatattagaatttttcatgagtatgcttccccaaatgacttctcaggaaaactgaagatccctattgtgttgagaatttggaggccttctcaactagtgcttaggccatcggtttagcccatagcaggagcggtcataccttccttggttttgcttcaatatagcatctatccttaagatagctcttgtctggttgatccgagatatgattgcattagttatgtgagtatatattaggtgctgttacatattttcatccctaaatctcctcaactagcttctcagaggaaagattatggaggaaactaaatattcacaaagaattcctttaggtagttgatattgtttgctggtcagtgttatcaactcatccaactaatcacaattaatctgggaactaatcgttccttgacctcaatgaggctctgctacttgatttggttgaatggttgaccgaaaatcttgtcgtccaattagtcattgtctaatcatgattagttggtgtaacactctgtctacacctggaccgacaatacttactcctggtagccctttaggatcatagagcatccccaatcattacagaccaacacgattcttttatgcgcactttgtccccactcatgcgcaccgggaaaaggtcaccatcccgaaattgctctaggtcaagcacgcttaacctagaggttgttttaagacaaacttctgaaaaaagatgcattttattagtatgagtactctactagttctatttagccttggaccaacatatcacataatccacctgggtcaggatatcacaatcctccccccttagaagaccgaagtcgtcgtcggtcaactccaagccaggaacctcccatcttggccacgtctgtgtgtctagtgtcgtcaatatgctatgccatgtgcccactccgggcccacatgcgccatatgcccgaacccttaccacacacgccagcgaggggtggctctaataccatttgtaacaccctgtctagtcctggaccgacattacttactccttgtagccctctaggatactagaccatccccacagaccaacacgagttttttatgcccattttgtccttactcatgcgcaccgggaaaagatcacccataccgaaattgctctaggccaaacacgtttaacctagaggttcttttaagacagacttctgaaaaagaagatgcatcttgttaatatgagtactctattaattctatttagccttggaccagcatatcatataatccacctgggccaggatatcacaatcctcccctcttagaagaccgaagtcgtcgtcggtcaaccccaagctaggaaccccctctcttggtcatgtatgtgtgtctagtgtcgtcatatgctatgccatgtgcccactccgggccacatgcgccatatgcctgaacccttatcacacacgtccgcgagggttggctatgatatcatttgtaacacctcgtccactcctggaccgacattacttgtggtagccctctaggattatagaccattgccacaaaccaacatgagtcttttatgcgcactttgtcctcactcatgcgcatcggggaaaacttcccggtcggtcatccgttccaaaattgctctaggccaagcacacttaacatagaggttctttgtgacagcactcccaagttatcaggcccacgtgcaccaatccttgccttaacagcctcagatggctgtacacgtgtacatgataacttaacaaggctatcgagttcaacaacttgaactcattatcccagagatctcccacaaaacaggtacattacagtaatcacctttgatacacacatacattggagatagagcgaaagactttacaaaacacattctacaattccaaatctcaagttttacatcatagaaagagttgtaattattacaagtcctgacagtacttaaagtgcataacttattacacaatggaaaatgtgaagcctttccataagaaatacacctaagcattaaaatctttaaggcctccacacgaagcaactatcaagagctaaagatagcaataacccttcttgcaacaacatagggaataaaaccctaagtaggcaattactcagcaagacttacccgactaaagaaaaagactttcaagagtatgctggatttgagactcaaggtaaagcttatcaattaccgaagaccctttttggcagagaaacttactaccagttgatccctaagccaagttttaattcacaaatcaggtatttacctgaacatagatttgcctaatctagttcaagcacttggcctgtattagctgcattttatccatactcatatttcacttgctaactacgatgatggtcatcgggatgagtctccataaccgaggagcaacgacgattcaaaccgattatatccagttggagatctctaacaacacgacatatgtagcacttaaccctttcatatgtcaaccgttcccacggagtcctccactacatgaacaggtccgcgccacccgagagcacattaccctaccaggcgtgctactatgccaggagggtatatgctactcccgccatctcttcactcccagtgtgtgattgtctcttcacgtatggaatagccgggttcaagcttaccctgccctacaccagggtatattgctagttgcaaagtctcaaccacattaggccagtaaacggtacggtccttaatcgacacagacggtcgaccttgtctgcttagcgtctggtctcgatttattcaaaccatttccccatttttggtacccgataggggtactcttttcgaacgatgagcccatctaggccctgatggactcaccatcataagtttgctatgatttttcagaggaaaatcccacaaccaatgttacacatcattcttttgaaaaacaaacgatttttgagtttctaagcatgactaagcagtaatcgttctttttataaaacatggatcaaggaatagtaatcaaattacaaggaatggtaatgcatcgattgtttatcacacaactcctatcacctaatgtatcatataaggtgataaagcatttaaaacacaaggggcaaatgcactggggcttgcctttgttgcagagaagaggtgctatatccctctacccaaccatcatttagatagctctatcctcttgatgagcaggcactggagtagactccccttcagctaccacttcatcttgaatatccacttcttctgggagctctacatgaaatgatatgtccatgaatgcttatgcttatgtagttgcagttagaataggaaaccctaaccctaacaaggggttgggagatggatatatagcctgagttagatgggctgagcccattacaatgggggcaaaacagtaaatacacatgggaagtaccgaaaccctaataggtacttaacatatcctgtacatatgttgagattagaccggaagtctatcctgcagtcacaactccccctgcagtcacaactctatcctgtacatatgttgagattagaccggaagtctaggaatacattggacggtagccccttgatgaagatgtcggcgaactgcagcgttgtggggatgctgaggacccgaacgtcgcctgctgcgacacgctcccggacgaagtgcaggtcgatctccacatgcttcgtgcgctgatgctgcacaagattagtggagaagtagacagcgctgacgttgtcgcagtagactagggtggcgcgctggagggggctgtagagctcgtggaggtgctggcgcatccaggaagcctctgccacgccgttggccacaacgcggtactcagcctcgacgctggagcgagagacgacaggctgccgcttggcgacccaagagacgaggttggcgcctaggaacacgacatagccggaggtggaccgacgcgtgtcggggcagtcggccccattcagcgtcggtgtagaccacaagatctgacgtcgaggatggtcggaggaggccgtagtcgagtgagccccggaggtagcgcataatccgcttgagagcggtgaggtggggctctcgtggtgtgtgcatatggaggcacacctgctgaaccacgtaggcgatgtcgggccgatagaaggtgaggtactggagtgcgcctgttaagctccggtaagacgttgcgtcggcgaccggggggacgtcatctcaaactctcgctggagggcgatgatcgtgcgctgtaggaggtcggcggtgaatgccgtgagcacaatgtcgtcgacgtagaggaggtagtcgatgtcctcgccccgccggtagatgaagagagatgtgtccgacttggcctcgacgaagtcgatggaggccaaataggtggtgaagcggctgtaccaggcccacgacgcctgcttgaggccgtagagtgagcggtttagccgacagaccaggtccggattggcggcgaggtcggcggtgaatgccatgagcacaacgtcgtcgacgtagaggaggtagtcgatgtcctcgccccgctggtagatgaagagagatgtgtccgacttggcctcgacgaagccgatggaggccaaataggtggtgaagcggctgtaccaggcccacggcgccggcttgaggccgtagagtgagcggtttagccgacagactaggtccgggttgacgccgtcgacgaagccgatgggctggctgcagtagacagtctccgtcagagtgttatgaaggttggcgttcttgacgtcgagctggtggatcaccccagtttcgagagagggcgagggagaggacggcgcagacgatggcgaacttgacaacggggttgaaggtctcatcgtagtccacgccggggcgctgggtgaagccctgaagaacccagcgggccttgtagcggtcgatggagtcatccgaagtcagcttgtggcgaaagagccacttgccagtgaccacattggtgccgtgaggacgtggcaccaagtcccaggtgtggttggccagcagggccacatctcctccatggcccgacgcaagtgagggtcggtgagggcggtgcggacagaggaggggaccgaagaggcgtccggtggagtagcggtcgtatcggtggctaggatcagcctgtcgacaggccgaaggacaccgccgacacgacgagttaccatggggtgagtgtgcccgggggcgcggtgaatggcgaccgggtggtacaccgacggcttaagggccacaggcatggccgacccgcggcaatgataaacgacggctgggtccgtgggcgccgacggaggagcgctgccgcgacggtgatagacgagggtagggtcagcgaagcggtgttcgctcgtcgacagggccggagtcgccagttccgcgcgtggcgtaggtgaggtcggcggggctgcgcgtggtgcaggcagatgtgcgaacgggggcgtcgaggccacatggggcatggacggggtcgacagagccgcgcgcgagtgtggtgaagatgcgaggtgcgagcaaggatgcgaggcgtggtgcctgggaaggagggggtactcggatcagactcaaggagggaatcaagatcggtgggtggggaggagccagcaaggggaaacacattttcgtcgaaaacgacgtgatgagagatgatgatgcgatgggaggagaggtcaagacagcgataccctttgtggtcacgggagtagccaaggaagaggcagcgagtggagtgtggagacagcttgtaaggagcggtagcggaagtgttggggtagcaggcacaaccgaatacacgcaggtggttgtaggagggggctgtgccgtacagggtttaggagggggctcaccgccttcgaggggaggaagttgaggaggtggtggcggtgtgcagggcctcggcccagtagctggcagggagagacgcctggaagagaagacaatagatcatgttggtggtggtgcgaatcatgcgctcggcccggccgttcttggcgggtataggggcaggagagacgcaactaaacgccactggtgaggaagaatgaccgagaggcgtgtttgtcgaattcgctagcgttgtcgcactgcaaggcacggaccgtgcgacggaactgggtggagacccaggcgaagaagtgagtgagggtggtaaaagtgtcggacttcaaccgaagagggaaagtccaaaggaaatgagaaaaatcgtccaaaatcaccaaatagtatttatagctagaaagactgagtacaggggaggtccagacatcacaatgaactaggccaaaagcatgctcaaccctagacgaagatgtagtaaaagggagacgagtgtgtcggccaagtgcccaagttgacaagcatgacaaaggccctcaaaatgtcccctattacaagaagaatctaaagtgctggaaagcttggtcatggcatcaggtcctgggtggccgagacgacgactagggagggtaggaatgaaaaaaacaaacctagctctggtaccaagttagaataggaaaccctaaccctaacaacgggttgagagatggatatatagcctgagttagatgggccgagcccattacaatgggggcaaaacagtaaatacacatggggagtaccgaaaccctaataggtactctaacagttgcaaagaggataacattaagtacctctaattacacctttctacatggtgcacacaagaactaacaaaaactacaagggatctaaatactccaaccacacaaccaaggtatccaaccatgctagggaaccctgcctttttaatccaatactccattcatgacttaagcatggattcatccctctttcattgaacccttacaagctaccaccacaagcttgaataattaaaggattagaacatactagactttatttagggcccgtttggcacagctccagctcctgattctaagcgagaatctggaggagccgtgccaaacgggtatttttttaaactgattctcgtgtggagccgaaagatcgggagtcatttttgtgaagaaaggtgggatctaaaaaaacctgctccaccctcccttaaaacagctcctcaaccaaccaaatatggacctctccttaaagtttgatcgaaattacccgcaattgccattggacaaaaacataacgagccaatttatggattaaacatttgagaccattttatgcactactatgatgggaatattttatatgttattgtttcatatttttttcctgtatatgcatcctacttattggtttgtaataaagttgaattgcaaagagtaaaacatataattgccacagaccaccaactctcagaagacaagaatcagtttacttgccaaacggttttaaaaatgattctgattttctaggagaatcaggaggatcagctcctcacgaggatcaggatctagagctaaagaagcaggagctggagctttgccaaacgggcccttaaagacccagatctcacttgataatttgcctcttattccaaagcacttaatccacttttattaaggatttaacttttctattttggaccttacaaagcttcctgagaaactggcttccaacagccccaaattttttaccatatgctcaactgaccaaaataaaggtacccaaaaattttcataatctttggaactaaacttttatttctaaaatccaaataggccttccaagagcacttttaaatcacttaaaatttagtaactgattgaaaaatcctaaaaccaactttaccatagagctcttgattttagacacccaataaaatttgttccatgatttttggagttctctacaaattttggcataatttacaagttccctgataaagaaaaagtaaagacgagcacactattgggcccaaatcagcccactcagcctgcgcaacaggacaagtcagcccacggctgacaacccacgctcgcgctggcggctttgcgcaaaagatcctgctgcccaaacaaaagctcagaccatctcacttaagtccctcagctctggcgcttttacaaaagctcagacccgacaccgccgccctactacggcgaacaggcaaccacgaccgcggcgcagctgacctctggcgcccctcttaagtcactctaacatgtccgtggttagcacaaatcaggtacaccgctttgtgatattttggcccttgggatggtgatatcctggcccaagaattaatagaattcatagagtatccataccaactgtaagcaatgggactcttactctcatcgagaggatgacactatgagttggagagattttctgtttattttctcaaacactacacaatgccatacccgtctaagggttgagatacatatttatagcccaaggggctgcaacatatgctttctagagatgcgaatatgctgtcctacaaactgcactaaccactaagtgctgttgtactctagtcaaaagaaaactgcagcaagctgctgtcctccaaaagatgaaaaatggaaaaggatatgcctgcaacacgttgtccttgtagtcaaaagactactgatgtgcaacacgctgtccttgcagtcaaaagactgttgtcactgctgtcctacaacagagatgttgtgtggactgtcctccacaccacaaaaatagagatgctgtcctccacacgaataccgcatgacttgttccatcattctccccctaagttttgtgcgtcgccttgtgggaaagttgagccatcccggacctaaaacaaagctcaagaaacttgatcctcccaaggggattggcgagcaggtccacaagctgatccttggtgtttatgtagcgtgccttgatgctcccttctgccaaacagtcacggatgaagtggtacctcaccttgatgtgcttattccgttcatggaacatggggttcttggccaacacaagggcggactggctatccacccggagttccactgctccaacttctctcccgaggagatcaccgagcaggcgagcaagtcagagcgcctgagttgaagcgatggaggccgctatgtactcagcctcgcaactggacatgaccaccacatgctgcttgaccgactacccagttgatgggacacttgccgaggaagaagatgatcccgcttgtgctcttgctggtgtcgatgtcgccggcgtggtcgctgtcgctgtacccgacaaggtgtgcctccctagagcacctcgagtagtagagaccgtggtcaagagtctccgcaacatagcgggcgatccttttcacagcctgctcgtttcacagcctgctcgtgctccatcgtcggtcgctgcaggaatcgactaacgtagccgacggagtatgccagatccggtcgtgtgtggacgaggtagcgaaggctccccacaagacgccggtactgagtagcgtccacctcctccgtcgtgctgtcacggttcagctttagcctcctccatcggagtgagggctgggttgcaatcagtgagcccagccagctcaacaatgcgcttgatgtaggccgtctggcgaagtgtgatcccagagtcactctggtgcacttcaatccccaggtagaaggagagatgccccaggtcactcatctggaaggtgaccttcatctcttccttaaacgccaccacctcttatattcccatccttgacagaaaattaacataagtttaattttccttaaacctgacagagaattacttttattctaactattttacttttatattacagttacaatggaatgctaagagacaaatagttaaagaactgctttaacctaccttgatggagaggggagaatgcatcgtgttagcaagggagcaccagagcaggtactattttccttaaaacacattgggaactctagatttgtgacaatcgtttctgttgttaaatgtggaaattaaacagatccttcatcttgcccacaacaagtcagatattgaaagaagggtcagagctgtgattgacaaatttgctgagcgtggtctgtgagcacttggtgtggcttaccaggtttatgatcctttgacgagcactattgctacactctttgactagacgtctattgtacttgactgacaaaaattcatgtacaggaagtgtcggggaccataattaagggtacccctaagactcctaatctcagctggtaacctccatcagcacaaagctgcaaaggcctgatgggcgtgattaagctcaaggctcagtccactcaagggacacgttctcgcctcgcccgagcccagcctcgggcaaaggcagcctaccccggaggattcacgtctcgcccgagggccccctcaagcgacggacacaccttcggctcgcccgaggcccagtcttcgcggagaagcaaccttggccagatcgccacgccaaccgaccgtatcgcaggagcatttaatgcaaggatcgactgacacattatcctgacgcgcgctcctcagtcgacagagccgaagtgaccgcagtcacttcgccgctccactgaccgacctgacaggaaaacagtgccgcctgccccgctccgactgctgtggcactcgacagagtgaggctgacagcagctaagtccagcctcgggcgccatggaagctccgcctcgcccgacccagggctcggactcagcctcggcctcggaagacggtctccgcctcgcccgaccctagggctcggactcagcctcggcctcggaagacggactccgcctcgcccgaccccagggctcggactcagcctcggcctcggaagacggtctccgcctcgtccgacccagggctcggactcagcctcgaccccggaagacgaactccgcctcgcccgaccccagggctcggactcagcctcgacatcggaagacgaaatccgcctcgcccgaccccagggcccagactcaacctcgacctcggaggagcctccgcctcgcccgacctcgggctcggacccgccacgtcacagggaaggccttcattaccctacccctagctatctcaggctacggggaacaagaccggcgtcccatctggctcgccccggtaaacaagtaatgatgacaccccgtgtgctccatgacgacgacggctctcagccccttacggaagcaaggagacgtcagcaaggatccgacagccccgacagctgtacttccacaaggctcaagcactcctatgacggccacgacatcacatgaacagggcaccaaaacctctccggctgtcacgacgacatgtacttagggctttagctcctctctgctagacacgttagcacactgctacaccccccattgtacacctgggccctctccttacgcctataaaaggaaggtccagggctctcgtacgagaaggttggccgcgcgggagaacgagctggcggacagtctctctctctccctctctccctctctcactctcccacgcggacgcttgtaacccccctactgcaagcgcacccgacctgggcgcaggacaacacgaaggccgcgggtttcccctttgctgtttctcacccccctttgtgctccgtctcgcgccgacccatctgggctgggacacgcggcgacaatttactcgtcggtccagggaccccccggagtcgaaacgccgacaggaagtgccagatggtaggaaagagagtcctggaggaccatggcagttcattgggctcttgcctccttttgaccccccgcgccatgatagtgcagaaactatcagaagggcactcaatcttggtgtcaatgtcaagatgattacaggtttgccatatttatcactgtccaccttttgttgattgctctaaatctggagtttcatcccattccttgctagtttgttggtagtaatatgtttgcagatttggctagtgctactgaaccgctgtactgtaatactgactgacctttttcccgcctcaggtgatcaacttgctattgggaaagaaactgcacgt

SEQ ID NO: 411 - DNA, 549 bp, Zea mays
  Intron number 7 from transcript GRMZM2G081538_T07 (locus G RMZM2G081538) derived from phytozome v7.0 (chr-ID 4; pos 9 0842687 to 90843235 reverse strand)
tggattataaccccaagaagcaacacattattgtgagtatgacacttactttcatgtttcccatatgaagcaatatttcatatatatttacattaatcgaacattcctatgaattatctttatgtagtaacattgaagacaacaactttgtattaccttgtgtttcttggttatatttctacattatttttgttataatttgattatggattctttttttttcttgcttctgtagttcactgcatgttcacactggagtatgacatgattttttactttgttattattaaataactggttagaactcttgattgtgttctacgagcaaaattattttttatcgatttattgttgtattagtttaatctagccaactcctgatccaattacgtagagtctgccaaattgaacacccgtgttctagttcacaacgacgacagctattacttgttcattttgaattattatcaacttatttatactgctactcaaaaatatatatttgcttctgaatagtaatcggttatacgcttcaggcaacaacagaag

SEQ ID NO: 412 - DNA, 1873 bp, Zea mays
  Intron number 4 from transcript GRMZM2G174570_T01 (locus G RMZM2G174570) derived from phytozome v7.0 (chr-ID 8; pos 2 1445429 to 21447301 reverse strand)
gagagcgccctggtctagctgcatcagctgttgcggttcgtccaaaccctgaacatgtttattcccagtaggccagtatgaatgaaatagatgtccaatgtgtttccctgtgaaagtgcaactattcatgtctataaaacatcatgtgtcctggtagttgatatagcgatatgatttcacttgtgttgatttgtagttttgtttgatagcgcgtgggcgattttttctctaataaattgaattccaaaacattttgtatagaatttggggcctgggcgagtgtcagcgtttggggaagtcatacccctagatgctggtaaaacactctctagaacttcatcagtagaaggtagacctacaatggggctttggtgccagtctggcatccattgggccctgtgtcccgaggccatgccctacaagctgagggctttatgcaggaggccgtgacactccccaagatgcccctagggcaggacaaccttgatatcatatgcgcccctgaactaggtcgattgcgtagatcctggtggtcgagataaggttcttcatatttattgcgacattgtgatcaaaaggcattgccgtggccacgtctgagaccgcaggcgtacctgcaagcactatgtaccgtgtgagtctactgtggctaccaattacgccgtaggcgacaacgtgggctctcataactgcatatgtggtatgccatgctcgccactatggcacaccggagatgtgcaatgcgtagtagttggacctttgttgggtggggcccaccgtgtagatagggttgtaactctctcctcccttgtgctataaaaggggattatggagcaacatagtaacggtttcccactagtaggctatgtcaggttgaggaccatcggacaactagtgttcaagggctgctgccatcgacattcaggggctgccggcaccatcgagtttaaaatctcttggttctcagttccgctccttatctcaatcatcatctgagtatgtaagctcaacccactcttgcatctttacatccaccacaaactcacaaagagaacgtgggttattgcattcagacagctcgaacctttctacaccgtgtgtgtgcatataagcatattaatatgtcatctctctattgcacggtattagatctacgttcccctctctgattctttttgatacccttggtaccatggtgttgcattctaacaacaacgagtaatccaatttccccttaaaaactatactcaggtatctgatatctgttagaaggtccatatgttgtggatatccgtagtttttgtttggctatttggatatcaaatattattgcttatatgatgcaatacaacttaggatatgtctggatcactacctgacgtgccatgtcttctttcctcgaacacgcaggagaactgcatgtcatttcattaataaattgaaaacagtttgattacgtgccgattccatgcctctagttgcgcccttgaacctatagagacacagccatgccttttcggcaaacaatgttctaagatatggccaacaatttcttcaccacaccttagttaatgttttggcaagaaaatgggtctctgacaggtgataaccatacacccagctaagaaagtaggcggtgcggtgcctaacatctggtgtcacaatgttaaaagcaaaatcacttaacttgatacagttctttgcattctgtattttttattctgatgaacttgcacttgcttgaaatatgtgggcacttgcttgaaatatcttgcttgcttgaacctgataacagctggagtccagtctaacagccacactttgatcgttccttgcaggctctcatcttcacagttctggcaattatcgctct

SEQ ID NO: 413 - DNA, 19758 bp, Zea mays
  Intron number 1 from transcript GRMZM2G530860_T01 (locus G RMZM2G530860) derived from phytozome v7.0 (chr-ID 1; pos 1 99664365 to 199684122)
ctctccctcgttagggtttcctctggattttgttggtgcgtattcttttcctcactgcgccgccttcctctcgcacctctggtctctcccgttttcggtgaggtctagttttggcgggggctggtgcgtttcgtcctttcgtccgccggtggttgaggagtggccgcgtctgggttctggcgttcttcgaagcccttcgaaaatctctgctatggatccgaaaggaaagaacccctagaactcccagtgggatcgttggggtccgatggagaagccgcaaggtactcatccttggaacagatcaagaaaccttagcttgaagctgaagcctaatatcggcaaatctgagtagcaggagggtgtgttgtcccctcatcctgttgagggaactcaaccaggtaacccttctgtctctcctgttcctttgaagaaagatcttgatctcgttcgccctgcgttctgtcagaaatgtggtgttgaaggacatcatgccagaaattgttttaacgctttgtggtgtgatatttgccgcaaggagacgcatgtcacttctcgctgtgttcttcctaagcaaaacaaacccaccatgcccattgttggtttggctgctgatggattagggttttatctgtctcacttcgctaaaccattgaccaaaaaaccaaaaagggtttttatcggtctggttaaagtgattgagggactagtctcggctgaagatcttgagagagatttcggttttcacttcccatggaataagaggtggaaagctactaagtgccattcggggtttctgatgcagtttccctcccaagaacgtcttgaggaaatgataagcttcccggagctgaaaatgaagatgtctggggccaagattgctgttgtgccttggagttctagggccaaacctaaatctagacttcatactgtgtgggttattgctgaaaatgtccctgaggaattacagaattaccagtctatctgtgaaattggatcaatgattggtgcagtggaggaagttgaccttatgtctctggattctgatgatattgtgagatttaaaatccacattaaaagtgtggccatgatccctcctgtggtggaagtggctgtcaagccttttctttatgatatcttctttagaattgaatctatttgtgatgaaggatggaatgatgattcaatgaatttgggtaagagagcctctgttcaaattcatgggtccaatgatccactctttgataaatctgggaaaaacccaagaatttggatgatgttacccttgaagatgagcctaatcctaatctcaaaattggggagtcttcttctcaaggcaaagagtttgccaaaatgtctgaccctaatcttgtgccttctaaagatatgtctgatgatgagcagaaacttgataacctctctgatgagaaagtggattttgatccaaatgaagatgatttgcttagctctcaagaattggaagaattcgctaaagatatggaggaagatcaaactgattttcaatttaaaattggtgctatgatctcgatcccccccaatgatgagattgttcatgatgggaagaacaaaaagcctctggacttgcccgctaacacgactgatggcgtcaggaaaagttctaggttggagaagaatgatgatgtgaaggtggccgacaaagcgatatacagagcagaagccaaggatgccttcctcaataaaggtatgtgttctaactccttttccttgcttgattctaataatgatgatttgatagatttagctaataaacttggagtttctttgggtccctctgactctgatgttattgataatttggagttgatcaaagatctggaacgttccagaaaaattttggccttccaagcttgcaaaaataaaaatacctcaaatgtggaggtcccctcccttgttgatcacataaatatggatagtagtgtccatgatgattctgacctgaatattgatcaggatttacttgatgtgatggtcttaagaaaaggtaggaaaattaagcatcggaaaaaaaacgattaagaaaaaggcttccccaaaaagtagaggttcatctacgaaaaaatgggagcctgtctgttctgacctccctcttgatccgttttaaatcatgagaggccttatttggaactgtcagggtttgggtcgcgacattaagtttgatttcctgagagaaatcattagggaagagaaaattgatttcgttggtttacaagaaactaaaaaagaacattttaatgactctcttctgtcctcgcttgctggtagcaagctttttgcctggttctcctctccttctaatgggagatcgggaggtcttttagtgggttttaattctgaggtgtttgatgtcagagaatttaaagctggtgaattcttgactcgctcccttgtcctccacagagaaaaaatttttatctggaatttcgttaacgtttatggggctgcccaaaatgaacacaaatctcgttttctcagtgaattgtctgcagtttgttcgagaagtcaggtccctatgcttattggtggagatttcaatattctcaggaaagctgaggaaaaaaaataaacctggtaccctcagcaaatggagttttctgtttaatagtatcatagatcatcatggtctagtggaatttgagctgaaaaatagactatatacgtggtctaacaaccgcaacgatcccacttttgaaaaacttgacagatttttggccagtcctgactgggatcttgcttataataatattagtgttattgggttaaatagatccttttcggatcatgttcccctttgccttcaatctgatttcctgcccatggtgcgtaaggactttcgttatgagctgtgttggaaggttaggcctgattttcacaaattagtggaaaatgtttgggctcttccggttggtgtgtccaatagtcttgatgtttggaagttaaaactgaaacatctacgtcagaagcttaaaggttggaacagcaatattgtaggtcactacaaaaagttgaagaaaaacttgattgaaaatattgatattctggataaagccagtgagacttctggcttatctgatgctgacagatatttgaaattagatttggaatctaacctcaggaagattgttaatgaggaaaacattagccttagacaaaaagcttgaaagggaattaggcttacacctagtccctaattaattttggtggttgaattgcccaacacaaataattggactaactagtttgcccaagtgtatagattatacaggtgtaaaaggttcacactcagccaataaaaagaccaagttttggattcaacaaaggagcatagtggcaaccgaaggccctctggtctgggagcaccagactgtccggtgtacaccggacagtgtccggtgcaccaccggacaatgtccggtgcaccagaggactccaactcgaactcgccaccttcggaaatttccagaggcactcgcgctataattcaccggactgtccggtgtacaccggacagtgtccggtgcgccaaggaagaacggcctcaggaactcgccagcttcgggaaacgccaacggctagtccgctaaaattcaccggacatgtccggtgtacaccggactgtccggtgtacaccggactgtccggtgcaactccggagcaacggctagtcggcgccaacggctacctgcgacgcaataaatgcgcgctctgcgcgcgcagaaggcaggcgtgcccatactggcacaccggacagcaaacagtacatgtctggtgtgcaccggacatccaggcgggcccacgagtcagaagctccaacggtcagaatccaacggcagtgatgacgtggcgggggcaccggacatgtccggtgtgcaccggactgtccggtgcgccatcgaacagacagcctcccaacggcacattttggtggttggggctataaataccccaaccaccccaccattcattgcatccaagttttccacttcccaactactacaagagctctagcattcaattctagacacaccaaagagatcaaatcctctccaaattccacacaacgccatagtgactagagagagtgatttgcttgtgttctttcgagctcttgcgcttggattgctttcttctttctcgattctttcattgcgatcaaactcacttgtaattgaggcaagagacaccaaacttgtggtggtccttgcgggaactttgtgttccaagtgattgagaaaagaaagctcactcgatccaagggatcgtttgagagagggaagggttgaaagagacccggcctttgtggcctcctcaacggggagtaggtttgcaagaaccgaacctcggtaaaacaaattcgcgcgtcacactccttatttgcttgcgatttgttttgcgccctctctcgcggactcgtttctttattactaacgctaacccggcttatagttgtgtttatatttgtaaatttcagtttcgccctattcaccccccctctaggcgactatcaattggtatcagagcacggtgcttcattagagcctaaccgctcgaagtgatgtcgggagatcacgccaagaaggaaatggagaccggcgaaaagcccactacaagccacgggagcacttcatcggaagagtcccgcaccaagagggaggagaagaagaagatctcctccaacaaagggaaggagaagaaatcttcttctcaccacaaagagaagaaggaaaaatcttcttcccacaagccgcatcggagtggggaaaaacaaaagaggatgaggaaagtggtctactacgagacccgacacttcatcaacatcgacctccgactccgacgcgccctccgtaacttctaaacgccaagagcgtaagaagtttagtaagatccccctacactattctcgcatttctaaacatgcacctctactttccgtcccattaggcaaaccaccaacttttgatggtgaagattatgctaggtggagtaatttaatgcgatttcatctaacctcactccacaaaagtatatgggatgttgtcgagtttggtgcacaggtaccatccgtaggggataaagactatgatgaggatgaggtggcccaaatcgagcacttcaactctcaagcgacaacaatactccttgcctcactaagtagagaggagtataacaaagtacaagggttgaagagtgcaaaggaggtttgggatgtgctcaaaaccgcgcacgagggagacgagctcaccaagatcaccaagcgggaaacgatcgagggggagctcggtcggttccggcttcgcaaaggggaggagccacaacacatgtacaaccggctcaagaccttggtgaaccaagtgcgcaacctcgggagcgtaaagtgggatgaccatgaagtggttaaggttattctaagatctcttattttccttaaccctactcaagttcaattaattcgtggtaatccaagatatactaaaatgacccccgaggaagtaatcgggcattttgtaagttttgagtgcatgatcgaaggctcgaggaagatcaacgagcttgatgatccatctacatccgaagctcaacccgtcgcattcaaggcgacggaagaaaagaaggaggagtctacaccaagtagacaaccaatcgacgcctccaagcttgacaatgaggagatgacgctcgtcatcaagagcttccgccaaatcctcaaacaaaggagggggaaagactacaagtcccgctccaagaaggtttgctacaaatgtggtaagcccggtcattttattgctaaatgtcctatatcaagtgacagtgaccgaggcgacgacaagaaggggagaagaaaggagaagaagaggtactacaagaagaagggcggcgatgcccatgtttgtcgggagtgggactccgacgaaagctctagcgactcctccgacgatgaggacgccgccaacatcgccgtcaccaagggacttctgttcccaaacgtcggccacaagtgcctcatggcaaaggacggcaaaaggaagaaggtaaaatcaagatcctccactaaatatgaaacctctagtgatgaaaatgctagtgataaggaggataacttgcgtaccctttttgccaatcttaacatggaacaaaaagaaaaattaaatgaattaattagtgctattcatgaaaaggatgaccttttggattcccaagaggactgtctaattaaagaaaacaagaaacatgttaaggttaaaaatgcttatgctctagaagtagaaaaatgtcaaaaactatctagtgagctaagcacttgccgtgagatgattaacaaccttagacatgaaaatgctagtttaaatgctaaggttgattcacatgtttgtaatgtttcaattcccaatcctaaagaaaatgatgatgatttgcttgctaggattgaagaattaaacatttctcttgctagccttagaattgaaaatgaaaaattgcttgctaaggctaaagattttgatgtttgcgatgctactatttccgaccttagaactaagaatgacatgttacatgctaaggtcgtagaattaaaatcttgcaaaccctctacatctagtgttaagcatgtatctatttgtactagatgtagagatgtcaacattgatgttatacatgatcatatggctttaattaaacaacaaaatgatcatatagcaaaactagatgctaaaattaccgagcacaacttagaaaatgagaaattcaaatttgctcgtagcatgctttataatgggagacgcccgggcatcaaggatggcattggcttccaaaggggagacaatgtcaaaattagtgtccctcctaaaaggttgtccaactttgttaagggcaaggctcccatgcctcaggataacgagggttacattttataccctgtcggttatcccgagagcaaaattaggagaattcattctaggaagtctcactctggccctaatcatgcatttatgtataagggtgagatatctagctctaggcaaccaacccatgctaagttgcctagaaattaaagaaaactcctagtgcatcaaataatcataacatttcatttaaaacttttgatgcatcttatgttttgactaacaaatccggcaaggtagttgccaaatatgttgggggcaagcacaagggctccaagacttgtgtttgggtacccaaagttcttgtgtctaatgccaaaggacccaaaaccatttgggtacctaaagtcaagaactaaacttgttttgtaggtttatgcatccgggggctcaagttggatactcgacagcgggtgcacaaaccacatgacaggggagaagaaaatgttctcctcatatgagaaaaaccaagatccccaacgagctatcacattcggggatggaaatcaaggtttggtcaaaggtttgggtaaaattgctatatctcctgaccattccatttccaatgtttttcttgttgattctttagattacaacttgctttctgtatctcaattatgtcaaatgggctacaactgtctattcactgatataggtgtcactgtctttagaaaaagtgatgattcaatagaatttaagggagtgttagagggtcagctatacttggtagattttgatagagctgaactcgacacttgcttaattgctaagactaacatgggttggctctggcaccgccgactagctcatgttgggatgaagaatcttcataagcttctaaagggagaacacattttaggactaacaaatgttcattttgagaaagacaggatttgtagcgcatgccaagcaggaaagcaagttggcactcatcatccgcataagaacataatgacgaccaacaggccactggagctcctacacatggatctattcggcccgatcgcttacataagcatcggcgggagtaagtattgtctagttattgtggatgattattctcgcttcacttgggtattcttcttacaggaaaaatctcaaacccaagagaccttaaagggattcttgagacgggctcaaaatgagttcggcttaaggatcaagaaaataagaagcgacaacgggacggagttcaagaactctcaaattgaaggcttccttgaggaggagggcatcaagcatgagttctcttctccctacacccctcaacaaaatggtgtagtggagaggaagaatcgaactctattggacatggctagaaccatgcttgatgagtacaagacttcggatcggttttgggcggaggcagtcaacaccgcttgctacgccatcaaccggttgtatctacaccgaatcctcaagaagacatcctatgaactcctaactggtaaaaagccaaacatttcatattttagagtctttggtagcaaatgttttattcttgttaaaagaggtagaaaatctaaatttgctcctaagactgtagaaggctttttacttggttatgactcaaacacaagggcatatagggtctttaacaagtccactggactagttgaagtctcatgtgacgttgtgtttgatgagactaacggctctcaagtagagcaagttgatcttgatgagataggtgatgaagaggctccgtgcatagcgctaaggaacatgtccattggggatgtgtgtcctaaggaatccgaagagcctccaaacacacaagatcatccatcctcctccacgcaagcatctccaccaacacaaaatgaggatgaagctcaaattgatgaagaagaagatcaatcaaatgagccacctcaagatgacggcatagatcaagggggagatgcaaatgaggaagacaaggaggatgaggaaccaagaccgccacacccaagagtccaccaagcaatccaacgagatcaccccgtcgacaccatcctcggcgacattcataagggggtaactactcgatctcgtgttgcacatttttgtgaacattactcgtttgtttcctctattgagccacacagggtagaggaagcactccaagattcggattgggtggtggcaatgcaagaggagctcaacaacttcactaggaatgaggtatggcatttagttccacgtcctaatcaaaatgttgtaggaaccaaatgggtcttccgcaacaagcaagatgagcatggtgtggtgacaaggaacaaagctcgacttgtggctaagggatactcccaagtcgaaggtttggatttcggtgaaacctatgcacccgtagctaggcttgagtcaattcgcatattattggcctatgctacttaccatggctttaagctttatcaaatggacgtgaaaagtgccttcctcaatggaccaatcaaggaagaggtctatgttgagcaacctcccggctttgaagacagtgagtatcctaaccatgtctataagctctctaaggcgctttatgggctcaagcaagccccaagagcatggtatgaatgccttagagatttccttattgctaatggcttcaaagtcggaaaggccgatcctacactctttactaaaaactcttgaaaatgacttgtttgtatgccaaatttatgttgatgatattatatttgggtctactaacgagtctacatgtgaagagtttagtaggattatgacacagaagttcgagatgtctatgatgggggagttgaagtatttcttaggatttcaagtgaagcaactccaagagggcacattcattagccaaacaaagtacactcaagacattctaaacaagtttggaatgaaggatgccaagcccatcaagacacccatgggaaccaatgggcatctcgacctcgacacgggaggtaagtccgtggatcaaaaggtataccggtcaatgataggttctttactttatttatgtgcatctcgaccggatattatgctttccgtatgcatgtgtgcaagattccaagccgaccctaaggaagctcaccttacggccgtgaaacgaatcttgcgatatttggcttatactcctaagtttgggctttggtatcctaggggatccacatttgatttgattggttattcggatgccgattgggcggggtgcaaaatcaataggaagagcacatcggggacttgccagttcttgggaagatccttggtgtcttgggcttcaaagaagcaaaattcagtcgctctttccaccgccgaagccgagtacattgccgcaggccattgttgcgcgcaattgctttggatgaggcaaaccctgcgggactacggttacaaattaaccaaagtcccttatgagagtgcaatcaaaatggccgacaatcccgtcgagcatagccgcactaagcacatagccattcggtatcattttcttagggatcaccaacaaaagggagatatcgagatttcttacattaatactaaagatcaattagccgatatctttaccaagcctcttgatgaacaatcttttaacaaacttaggcatgagctcaatattcttgattcgcgcaatttcttttgctagattgcacacatagctcttttatatacctttgatcatgtctctttcatatgctatgactaatgtgttttcaagtctatttcaaaccaagtcataggtgtattgaaagggaattggagtcttcggcgaagacaaaggcttccactccgcaactcatccttcgccatcgctccaagcgactctccgttcttgggggagaaaacatgagcaccaagcaaaaggactccatctttggtataattttcacttatttgtgttgaccaaagagggagaatgtaacttcgagggctctaatgattctgtttttttggcgattcatgccaaagggggagaaagtaagagcccaaagcaaaaggaccgcaccaccaccaatttcaaaactttgtgtttccaagaatattatcaattggttttcctattgtgttcaaaagggggagaaaatagtatttcaaaaatgacatatcaaaaaccctcttgaactctaagaggaggatctcatttagggggagttttgtttagtcaaaggaaaagcatttgaaacagggggagaaaatctcaaatcttgaaaatgcttctcaaaatcttattcatttgcctttgactatttttaaaagatctttgaaatagatttataaaagaatttgcaaaaacaaaacatgtggtgcaaacgtggtccaaaatattatataagaaagaaaacaatccatgcatatcttgtaagtatttatattggctcaattccaagcaacctttgcacttacattatgcaaactggttcaattatgtacttctatatttgctttggtttgtgttggcatcaatcaccaaaaagggggagattgaaagggaattaggcttacacctagtccctaattaattttggtggttgaattgcccaacacaaataattggactaactagtttgcccaagtgtatagattatacaggtgtaaaaggttcacactcagccaataaaaagaccaagttttggattcaacaaaggagcatagtggcaaccgaaggccctctggtctgggagcaccggactgtccggtgtacaccggacagtgtccggtgcaccaccggacaatgtccggtgcaccagaggactccaactcgaactcgccaccttcgggaatttccagaggcactcgcgctataattcaccggactgtccggtgtacaccggacagtgtccggtgcgccaaggaagaacgacctcaggaactcgccagcttcgggaaatgccaacggctagtccgctaaaattcaccggacatgtccggtgtacaccggactgtccggtgcaactctggagcaacgactagtcggcgccaacggctacctgcgacgcaataaatgcgcgctctgcgcgcgcagaaggcaggcgtgcccatactggcacaccggacagcaaacagtacatgtccggtgtgcaccggacatccaggcgggcccacgagtcagaagctccaacggtcagaatccaacgacagtgatgatgtggcgggggcaccggacatgtccggtgcgccatcgaacagacagcttcccaacggccacatttggtggttggggctataaataccccaaccaccccaccattcattgcatccaagttttccacttcccaactactacaagagctctagcattcaattctagacacaccaaagagatcaaatcctctccaaattccacacaacgccatagtgactagagagagtgatttgcttgtgttctttcgagctcttgcgcttggattgctttcttctttctcgattctttcattgcgatcaaactcacttgtaattgaggcaagagacaccaaacttgtggtggtccttgcgggagctttgtgttccaagtgattgagaaaagaaagctcactcgatccaagggatcgtttgagagagggaagggttgaaagagacccggcctttgtggcctcctcaacggggagtaggtttgcaagaaccgaacctcggtaaaacaaatccgggtgtcacactccttatttgcttgcgatttgttttgcgccctctctcgcggactcgtttctttattactaacgctaacccggcttgtagttgtgtttatatttgtaaatttcagtttcgccctattcaccccacctctaggcgactatcaaagctagggataaattcttattagagggtgatgagaattccaagtattttcatttgctggccaagcacaaaaaaaggaaactgaaaatcgtgactctttctcatggtgatattgtggctcatgatgatcatggcattaatcagttggcgacttccttttacaaagatctctttggtccttcccgaggatcgaatatttctttggctaatttggacatgaaacaacttgaggagggtgatagaaatcttcttaccagccctttttccttggaagagatcaaagatgtggtgtttgctttgaaacacaatagtgcaccgggccccgatggcttcccttctgaattttttcaagagttttgggatgtgatcaaaagtgatttgtttaatctctttaaagcttttcatgatggttctctcaacattgaaagactaaattttggtattgtcactcttatccctaaggtccctgatgcgactgatattaaagcttttcgccccatttgcttgcttaatgtttgctacaaaatcattaccaaagttcttactaatagattggcccgttgcattacttctgtgattagtgaccttcaatacgggtttattaaaggaagatatattatggatggtgttctttctttgcatgagattattcatgaagttaaacggaggaaacaaaatggggttattttcaaagtcgattttgaaaaagcttatgtgtaacactataaaaatcatcaaataaaaataatacatttaattattaataataattatggtaataaatttttattgaagtgtttgttatttatttcatttggaataatttttgattgcgtataattgattttttttaataagcatttcttcttaaatggaaattcaaataaataatataataattattagtataaaaataaatattgtatttataaataattttggtttaattattatgaattttagggttatttaaaatatgattttaattttagaagaaggaaattcgaaaaaaactaaactctcacactttcacatgacgtgaccacatagaaaatgatttggaaaaaaaaacaaagcaaaagcagctcacgattcttgctggacgcatgctcggcctgctctcagcctcgccccgtctctttatttctagctgccaagtggaccccactccttcatctcctccccacgttcatttcccttagacgcaagaagccgctggtctatgccgctacgccatctctctgtctgtcccatcgcctcgcccttccccgacccgccgcgacaggagctcctgcacgctcgacgccgagaccccacgcgacgagcgaccagcgccgaagaccccgcgcccctacatgccgtcaagacgtcgtccgtttctgaattttaatggagctttactgcgtctgcttctgttgtctggttgaagccgccattaaacagccattaatggtgatggttagtgcttgtgcttcgtctcccaccggctacctctcttattcttccacttatggccacgaccgttattggattcggcactctcttctctcctcggcgcccctctccatccccattaaatctgcatttatcccctgccacagccacacaccattgatgcttgcctgctcagcttccctctcttccacggctatttaagccatggtgtcgtgcccctttccctcctgctctccgctcctcctccatgctgaattattgtcgcgtctgcttgctgcttgcttgcagagcaccatgctaccgtttaccagaattcgccggagctgttcaaactccttcgcctagctccgtcagctcgccggaacctctcgccaaagccacgacatcgccggagttgctgctctgctgcgccattttgcctgcgtgcccacaccgctgactgtttccccactacgccgcgcccgcagccgcgccacacgcccgccgtcgagcccctactcgcactgtgcccagctcgccgtcgtgaagctcatcgccggaccgttcgcagccgtacgtcgttcgtcatccgtggagcctcgccggagctacgcacccgccgtgccaagccttcgccttgatgcacgcccaaacccatccatcgtccgttcacccaaggttgataacaaccccgaaatatttattttctaaatcatgttttgaatttattgtgaattattgttgtaatgatgcgatttggcgattcacgtgtatgattttagagatgtgatgtatacgtgtagccaaaatcgaccctgcgacactactttgaatatgcgtataattctaaaaatgaacacggtcaccattcactacttcagtgattttcatactagaatacgtttacggatttgattttgctttaatgtgtggagcggtaattggttagtattgtgataagtgtaatcttagtgatataagaaattgaaatagatattaagccacgtatttccggtcgaatgaaaaatgtatagattttactgttcataataaatgtattcataagtatagcacctaattacttagaatagtaaaatgcttatttatatcataataaccatgaataagttattaaagtctcatttagtaatttacaattaattcttagtatattaatgtcggaagaattataaataaacaatttttagttatacgtataaattctatttagaaaagaaaggagaaaactgaaatagtagaatttataataatgttaaaatgacttaactagacactcatacttttctaataaagaaaatgatagtatgttgataaacatatgtttcttactaaagaattagataatttgtttctaactttaaaatgaccttttaataaatatgatattagtaagattcattatagatgtttaagtacccataataatatgctttacaatagaattatgtcatataacttttctaataatgacttaattaagtgctcacaccgttataactaaaatgatagttaataatataccaatgaatatagtattcatttcaaatgatttaggtcatatgttcctaaattgaaactaaatataatcaatagattatttatattttatcacaatttaataattagacttacgtttcaatttgtccataactagtaatataagcgtgattattccgttcatcacattgaatccatattatttatatatatcatttagtggtccctaaaggataaaataaagaaaattagtgtcctttttataattaaatgttagtttacatatttgttttgtatatagctttcttaacaaagaatataggacatgcactttctaataaaaataaaatataattgttgttcattgtcttttacataaaagtttattaaagcatatattataactttccataaataggtgtttaataataatgatcttttcacataaaacctattcagacttatatcttaatttgtcataagtgaaggtttaacaatgatttataatacgttctataatgcttacaaaattaataatgtatttcataacacattaactttagatatataacatatatcttctctaaaaggttaaaaaggatttatatcgttataacgtgctttatcgtcttataaacccttaatcttagacatatcacgtatgacgttttataaaggattaatttggtgaatctaatatttgtatattgtaattaagacatttataagctcatgtcttattttataaagtatagatcacatgtttgaaaagaatacctttttttattataacccttgcgtgtaatgtttttgaaaagcgaacgctcttttcgttaggctttcttttagctttacgtatggtgaatgttgtatgttattgaatggtgtttgctcttcttgtttgtttgtgtgatattcagtggttgatctagtagttaagaatcaagatctattccgatccgtggaagaacctcaagttttcaataagcaaggcaagtggacttctccctctacatactctgtttgatcccaaataatacatttaataaagtttattcttttggatatatatgcataatttgacgggttacctatttagataacctttccaaccttattccttgatcaaacctgggaattataatttaatcaagtagctatgctattgctacaacttaactttatgcagtcactccccgcttatgatattaatgttccaaattgtaagattactttgttgttgttaacccgatggttaaacaagattattgcatattaattggaacatggagtgaccacccgggaaaacagtgctaccatgagaactatcatggctctggtcttggctaaataactagggaagtcttatgttgggtgctggtcgtggtcgacaggaacgggggcatctggcaagctcttatagttccggctcagccagattggatacgggcatagttcccaaagctttaccctgtagtctggactataagttggttacggtaggtgtgccttatgcagtttgaccatttccagcatttgcgtaatgaggactctagggagaagcctcgtagtgagaccctggccattcacctcggaagtgaatacgggtctagctaacccgggctagaagggaatcacgactcatgggtaaagatgcgccacctctgcagagtgtaaaactgatatatcagccgtgctcacggttatgagcagcctggactcctcacatgataattgaacttgaagatggaaataaatcgagatccgatgatctatcaatggtttgcttaagtggtttcacttaagtgttttttatatactcttatacctttgtttaatgggatacttgggatccacacttattagtaagataggtgttgttaataaaatgttgaccaactaaaatgcttactgctcaacctcagcctcaccttgttagacttgcattagtttttcccccacttgctgagccccgaccataagtgagctcacccttgcttaattttgatcagaagtttgcagatgaagatatgatgctgaactccatggatgctagtctagtgatacccccggtcatcttcctgtggatggatgtccatgttcgctgtactttgatgaataaaggttaagacattatgtctgttcgaagtgtaatatgttaatataatcgttatttacgctcttatgcattgttcttttgatatattacacttgtgacatcaacatatgtgtggaaatagatcctggcacacatatgctatgcacccggctctgccttcagaaacgggtgtgacattatgacaaggttaattggaattttctccataatatgatgataaaaaaaggctttggagatatgtggagtgattgggttttgaagaccgtgaaaggtggtaaagttgctatccgaactaatgatgtggttgggccctactttaaaactcataaaggtgttcgccaaggtgatcctttctcccctctcctttttaatgtggctactgatggtcttgcttgtctgattcaaaaagccaaggatgaaggtattatcaaaggtcttattcctcatattgtccctggtggctgctgttgtcttcaatatgcagatgacaccatttttctgtttcaagatgatttggaaaatgctagaaatttgaagtttattctctgtatctttgaacagatttctggccttaaaattaattttcataaaagtgaaattatctgtttgggaaacgcctgcaacagagaacatctgtatgctgacatcttcacctgtcctcccagtggtcttcctatgaaatatttaggggttcctattgataacaaaaaactgtgcaaatctctgtgggatcccatagttggaaagattgagaacaaactgggttcctggcaaggtcagttccttagtttgggaggtcggttagtcttgcttaacatcagtctcaccaacgttcccttgtatatgctttccctgtataaatgccccaaagttgtgttgaaaaaaatggatatcttcaggaaaagattattatggcagggaggtcatgatcagaaaaaataccatttggctgcttggaatttagtctgctcccccaaaaatatgggtggccttggtgttttggatttgcaaaaaatgaatgaagctttgttggctaaatggatttggagactagaaaatactaatggtttgtggcaatccattataaaaagcaaatacattaagaataaacctattatttcggtgaagaatagaccttcagattctcatttctggaaaggtattctctcggttcgagacaaatattataaatactgtaaaaaaagattggtgatggtaagagttccagtttttggaaaaatatttggtgtggtaatgtgaagttggctgacaagtaccctaatttgtttgaggttgcttatgacaaagatatcattgttcataaggttgtctcctccaactttcagttgctgactttcagaagaagacttattggtgttttaggtgaggcctatagtgaccttatggatcattgcagccaggccttgctttctgaaaatgttgattcttcaaattggttgttggggtgcaaaggttattcggtaaaatccttttacaaaatgttaaaaaattccatgattgaggttcctgtgaattttatgtggaaaaccagacttccacacaagatcaaagtgttcctatggttggtcagaaataataagattttgactaaagacaatttggttaaaaggcattggcatggaaatatggattgtaacttttgtggattattagaatccatagatcacttattttttcattgccccgtggccagatttatttggagaatcatccaaattgctttcaagctgtcttctaccccaaaaacacagctgacctctttggttcctggatcgatagtttccataaatctgaaaagaaattgatcctttttggatgtggtgctgttatttggactatttggcgtactcgtaatgattgctgcttcaatgctaggctgattgatgatccatctaatgtgattttctcctgctgttattggattgatgcttggtctattcgacagacaaagaagggaaaaaggctggtggaacaaggaag

SEQ ID NO: 414 - DNA, 2256 bp, Zea mays
  Intron number 2 from transcript GRMZM2G121229_T01 (locus G RMZM2G121229) derived from phytozome v7.0 (chr-ID 6; pos 1 61712427 to 161714682)
gacaggtgagatgtttctgttgatcgcgtcgtttctggtatttgatcctaataaatttctgaattgtcctctgctgagattgagctgtagtactttgaggtactctatgacaggtagagcggcgatcttatctagagctgacttgctcctgagattgagctgtggccttgaaattgtttagtgaaacaaacaattggaaaaaaggaaaatgatctagaaagctacgagaaccattcaatcattaatacacttagggagtgtttggttgtagggactaatgtttagtccctagattttattccattttagttccaaaattgccaaatatagaaactaaaactttattttagtttctataggggtgtttggtttatagggactaaacattagtcccttcactttattccattttagttcataaattgttaaatagggaaactaaaatagagttttagtttctatatttagtaatttagggactaaaatagaataaaattgagggactaaaaattagtcctagaaaccaaacaccccctatatttagcaatttatacactaaaaaggaataaaatgaagggactaaatattagtctctagaaaccaaacacccccttagtgccaccaagagatataccaaaatttccctccttgggtatatacctcgagtgcatccactgttggatacttggatgcatacgaggatgcatgtgagcaggaaagagaaattttgagggaacctctctcctgcagtcctgctatagaagcatccaacgtcatccaatggtgacacacatggggcataactcactggaaaaaaaaacttttgcggttgttctctgttgcttatcttgatcaagcgtgacattattaatatccattccatagaaaatgtgaggtgttaatctgccgcagtttcatattacagcaagtgctcccttgtaaattaagcattgatgtagaattgctgagttgttttagtccttgaaagttgtcgtaacatgcagacaaccgtctcaaaatggagggaaaaaacatgtacacgcattattgcgatgcttctataaacttgttgtacttgtattagtcaaaggtgacttgtggttttccacttggtttcagggccgtccttgtgggcgtgcgaaccgtgcgggcccccccaaaattatagggccccaaaatctataataatccatatagatattatagataaaaatattattttgcataaaatatttgttaaaatataccctagaattgcaaaaacgttgaaatcaatatgttcttattgttaatcaaactatttcttcgcttgtaagaagatttaaatggtatcaaggttatcaaaaaatatttggtttcttatttatctccagtgcattgcagtcactagataaaaagtgtttgaaatcttgttgtcaccatcttaagatgcaactgaaagaggcagacaataggatttaatgcaagtgaccaatccgtggagttgagttttctttaagattttattctaaaaaaaactgccttgtgacattctaaattttgtaaagtggaagggcaaaaataagtaaaaatcgtgagtaagggtaaaaatgagaaaagccacaggactaaggatattattttaaatactactatattttttgctaccatttgcgcagggcctctcaacttgacgggacacccctgcttggtttgatctgattctttacagctatttgtattcttctaaataaaattttgtatgcatggaattcattatacttggctcatcattcggcaccagaattaactcttgatgctaaaatcatttgttacctttggcatatatgggttaaaaactccagaagttttagctcgtgatcggcttctaggctcgttttctgtaagttgttcttattggcttctttaaatatcacgttcttttgggatcaattagctctttggcttctattgtcaactccatgccatgaagcttattgaatgaaaactgaactgtacatgcacatgtcatgagctgtgatacctctcagggaatatggccatattatgaacttggctgtctgtgctctggatctacatccgagtctgggtgttatctggtgcattagttttctgaaacattagaaattgcaatacccaaaaaaaaacatcgtagcatcattgggaaaaaaatatcttttacactgctactaaacactgttttcctttttttatgctccaggtcaagcctgtggtaaacagagtgaagttcacctt

SEQ ID NO: 415 - DNA, 11249 bp, Zea mays
  Intron number 2 from transcript GRMZM2G159155_T01 (locus G RMZM2G159155) derived from phytozome v7.0 (chr-ID 5; pos 1 14759459 to 114770707 reverse strand)
acctgaagaggcggcctgctgcggagaaagagaaggtgagggagtacaattcttctcgcacctattggaattggatagcttctgagctacgctgagctttaagctactcataaaccacgcatttggaaaaatttggtgaagtacattgcttatgtaatttgaacctggaaattaactaaaactctgaccaattaaaatagcttcacgttaccagattaagttttcttatattggttggacccacatgaacttgttgacctgtaacattttttatgtatatatattatataaaaccccttatgctccgtttggatgttgatattggagggtatataattgaattgggttcaataccaaatcagccatggtattgaaatgagatgtaattccaattctgttgtttggatgtcactatattggagtctagaattgtgtggtctaattccacacaatacagaggggtgacgctctgtattgggaaagggagttttcagttatagtctaattccaggaattgactttctaatttccaaatctcaattcaatgtgcaatcaaacaatagaatttaggaaagctgattccaattctcaattccgtgcactaatatgtacatccaaacagggtattagactacagataaatatcctagtttgtaaccagcataagtgcagttagagtgataattctgttcagtttgttttcaattataagccaattctacttagtggtttactggggtttatggcccccatagagatgaggataaaccagcctttctttaagaactatcatatgtcagaaatttatgtactgtcccttggatggtcgcaggagatttcaacatgattgtttgtgcggcagaaaaaaataatgcaaatctgaatagggctctcatgggtagattagaagatggattaatgaccattcccttaaagagctgctcctagttggaagaaaatttacatggtctaatcaaagagatgaccctaccttagttaagcttgacagggttctacgcactgctgattgggaggctctattccccaattgtcttcttaagagaggcttccaatatgtctgaccattgacctttaattctgaatcttagtttgggttttaaagggaagaggagattctccagatacaagattttcaggaagtggttgaggattcttggaattccaatctttctgttatttatcccattgaaaggatattctgcaaattcaagagacttgctaagagcctttaatcttggagccaaaaacgtgtggacaatgtttcatatcaacttgctttggccaaaaagattttacacttgctggaaattgcacaggactgtagatcccttgggcctgcggaagaatggctaaggaaaagaaccaaacttttgtgtctaaagctctcttccttggaaagaaccatcgccagattgagatctagaatcagatttgttaaagcaggtgatgcaaatacttctttctttcaagctcatgctagatttaggaaaaagaaaaactttattcattctttggtgatggagggtcagtttctcacttcccaggaagacaagcaacatgctatgtttcaattctataataacctgattggttcgacgaatgcaagggatttcagcctggatcttaccggttttcataaaggcaattatgacctctctactcgtgatattcctataacattggaggaaatcaaatctgctattaattgccttccaaatgatagatctcctgggcctgatgggtttacaggacgatttacaaatgttgttggaacataattaaatgggacctttgagctgctgtcctggatattcagcagggaaattctggaaggttgtggaggctaaattgtgaatttagcctatcttacactcattcctaagaagactgaggcatcttaccctggggactttaggtctgtcagccttatccatagcttagctaagctactaacaaaaattcttgctaataggttggctcctgaattggataagctggtcagcacaagccaaagtgctttcattaagaatctttgtattcaggataattttctcatggttaatcaaactgtcaaattgttacaaaagaagaacatctcatccctgttcttgaaattggacattaagaaggctttctattctgttagttgggcttggacagatttggtgtaatctggttttgaacttgctcacatcatcatcgactcaaattttggtgaatggagaaccaggtctgcctataagacataagaaagggttgcagcagggtgatcctctatctcctctacctctattgttcattctggtcatggatgtgcttaatagcctttttcttaaagctgatgagtgtgggctgctgcattcctggtagaaatattaatcagagggtctctctttttgctgatgatgtggctctctttgtccaaccagatattatggaattggagacagtcagggagatattgatgagttttggggttgcctctggcctccaaactaatttgcaaaagagtttcttcttcccaattcggtatgatgaagaaatggtggagttggctgtccaaacattggggtgtgccactaaaagttttcctacaacttattttggtcttccttttgagtaataaaagacttaatgctggagatcttctactatggattcagaagattgctgataggcttccaggttggaaagctaatctcttaaacctttctagagaataactttgattgttattttcactagcggaagaagcggggctgctggcatctgtcaagaacaaccaggctccatcggatttccatgtacgtggatgatgtggctttgttcctgcattcctctacatccgacattgagatcactctggatattcttcatttatttggtgaagcttcaggtctacataatagtgaaaataagtctaatgtttaccctatctagtgctcagatgaggacattttaactcgaccagcaaggggtaagacaaccccagaatattgtattaagaagaactcacacaggtcgagaaaacccctgaaccccctgccccacccatacacagcggcattgaagcccatgtgagagcgaccggggccaagccttagacctgtgctttggtgtgggacagacgaggggattttttaaccacagtctgaaattcgctcccatagggagtcgaacccaggacttgaggagtggtacccagaccgcctaaccaactcagctagaggtcctttcgcagttgaggacattttagtggtgcagaatttgctgccccgtgagctttcaactttcccttgccgctatcttggccttccgctatctattcacaagcttaccaaggatcaagtgcagtccttggtggataaaattgcagggcagcttccaaaatgggaagctgatctattgacaagggctagtagaagagttcaggtgcagcatgtcctcacatgcatgattgtctatctagccatggctattgatttcccttcttgggctttggatgccattgataagatctgaagaggttttctttggcgtggccgtaaggatgtcaaggggggggggatcactgtcttctgtcttgggaaagagtgtgtcggccccttgagctgggagggttgggtatctccagcctgcaaaagatgtgctgggcgcttcacatgaggtggatatggttgcgaaaaactgacccagggcgtccctgggcaaaccttcctattcaggtgccttataaagctcggtcctttttctccgttgaccttattttggaggttggaaatggagcaaatactttgtacagataaatggcttttgggacagaaaatcagtgatattgctcctaggcgttttgaaaccattccaaggaggtttgcaaaaagaagaacagtccaggaagccttacagaatggaaactggatttcggatatcaagggggctctttctgttggtgttctagtggattatattcagttgtgggatctgatttcaaatatagaactgcaggctgaaattgaagataaacatgtgttctgcatagctgcagatggtttgtattcagctaaagctgcgtataaggggctttttttcaggaccaaccttttttggttactataaaagggtgtggaaaacttgggctcctccaaagtgtaaattttttcctttggcttgcagctcataacaggtgttggactgcggacaggctagctaaaagaggaattgatcatccctttaaatgccctctatgtgatcaggaagctgaaactttggatcatctgttagtggcttgtgttttttcaagagatttctggttcaagctcctgagtcaagttggtctgcaaatggttgcacctcagcctggttcgccttccttcatgagttggtgggaagaagtttctgggattgttaatggactagttaagaagggactcaactctctcattgctatgggagcatggattatttggactcattagaacaatgtatttttgacggctggaccccaaatgtctctctagctcttcggctagctagggatgagagaatgatgtggaaatggctggggctaagggcctcccctatctggcggtctctattcctgaggtttagtctagaatagggggggtttggttggtagattttttgtttagatggatcttctcaggttgctgagttttcaacctccataaggaagtctctgtatcgggtctaatttagaccttctttaccttcttaatataatggggcgcaattctcctgcacttttcgagaaaaaagaataactttgattaatctgtgctctctggtataccggtctaccgtctacctgcttagtacccttaaggttcctaaatgggttattaaagccattgacaaaattagaagttccttgtggaaaggtagaaaagaagctagaggaggaaattgtcttattactaggcctattgaattgggaggtcttggaatacctaacctccttatcatgagctgggcattgcaaatgagatggttatggtttcagaacaaacactgccaaaccttggagaggcctcgatcttaatatttccacacaagccagagctctattttggatagctgtgaccactactataggtaatggtgtcacaactttttttggactgataagttgattaatgggtgctcaattaaagagatagcaccaattatagttggtgcagttcctacaaaattcagaaaggttaggactgtgcagagcaggctctccctgcttactcttgtgttcatgatataaaaggaaactttttccttatgtacattgagaaatacctacagttgtgggatgtattggaaaattttcatctggaagataccaatgatactcatgtatggcgattttctagtagtgggaattgcagctccaaatctgcatagagtcttttgatccttggaagagaatttggaagacatgggcagctccaaaatataaaacctttgtctggcttgccattaataacaaatgctggacaatagatagactacaaaaaagaggaatggaacatccctagtgttgtcctttgtgaccaagaggaagaaactgtgcagcacatcttaaccaattgtgtttttgcaagacagttttggcatgttatattatctacaatcaacctttgtaatgtggttccgaggagagaagatagctgtttcgtggactggtggaggaaagcctctcataaagtccccaaaggcaaaagaaaggattttaatagtttcatcatccttggagcttggagtacttggaagcatagaattaaatgtgtttttgatggagcgaggccttgcctttattccctagaagagggattcagagatgagctgcaactttggattctagcagcagccaagtgtcactaaccttgattaggcgagatgattaccccctcgggtactgtagcatatatataggcagacaagaatatatgggctttatgggccttaacaccccctgtcaaactcaaggcggaagtggaggatttgaagcattgagtttgattagatgaaactgttgttgtgcctagtttgtgctttggtgaagaaatctgcaagctgtaattccgagggcacatattgaagatcaatggtcttctgatgacaatgagatctagtgaatgatacatcaacaccaatgtgttttgtgagttcacgcttcattggatcatgacaaatttgtatagctccagtgttgtcacagtgaagaagcgtaggcgagtcacaagaaacgcctagatcagccaagagccaacgaatccagataatctcagcagcagtagtagccagggctcgaagttctgcttcagtactagatctagatacaacagcttgcttcttggatttccaagcaacaggggatgatccaagaagaatacagtaaccagtgatggagcgacgatccgtaggatcactggcccaggtagcatcagagtaagcatgaagctgaagtgggggatttgagtcataaaataaacattgtgtttttgtccctcgtaaatatctaagcacacgaagtaagtgcccataatgaactgatgtaggagcagagacaaactaactcaaaatgtgaaccgcatgagcaatatctggcctggtgatagtaaggtaaactaagctgccaataaggtgtctatatcgagatggatcctccaaaggtgccccatcagtcggacgaagagataagtgaagatccataggcgtggcaacagtgcaagtatcactaagaccagaacgatcaagaaggtcttgtatgtacttggcctgagaaagataaataccattttgagtctgcaaaacctcaatgcccaagaaataactgagtgcccccaagtcagacattttgaaattccttactcagatactccttcacatgagcaatatggtctggatcatcgcctgtaatcaatatgtcatcaacatatagtaatagcaacgtgcgtcctcgtgaagaaacatgaatgaacaatgcaggatcatgatcactagaatagaaaccacaagccttgatgacaaacaaatctctcaaaccaagcacgaggagcttgtttaagaccatacaaggctcgatggagacgacatacatgctctgatggaacctctatcccaggaggtgggtgcatatagacttcctcatgtaggtcaccatgaagaaaaacatttttgacatccatctgagagatagtccaagaagatgaggctgcaacaacaagtaaagctcggacagtagtcagatgggccacatgtgcaaaagtctcatcatagtcaataccctgttgttgaaaacctctggccacaagacgagctttatatcgctcaatagacccatcagatttggttttaaccttgaagacccatttgcacatgataggtacaacaccatcaggtaacggaacaacatcccatgtacatgtgcgatgaagggcattcaattcatcagtcatagcaagttgccacttaggtataccagaagcctctttataagatgatggttcaacaatgactgcaccagcacggggaaacccataacgttctggagctgcaatagtgcccacgatcacgaagatgacacccctgattaaaaacaacatgagatgagagtcatcattgttagtacaagtatcagcaacatgatcatcatcaagactggccgtgggagtagagcgaggacgacgaatgcaagtctgagtgacaggtggtttggaagagtaagactgagatggtgtggaagtggaaggtggtgtgatgagaataagaacatctggggtagaaacagtaggtggtgatactgatgaagtttcagaaatgggaggaaagctcataaaggaggtagactctgtggaataaaaagaagaatgagtggaagagttgtaaaagaaggctcggttttcattaaagctcacatctcgagaaatacgcatgcgacgagaagatgaatcataacactgatagcctttatgttcagggctgtatccaagaaaaacacactcaacagattgagcagtcaatttagtacgttcacgaggtgataataatacataacacgtacatccaaaaactcgaaggtggtcatatcgtggatgagttccgaaaagaacttcaccaggtgttttgccagagagtttggatgacagttgtcaattgatgaggtaaaccgcaatagaaactgcttcaccccaaaaatgtgaagggacaaaagaagatatcaacaaagtgcgagcaatttctataatgtgacagtgtttgcgttcagccacaccgttccgtgcatgagcactagggcaagaaagctgagcaagagtaccctctaaagtcaaaaactggcggaaattatcagataaatattcaccaccagaatcagaacgaaaggttttaatatgagtggaaaattgagtgtgaatcatgcgagcaaaggttttataaatagaaatcagctcagagcggcgtttcatgaaataaatccaagtgtagcgagaatgatcatcaataaaaatgacatagtatctatatccaccttttgacacaaaaggtgcaaaaaatatcagagtgaaccaaatcaaagagttcaacataatgagaatcactagtaaaatatggaagttgtatttgttttccaagatgacaacccttacaacgaaaatcagactcaaccgaagtatgacctaagcaacctgactttattagagtagacaatctagatccacacaaatgacctagacgatgatgccactgggcaaaagacgcaacagaagcaagggtagctgaaagcacatgtgctggagatgtagccaaggaaggaagccgcaaagagtccaagatgtagaggcgaggagcagctctacggcgatggccagtcccaatcacttcccctgtgcgaaggtcctgtacaaaacaagatgagtcattaaatccgacaaagcaattatgatctgtaatttgacctactgaaagaaggtccatagatagctcaggaacaaagaaaatattaggtactgtaaagtgtggatcacaaagagaacccttatgagtaatgtggcatacagtaccatcagctgtctgcactgaagcaccatctgtgacaggtgtagtagaagccaactttgactgatcagatgtgacatgaaaggagcctcctgaatcaagtacccaggccgactctgaagtacaagcggacgaagtggcagcaacagcaactgagcctctagtagatggtcctggatcacgaccacgagcagcacgtcgtacacggaaatcagtcaacttcttagggaacttgacaaagcaaagctcagatcgatgattggtcttgccacaatgatcacaaggtttaaaaacactcttaggtttctgggcagcagccaacacactgtgagtattactaccagtagaagacagaaattaagacgagtctcttcagcatgtaagttagacaacgccttagccattgtgagagtgtcagaaccctaaagtaaacgagcacgaagagaatcaaactcggcccgaacgcccataacaaatctgtaagtgaagaacttcttaataaacttatgagccggacacggatcagcaatacaagcaggcaccatagatgtcaaagcactcatcaggcgatcaaaggctgagtagtactcatcaatactcatatcattttgctcaataacatgtgtctgctgcatgagagtgtaatagagcaccactgtcctgaacaaaacgctccttcaaatgagaccagatggttttagcagttttaaatttagacaaactcataatcatagacggtttgacgttgttcaccatagcagccatcactttaccatcattaagctgccatgttttgatatcagcagcattgcgacgatcatccgcaagaacgggtgccgcatcagtcaaatgaaagagtaatccatgtcccctgagtgcagtctcaacacagaaagcccactccggataattttggccatcaagagtgatattgaccacaatagcatttgtcgccatattgaattcaatgaaaatcagggagaacaggagaccggaaaccaaacaaaccagaggaaccgcagctgacagcagcccgagttggacgagttgacggaggtcctgggcgcggaagccgagttggactgcggctgctgccttgatgactctgcccgcaatggcagccacctgcgcaaaagcagggacggcgcagatggcgacaaggcagggcgcagcagacggcggcgcagatccggatccgcagcccttgcggcgtgcagcaggcggacgacggctaggcgcagcaggcggacgacgccaaaggtgcggacgatggacgacgcaggcacaaaagcctagatccgcccgcggggatggaggaaaccgcgacggcgacagaggcgggaaggggaaaagccgcggcggccggatctgcgcgcacgacagcctcgatgacggccgcggatctggacgggggcggcgcagatgagctcgcagccgcgacggcaggcgggaggaaggtggagggccgcgatggcggcggaggaagaccgcgacgacagccggagaaaagccgcgacggcggtcaggaggagacaatggcggctaaaaaatctaagaaaccctaatcgtgacctgctctgttaccatgtcactaaccttgattaggcgagatgattaccccctcgggtactgtagcatatatgtaggcggacaagaatatatgggctttatgggccttaacaccaagaacattagaaccctgttcgatccaggctaattgaggagaattttggctggtgtgtgtttgtgtgtttcctggattgttgtttgggtttgtggggatggtgtccttgggtgattgtgtgtgtgttcaggatttgttgtgggtgcgtttgttttgggcctagtgccttctccacttttaatataatgatatgcagctctcctgcgtattcgagaaaaaaaagcttatatagaactactagctttgtattcagcattcattcattgtttctggtgaagattttggattggatttgtgatatacttgtgaaatgttacatttgttacaccatagcaaagcaattcaacttgatgtgaacttctcatggaatgcagaagatgactactcttatctacttgtctggctgtttgattccattggagctaggggccactttagtcgatttaacaaaaccattttaatatcttatgcaggtagc

SEQ ID NO: 416 - DNA, 41352 bp, Zea mays
  Intron number 1 from transcript GRMZM2G084062_T01 (locus G RMZM2G084062) derived from phytozome v7.0 (chr-ID 2; pos 1 9602835 to 19644186)
ttggcaagggttactgggtcatcctcatctagtaagtgaggatcagttttaccatttgctttttaccatttctacatgaggcgtactatcagactgttttgtgtgaggaagttgttattagactggttattggtttgtaccagagtttatttctgcgaggatgttgttatcagacttgttatttgtttgaggaatttgttttaagacaatttctatgagaatgctgttaagtttgttaatgtcttttattgtcttctatgttgtagttggtagtcatgacaatcctaatttcgtatgatacatttatgccacacatgaaacacagtaccatagtttcacacacatttgcatacatcacatactagttgcatatgacacactaggacacatgacacactagcacacacatgacacacacttgcatagtttcacacccatcatctgacatgacaaagtatgactaagacaaacactacgacattttggttcaatgtcatcattttatttaagtaccatgcaatcagtcgacgcctatgcaacttcggagccaagacgcgcctagtgatggtggataagatcaacctgaagctgagtatatttgtttcggtctttgagttggttatacctttgattgacaaatcgttgcgctcttccattgaaccttgagtagtgtcagccaccacttcgatgttgtcaaaacttgtgttcaacaccaatggtccttcgtcctctactatcatgttgtgcaagatgatgcaagttttcattatgttcccaatgtgttcaggactccaactgtcacacccctggtgttactaccactaaaatttgagcataacatcataagcatcagcataacatgtgattgtcacacctagagtgcattcactaggcaaaaatttcaaataagttgtattgatgtgacatttcatgggtgaaattctagggtacaatacttaaccctaaactgggcttaaaagagtaaacaaagcctaaacaaaagaaaacttcaaaacttattagtaatgatcataaagtgtcaccattaatgaacttaagtgatatccaaaccctagaagtaccaaaaaccctaaacagacccctagaaaaccctagactgaaaccctagggggttatctgtaaaaaggtgcacattttggacctaagtgcaaaaatcatggaaatagggcatcttaagtcatatggttcacatatttggagatttgcaaatgaaaccataagttttgcgcttatttgcaaaaagaccacatttgtgctctaatggctaagtctgaatttcagtgaatgggctcaactttgaagccctatatcttccaaattgtgaggattttcccctatgtcaacacatcaaatttgtagagctatataaggagaacaaattttattaagtaagtaagccttagtgctacatggaaataggagaaacacagacctgaagatagtctgtcagtcaagcacaactgtgaaactggactgacagtgagctaggaccaagtgtgagggccattttgagaatgatctagtaagaatttgggagtgattgctatagcaagattgaagctggatagtagagcaacaactttgttaaagatatattagcaagttatcacatgaaaatttgagatccaagccctacaaaatggtctgtcagacgctctgatggtaaccaccatggtacagagactgaacaagattacaagttcagccccccctcaccgccggtgacctttgcgccgtgatttgcgccgtcgccgcgattcgtgttctctggtgaggggataatcacggcggagtaaagatcttggcaccagataggctcgggctcagtcgcagatgagtttcaccgtacccacttgctcgtcgatcgaccgagatagacctcgctgccgttggccacttaccgttgtgcgccacgtgctcaagcgttgtacaacgtcatagtgaatcgcgtcttgcatgcccggtgatcgccagagagccgccacggtgaaagccactaagcttgcgcgccagtaaccttctttctctccagctgccagcatgtcttcgcgaaattggatgccaccgctgagggagcctctaaattgccgcccccgcctgctctgctaagtaattgtgcacccagtaaaccaaccctcacctcagatcgtccaccagagctccccaatttgggatttcccccaaatcaaccaagaacaccgtgcggtttgacctcaccgtggccaaagtgtttcaggtccgttcatgtccactgtcctcttgtttcagcacccttacttgctcctgatactcgttgacccatccgatttagctaggcggtcctagatcatcgggaacgcgtttactcatccgatggtccgcgctgtttctgtggaccggatgatttggagctccgttagtaaaattgagtgaggggaatggttaggaggggtccaatttggtgtccaccgtgcgagagcaccggtcgttgcaggatccggtcggtataagctcgttggagctcggttctccgccgctccccgtcgtggacttcgggctgtgaaggattagaaacgcgggggtgttcttacaaatgtcagtgagacatgagaatagtgccatgacttttctttcagttattcaaactgtgagggacatttctgcaaaaccagcagcgcaggcgcacgcggacgcgtttccgcctgtagatgggccgacttaggccagttccggtccagagttgttcatgctttttcctttttctttttctatcagggtttaagaatttctagaaaattgtagaaaaatgctaaaaataccagaccaattttgctaggctcctaatttctatagtatttaataaaaatagtttcatgatttttagttccaatagggaattttgggacatttaaaatagccaaaatccatacttatggaattttagagaataatttataatcccaaaattcaccaaactttttaaacaagctttaagtaatatttagaagccttgggtaaagtttggcatgatttgaactatgtttggtacttagaacccaaaaccctagtcccctgccctatgagcttcactatagactccaaaaaccctagtttcccggagatccgtgaagaaaagttatattcaagactttagataatatacttttattatctttgcattttcatgagcattacatgagcattcataattatatatggctatatttagaaaacgaggaggaaatagaagttgaagaagcaaggactacaccaccaccaccacctgaagaacctcaggcacgaaactgcttttactttgatatctgtggagcagagcctgattcacctatcacacaaggcaagccttggtgcatttgtcacctccttgctattttaaatcctttctcacttacttgatgcattaggtgataggagttgtgtgctaaaccagttgctgcatttccttccttggatttaattacttctccttaatcccctgatttacaaaaaggtttttctgatgcttagctttgctctagaaaaacaaaatattttgttttgacaaaagataatgcttcaaagtgggtgggatgttttcaaaaataaaacttgatggtggatccatcatggccatgatgggttcaacatcggaaaagatgtacctctgccaggtaccaaactttggatttgaaatgataaagctgagaccgggtgggtgacttgcacgagaagagagtctcggtgtagtgtctccgtctgagtcgattaaggaccttgtcgatgtaggcttgctgatcgaagaccctttaactggtcacatgcctcatcatgggtaagctttgcctcgggcagactaataccagaataagataacacgtaatgggagtggagagatggcgagagtagcgtgtaccctctgtggcaagaggttggacggtggtgtatctgtgctctcggttggcgtgaacctggtctggtcttaagaacactggtggcgagttgatatatgcaagggttaagtgctacatatgtcgtgtgattggagatccttagctgagtataattgattcggatcgccgtaacttcacggacatgaagacctggccactgccctacatgtagcattccagtgaataagaagggttgttaagaaattggctagtataggtcaagtgcttgaactagggtagaaagaactctagagctcaggtaatgacttaacttgctaataaaactggacttttaaggatccactattagtaagcatttctgcaaacagagtctttgattattgataaaccataccttgactcctaaaggccagcatatacttgagagtcttttattttgacgggtaagaattgcgaaagtacatttcatactcagggctttgtcccatgttgttttaggtgaagaagcagcaaacttttgttgcttctgttccaaggtggtaccgaaagaagaaaatcaagactgaagctgcgggaggaaaggtcctccgttaagaaaaaaattactatttatcgggaggggtttttgcctcccaggttatgtaataatattactcagtactcttatatttcgctctggtctgtaataatacaactctttcttactttaatataaggtaagttattgtaattgcttccgcattttcgtacctccgatgtattgtaatgtctgcgtgacgggtgaaacgctcttgggcaaggtaaggaattcagataccgaacttgtcaagtgatcaggtgcacctgcagggttgtctaaggtccgttggacaaggacaactgtaggtgggcctaataacttgggaggttctgtcacagctggtatcggagcgaagcccatctctgcagatgttatgagacattttcaaaaataattttcaaggacttacctcaggaaatttatttccttcttatctaaccaccttctgaagtacttattttaaagaccagatagtagagtgcaatgtatagaagtttgtgaatcaactaaggttgattctgtaattatgcatgcatcatactaaaaactatactaataagattttccccctcatggagatatgccaccgcgcacaatgaaaaccacgcgcaagtctaccggaccaattggcgtgccttgccatcaactagctccaaggcatgaggacagtagcagtggtagcaatgtcctatcggagatctggaagctcaagtacaacagcttaccaacggagctccgtcacaggaacaatgtatgggtcgaggatggtcagcgaataaacgagttaagaactgacatccgccacttgcaagaccaacttgttgaacgagatttagcgctcgattgggctgttaactcacgttcacttgcttgggccaaggaagccaaagctcgagcccatgtggaggagcttagcacagccgtggacaagttgcaggtgtactgtaatacactacatgaggaagttcatgtattgtattcacgactgcatcctgacgtacctgcggatcctgtcggaatggggagccggaccttctagagcagcgggtgaagcctttggtggggaactggaccatttcaggcccccctccttcaatgaacctagctgatgaatggactcctacacccgacagtgaagctaccaaaagtgataagaagctagagtagtgtagtatagaagtagtattaatgtataataggtaatgtggtcctgttgtaaattcgagtctgtatcattaccttttaagtaatgtaaaatggatggtttgctttggcatattatattttccaaatgttctttgcctcagatgtcgtccaggactcgtggacaggatggtgcgggaacctcccgtgggagggagaccactcctaacccgtaaccagtacccccaaccttggctgaggctatcgctgccttagtcaatgcaacagccgacaacagccgctttctgcgggaaatggcgggacagcaagtgcaacagcaaggcgggagagcgtatccgcaaggaccccacgaaacttcatatatcgatttctcagaaacgcgtcccccgctatttgtcaaggctgaagactctctcgaagcagatgaatggatctgggttatcgaacaaaagtttgggcttcttcgatgcacggagactcaaaagcccttatttgtggcacagcagttgcgaggccctgccagcacttggttgggaaattatgtggctatccagcctgctggtcatcaaattacctgggacgaattcaaactggcttttcaggagcactatattcctgaaggagtgctccatatgaaacaggaagaatttatgaagctcaaacaaggtggagatactgtcactcagtatctcaacaagttcaaccacttgtcccagtatgccatcgatcaggtcaacactgatctgaagaagagaaattgttttatgagaggcctcaatgaccggctgcagcgaaaaatggccacctgcctcgatctatcttatagcatggctgtcagcatggcactagcagtcgaagccaaatatgcaggcccgggaaaatcgaagggctatggaggcgataggcccaaccgggggcttgagaagagacaaaggttggtgattcgaccttttaatcagaatcgttcttcaccacgtccaccctcctaccctttcaaacaacctgtctttatccgtcctgccactgcccccacctcaacaaatcagccgagtgcccctggtactcgtttccccgccctcccaagctcctcaacaggttgttttaattgtggaaagtctggacattttatcaaggactgtccatacccgaagtagaataaatcaaataatccgtagagttcagggagttccgctcagggcaggggaaatgcggcgaataatgcgatgggcaaaaatatgaagaaaaatgggcggatttattatacgcaagtggccatgacaccggaaggagaaccggttatgatgggtacgtttctcgtggccaatcaccctgcagttattcttttttattctggcgcttcacatacattcataagcaagaagtttgtggagcaacattgcattccatacaatgaatcaagggaagggtttataattcattcaccttggggacaaatattcactaaagaagtggctttccatgtgcccgtaacattggctgaacgggactttcccacaaacatgattattttaaaaggccaagatatagatgtaattctaggcatgaattggttagcccaacataaagctattctcaacactgatctaagaaccatcaggttgagttatggccaagaagaggttctcttgtccatccctgtagctattccagctaaaccaattggcagagtatatgaagccatcataccggagatccaagatattgcggtagtatgtgaattcccggacgtctttccggaagatctgcctggattgcctccagaaagagatgtagaatttgtgattgagttgaagcccggtacgactcctgtttctagaaggtcgtaccgaatgcctccgaatgaattggcagaactcaagacccaattacaagatctactagaaaagggattcatccgaccaagctcatcaccttggggttgtccatccatctttgttaagaagaaggaccaaacacttcggatgtacgtggattatagaccccttaatgtggtcacaattaagaataagtaccctcttccccagattgacatcctatttgatcaacttaccagagctcgggtattctccaaaattgacctcaggtcgggttaccatcagatccgtatccgacccaaatatatacccaagaccgcatttactatgcggtatagattatttgaatatctggttatgtctttcggactaacaaatgctcctgcccacttcacatatcttatgaactcggtattcatgcccgagctggataaattcgtggtggtattcattgatgatatcttgatatattccaagaatgaagaggagcatgctcggcatttgcggatcgtattaacgctcttaaaggagcaccaattatatgctaagttcagtaagtgcgtgttctggctggaggagatccaatttttgggacacgtattgtctgctaacgagattgcggtggatcccaacaaagtcaaggatattttggagtggaaacccccaaccactgtacatcaagtccgaagtttccttggactagctggttattaccgccgatttattccagattttttcaagcttgtgaaaccaatcacaagtttattgaagaatgatactaaatttaattggtcttcaagacgtagtgaagcttttgagcagctgaaagtattattgaccactgctccggtattagctcaaccagacattgagaagcgctttgatgtgtattgtgacgcataaggcagtggtctgggctgcgttctaatgcaagagggccgagtgatagcctacgcttcaaggcagttgcgccggcatgaagaacattatccaactcatgacctagaattggttgttgtggttcatgccctaaaaatatggcatcattatctgctggggaatatatgtcatatttatacagatcataaaagcttgaagtacatctttacccagttagagttgaatatgaggcagaggagatggcttgagctgattaaagattaagaataggagattcattatcacccaggcaaagttaatatagtggcagatgcgttaagtcgcaaggttttctgtcattgtcttacaatgaagacttctgacattacgttatgccaagaaatggagaagttgaacctgggaatgattcaatatggaacatcaaatcacttgaagcttgagtcagtcctcctgcaaagaataattgacgcacaaagaaatgatgagggtatgaaacacattcatgagaaaatggaggtcggtaaagccaattgcttcagaagagatgatcaaggtgttgtatggtttaacaaccacatagttgtgcctaagaatgatgagatccgccagcaaattctggatgaagcacatcttagtcgctattctattcatcccagaagcactaagatgtatcatgatctaaaacagcatttttggtggacaaagatgaagattgaaattgcacgctatgtggcgagatgtgacacttgtagacgtgtcaaagccatacatatgaagactgctggtccattgcaatctttgcctatcccaacatggaaatgggaggatataagcatggacttttttgtgggattgcccaggaccgtaaagggatatgattccatctgggttattgttgatcgacttacaaagatcgcccacttccttccagtcaggataaagtatatagtggccacatatgcagagttatacattgctcgtattcttagtttgcatggtgttccaaagaccattgtgtcggatcgtggaccgcaattcgtgtccaaattttgggaagaacttcacaaggctttggatactaagttgctccatagttcggcctatcatcctcaaaccagtgggcaaactgagagggtgaaccaaatacttgaggacatgttacgagcttatgctctagaatttccacagaaatgggatgaatgcttgccattggtggagttctcgtacaataataactatcaagagagcattaaaatggcaccctttgaagccttgtatgggcgacggtgtcgtactccgttaaactggtctgaaccaagtgaaagatatttcttcaggcctgatatggtaaaggaaacagaagaaaaggttcgacgaataattcataatttgaaagaagcccaagctcgtcagaaaagttatgtagacaagcgacggaaacccttgtactttctagttggggattatgtctacctaaaagtctcaccaatgaagggtatatcacgtttcagggtaaaagggaagcttgcaccccggtacattggtcccttccctattcttgaacaatgtggaccagtggcataccgactccagttacccgaaaccttgtctgcagtgtataatgtgttacacgtgtctcaattgaagaagtgtcttcgggttctagatcgaactgttgaagtaaaggatgttgccttagaactagaattgacatattcagaacatcctattcgagtcttggatcaaaaggacagaattacacgaaggagaactctcaagttttacaagatacagtggaaccaacatacaaaagatgaagctacttgggaaactcaagactttttagaaaagaatttcccaagctttttggcttcgtgtaaattgtaaaagtatgtacacttgttgtaatagaagaatgaaccccataccacccctgccttgtaccaaaaaataaggaaataaaaatgtgtcgcgtttccttttccattacttgccctcggacttttaatctcgggacgagattcttttatggggggaaggatgtaacacccatggtattactaccactaaaatttgagcataacatcataagcatcagcataacatgtgattgtcacacctagagtgcattcactaggcaaaaatttcaaataagttgtattgatgtgacatttcatgggtgaaattctagggtacaatacttaaccctgaactgggcttaaaagagtaaacaaagcctaaacaaaagaaaacttcaaaacttattagtaatgatcataaaatgtaaccattaatgaacttaagtgatatccaaaccctagaagtaccaaaaaccctaaatagacccctggaaaaccctagcctgaaaccctagggggttatctgtaaaaaggtgcacattttggacctaagtgcaaaaatcatggaaatatggcatcttaagtcatatggttcacatatttggagatttgcaaatgaaaccataagttttgggcttatttgcaaaaagaccacatttgtgctccaatggctaagtctgaatttcagtgaatgggctcaactttgaagccctatatcttccaaattgtgaggattttgccctatgtcaacacatcaaatttgtagagctatataaggagaacaaattttattaagtaagtaagccttagtgctacatggaaataggagaaacatagacctgaagatagtctatcaatcaagcacaactctaaaactggactgacagtgagctaggaccaagtgtgagggctattttgagcatgatctagtaagaatttgggagtgattgctatagcaagattgaagctagatagtagaacaacaactttgttaaatatagattagcaagttatcacatgaaaatttgatatccaagccctacaaaatggtctgtcagacgctctgatggtaaccaccatggtacagagactgaacaagattacaagttcagcccccctcgccgctggtgacctttgcgccgtgatttgcgccgtcgccgcgattcgtgttctctggtgaggggataatcacggcggagtaaagatcttggcaccagataggctcgggcttagtcgcggatgagtttcaccgtacccacttgctcgtcgatcggccaagatagacctcaccgtcgttggccacttaccgctatgcgccacgtgctcaagcgttgtaccacgtcgcagtgaatcgtgtcttgcatgcccggtgatcgccgaagagccgccacggtgaaagccactaagcttgcgcgccagtaaccttctttctctccggccgccagcgcgtcttcacgaaattggacaccaccgctgagggagcctataaattgccgcccccgcctgctccgctaagtaattgtgcacccagtaaaccaaccctcacctcagatcatccaccagagctccccaatttgggatttcccccaaatcaaccaagaacaccgtgcggtttgacctcgccatggccaaagtgtatcaggtccgttcatgtccattgtcctcttgtttcagcacccttacttgctcctgatactcgctgacccatccgatttagctaggcggtcctagatcatcgggaacgtgtttactcattcgatggtccacgctatctctgtggaccggatgatttggagcctcgttagtaaaattgagtgaggggaaataattaggaggggtccaatttgatgtccactgcgcgagagaaacggtcgttgcaggatccggccggtataagctcgtcggagctcggttctccgccgctccccgtcgtggacttcgggctgtgaaggattagaaacgcggggtgttcttgcaaatgtcagtgagacatgagaatagtgccatgacttttctttcagttattcaaaccgtgagggacatttctgcaaaaccagcagcgtaggcgcacacggacgcgtttccgcttgtagatgggccgacttgggccaattccggtccagagttgttcatgctttttcatttttccttttctgtcaaggtataagaatttctagaaaattgtagaaaaatgctaaaaatactagaccaatttttctaggctcctaattttctatagtatttaataaaaatagtttcatggtttttagttccaatagggaattttgggacttttaaaatagcccaaaatccatactctggaattttagagagtaatttataatcccaaaattcaccaaacttttttaaacaagctttaagtaatatttagaagtcttgggtaaagtttggcatgatttgaactatgtttggtacttagaacccagaaccctagtcccctgccctatgagcttcactatagactccaaaaaccctagtttcccagagatccgtgaatgaaagttatattcaagactttagataatatacttttattatctttgcatttttcatgagcattcataattatatatggctatatttagaaaatgaggaggaaatagaagttgaagaagcgaggactacaccaccaccaccaccacctgaagaacctcaggcaggaaactgcttttactttgatatctgtggagcagagcctgattcacctatcacacaaggcaagcctcggtgcatttgccacctccttgctattttaaatcctttctcacttacttgatgcattaggtgataggagttgtgtgctaaaccagttgctgcatttccttccttggatttgattacttctccttaatcccctgatttacaaaaagggttttctgatgcttagctttgctctagaaaaacaaaatattttgttttgacaaaagataatgcttcaaagtgggtgggatgttttcaaaaataaaacttgatggtggatccatcatggccatgatgggttcaacatcgaaaaagatgtacctctgccaggtaccaaactttgggtttgaaatgataaagctgagaccgggcgggtgacttgcacgagaagagagtctcagtgtagtgtctctgtctgagtcgattaaggaccttgtcgatgtaggcttgctgatcgaagaccctttaactggtcacatgcctcatcatgggtaagctttgcctcgggcagactaataccagaataagataacacgcaatgggagtggagagatggcgagagtagcgtgtaccctccgtggcaagaggctggacggtggtgtatctgtgctctcggttagcgtgaacctgatctggtcttaagaaccccggtggcgagttgacatatgcaagggttaagtgctacatatgtcatgtgattggagatccgcagctgagtataatcgattcgggtcgccgtaacttcgcgaacatgaagacttggtcactgccctacacgtagcattccagtgaataagaagggttgttaagaaattggctagtataggtcaagtgcttgaactagggtagaaagaactctagaactcaggtaatgacttaacttgctaataaaactggacttttaaggatccactattagtaagcatttctgcaaacagagtctttgattattgataaaccataccttgactcctaaaggccagcatatccttgagagtcttttattttgacgggtaacacttgcgaaagtacatttcgtactgggctttgtcccatgttgttttaggtgaagaagcagcaaacttttgttgcttctgttccaaggtggtatcgaaagaagaaaatcaagactgaagctgcgggaggaaaggtcctccgttaagaaaaacttttactgtttatcgggagtggtttttgcctcccaggttatgtaataattttactcaacactcttatatttcgctctagtatgtaataatacaactctttcttactttaatataaggtaagttattgtaattgcttccacattttcatacctccgatgtattgtaatgtctacgtgacgggtgaaacgctcttgggcaaggtaagaaattcagataccgcacttgtcaagtgatcaggtgcacctgcagggttgtctgaggttcgttggacaaggacaactgtaggtgggcctaataacttgggaggttctgtcacaccaaccataagtagaggcacagaccacacccatcgctttcggagcacaccaaaagctcgttcaatatttttctagctgactcctgaattgcggtaaagtgttgtgttctaacatcgtagggattacggattgtctttacaaatgctgaccaatctgggtaaatcctgtctgctaggtaatatcccatattgtaagtgtgaccattaactgagaatgaaacaggtggtgtgtcaccgctgagatgtctttcgaaagggtttgaacggtggagaacgttgatgtcgttgcagctacctggcattccaaaatatgcatgccatatccaaaggtcatacgtcacaactgcttccaagatcatggatggatgtttaccgcgacttgtaaacattcccttccatgcatttgggcagttacaccactcccaatgcatgcaatcaacactaccaagcataccaggtgtcggcgtttcgagacaggggggtccctaagccgacgagtgagtgtgctgcgtgccccagcccagatgggtcgagcgcgtgggcgagcgcgaaggggggagaggcgaggtggccggagccgagcgtgagagaggtggaagtcccgcggccttcgtgttcgtcccgcgcccaggtcgggtgcgcttgcagtaggggggttacaagcgtccacgcgggtgagggaagcgagcggccctaagagagcgcctgtcccgtcctcggtcccgtgcggccaaccttctctaagaaggccctggtcctcccttttatagtcgtaaggagaggatccaggtgtacaatggggggtgtagcagagtgctacgtgtctagcggagagagagctagcgccctaggtacatgccaatgtggcagccggagaggtcttggcactttgctggcgtgatgtcgtggctgtcggaggtgcgacggagcctggcggagggacagctgttagagcggtcgagtccttgctgacgtcgccctgcttccgtaagagagctgggggccgccgtcgtcacagagcttgtggagtgccatcattgcccatccggcggagctggccggatgggacgttggtcttgttctccgtaacccgagtcgattcggggtaggacgatgatggcgcttcctgttgacgtggcgggcctgtgccctaggcagggtgacgtgggggctcctccgaagccgaggttgagtctgtcttctgttgccgaggccgagtccgagccatggggtcgggcgaggcggaggtcgtttggccgaggccagggtggagtccgagccctggggtcaagcgaggcggagtttcgtcgtcttccgggtcttagcccgagtccgagccctggggtcgggcggagcggagttcgccgtcttccgggtcttagcccgagtccgagccctggggtcgggcggagcggagttcgccgtcttccgggtcttagcccgagtccgagccctggggtcgggcggagcggagttcgccgtcttccgggtcttagcccgagtccgagccctggggtcgggcggagcggagttcgccgtcttccgggtcttagcccgagtccgagccctgggggtcgggcggagcggagttcgccgtggcgccttcggcaaggcctgactgcctgtcagattcactctgtcgagtggcaccgtagtcggagtggcgcaggcggcgctgtccttctgtcagactggtcagtggagcggtggagtgacggcggtcacttcggctctgccgggggggcgcgtgtcaggataaaggtgtcaggccacctttgcgttaaatgctcctgcaacttggtcagtcggtgtggcgatttagtcagggttgcttctgagcgaagccaaggcctcgggcgagccggtgatgtgtccgccgtaaaaaggggggcctcgggcgagacggaagtctctcgaggtcggctgcccttgaccgaggctaggctcgggtgaagcgtgatcgagtcactcgtgtggactgatccctgacttaatcgtacccatcaggcctttgcagctttacgctgatgggggttaccagctgagaattaggcgtcttgagggtacccctaattatggtccccgacagtagcccccgagcctcgaagggagtgttagcactcgcttggaggctttcgtcgcacttttttgcaaggggaccagcctttctcggttgcattttgttccggtgggtgcgcgcgagcgcacccgccgggtgtagcccccgaggcctcggaggagtggttacactccttcgaggtcttaataccttgtgtaatgctttggctggtctggtcgttccctcatgcgaactggccgtagcccgggtgcacggtcggggcccaagctctcgggctggtatgttgacgttgtcaacggtttggccggagccggtttttgcgagagcagcccccgagcctctgcacagggcgagaggacgatcagggacagactcgactttttacatacgcccctacgtcgcctttccgcaaggaggaggggggagtgcgccatgttaccctcgatgggcaccgaacatggtgtctccggtgagctgcaagcgggtaatccgagtggacgtccgtgccccgttcgttgggggtcggctaggggcccagaggcacgcccaaaagtacctgcgggtgatttgccggacccggtcccctggcgacggggtccgagggctcgatgcctccctccgatgggattccgttacaagatcgttcccgctggtctcggaaatgtcctagggtacctcgggagcgcagcccgagcctcggttatgtatcgaacgtacccctggtcatccctcgctcggtgtctgaggcgactgtgaacccttcgggggctagccttcgaacccctgatcagtaatgggcacggagcccgagtagcctgaggcggccatggaacccttcggggggctggctttcgaacccctgaccagtagtgggtgtcgggcccacgcgatctgaggcgactgttgaacccttcggagggccagtcttcgaacccctgatcagtagggggggctcggatcccggttccttcgcggagaaggatccttttcggggtatccccctttcccggtccctgttgcaagagatagagaaagaggaaaaaggaaaaggatacgaaatcgaacgacgtggcgtaccttttctgacgcggttattacggcgaaggtgaagcgtcgcgcgctcctcccgtcagaggcgccgcgtgtcccgccgcggagttaatgcgacggggcgagtggttggcggggcggccgttacgcgtgcgtaagccgttcgaggaacgggtcacgggtgcaccgtcttcacgccgtgggaggaggctctcttgctgtcccaggatgagacgtgagcctgactggcgacgtgactgctgcgcccgcccgcctgccaccgccattactgccggcccactttcggtcgctttgaccaacgcgccaggctggcactgctgggtcgcctcgagtcgcggcataggcttcgcaaccgaagaggcgcgacggtggcccaagtggcggtgcggctgcctgtatgcagcaactggcgcgccggttgcttgacgcgtgggcctgggcttccaagctgtcgtgtcagaagtcggagaagcgcgtccacctggcgcggttgcatgccgcctgcatggctgcccgccccttccgcccgttggtctgggcaaaagtggggggtcgctcgtaaccgctgggcggtcgtgcgcaccgcgcgcggcggtttggcttcttctgccctgagccggtttgcatgacatgcgggacccagcccccgagtcgcaggggaggatcttagagcgtgttggagaagacctagcccgcggcgtctgggggcgtacgtagggagagttgcctttaaaaggagggagactcctttcagaaggcaaccatgtcttcttcctcccttacgcgtcgtgtctttccatcttccaagcccccggatggggggtatccgccgtctttccgcctcctcgttggaggaacgcaactccatgggagttggtacctctcagccatcgttcggcttcaaggattttcatcatgcagcccggccgcacccctccaccggcggtcacctgagatggcgacctccggcttgatggtgggggaaagcgagccgggctgcggcctctgcccctccctcagcctcaaggattttcatcatcaaggctggggaggggagagtgccgagttggggtcggcccctgcgcgggcgacggcccgctccttcactcagtgatgagggggaggagcaggtgttgcccgtggcgttggcagctgcagcgtgcccggtcttcagacacgagtggcttcggagccgctcgcggcgccggcgtccgccacggcagctggaagaggttcttccgccggcgcgatagccggggccggccacgggctgacctccaactctacggccttctgcccgtccttgacttacgagttttggcgcgggcgggggcctcctggcagtggcatccaccctgaggtcagcgttgccgctgttcggccccccggagcagaagtcgtcgtcgtcgccgctgctagagcaggtgacggcgcgccgttcgtcggcctcccgttgctccgcaggccttccccctcggagtggggttgttcgtacctgcggagggggaaccggagttccgtttgtaatggcatctcgaatgccggtgagtttgtccattgcggctgtcggggcctgaacatgtatgtaatttcggcacggagtcgtgttttttcctcattttcgagcgctaagtctcgcctgttgattatccgaaccgctttaccaagcatgagtcgccccgtgtcaaggtgacgagtgaggtatccgcatcccggaggcgtaggaatccctcggcccgatcggccttgttgtctggggctcctctagcttagttaaagagacccctcggccgcccttcgatgagccgaggccaggggtagcgatcagtatgaacagaggcggagttggctcgagaatgggaacctggttggccggagcctagccgtgttgtccgtcagcgaagccgacgccaaagtcgatcagccgaggcctcgggtcgggctcgcgcccttggaagccggttggccgaggccccaggggtaaccggccgagccgcctgctcgggccggattcccggaggaattcctggaccgcgtcgccgtccgaggctgggtcggactttgctgaagacgtcgtcgatgccgagggtgctacggctcccttcagcgtgaagatccgagcctacaggatcagatcgtcttgtagcgtgtgccttctgcggccgccgaggccagaaaaacacaccctcgccgtgcttgcgaagctgcgtcttttttcctcttgtttcgagcatctggactctctgtcggtaacagggatgtttgtgtgagcgagagttgcttctcgcggaagggacgagtgaggtatccgtatcccagaggcgtgggaatccctcggctcggtcggccttgccgcttacgcgtactttcacccgtccatgaggccctgtccccgactcagtcgagaaagcttgaaggactgcttcggcaggagagcttccgaacgtgaagacttgttcggtccacggagtcgctttatccgagcgcgagttacttatcgcagaaggtgatgagtgaggtatccgtatcccggaggcgtaggagtccctcagctcggtcagccttggctgcttacgtgtactccgtcgtttccaggatccgctttccgaagtagtcaagaagcacgaaagtaatcctgctaaaaagagatcctttttcgaggaaaaattcgacgcagagggggtctccccccttttagcccccgagggagggtcgggctttgccgaggctaggccgacccttccttgacgactaaactttgcgtaggtgcgaggtatatgaacaacttggaaacatcttaagggtagaagcgacgtagctgtttgatgttccaagcattgccgtagatctcgccttgattgttggccagcttgtatgttccgggcttcagaattttggcgatgacgaatggcccttcccaggggggcgtgagcttgtgcctccctcgggtgtcttgccgcagccgaagcaccagatcgcccacctggaggtctcgggaccggacccctcgggcgtggcagcgtcgcagggactactggtaccgcgccgagtgtagtaaggccttgtcccgagcctcctccagctggtccagcgattcttctcggctagcttggttgctttgatcggtgtaggccctcgtcctcggggagccgtattccaggtcagtgggcaagatagcttcagccccgtagaccaggaaaaacggcgtgaaacccgtggcacgactcggcgtcgtccttaggctccagaccaccgaggggagttccttcatccaccgcttgccgaacttgttgaggtcgttgtagatccgaggcttgagcccttgtagaatcatgccgttggcacgctctacttgcccattcgacatgggatgagccacggcggcccagtccacccggatatggtgatcctcgcaaaaatccaagaattttttgccggtgaactgggtgccgttgtcggtgatgatggagttcgggaccccgaagcgatggatgatgttggtgaagaacgccaccgcctgctcggacctgatgctgttcagaggtcggacctcgatccacttggagaatttgtcgatggcgaccagcaggtgcgtgtagcccccgggcgccttctgcaagggaccgatgaggtccagaccccataccgcgaagggccaggtgatgggtattgtctgcagagcctgagcgggcaggtgggtctgcttcgcatagaattggcacccttcgcaggtgcggacaattctagtggcgtcatccaccgtcgttggccagtagaagccttgccggaaagcattcccgacaagggctcggggcgctgcgtggtggccgcaagcccccgagtgtatttcttgcagcagttcccgaccttcggtgatggagatgcatcgctggaggatgcccgaggggctgcgatggtagagctcctcttcatcgcccagcaagacgaacgacttggcgcgtcgcgctacccgccgagcctcgacttggtcggggggtagctctcctcgacggagatattgcaggtacggggcctgccaatctcgatctggcgtggccccgctctgctcttcctcgacgtccagtgcctcgccctcgggggccgagggtacctcgggctgggccgagggtgcctcgggctgagccgagggtgcctcgggctgagccgagggtacctcgggttcgggcgcgtcgtcgatcttgacagagggttgatgcagatcccgggagaagacgtccggggggaccgtcgttcgccccgaggctattttagccagctcgtctgcagtttcgttgtagcgccgagcgatgtggttgagctcgagcccgaagaacttgtcttccaggcgccgaacctcgtcgcagtaggcctccatcttcgggtcgcggcagtgggagttcttcatgacttggtcgatgacgagctgcgaatcaccgcgggcgtcgaggcgtctgacccctagctcgatggcgatccgcaacccgttgaccagagcttcatactcggccacattgttggacgccgggaaatggaggcgcagcacgtagcgcaagtgctttccgaggggcgagatgaagagcaggcccgcgccggctcctgtcttcattagcgacccgtcgaaaaacatgatccagagctccggttggatcggagccgtcggcaactgggtgtcaacccattcggccacgaagtccgccaacacctgggacttgatggccttccgaggggcgaacgagatcgtttcgcccatgatttccaccgcccactttgcgatcctgcccgaggcctctcggcactggatgatctcccccagggggaaggatgacaccacagttaccggatgagactcgaagtagtgtcgcagcttccgccttgtcaggatcacatcatacagcagcttttgaacttgtgggtagcggatcttggtctcggacagtacttcgctgacgaagtagaccggcctctgaacgggcaatgcatgcccttcctcttgcctctcgaccacaatcgcggcgctaaccacctgagtggtcgcggcgacgtagaccaagagggcttctccatccgccgggggcaccaagacaggcgcctttgtaaggagcgccttcaggtttccgagggcttcctcgtcctcaggggtccaagcgaaacactcggtcttccttaagaggcggtacagaggcagacctctttcgccgaggcgtgagatgaagcggctcagggccgcgaggcatcccatgaccctctgtacaccttttaagtccttgatgggtcccttgctggtgatggccgcgatcttctccgggttggcttcaatgcctcgctcggagacgatgaaccctaggagcatgccttgtggcaccccgaagacacacttctcaggattgagcctgactcctttcgccttgagacatcggaatgtcgcttcaaggtcggagaggaggtcggaagccttccttgtcttgactacgatgtcatcgacgtaggcctcgactgtgcgaccgatgtgttcgccgaacacatggttcatgcaccgctggtacgtcgcgcccgcattcctcaaaccgaacggcatggtgacatagcagtacatgccgaacggcgtgatgaaagaagtcgcgagctggtcggactctttcatccggatctggtgataccctgagtaggcatcgaggaaggacagggtttcgcacccagcggtggaatccacgatttgatcgatgcgaggcagagggtagggaaccttcggacatgctttgttgagaccagtgtagtctacacacatccgccatttcccccctttcttcctcacaagcacagggttggcaagccattcgggatggaatacctctttgatgaaccctgctgccattagcttgtggatctcttcgccaatcactctgcgcttctcctcgtcgaatcggcgtagaggctgcctgatgggtcgggctccggcccgaatatccagcgagtgctcggcgacatccctcggtatgtcgggcatgtccgagggactccacgcaaagacgtcggcgtttgcgcggagaaagtcgacgagcactgcttcctatttggggtcgagcccggaaccgatccggatctgcttggtggtgtcgccactggggttaagagggacggccttaaccgtctccgctggctcgaagttgccggcatggcgcttcacgtctggcacctccttggagaggttctccaggtcggcgatgagggcctcggactcggcgagggcctcggcgtactccacgcactccacgtcgcattcgaacgcgtgtttgtacgtggggccgacggtgatgaccccgttggggcccggcatcttgagcttcaggtaggtgtagttggggacggccatgaacttcgcgtagcatggcctccctagtacggcgtggtaggttcctcggaacccgaccacctcgaacgtcagggtctcccttcggaagttggagggcgtcccaaagcagacggggaggtcgagtcgcccgaggggctggacgcgcttcccagggatgatcccgtggaagggcgcagcgcctgctcggacggaggacagatcgatgcgcaggagcttgagggtctcggcgtagatgatgttgaggcagctgcccccatccatcaggaccttggtgagcctgacattgccgacgacggggtcgacgacgagcgggtatttccccgggctcggcacatggtcggggtggtcggcctggtcgaaggtgatgggcttgtcggaccagtctaggtagactggcgccgccaccttcaccgagcagacctcccggcgctcttgcttgcgatgccgagccgaggcattcgccgcatgtcctccatagatcatgaagtagtcgcggacctcggggaactctcctgcttggtgatcttcgttcttgtcgccgtcgcgggccctgccaccctcggcgggtggcccggccctgtggaagtgacgccgaagcataacgcactcctcgagggtgtgcttgacgggcccctgatggtaggggcacggctccttgagcatcttgtcgaagaggtttgcacctccggggggcttccgagggttcttgtgctcggcggcggcgacaaggtccgtgtcaacagcgtcgcgtttcgattgcgacttcttcttgcctttcttcttggcgccgcgcggagcagacgcctcgggagcctcttccgatgggcggccccggggctgcttgtcctttcagaagatagcctcgaccgcctcctggccagaggcgaacttggtggcgatgtccatcagctcgctcgccctggtgggggtcttgcgacccagcttgctcaccaggtcgcggcaagtggtgccggcgaggaacgtgccgatgacatccgagtcggtgatgttgggcagctcggtgcgctgcttcgagaatcgccggatgtagtcccggagcgactcccccggctgtcgccggcagcttcgaaggtcccaggaattcccggggcgcacgtatgtgccctggaaattgccagcgaaggcttggaccaaatcgtcccagttggagatctgccccggaggcaggtgctccaaccaggcgcgagcagtgtcggagaggaacagggggaggttacggatgatgaggttgtcgtcatccgtcccacccagttggcaggcgaggcggtagtccgcgagccacagttccggtctcgtttcccccgagtacttcgtgatagtagtcgggggccggaaccgggtcgggaatggcgcccgtcgaatggcccgactgaaggcctgcggaccgggtggttcgggcgagggactccgatcctccccgctgtcgtagcgccccccatgcctggggtggtagcctcggcgcaccctttcgtcgaggtgggcccgacggtcgcgtcgatggtgctcgttgccgaggtggcccggggccgcaggcgcggtgttgcgcgtgcgcccggtgtagaccgaggcttcccgcatgaatcgggaagtcgcggcatgaggttccgagggatatccttgccttcgggaggcagtgctctcggcccgtcgggccgcagcgccttccaggagattcttgagctctccctggattcgccgaccctcggtggttgatggctccggcatcgcgcggaggagcatcgctgcggctgccaggttctgaccaaccccgctggatgcgggtggcggcctgaccccggcatcgttagcgacgcggtgctggagaccttggggcaggtgacgtatttctccggccaagggttggcccgcccatacctgcccgacgtcccgacggatcggctcaagcgctcctgttccctcgttgagcctggcctgcgcctcgcggacttgctcgagttgtgggtcataaccccccgccggagcggggaccacagctagctcccgtgggatgtcggcgcgaggcgccggcctaggaagatcatcgtcctccggcatgccgagatggttgccttcggagggatcccctagctcgatgtggaaacattcgcggcttgggccgcaactctcgtcgccaaggctgcggcttccgtcggaacaggcggagaggcagtagtcgcatgcggtcatgaagtcccgcacggcactggggttgccaagtctggagaaatcccaacagatgctgggatcgtcatcttcctcggacccagagggcccgtaggtcgagacgtccgtcagccggtcccaaggcgaccgcatacgaaaccccagtggggttgcacttgcctcaatgagagcgcccgccaaagcgaggtcgtttggcgggttgaggccgagtcgaaatgacgcaagatgggagtgagtcggtaccttttggtcgacgaggagcgacgtagtcacatcggggactggttgcaccgtcatctcaggtacaagggcgacgtcctgtaggctttccgcgagcgcgccggcgtcgtcttcttgctcggggtcagcgtgtcgcgaggggacggcgcttgcctccgtcttgaacgcgaggtcgacgtccggcgtgccttccgtcggggcgtcgggggcgtcgattcgctcgacggccaacgaagcgcggcctcccgcttggccttgatggccccgcctcctcctccgttggcgggggagagaacggagcgagctcgaatgttgctcttccaccacgcggggaagatgtcgtcgattccgccgccggcgggcgggttgctggccgccattgtcgtcgtcgcgcggcggtggaagaagtatcatgtcgtagctgccgtcgaaggacatgaactcaagagtcccgaaacgaagcaccgtcccgggccggagaggttgctggagactgcccatctggagcttgacggggagctgttcgtcagcacgcagcaggcccctacctggcgcgccaactgtcggcgtttcgagacaggggggtccctaagccgacgagtgagtgtgctgcgtgccccagcccagatgggtcgagcgcgtgggcgagcgcgaaggggggagaggcgaggtggccggagccgagcgtgagagaggtggaagtcccgcggccttcgtgttcgtcccgcgcccaggtcgggtgcgcttgcagtaggggggttacaagcgtccacgcgggtgagggaagcgagcggccctaagagagcgcctgtcccgtcctcggtcccgcgcggccaaccttctctaagaaggccctggtcctcccttttatagtcgtaaggagaggatccaggtgtacaatggggggtgtagcagagtgctacgtgtctagcggagagagagctagcgccctaggtacatgccaatgtggcagccggagaggtcttggcaccttgctggcgtgatgtcgtggctgtcggatgtgcgacggagcctggcggagggacagctgttagagcggtcgagtccttgctgacgtcgccctgcttccataagagagctgggggccgccgtcgtcacagagcttgtggagtgccatcattgcccatccggtggagctggccggatgggacgccggtcttgttctccgtaacccgagtcgattcggggtaggacgatgatggcgcttcctgttgacgtggcgggcctgtgccctaggcagggtgacgtgggggctcctccgaagccgaggttgagtctgtcttctgttgccgaggccgagtccgagccatggggtcgggcgaggcggaggtcgtttggccaaggccagggcggagtccgagccctggggtcgggcgaggcggagtttcgtcgtcttccgggtcttagcccgagtccgagccctggggtcgggcggagcggagttcgccgtcttccgggtcttagcccgagtccgagccctggggtcgggcggagcggagttcgccgtcttccgggtcttagcccgagtccgagccctggggtcgggcggagcggagttcgccgtcttccgggtcttagcccgagtccgagccctggggtcgggcggagcggagttcgccgtggcgccttcggcaaggcctgactgcctgtcagattcactctgtcgagtggcaccgtagtcggagtggcgcaggcggcgctgtccttctgtcagactggtcagtggagcggtggagtgacggcggtcacttcggctctgccgggggggcgcgtgtcaggataaaggtgtcaggccacctttgcgttaaatgctcctgcaacttggtcagtcggtgtggcgatttagtcagggttgcttctgagcgaagccaaggcctcgggcgagccggtgatgtgtccgccgtaaaaaggggggcctcgggcgagacggaagtctctcgaggtcggctgcccttggccgaggctaggctcgggtgaagcgtgatcgagtcactcgtgtggactgatccctgacttaatcgtacccatcaggcctttgcagctttacgctgatgggggttaccagctgagaattaggcgtcttgagggtacccctaattatggtccccgacaccagggaaccctcatgactcgccaacttggaggaggcgtgcgatatctgccgcattaggtgcacggagatagtaaggcccaaacgcagtttggatggccgtgcaaaagtgtttcaatgcctcatgagcgatagattcaccaatgcgtacgtattcatcgaccgcatctgttgggggccttcttctttgctgaaggtcttctaagcaaaaacaccttcggtaagacgatatgcaagcagacataacacgaaggtatatgccgaagctgcaatccagggagcttcggcatgatgacacgccttgagacgaagggcgtcaccgacttaaagaggaaaagatcgttcagtctatgataatttgtgtcatgtttataattagttatcaaggacataaatgtaatttcgaccgggctgcgtctcgtgcctataaataggtgaacagtagccccgtactgttcacactgattggtactcatctgcccgtcgctcttggatttttaccttctgtcaagccgaaggtaaaaatgtaatcaatatcattaatgtttgttcatggttatataataagaacataaataataatatgatgatttaaggtgattattccatgttctttttatgtttcatatgtttctactttcattattacctattgaaatgatgaaggtatgtccttcatgaccttcgtttgaagatctttatatcccaagggagataatgcttcgaaggacaaaggtttttaaccattaacatttgtgttgccttgttcttaactcatagcatttgagaacaagtccccaacattggcgcccaccttcggtgaactcacttccactgttgagacgatggattcattcaacaaccaagttgtagcaccttcggtcacgaagctggtgctcccaatcacgggcggttcaagtttagagccagccaacaagaagcaaaagaaggaagcgcagaggagagtgtagcatgttggggtgcaaggacccttcgtcagatccaagtggtcccacatcccaatcaccttctcccaggaggatttacagctcaaagactatcctcacaacgatgatatggttatatcttgtgtcatcaagggatttctggtccacaatgttttgggttgacacaggcagtgcagcgaacatcatatttgcaaaggctttcaaacagatgcaagaaccagaggacaagattcatgatgctatcacaccctctttgtggctttggaggaagacagattgtggcacttggcaaaatcacaatgtcagttacctttgattatgtccacaacataaggtctgagcaggttatctttgacattgttgacatggattacccatacaatgcaatcattggtcgagggacgcttaatgcctttgaagccatacttcatccagcgtacttatgcatgaagataccttcggagcaagggcccattgttatccatggaagtcaagaagctgccagaagggccgaagggagttggacagattcaaaggcgatccataacgtagatggagtcgaagcttgttaacaatataagcacaaaagagagaaggctgcttcggcagatcagccgaagcctatgctcctatgtgaagatatagcagatcaaagggtactgctgggatctcagctatctgatgagcaagaaaagactctgctaagatttttgttcaacaacaaagatgtcttcgcttggacagccaatgatctttgtggtgttaacagagatgtcatcgaacattcacttaatgtggatccatctttcaggccaaggaagcaaagacttcggaagatgtctgaggataaagctgaaggtgctcggaacgaagtaaagagacttcttagtgctagtgttatcagagaagtaacatatccagaatggctagccaacactgttatgttgaagaaggctaatggcaaatggagaatatgtattgatttcacatatctcaacaaagcatgtccaaaggacgagttcccattaccaagaatagacacctttgtagatgcaacagcttcttcggagctcatgagtttattggactgctactcaggctatcatcagatttggatgaagaaggaagatgagccaaagacttgcttcataactcccagtggtacttattgctacctttgaatgcctgaggggctcaagaatgctggaggaagcttcagcagaatgacagccaaggtccttcactctcaaataggcaggaatgtactgacttatggtgatgacatcatagtaaaaagcatattgctgacttgcaagagacatttgccaattttaggcaagctggtcttaaattaaatctagaaaagtgtgtttttggagtaaagaagggcaagttccttggctatctggtatcaacgaagggaatcaaagctaacccaaataagatcgaagctatccttcagatggagccaccaaatttaaagaagggggctcaacgattggcaggaaggctggcatcgttaaatagatttatatcaagatcagcagaaaggaatctaccattctttgaaatactaaagtcagccgaagttttccaatggggtccagctcagcaaaaggctttcgaagagttaaagcaatacttgatagacttgacaactctaactccaccttcgccaaaggctccgttactcctatatgtagcagcctctcactctgcagtcagtgtggcgcttgtacaggagaagcaagatggccaagtcaaaagacaagcaccagtatatttcgtctccgaagttctaagcttatcaaagagaaattatacagaattggagaagatattatatgctgtattgatggcctctaggaagcttcgacattattttcaagcatatcatataattgttccttcatcacaacctctaaaggacataatgaggaatagagaagctactggaaggatcggaaaatgggttgccgagctcaatgaattcactattgattatctacatagatcctcaattcagtcccaggcgttagcggattttattgctgattggacgccaggggctcagggagaagaagtaacaaaagacgtcgaagcctagacagtcttctgtgacggttcttggggaacctttggcgcaggagcggctgctgtcctagtagcgccctataaagtcagaacatgctacacagtaaagttggactttagttgtacaaataatattgctgaatacgaagctcttctgttggggcttcggaagctaaaggcaatgggaataagaagggcgatccttaaaactgactcccaagtcatttctggtcatatagacaaaagtagcaaggcaagagatccgaagcttgaagaatatttggatacagtccaaagattggaggcttccttcgaaggattctctgtaaaaaatattccaagagggggaaaatgagcatgcagatctgctagctaagtcagcggcacaagggctccctctaccttcagaagtattttttgagacaataaaagcaccttcggttgaacttctagagagagagcagtgcttgaaatatcacctgtacatagtgaagattggaggactgaaatcatatctttcctccaaggtaactatctttcagatgacgaagtttataataaaagaatagaagcaaggacaagaccatatgtcataatagaaggggagttatacaaacatggagtctgctctccacttctcaagtgtttatccagaaccaaaggtatagaactgatgagggaaatacatgcaggtttatgtggatctcacattgggtctaggcctttgctggggaaggttttcagacaaggattttattggccgaaggaaacttcagatgcagcagatctggttcaaaagtgcgagaattgtcaaaaaaatgtgcaagagaccagaaacaaccttcgtcgctaacccagttaatacagccaacctggacattgcaaaggtggggcctggatttgttatgtccactcccaccagcacaagacaacttgaagtatgttgtagtggcagtagaatatttttcaaagtggattgaggcgaagcccttggctacaataacttcgatcacggtccaaaagttcttctggcagaatattgtttgtcgcttcggtgtgccgaaggcaataactgtggacaatggaatacaatttgatgtcgaaacattcaaagatttttgtgaccgaattggtacgaagattcattttgcatcagtcaggcatccagaatcaaatgggctagtataaagagcaaatggcattataatgacaggaataatgaagctaatcttcaatcagcccagagaaaagtggtcacatgagttgattaaagtggtgtggagccacaacacaactgcgtcaaggtcaacaagatttacacccttcaagctcctatttggtgacgaagcaataacttcagaagaagcaaagacagggtcaataagaacaacaacttcggcagaagacgaagctgattatcaaataacaaaagatactatagaagggaccagacttcaggctatagagcacatcaataaatatcaggccaaaacaataaggtggcgtgatagaaaagttcgattgaaaaacatcaaaccaggacatctggtgcttcggagagtggccaacctagatacagtgggcaagttgcaactgaagtgggaaggtcctttttctagtaatatcttcgtcaagacccggttcttatagattgaaggatatggacggaaacgacatacccagatcttggaatgcggatgagcttcgatgatactatgtgtaatttgatgtaatcttttttcattttctctatgacacccttttcctttcaagaggggagaaaggtttttaatggggccatagcttgtaatttttcattcttatttagccctacgagggccaaatcccccaaagatgtaatatgtaaaatctgagcctgcaccatcgagtacaaaaagaaaaacagagagaagctcaaaagacgtccccaaggggatgcagagcatgacgaagctgcaaaaaagtcattcctaagggagcgcagcgtaagttttctgctcaaaagtcgttcctaagggaatgcagagccaaaaattcgacgaagattcaaaagtcgttcctaagggagcgcagagtaagttttctgctcaaaagtcattccaaagggaatgcagagccaaataccaccgaaatataaggtggagaagtttaaaagtcgttcctaaggggatgtagaacttaaatgccactgaaatagaaggtgaagaagctcaaaagtcgttcctaaggggatgcagagcttaaaagactcaaaagtcgttcctaagggaatgcagagtctgggtgtggtttcgtgtgtgtgttcgggacattcatttgcacattacattacattacatcattcattgcattcatacacattcatgtagacattcgtaggatcatcgtcatcataacatgaagcacaaacagaaattcttcagctttgacaacaatgcttcgatgagcacgaagaagcaaggacatgttttgttgtgtacgaaaagaagggaaggtgtttttcaccttcggctcaaaagatacaagtttcatccacagcaaagcaatttatacatggatggaaaggtaaaaatatattacaaggtatggacaagtatacaaagtaatgttcaattctcgattacaatgtcttttacaaagataatacaaatgcttctaagctctatacaagcaggcctaaaaaatagcttcaacggccttcggaatgtgcttcggactatcaatcttcggcaccaccatcctgcacacaagcaagcaatataaggtaaaaagtaattacaagagatggcaagcaacgggtataagtttcataccggcttaagcaagcttcgggcctcgtcaccagccaaatcccgcccacccttcgcccaaatctgagttataaatttatttccaatactctaggcttcgctggggatatcaaccaagtctgttggagacagactaaaggttggtttgtttaccgtttttccgtgtgtgcaaccagccttcatgaatgctacagtcgtgccacaggaagccagcagggcatagaagtcaccgtgactggctatcacttcatcaagcgcctcaacttcgccttcaatgtgttcgaaggtgtttggaatatcttcagctgaaggggtaaactcttcggagctggctccaaccaagttgaagactcttttcaatcgttgtacacagctgttgccaaagctcaaacatatgttccgaagctctttcaaagtttgttgcagctttgtatttttgtcagcttcagcttcgtattttgcctgtaaatcttttctctcttgttcgaagctctctaatttttggagaagttcctcatttaatctagcactttcgacttgggcttctgcaagtgaaccctccattgcctgaagcaggaaatctttcttctcaagagaagcttcgtagtctttaattttgttttccagactttctattataatttcgttctttttgtcttcgaggtcttgctgcattctcagtgccttgcttagcaacatactctatagaaataaaccttcatcagaaaactttgcttcatcacaaaaataaaatgaaaattttgcttcatcttaaaaaaagaagggaattttaccttgaagttggaataaaacaaactactgacgatatgttgtcaccgatagccgctagtatcagcttcgagcttcgggaaaccgacactcttcgctagagtgccgattatctttgccctgatgcaatcgtgaatgcatcctaaggccccttcatcgatcccaccaaagagcatggctcctggctggtagccacacgatataccatactcctgtagctccttcttttcgacctcggataattcttgcccgactaggttctgaaggtcgaagtctttttcctctgaaacagcatcggcaatcttctttcctttgtcaggcactgtggccatgaccacctctatagccgcaactatttcttccacagccatatccaagagcagtttatcaattctagaaagtgtactctcaaggttggtggcttcggcagcggctgtagcttcggcaaaggcatttgctttggcagtggcctcggcgcttgcaataggtgttattttagatgccgaggccgatggtggcgtccgttcaatggcttgcattatggtaacgattcttcgctttttctgttcatccgccctctttgtagccgaaggctcgtccttcttttgtaaaagcttcgtcagttccggtcccagaggacttagtagcttgataggtagagattcagtcattacctttaaaatttctgccacttcggcagtagggggtgtcgaaggagtctcctcttctacctcagtcaccttcggctttggaatttcagcctttcttttcttcgaagctgccaccttcggctcaggagtggattttatcttctttaaaaccttctcatcctccttaaccattctaacagcttgtctgttcagaacgctgacaattcttttcctttttacccctttggcacccttgctaagccgctcataattagggtattcaaatttcagagcatccatcacccggtttaaccttcgttttggccaggtgccgaaggctgctgtcatcaattggtcttcttttttggtatagtttcccaatatttcattacatatagtttcaatcatttctagccattcttggcaaggctccttgaactgtttttgaaatttgaaacgataagataatcgaacaaattcatgtttcttctttgcttccttcatcttcggcatcccccagccacatgacgttggatacatccggttggccaggtattcctgcaccaagtccctggtgctgatttgctcagccaccaccctgaattctactccggccagctggcatggcgaccctagctgcatgttgcacaggggcctggtcattccgaagtttaaggacagcggacacatgaccatcgtcatcagtttccccctcttcttctcatcagccttaatataaaaccattcacctttccagccggttggccattctgtgcggtaactgagaactagagccttcgtatccttgcgatacacgaaattgtagaaaccaaaattttcatgaagaccgcctgccctggccttcgtctggtagtgcaactcgtgcactcggcagaacgcttcggcatctgggctcatcccttggcttcggagggcccagatgaagacggtaagcctaacaatggcgttaggggtcagctaatgaagatatatttcgaaatttttcaagacttcccctatcatctcgttcagaggaaatcatagtcctgctctgaaaaagctcttgaaaaccactacttcatcactcttcggtgctagggtggtctcttctccatcaaatcggacaagtttgctttcagcttccccaaagtagcccaacttcatcatcatgggcatgtcagcttcagacacagtagatttctcaaaatctagatggctgggttttgttgggatcaaaatactataatctttctcatcttcatcaatattttctttttcagcaacggtctattcagcttcggcaacaggagtaccttcgtcagtagttccctctgtcacaactagacctgattgtttcatgacttcagaaattggtgctgtctcggtgacctcggtttcttctccctcacgagacacccttgcagtcgaacgcactctggccatttgatggatttttcgcggttttaacgaagttgatggttgttttgcagttttgacgaagctcaatcttctgacaaagttaactctaaatgatgaagtgctcgcttgagagcgcagtgaaaaaagctctggctatgattaaattttttaacagcactacagtgcaatggcaatgaatgttgtggtaactctgcaccaacccgtctgtttatatagtgctgtaggtgggaaggtgaaccgccaaatcgcctgcacccgctgagcggtggaccactcggcgcttggaaggtgaaccgccagatcgcctgtattcgttgaatggtggaccacccaacgtctggagtattttaatcttttctcgacaacgagctcagggaaggtgttttcggaccttcgacattccgaagcctttgagttttttcgcggatcgagctcgttacgaaaaacgatctagcaccgcgaaggggctactgttgggggccttcttcttcgctgaaggtcttctaagcaaaaacaccttcggtaggacgatatgcaagcaaacataacacgaaggtatatgccaaagctataatccaaggagtttcggtatgatgacacgccttaagacgaagggcgtcaccgacttaaagaggaaaagactgttcagtccatgataatttgtcatgtttataattagttatcaaggacataaatgtaatttcgaccgggctgcataccgtgcctataaataggtgaacagtagacccgtattgttcacgctgattggtactcatctgcccgtcgctcttggatttttaccttctgtcaagtcgaaggtacaaatgtaatcaatatcattaatatttgttcatggttatataataagaacataaataataatatgatgatttaaggtgattattccatgttctttttatgtttcatatgtttctactttcattattacctattgaaatgatgaaggtatgtccttcatgaccttcgtctgaagatctttatatcccaagggagataatgcttcgaaggacgaaagtttttaaccattaacatttgtgttgccttattcttaactcatagcatttgagaacaagtcccaaacagcatcagcaggaatgccataagcaaggatgcgaacagcagcaacaactttctgcagagcagaaagacctatctcaccggcacattttgagcgtgaataaagtatggatcgacttgttgcacaacatcaaccaagcgctcaaacacatggcgacgcatacggaacctaccatataataaatgtgtgtcactgtaagggctgatcaagttaagtacatgtcaaaatgaatgtgcacatgaaatatatgaaatacctcctatggaattgagcatccgtgtacacgggttgggctctaaagtagtccgctcggattcttgcatcgccgctcatgtgatcacgatgaatccgaacacgcccaggaatggaaccaccgtgacgacgctcgttgcgtgcacgacgcctcctaatatgcaggtacgtcgccatctgcaactcttcttcttcctcttccatttcttccatcatcctaacaagaaaattggattctaagtacgggttcattattgtggagatttgaaagacaagtgtgagtgaagtattgaagcatcaatggttatttataaaacgagtaggcttcggatacaagccatcgtgctggcgtgcagacgaagcttgtcgatggcttgttgaagaagtgtcatggctcatggtggaagcatgtcaatctagaaacatatttttatactaataaaatactatgtgacgttttatcgacaacaattgcacacaatatcacatcgaatgttaattaacatttacaattagaaattattaatcaagcattgtttcggaggttattatttgcaaattaatgaaatacacttttttgcgcatcctttgtattgcgttaaatgggaagaaaacaaagaaaacaggaaaagaaatagaaaaaggaaatatgttaacactgtagttttaggagaccgaatttaggggacgctgctggagactgagaagatatagaggacaaaatcttttagtgtgtgctgtaaatgacacagaatatttctttaggcgatggaatttagaggacgctgctggagacaccctaaatcaattggaggccaagaacggaacaatgttgcggtggcgggactctagctccagcctccaggtcaagcttacggcggcagcgccctagccggcctgccctgctcgtcttctccctttggcggacagcatgttggcatcggacgtccgcaccgacgcatttcttcagcgtcgcgccgccgccgcccccaggccaggctcgcccctcgccattgccagtgccatagctccaaatcaggtagccgctcgccctcgtcctcgtgaacttgcgatttggtgcctgttaggacataagaaccaccgaactcgggtttatgacgtctcaggtaccgttcggttttcacggaacggaggcatgacaatttctagctggatttcttctttatgttatataaattttgattagctgtaacgatttcaagtctattcgtggacaaacaaacaagctcgggtttggtttgtaatacataggtattaccgtgaaatttgggttggtggaggggttttaggctggctccagcaaggacccctaaagggtcctctaccctaaatatagaggaccaaacggtcctctatgctctctagcagcgtcctctaaactgtcttttaaatttagaggacgctactggattttctatatatagagtttctttaaacagttctctatacatttgaatactttaaataaccggtttagcaaaactaaaatatgcacaatacatttgagagtatgacaaatacatatgtataaaaaataaaaataaaaaatgtctctaatatatgtatttgagtatagaggacgtaatttagaggatattgttggagagaaaagagatatagagaataaaatcttttagagaagattgtaaaggacggatatagagaattaatatagagaacgttgctggatacagccttagcagcgatagaatctggtcaagcacgtctctatttagcccacgtacagcccacgaaacagccacagcccacggtgtaaccttgatatttaagaagcagcagcattgccgcatccacatccccgtccctggtggtcgcccctcctggagctcgccgccaccatctcgattttgttttcccgaccacagcgccaccgcccaacgctaacctgccgctccacgagtctcgacaaattatcgacgcgactggcacccctccccctccactggtgattgtcgccgtcagcatcttcctccggtcctcccaaggtgagcgccgacctaattcacaaattatgtagcagtaattagaagatctcgaattctcgagctgccttcggtaggaaggcccacgtgttcccgatgcgaatttggtaggaagggccatatgttctatatgtgaatttgctccatgcgcatgtccaggattatctaaatgcatatctagtaccattgtcacgttcttttgtactgatgacaagtttggtttaactgatgctatctggaagagctcgaactgtatatcctagttcctattatgaatcaccaacattatatcattttttgtcatttgcgaacaatccaatttgaggtgaaccctgcatttggatctgatctaattacaagcgtatacatgtattatactaacttcgactgttttgcaaaaaaaatattgggtgtgcatgtgtacccccatgtcgtccgcccctgatatgctgtacttcatcttctgtttcatagtcatttgttttgtagagtaatttttgaggattgattcactatgatactcccttcaaatttgtactcgaattattttactcatgtcagtgctgcctccagtttaatgcagtttccgctcctgtttttattgttaattattgctcattcttggtgtactctttgcagagcaagccttctagaagttaaagaagcagccagaa

SEQ ID NO: 417 - DNA, 3087 bp, Zea mays
  Intron number 15 from transcript GRMZM2G144002_T01 (locus GRMZM2G144002) derived from phytozome v7.0 (chr-ID 7; pos 23756573 to 23759659 reverse strand)
tacaaaaatttagaagattatagaattatctgcaggtaagctaagtgtgatgcttaagaatatggaactaatattattgcacatgataatttgatttacaaaaaattttataaagttagagaatgaatgttctgtgtacaatgcagaaatattgacaaataaacaagttaagcctatacataatgaataaacgaagaatgtccagatttgtctagtgttatcaccaaatcaatttctactataaagttaggtagtgaagaaacactctgtaaacagtgtactaattgctgacatgtaaagaatgaaaaggacgagttaataatattcagagctgtgtaatgtaggtcccactttaattgcctacgtctaagggtattatgcctgcctgtgcaatatttccatacaccctaggcaggcagaagcttatcaatattgcttgcagcccgtcctactccttgagaagttgagatcaaccttttccactgcctaaatctcttggaacttgtacccttatgccctcctttcttcttttcttgtcagaggcagaattctgagaaccttaacatattcgttttctaggataggattatctgctgtcatcagactcaccatttcttttgaaagtgctgttctgtttctagggcttgttcccaaatcgatgaggtcgaggaatgcggtatggtacttgtgagaggcttttacatgatggggtggaaaatgatcccatgtatgttgagggcagggttcgatttcccggtagagaagaccgagaaaccggtaaatttaccgtttccggtcgagtacgagatgcatttttcagtcctattttctatgtgtttcgattccaaattttaaaatacgaaagtcaacatttttggtgaaaactaaattttggaacagtaaaaacaaaaatgtaaaccacagttgaggtgggatgctgatgctaaagccagcccacggtctgttagggtcggttttctgaacccacaaccaatggattctcaaagaccaacccaggacttccaagttatgacgttggagattaatctggagaagctggactcctctccactgcaaattcttcctttggctcgccaagaacaaccggtgttagactgcggagcgacttgccaagcgtggtctcgcccacccagctgcctgccccttgtgtgaccaggctgatgagacccttcagcacattctcatcggttgcgtcttgtctagacagatctgggccttgattttgcagtccttgcagctggctgaaatttcccccactctggctgactcgggtttcttctcctggtgggcgcgatctgtcaagtcggtgccaaagaattttcgaaaagggctgagcactctctgtattctggtagcctgggaaatctggaaattcaggaacttgtgtgtgtttgagggtgtgcagcctaatgtccagcttcttctccttaggataggaagcgagggcatcctttggtgtgctgcgggagcttttaggttgcttgagctccttaagggttgatttggtgacaaggggatcacgggaggattagagggggttgagggggaaatgaactagtttccccctcaatccctccaatccccctatgatccctgatcaccaaatcaaccctaaggccctgttcgttttgtgctcatctatagggattgagggggattaaatcccctacaagtcaaaatcatctccaatcccttccaatccccctcaatccctatggttttgggatcaaacgaacatggcctaatagggcgctgatcccagctagctagctaggcgctggtggtcttggttgttctttttgttttcagttactttgtaaaacctgctaagggcctgtctgtacttgggttgggtttcttgacctttcccgctgtttttcttccttaaatgaaatgacacagctctcttccttaaatgaaatgacacgcaactctcctgcgtcgttcgagaaaaaagtaaaccacagttgagggtcgatgcatttggacctgtttttatgattatatcatcctcatatcactcatgctaagtacggcagtggaaagatctgcatataataaatccttactatctactaaacatcacgtgaacaaaaaaaggttggcagggggaagaaccgtttcttgtatgtattgggaacatgctgaacaaatgtattgacactcaagggtttctcctagattgagctaccctggagccaatgtaccatgatagtagcatttttgccactaaggccattcactgtaaatttcaacgaaatatacatgttccttgactggtctgctagggttaatttagcactagcttcagacctgttcatactgtagggtatttttctcgaacacgaaggagagttgcgtatcattatatattaagaagtagcaaattccaaaatagacccaaaaacaaaggtacaaagaggccaattcaaggcggccaaaccttacaactactcaagctagatagagctcaaccctgaggcaccggccttacaccttacaccagatgtcggcctcatccttgatacattgcacaatagactgatggctgggagtagcctcataaaaaaatgcaagcgtttatgtgcttccagatccaccaagtcaccaacatcaccagagaattgaaaccttttctagactgtttctgaacattcatttcgttgctgccccaccaatcttgaaagttgtgctgaggtcctgatactgtagggtatgtgccagtgcatttgaggatacgcacaaattggagttagcagtacatgcttggagatgatgtagtagttgacacatgcaaatgctttggaataactttggtacctgctacctacagttcctggagtaaagaaaaatggacttcaacagcttatatctggttgaaacatgactcaggaagtcatgatagtgctaattatctggttttccgattccaatcctagaaactattttgattattagatgcgtaccatgtggttgctgctttgaaattctatatgccaccgagtcataaatccatgtctgtaaattgcagaataccaatccctcagtgaagagcacaccattgaa

SEQ ID NO: 418 - DNA, 1437 bp, Zea mays
  Intron number 2 from transcript GRMZM2G441768_T01 (locus G RMZM2G441768) derived from phytozome v7.0 (chr-ID 3; pos 1 17587949 to 117589385)
gccaatagcgccgccaacaggatatctgggtatgttgaaagctctcactactaaatcattcatctttctatacattttgtttttgcatataatcatgtatggattgcactgctgcatgttgaatgaaacatgagagtttatgatcagtatctagtacacacatccttttgctaatttgcagtatcaaacttagtgctatcggttgaagatatgtaatttcggtgcttcttatttacttaagtatctctgtggtttattgtcaccataagccatctccaaaagtccaaagaacacctgcacctcagtaatgttaaattgtcatttctaagttttggtgtagggcaatgctgcagtacaccttttccttattaggaggtaataactcaaataaatctgaaccattgattttgtagattttttaaatcaactaatcaattagttaccctagaaaaagaaaggaagcctcaaatcccctcaaccatgggagacagcgagcaactggcccgttccttgttggtttgttgcatatcctttcttttctccagtgcaagtggtgctggttgtgaatttgaaattgcttgttttatttataatgatgcaattttaatatgattatacttgtaattaaatagtattgtataaaaattaatagaagtgtattttgaaagattgtgttatgttaaattgtgccttatagaaaagaatgaaagaagtatcattttataaggctaaagttgcataccaatcatgatatggtatcataaaaacttttaagtgggatcatcatgtatacaacttgatgctaccatagatatgttcttaaaagtgttcaggaagtttttatgatacctagtcacgttaaagttacgtactcaatttaaaaacatgttatatgcattaaaaggtcggcagctaacatattaattgaaccatgaactttgatgatctaaaatatgttatatgccaacacactttgcatatcaagtgtgcacgttatgctaatttgattaaaactaatatagctgtgaggggggtttataaaacgtactacacatagcctcactcatgtgcattgggaacaaacactacatcagtacatctaactatcacatgggtctggatcaaaagacggaagacaggaccaacccaggggccaaattatgttatgtttaagaatgcaaacaaccccgcatccaatagatcatacaagcttcaattagattacgaaaaaagttttttatgcctaaaacttcccttatttattctattctccaaaatagaaaattaaataaatatgtatttcatgtattacctcctaggaggtaatagataattctaaccatctgatctgatgaaacggatgtctccctgttatttgggagtaccacagcaaagctctttggtgtatctaaacggcgcttgccgttctatgcaggg

SEQ ID NO: 419 - DNA, 1589 bp, Zea mays
  Intron number 1 from transcript GRMZM2G092154_T01 (locus G RMZM2G092154) derived from phytozome v7.0 (chr-ID 5; pos 1 39762365 to 139763953)
acgacggcgacgacgcgaacgcccccgccgcctaggtatctccttcgccctcctccccatccgtcgtggcgcgcgcccgcctccctctcggtcggcgtcgtcgtattttaccggcgccggcggtttcgttttcgtcctcgtatgcgccagcgaagtttgcgcgaaaatctctctccttgtagtccccgcgggttcttccacgctcgttttcacgaatttacgattattaatttcagttcttgtcgcggtgtggggggtgtccgctatttaatccttcgctggcagcaagttgatccttcccagctccggctcagtgttccggagaggtgcaaggtggaaggttggtatggccttctagtttattgtcttcgtactgagcccacccttcgtttgcccatggagaacttgagagatcgttcagttcttagctcaacccgtgcccttgcggttgatgaggtgcgcacgcgaaactggatatacttgttagtggagcggcgtcgcgtctctatttttttaaatctggagaatcgttctgagtcagatctttgatggtgtctgaggctctgggtctaggtgagaggagtggagcctgaattgtgctgcagcttctgtctcattttggggttcatgtctgcattgaggagattttcaacccgttgtcttagtgaaatcactcataattcctcttaccttgtgacagagtctgcctctgaacactgtgaattcccatccattgtttatttgtggagaaggtgtagaagcgcttcacaaagttgcgcttcatgaaaacaacgatcttaaacttattgactagagagttacgtttatgaacaatatagtatcttcagaagaagaatgtatggttggtttcatcttggctccctaattggatcacatgtagtttaggtatacagtaatgttcctacgtctcctacaatcgaaagacagtggcaggatcacctctacacgcgcatggttcgttctctctggtccatcccttctgttcgtttgaccccaaaactaagggaactgtatggaggattaaatcccctgcaaggcaaaacccctctcaaacctctccaattcccttgattttgtaatcaaatgaacacggcaggctgctttccctttgcaagttcaatggagtaaaaagctctgctcatttgactgttcctttccagtgaatcttctgacctcctctctcgtagtttaaattatgttcaatatctttctttgtagttgcttttgctcacgaaaggcatacgagagtaccattacgcatcatttgaaattttcttaatggttttatctggtgaattgaaaccaagttccattttgcttgttgggattgagatgaacctagaatattcttgccctatatttaattatattctgactctaaaaaaataacactgacctatagacccacttcagatatactctagtccttactttttgcagagatccatacaggttaatattattgttcctgatacaaagttgcaacctgtggcatgcatgatgatattttggcttctgcgttcatttttgcaggcacatttgctgggaattagggcaatcaacgttta

SEQ ID NO: 420 - DNA, 3201 bp, Zea mays
  Intron number 1 from transcript GRMZM2G010518_T01 (locus G RMZM2G010518) derived from phytozome v7.0 (chr-ID 4; pos 1 29494494 to 129497694 reverse strand)
cggcacgagcaggagcttctactgcttcaaggccggtaagtcgtccacccatgatctcgctgtggcagaacctcccaagttattgggcccacatgcacctgtccttgtctcaaagacctcagacggctatgcatgtgcaccagataacttaacaggatccgtttgattgccccaaggacatcagataaaccacttacaactaggaccgcaagattaagtaacacaaatcacacacaccaatatttttgcagcggaaatcttattaccaaattttacaagttacaaaaattttacattattttatcggagtgattacaaaagtataagtttgaaatatatgctagctcaagtgaccatcctcattaagaagtataaaagggttacttagacttataagaaggccgagcccaccagcacttaacactatcaacagcagcacaaagttaaaacctgaaaaacaatagggaataaaaccctgagtatggaattactcagcaagacttacctgactaaagaaaagactctcaagggtatgctggctagagggagtcaaggtatggcttatcaagaatcaaagactctgttttgcagaaaagcttactatgagtggatccttaaaatccatttttacttgtcaggttaagtaaaattacctgcatctagagttctttctaccctagttcaatcacttgacctgcactagccgtcttttatcatcccatcagttcactagattgctacgtgtaagtcagtgaccaagtcttcatgtccgcgaagttacggcgatccgaatcgattatactcagctgaggatctccaatcacacgacatatgtagcacttaacccctgcatatgtcaactcgccaccggggttcttaagaccagatcaggttcacgccaaccgagagcacagatacaccaccgtccagcctcttgccccggagggtacacgctactctcaccatctctccactcccattgcgtgttatcttattctggtattagtctgcccgaggcaaagcttacccatgacgaggcatgtgaccagttaaaaggtcctcggtcagtaggcctacatagacacggtccttaatcgacttagacagagacactacaccgagactctcttctcgtgcaagtcacccgccccgtctcagctttatcatttcaaacccaaagtttggtacctggcagaggtacatcttttccgatgttgaacccatcacggccatgatggatccaccatcaagttttattttcgaaaacatccctcccactttgaagtatcatcttttgtgaaaacaaaacattttgtttttctagagcgaagctaagcataagaaaaaccttttgtaaaatagggacttaaggagaagtaatcaaattcaaggaaggaaatgcaggaattggtttagcacacaactcctatcacctaatgcatcaagcaagtgagaaagattttaaaaggaacaaggaggtggcaaatgcaccggggcttgcctaaataacactaggttagtgtttgttaggcgaccacttggcgagtatcctttggcttggcactcgttcagatcatccatcttctgttttgttcatcagcatcatcccgcaaagtagcccgcgcttggggtcgacttggttcgtcttccgcatcgcgcaattaattaacgtacctgaatgaaatgcattatgcatatgaatgcatatagacaggaatatcataaacctaaatagtgctacatcgacaagaattaaacacttagtgatgaagcgccgtactattttatacgaaaacactagctatcgacgtgcgactacgcccaattatcacatttttagcgtaatcgcatctacttcaaacatcaagcaataataagctaagcacaagtcttttggcaaacactcaatatcacattactcgtcacatttttattcactatttttgaataccgaccatttagagtaagggagcatattaactaactgtctaaattgtgtttctcaattatcttgaattccacgctaattagatagatcgatgccattcaccattaattacacagataatttgcacgtctctcatgacatcgaactaactaccaaacctagaataaactaactaattaagcagggcatcgactatatcaattaatcaaattgacataacgacactagaaaattgtattaactagctggtaggaatactaagcttatttctttcgtcatcagctcgcccgaatattaactaaattaatctatctttcgtattactaactctatcgtacttcacatatatttaatcctactgcgacgcgactgcttcaaaatcatgaaaataagcacctcacattcatcgaactacttcaataattaagctaacataaattttgaataagcttaccattctaaatctaacgcgctatccgcgaacacggcaaggattctggttcagctcttgtgtcgagcacttggggaatatcacaccgctagcttcgtcttcatccgattcttgggattccttgatgacgcacgaaatgacgacgaccttcgattgaagtcttcgaccgagcactggataagcaatgcacagagaccttgcttatttttgcctaacgtctgggattcggggttcgacgaggtcgggcagggaagaacgaggttcgacgggcttgacgacgatacaggagggtgacgtatatagagctgcaggtctggcgagctgacgcaagtgacggagacagccgcgtatggcagcagtgcatcgacaatctatggatttgggtgttttatctaataggcgggatgcgaggagccgagcaatcacttgaacatggtcgacggcgaggtctgctgggagagaatatcagcacacgacgcggcacgacgaacgcgcagagcttcaaaaccacgcgcgcgagatccaactactgcgtgatgcgccttaggaacaagcgcacgtggcagcggacaaggtcgacgagccaaacaacacagggtcaagcgacgaacgcatttggcgaggtcgcgaccatggatgacggcgttgggagttctgtaacaaggcaacggtggctgacgagctcgcaacgacgcgcacagggagctagagaccgacccgatgacgctcgacgaggaatacagcggcgattttctttttttttcaaggaaaagctcgcaggaagcctgcaggaatactggac

SEQ ID NO: 421 - DNA, 5608 bp, Zea mays
  Intron number 1 from transcript GRMZM2G153292_T02 (locus G RMZM2G153292) derived from phytozome v7.0 (chr-ID 1; pos 2 71106910 to 271112517)
gcattcaggtaacgagctgtccaattcctcttccattctcgcactgttaggttagatgtgtaatcggtatgggacttccgtcgctgatgcgtgctgtattcggtgggactaaatcgggggaggaaatggcatttcaaatcggtagatctgtagggatctggctgtatgtgatggtggctgcccagatccgcgtttgtcaggtctgatccgtatatatggtgagatggtgtctgatcgaggttcggttgtttttatctggatttttggatagaaaactcgaatggcgattagccgaaattgcgcattattttccatgatccaatgaatttagtagttatgtatcatatttgttgttaatttatgcctatacgtgtgttaggtgtgagtgccctgaaatcgtttaaatgcacaggcattcacgatctgtaaattttcataggccaagttcctattgcatgcctataccttcgattcgatgtacggttacagagttagtatacttaatgttaattgatgtacaatacatctattcgtactgttagagcatctccaacaaggagctctaaaatagagccctaaaagttaaaataggaccgtatttaaagtgtgtttaggattactccaacagttaggccttaaataattctatttaggaaataaatcacgttattaggaaataaatagttgtagactaagaggaaaggaggatagggctccaacggtgtactatatttaggacccgagagaccgagccctataatcttttgatgattttttataaaatagggctactgttggagagcgttttataatcccacaccctatatttcaaaatacagccttgtttagactatctccagcgtgtagtgttaaataggagacgcggaactgtagactgtttgacactgtttgcatagtgaaatttgaattttgaaatagtggatgtgataggagatagaattggggatctgctggagatagcctagggccccttttggagatgctcttagatctgcaaaaaaatatgaatacgcatcagcattagacgccttgacccaattgccttttgctgtttagatctgttagaaagattatatatacaggaatgctgttatactaaattgcttttgtcctagttgttattagctttatgtaggactaaatgctgttcacatatccgaagtgtttgcaatcatggatttaatcatggctccttaggacaattgaaatttcgaattgtgtttaggggtggtaatggactctagattttacactaaaatttaaggatcgggctctaatcctattcatttttgaattaaaattatttaagggccctaactttttatgaagaagcgtttggatcgtgatccattaccacccctaattgtgtgtcatggtttgaaatatgtccattcaggcatgtgttaccttaagattatgcgtctgtctggtgtactagtgtaggtggcatgcaattttttttacacagactgcttatgttctccttttgtaagggcctgtttggaagctcccagtttttaagaaactggtttatagaattagaggtggttccaaacataccagtttatgtctcagtttatagaaattgattgtcagttccttaaaaaccaataagctatcaagctagtctctcctagctaaaagataaaaaccagtttcttaaaaactggattgcttccaaacaggacctaattggcataaataacactgctacatttgtattttgttcaggccgatggtcagatgcccggtgacaagaccattgggggtggtgatgatgctttcaacaccttcttcagtgagactggtgctgggaagcacgtccctcgtgctgtttttgttgaccttgaaccaactgtcatcgatgaggtgaggactggcacctaccgccagctcttccaccctgagcagcttatcagtggcaaggaggatgcagccaacaacttcgcccgtggtcactacaccagtaagtaacctgatctgactgtcagtttacaatgctcctggatatttgctttgtaatgaacatcttatttaaacttgattgcttgtcttgcagttggcaaggagattgttgacctgtgccttgatcgcatcaggaagcttgccgacaactgcactggtctccagggcttcctcgtcttcaacgctgttggcggaggaacaggctctggccttggttccctcctcctggagcgtctgtctgttgactacggcaagaagtctaagcttggtttcactgtgtacccatccccccaagtttcgacctcagtggttgagccatacaacagtgtcctgtccacccactccctccttgagcacactgatgtggctatcctgctggacaacgaggccatctatgacatctgccgccgttcccttgacattgagcgcccaacctacaccaacctcaacaggcttgtgtcccaggtactgtcttggtttacagcctaagcattaagtaaatggtctgtaatctgggcttttctctttaaccatcagttgttcctgtcgttgtacaggtcatctcatccctgactgcctccctgaggttcgatggtgctcttaacgtggatgtgaatgagttccagaccaacttggtgccctacccgaggatccacttcatgctttcctcctatgctccagtcatctctgctgagaaggcctaccacgagcagctgtctgtggccgagatcaccaacagcgccttcgagccatcctccatgatggccaagtgcgatccccgccatggtaagtacatggcctgctgcctcatgtaccgtggtgatgtggtccccaaggatgtgaatgctgctgtggccaccatcaagaccaagcgcaccatccagtttgtggactggtgcccaactggctttaagtgcggcattaactaccagcctccaagtgtggtgcctggtggtgacctggccaaggtgcagcgcgctgtgtgcatgatctccaactccaccagtgttgtggaggtgttctcccgcatcgaccacaagttcgacctcatgtacgccaagcgtgccttcgtgcactggtatgtcggtgagggtatggaggagggcgagttctctgaggcccgtgaggatctggcagcgctcgagaaggactacgaggaggttggtgctgagtttgatgagggtgaggaaggtgatgatggtgatgagtactagaagtatcctgatgcggtcatcgtcaggcttgtgtgctgctcttgtccccgttgtggtttgcaacacctgatgttgtaagactttctggttatgtccgccccgctgtgccactgggttattaagaacgtcgttatggatggttgtctacactacattattgcttctcgatattggaaaactgttatgcgcctcggtggattgtgttgttgtcgtaatgtcatcactcatacgccgctgggaattttgaggcctgtcaagcatcaggattgcgttatgagttaaatgcttcagcgacgtttaaacttgtctaaggtgccatctagatcatgaacttgtcaagggttgccacttagatcatgaacttcgtaaatatgtttttggatccaaaatatgtttttgatccttaagggtgtgtttggttgaatgtataagaagggatgaaagaggaatgtcataatttctatagtgtttggttgagagacaagtgaggacgagataaatacctaagaagggatgaaagaggaatgccacaatttctatagtgtttggttcagagacaagtgacaatttctatagtgtttggttgagagacaagtgagggcgagtaaataccgcaataattttttggtggcaccgaatttttgtgaagttgtatacattttggacaccaatagaaaatagaattaaaaaaatataaaactggtgtcatttaaatcagtgtcacgttattaaaatttaaaactatcaactaaaattgtctaatggattatttatgtggttttgtaaagttgtggagattaaacaaccagttttgaagataagtaagtgaaatagtcaaatataaaactaggttaagaatttaggtacacttacgactagtttagatgccgcaaaatgggttaaatttttcttcttattcaaaattaaataataaggtgaatttaactactctaatttcctctgtttttttaactcccaaactatcccttattcgtaataataggaagcggtgacagtttggtggtgagaactcaggtatcaacaaaaagaaatgtatttttgaaatattttgctcgtaatgccctgcaaggtttcgatttccgtagccagtacatgtccgctcttgacccaggtactgtgtcacgaaccaaccgaccgttgaacggacgtggagcacgaaccattaaaacaatcaaaatctcaggggctcaaacgaaaaaacaccgcccccttccctcgcttgcgctggcactccatcgtgggctcgtggcccaggctgtcgttctgttctataaagcgagacgagtgggagcaggcgtaaccctaattgagcatcgcagagataggcgtcttcgtactcgcctacctccgcggctcaaacctttcccccttctcccaattccttccgccggccgccgctccacccgtacgacgacaccatgagggagtgcatttcgatccacatcggccaggccggtatccaggtcggaaacgcgtgctgggagctgtactgccttgagcatggcattcaggtaacgatccgtcattccctcccccgttctccctctgttgaggtagatctataatcggtatgggggtttcatcgctaatatttgctggatttttggtggggctgaatccgccggaggaaatgacgtttcaaatcggtagatctgtacggatctggatgcatgtaatggtggctacccggatccgggtttgctaggtctgatccggagaactggtgtctgagcgagattgcaattgtttttgaactggaattttgatacgtagaatttgaatagggatcacccgaaacccacgtgcgtggtagatctgagtgcccagaattcgtttaaatgtactgtcagtttggatctttgaattttcataggctaagttccgtattgcctgttgatatgtgagccttgatgtacaaatacagactatagtatgtttagtgttaatttgatgtgagccttgatgaattttcacaggctaagttccatgcccacaatgcatccattcatactgttattaattctgtaaaaaaaacgaatacacgtcactcttaggcaccttaacccaatttgcatttttctgtttaaatctgttagaaatgggatagagactggcatgttgttatgtagtcctagctgttattagctttatctaggactaaatgctgttcacatatttcaagtgtttgcaatcggagattcaatcatggctccctaggacatttgaatcgtgtgtcatagtttgaaatatgagattcaggcctgtgttaccttaagatcatgcatctgtctggtctactactgtagatggcatgtattttttacatagactccttaagtcgcatattaacactactacatttgtgttttgttcaggctgacggtcag

SEQ ID NO: 422 - DNA, 1602 bp, Zea mays
  Intron number 1 from transcript GRMZM2G060061_T01 (locus G RMZM2G060061) derived from phytozome v7.0 (chr-ID 8; pos 1 0810230 to 10811831)
caacgccgccgactacccccttctcacccaggacggtaagattcaaatgctcgcttcccatctgttagcgagatctgtttgagtagctgttttgcttcacagccgcacagacttgtccggatctaaggcaaacctcagctctttacttggtccttattatgaatactcaaaattgcgtttgcggagcatttccattcttgaattagaggcaaagcatgctgtacgaacagatcataaaattgcaaggggagcaactggcactgttcggttgaggggtcgccgtagctacaaaaatcaattttgtgttcttcacagcatgttgttgacttgtattaagttgcgtttaatgttatctgtcaagttgcataattgaaatatgcctgaaaggacgaagggcccactaccccatcagaattaggaagaggcctgctgcttggtcgtttggatttctgttggactgtggtacgatagccgccttaggtgaaatagtgcaactacatgattgacatgatgtcttcttcattctctatttaggtaccagctcaaccactgtgtgctctcgtccttatgaggactctaatcaccaggaacaagctatgtaattcttggtgtggctttgtttgtgtcatctacctgtgtacgcctgtacacatacaaccatttattttatataaaccatataaatatacatgctgtctttcgtgccatcaataacaacaacaaagccttttagtcccaagcaagttggggccatctttcatgctatatgctgccaattgatgctgaattgctaactaggatcagagagtactgagcttattcttgtggtcaattagctaaagcttggttggacttcttgggaaccatcttcaactctttcttttgggcaatcaaatccttttcttttgcacagaatagattgtaatggtagttaactgtagctactgcactggattccaagtgaatctgattgctgatttacttgatacactccaccagaggtatcatgcatggtgacatgcataagaaaatatggggattttttttgacagagatcatgtagcattagttgctctatatgtctatagtcatgttatgtacttgctccttgagtttaagtaacataaatcagggcacgtctgccatactgtgagttcagggtatttaaactcaaagtctcatactgagcagaatatcttggacagtaactcagcaactgattaacccttcatttaaatgacatctaagagagctttaacaagtgcatcactgaattatcaacacaggatgcacaaactgatgttctgatttgtggcgtcctttttcctcatttcctgatactacctatataacattgcctttttatgtgatacacggtaattattgtaacttcatctgtgttatgtgctgcttccactatgtcgcacttagttcacaccctttcttatgaagtctaattttgttttttaatagatactagcatgttctagttttgcttttggcttgtgtattccgactgacacctcttaggggttcttgagtttcgtgttcatgattctctgttttctttttgtcttttgtcccttgctgcagacttgatcc

SEQ ID NO: 423 - DNA, 2955 bp, Zea mays
  Intron number 1 from transcript GRMZM2G176358_T04 (locus G RMZM2G176358) derived from phytozome v7.0 (chr-ID 5; pos 1 75650149 to 175653103)
tgattcacgggggccatcctccacgcccttttcttgtctgtttggtcgtgccttcgcgtatacttgctatttttttgcgatttgccgtcctattattctttctgacgtaatgtcggtccttcaatctgatgtttcatatacaaactcaaggattagattcgaatgtatatttttttagagcggttgttattaggttggagattctgtgccatggcggctgcgtctcgtcccgttcgattgatccaactagatggtagatgcggttgcgaatatgaaaggtctgagagcacggatgcgcgatgtttaacagcacgtacagcagaatcatagtcgtagaagactcatatggagttccgagtttggttgggccgaccacgatgtagctcacccgtagccagaaagttgtacacccttagcagaatcatatttgtttgaagaaggattttgctatttttgtagccagtatagatgaatatgaatatactccctgcttcccaaattagtattcgctttagcacttagtatattcaaatagatgatgatgaatctagacacatacaaaacacatacattaattgttgtatgagtccattaaatgtctaaaacaaattttaatttgggacgtagagagtactattgatcctcacttgcaagttagcttgctctgagacgtcagatttgtttaggtcattactgggtgaaatgttccatgttttgtctggaaactcctttgcaatgttgctaaattatgaaactgggattcttgcttaggcacatttgtggtatggaatatgcagtttcaaacgctcaagtatttgaatgaaacttctgattatcttactttgtgtcctgtgtttgttatccaagccactaatgtactaacaatctggtgtaaggtgtttagtttttacgtgttcgataatcatgcattggttgaaccataattttttccctgtagtttattttcttggaaaatacttcatgcttatgtgcacctgcttttctgatgttcattaagatagtagttcatgcgacactgctcttgctatttatacatttaatattacaaagtttaaaatcaacactgtgcacacaagcaagtacataactaaattttatatatattcatgatagtgtgtgcaaaagtgtgaacaaaccaaacaagatctgtttatgaactagtttctgtagccagctaaccttgatgcaatgcaaggtaaggttgtgaggagaataagtattgttgacgatagtataatttattagatatggtgaactttgttggactttcttttttatttgaaacctggaaccatgcttaattgtttagctttatttacaaaactctttctatctttaacatttatatacagcaaacagttaggtaaactagtagcttatggttatgggtagatgcaacctgttaatggagatggaaaatttcgctccaattggcctttatgcatcacctttatgacactgctgttgctatttatgcattgaatattacaaagtttaaaatcaatactgtgtgtgagtacataattaaataagatatgcattctttcatgactgtgtgtgcaaaagtgtgaacaaaccaaacaagatctgttttgaactagtttttatagccagcaaaccttgatgcagggtaagattatgaggagaataaggaggtgtttggtttctagggactaatgtttagtcccttcattttattccattttaatatataaattgataaatatagaaactaaaatagagttttaatttctatatttgatgattttgtaactaaagtggaataaaatgtagggactaaaaattagtccctacaaaccaaacaccccctaagtatttgtgaatagtgatgatagtataattcattagatatggtgaactttgttggacctccttttatttaaaactgactaccatgcttaattgtttaactttatttagaaaactcattctatatgtaacatttgtatacagcaaacagttaggtaaactagtagcttatgcttatgcatagatgcaacctgttaattgagatggaaaacttccctctgcattggcttttttgcgtcaccttttcgcactattgcggagtaagagcatctccaagggaacctttatttttgactctcaatttagctctccataaagattaaactctatatgtagcatctcattcgaactgacttcaacatgcaagttagtttggctagccggagtggccagccaaatttgcctagtgagggagccaatttagggggtgtttgggattgcctccaggttccaactccagtgtggagctgtagtttataatatcaatttaagtagttttaaaaatatttttaatataaatgataaacaaaatgacttatctaaatgtcttctaaagactcacagctccagctccacggttttctagagcacttaatgacctgctccaccaactccaccaaattttctggagctgtcccaaatagggtcttagagagctggatagattggtgagttggatggctggtccgttaaagatattttgctattaagtagctaaaatttagattgacaagtcatttggctagtctcttggagatgctctaactggattacttttgacacatcgccttttattttcatgttattgtgtgtggagtacctgacttttttatatttatcaccctttttttactttgactgtcttaggtgatgagctgtgactgccaaaataaaaaaagaataattatgctttgatacttcctttaggtaacatatataccaggtgtgaactaacctgagacttgtggactttgcttgaatctcttttgtggggaagatctgttcactgagcatgatctgtagccagagcttcattgtatatgctcatttcattgtgtggttatttttgtaattcagtcttttgtgtaggacatcatttgctag

SEQ ID NO: 424 - DNA, 9796 bp, Zea mays
  Intron number 5 from transcript GRMZM5G885592_T01 (locus G RMZM5G885592) derived from phytozome v7.0 (chr-ID 9; pos 1 8163311 to 18173106 reverse strand)
gacggcttgatattcccaaggaagttgatcctctggtagcaaggatcatattcgaatgctggcagaagtgagttataagaactgaacctgttgtctgatcaaagtctcatgtctcagccatggcacttcaaatttgtgctaacatgtgctctgtcaatcgccagtgatgttgggaccatgcttcgtcgccgaaggtcttatagagagaagcgatcctcggatgaagctgtttgtataaaatagccgaaggtccctcttcgtaaagcttcggcattgcgaaccgacttaaagatagaatgaccttttagtccataaaaggtctgagtcaatattgtaagtttttataaggggcatacttgtaaattcctcacaggctgcgtcctgtgcctataaataggtgaacagtacccccgtactgttcacgttgacttggcatttgcttttgcgtcacacttgtattttcatctccttccaagccgaaggtacatttataattcaatattgtctctatttctctatgatgagttaataaagttaaacgaataatgttatatgattatttatgctatcttttatgtttcatatgcttcgtcttttactaatgtatgctgtaatgatgaaggttagtccttcatgaccttcgtccggagatcgttatatcctaagggaaataatgcttcaaaggacgaaggaccttaatgtttaacattttctgtgttgccttgttcttaactcatagcatttgagaacaagtccccaacattggcgcccacctccggtgaactcacttccactttttgagctgatggcttcgttcaacgaccaagctggagctgcttcggacccgaagctggtactaccaatcacaggtggttcgtcctcagagccagctaacaagaaacagaagaaggaagcacagagaagggtacagcatgttggggtgcaaggacccttcatcaagacaagatggtctcacattccctattacctttttccccaagaggaccttcagctcaaagattacccacacaacgatgccatggttatctcttgtgttatcaaaggatttgtggtccacaatgtcttggttgacacaggcagtgcagctgacatcatatttgctaaagccttcagacaaatgcaagagctagaagataagatttatgatgctacacatcctctctgtggcttcggaggaagacagattgtagcactgggcaagatcaccatgtcagtgaccttcggattcatcaacaacactagaactgagcaagttgtgtttgacattgttgacatagaatatccttacaatgcaattattggtcgtggtactcttaatgccttcgaagcaatccttcatcctgcttatctttgcatgaagataccttcggatcagggacccattgctatccatggaagtcaggaagccgcaagaagggccgaaggtaactggactgactccaaagcaatccataatatagatggagccgaagcttgtgaacagtacaaattcagaagggagaaagcagcttcagcagatcagccgaagcccatgctcttatgtgaggacatagcagagcagaaggtactgttaggctctcaactatccgaagagcaggaaaaaaccttgataaggtttttgttcaataacaaagatgtttttgcatggtcagccaatgatctatgcggagttaatagggatgtcattgagcactcgctcaatgtcgatccatctttcagacccagaaagcaaaggcttcggaaaatgtcagatgataaggccgaaggtgctcgcaacaaagtcaaaagactcctcagtgcaggagttatcagagaagtaaagtacccagaatggctggctaacactgttatggtaaaaaaggccaatggcaagtggcgaatgtgcatcgatttcacagatcttaacaaggcttgtccgaaggatgaattcccgttaccaaggatagactctttagttgatgcagcagcttcgtcagagctcatgagtctattagactgctattcaggctatcaccaaatttggatgaagaaggaagatgagccgaagactagcttcatcactccaagtggcacatattgctatcttcggatgcctgaggggctcaaaaacgctggaggaagtttcagccgaatgactgcgaaggttcttcaatcccaaataggcagaaatgtattaacttatgttgatgacatcattgtcaaaagcacgaagcaggagaatcatattgctgatctgcaggagaccttcgccagtttcaggcaagctggcttaaagttaaatccagaaaaatgtgtcttcggagtgaagaaggggaaatttcttggatgcttggtttcaacaaaggggattgaagctaatccaagtaaaattgaagctatacttcggatggagccaccaactacgaagaagggagctcaaagattgacaggaagattggcatctctcaatagattcatatccagatcagcagagagaaatttaccattcttcgaagtgctgaagtcagccgaagtctttcaatggggatcaatccaacagaaggcttttgaagaattaaaacagtatttaatagatctaacaacattgaccccaccaatgccaggggctcctttgttattatatgtggcagcttcgcactcagcggtaagtgcagcgcttgtccaggagaagcttgatggtcaagtcaagaggcaggccccaatatattttgtatccgaagttcttagtttgtcaaagaaaaattatacagagctggagaagatactgtatgctgtcttgatggcctccaggaagcttcggcactatttccaagcttacaacataattgttccttcttcgcaacctctgaaggatattatgaggaaccgagaagctactggaaggattggaaaatgggctgctgagctcaatgaattttgtattgaatatgttcatagatcttcgattcagtcacaggcactggcagactttattgctgattggacgccaggggctcaggaggaggaaacaaataaagacaacgaagcctggacagtgttttgtgatggatcttggggaaccttcggagcaggagcggctgctgtgttggtttcaccttccaaagtcaaaacttgttatgcagcaaagcttgattttaattgcacaaacaacattgctgagtacgaagcattgattctaggtcttcgaaagttaaaagcaatgggaatcagaagagccatacttaaaactgattcccaggttgtttcgggtcatattgacaaaagttgcaaggttaaggatccgaagcttgaaaaatatctggatatggttcgaagagttgaagcttccttcgaagggttttctgtcaaaaatatccctagaggacaaaatgagcatgctgatttgctagctaagtcagcagcacaggggctgcctttaccttcggatgtatttttcgaaacaataaaagcaccttcggtggaacttcttgaaagagcagttcttaatatatctcctgtttttagcgaagattggagaaccgagattatctcttacctccagggtaagtttctttcagatgacgaagcttataacaagaggatagaagcaagagctcgcccatatgtcatgatagaaggggagttgtataaacatggagtttgtgctccgctgcttaaatgcttatctagaaccgaaggtatagagttaatgaaagaaatacatgcatgcctgtgtggatctcacattggatctaggccgttactcggaaaaattttccgtcaagggttttattggccgaaggcagcttcggatgcagcagaattggttcaaaagtgcgaaggttgtcagaaatgtgcaagagatcaaaaacaaccttcgtccttgacacagctcatacaacccacttggccattgcaaaggtggggccttgacttgttaggtccgttaccaccagcccaagggaacctgagatatgttgtggtagctgtggaatatttttctaaatggattgaggcgaagcctttagccacaataactttcggctaccatccaaaaatttttctggcagattattgtttgtcgttttggggtgccaaaggctatcactgtggacaatggaacacagtttgactccgaaagctttcagggatttctgtgaccaaattggtacgaagatccatttcgcatcagtcaggcacccggagtcaaatggactcgttgaaagagccaacggcattataatgacaggaataatgaagctaatcttcaatcaacctagaggaaaatggccagatcagctaaccaaagtggtgtggagccacaacacgacaacatcaagatctacaggcttcactccattcaagttgttattcggtgacgaagcaataactccagaagaagctaaagccggatcaataaggatagtagcttcggcagaatcagattccgaagctgcttattctatagaaaaagatgctttagaagggatcagactgcaagccgtggagaatattaataaatatcaagctgaaacagtcaaatggcgggatagaaaggttcggctaaaaaatattgagccagggcacttagtgcttcggagggtggccaacccggaaacagtgggcaaattgcagctgaaatgggacgggcctttcttagtagcatcttcgtcaaggcccggttcatacagattgaaagacatggacggcaacgacattcctagatcttggaatgcggatgagcttcggcgatattatgtataattcgatgtaatttttcacatttttatttttcctttcatggcacccttttcctttccaaagggggagaaaggtttttaatggggccagcatatgtaatttccttttttagtcttataagagcaaaatcccccaaagaatgtaaatgtaaaagctgagagcgcaccatcgagtgccgaaaagtaaaaggcgaagaagctccaaagacgttcctaagggaatgcagagcttataccgcctaagtaaaaggcgaagaagctccaaagacgttcctaagggaatgcagagcttataccgcctaagtaaaaggcgaagaagctccaaagacgttcctaagggaatgcagagcttacagcgaaaagtcaacgctgattccgccaaaagtaaaggcgaagaagctccaaagtcgttcctaagggaatgcagagctgaggtgtgaatgtttttaagaaaataatggctatgaatatggcttcggatacgtgtttggccattcatttgcacaacacattacatcatagcatttgcattcataaacattcatctaagcatatgtaggataatcatcttcatcacataaaatggttgcttcggcaagaaaaggaaaaagaaagggaaaaaagagcttcgtacacaaaaaagaagggaaactgttgtttttatgaaggagagcttcggcaaaaaggaaaatgttgttttctatgcttcgttgcgtacgaaaagaagggaaggtgtttttttcgccttcggctcaaaaaaggagatttcgtccacatcaaagcatttctcatacatcagtcaaaaggttaaggatatattacaaggtatggatagtatacatggaagttttgtttacatttacaaaagttctcaaaagtttttcaagtactgtctgcagtctactatctaaaccaccaaggagcttcggtttcgacgttatttttgatcatcagcttcggcttcgtcatcctacatgaatagggtcattggaagtcagaatcaagttcataggaaaaggtaagcacaaggtatgatttcttactggatcaaggtggctacgagcttcgtctccagctttctctcgaccaccttttgtccatatcatctttacaaatcgattcgagatgcttcgggcgagatcagggatgtcatccaggattgatggtgacaaagtaaaatttggcctattgacaattttcccatgatcacagccagctttcatgaaggctgcagcggtccctcgagaagccacccaggcacagaagtcaccatgcccagctatgacttcgtcgagctcgtcaatttccccctcaatgtgttcgaaggtttttggtaggtcttcagctgagggggtaaacttttcgctactagctccaactgaatgaaaaatctttcttagtcgctgaatgcacttgttgctaaattctaggcatttttcttgaagatttgtcagtagttttctcaaatccgaattttgctgagcttcggcttcaagttttgcattgagatcttgtttttcttgttcgaactgctcagactggcggagaagcttcgtgttcagttctgatatttttgcttcagcttccgccagtaaaccttcggttgcctggagttcaaagttctttttctcaaaagcatctgattgctcctttattttgttttccaaatttccaattataacttcatgctttttatcttcaagatcttgctgcatttgcaaggctttgctcaatagcatactctacacaaacacaaccttcgtcagacatgtttttattagaagcaataaaagttaggggacaagtcatttaccttgaagttggagtaaaacaaactaccaacgacatgctgtcgtcggtagtggctgatatctgcttctagcttcggaaatccaatactcttggacagagtactaataactctggcccctgtttggtcccgaatacactctaatttctcatcatcaacacctccgaagaggagtgccccaggtttgtatccgcaggattgggcatactctttaagctcttctatttcagcttttgttagatgttctccaactaagttttggaacgcgaaggtttcgttttttgaagcttcgtcagcaatttcttttcctttctttgacgctacggtcacagtttctccggcagcagtagcagcttcttctgcagccatgtctagtagcatttggtcaatatgttcaattgtgctctctaaattaaaatcttcagctgaagtaacttcggcggctgcggcctccgaaggtgcaatttcaatatctgctccctctgcagccgctcgtgttttttgggccgaagctcttggcggcgttttgtcaattacctctgtcacggtaatgattctttgtttctttgctttgattgttttccttgatttctcgggctccttgtccttctgaaaaaactttgtcagttgaggatccagtggacttagcttcgcaggtaaggattcagtcattaccttcagaatttcctcaacaacagcagcagaaggcgatgcgggagtttcttctgcttcggatatttgttgctttggagaagaagttttctttttcttttgaattttcttctttattggttctttttcaccttcatctaaggcttcagttgcccttttccttttttggcccctggcacctttgttcagatcttcgtagtctgggtattcgaagcccagggcgtccaatactcgattcagccttcgttttggacggctgccgaaggctgcagtcatcaattgatcttctttcttggaataattaccaagtatttcgttgcacatcacttcaatcgtatctagccactcttggcaaggagttttaaagaatttcttaaatttgaagtagtaaggcaagcgtacaagttcaccctttttcttttccccctccagcttcggcatttcccactcttttacactagggaaaactttgaaagccaagaattcctggaccaggtctcttgtactgatattttctgcaattattttgaattcatacattgctttttgagttggaccctctggcaacatgtggcactgggggcgggtttctccgaaggtcagttccagtgggctttgcacaagtttttctttatcatcatcaaccttaacatagaaccattccgatttccacccagctgcccatttgcttcggtagctgatcacaggatacttcatagttttccgataagcaaaattataacaacccaaagttctcatgtaaaccatcctttctagcctttgtctgatagtgcagttcgtgaactcggcagaagctgtcagcaaatggttccatcgcctggcttcggagtgcccaaatgtaaacactaagcctaacgatagcgttaggggttagctggtgaaagtagattccaaaattcttcaatatctctgcaataatcccatgaagggggaatctcaacccagcctttaagaagcttttaaaaataacaatttcatctttctccggctttggggtagtctcttctcctccgaagcgtagtagcttcttttgattttcagtaaaatagcctgactttaccatcttggacaaatcagccttcgaaacagtagatttcccgaagtccaaatggctgggtttgcttggtgtggcaaggtgataatcatcttcggagtcagtttcctctgcttcttctccttctgcttcagcgattgcttgttctgcatcatcaataggaatcttttccgaaatcactagcccggaccgttgcatggcttcggagatagggacggtctccgaagcttcagtttcctccccctcgcgttcaaccctagcggtagaacggactcttgccatttagctaagaacttgtgaaactttaatacttttttctccgaagcaggtttcaagatggagcttcgttcaattctgacaaacaagcttcggcgatggttacaaattttggcaccaaaacagtgcaaatagcagtaaatgctgtggtaacttcacacctactcgtctgtttatatagtgccgcaggtaagaaggcgaagcggcagaagttttacaccaggcggacacccgctcgcactcgctgtacggtgggccgcaaagactgaacagtaattctgcacggtggggccgccacgcgcagggaaattgaatcgtttctcgacaacgagctcagggaaggtgttttttgagaccttcggcgctccgaagcttaagaaactttttttttcacggatcaagctcgttacgaaaaacaatctagcaccgcgaaaggggctactgttgggaccatgcttcgtcgccgaaggtcttatagagagaagcgatcctcggatgaagctgtttgtataaaatagccgaaggtccctcttcgtaaagcttcggcattgcgaaccgacttaaagatagaatgaccttttagtccataaaggtctgagtcaatattgtaagtttttataaggggcatacttgtaattcctcacaggctgcgtcctgtgcctataaataggtgaacagtacccccgtactgttcacgttgacttggcatttgcttttgcgtcacacttgtattttcatctccttccaagccgaaggtacatttataattcaatattgtctctatttctctatgatgagttaataaagttaaacgaataatgttatatgattatttatgctatcttttatgtttcatatgcttcgtcttttactaatgtatgctgtaatgatgaaggttagtccttcatgaccttcgtccggagatcgttatatcctaagggaaataatgcttcaaaggacgaaggaccttaatgtttaacattttctgtgttgccttgttcttaactcatagcatttgagaacaagtccccaacaagtgaccaagtaagctacagtttcttttggtacacatgtacatgtacttattttttatttcatgtgaggtcaacattgatatgaaggattatgtattaatatatgctttacatgtctaaaaaaggcttaatcattagttctgattttattacctgcagggtggtgaag

SEQ ID NO: 425 - DNA, 20649 bp, Zea mays
  Intron number 10 from transcript GRMZM2G103033_T04 (locus GRMZM2G103033) derived from phytozome v7.0 (chr-ID 6; pos 80927304 to 80947952)
ggactcttgctttcatataagacctcaaattacatgtaagctagagttaaagttcttgattaatatgacacctttagttagaaattgattgaggcttgaaaattatgcccaacataaacttggttgtgactgcagtaaagtttttgagaacctaagggcataaatgcataatacatttgttatgaatagcaatcatattcaatctaagggcactaggctgacgggcgaactctggcgaactctggttaagaatctacaaagaataagaaatatctggttgagtgacaccaagtcaccaagataaacaagactcctgactatgtgacgataacaggtaggatgaacaaccatcagtggcactaagatgaaattgagctccatgtgagtctcaaaggtacgataatcattaagtgaaacacgatcaagaagaccctaaatgtactcctcttgagacagatagaagtccacaagtgtggtggcctcaatcccgaggaaataataaagaggaccgagatcagacataaaaaactgctcactcacgtgccctcatggaaatatactatggaccatcaccagtgataatcatatcgccaacataaagaagagcctatccacaagatgatgtgtgcacaaaaagacttggatcatgagcattagcataaaaaccagcagaagaaaaacactctaaccaagcccgaggatcctgcttgagggcataaagggagcatcaacagacatgtcgtcgcagctgacgggcgaactctggcgagtggtcatgaagatgagcgccatcaagtcaaaggagctgactgcgaagacgtgcagagccaccaagcgatgtgaggaagcgatgtgaggaagaaacgattagagaaagagaggaataactctaaccctaatttttggctctgtatactatgttatgaatagctctcatattcaatatgagggcactaagctcaaatatatacatcgatacatgatagggaccatgtacaacaaggactgtttatgagaccaaacacaaaaaaggatacatgcatcagcataggtgtctaacaacatttactccagcagccttggcttcattcaagttctaatgcatatttctgttcatttttatatctttttttttcccgaacagcgcaggagaactgcgcgtcatttcattaaggtagaaaagagtacataggtctaagaagaccatcccaggcaccataaaaggcaccactcatgctagcttacatttacatcattggaaagataagtaaaacgaccacacgacccccagtttttaagctatgaggggcatcgacctggacctcaactcgtggagtttggaagcccccactgagcaccaaatccctccttccaaattaatagacacaatgtcgcctttgacacttggtctctttttctaaaaaatcaagcatttcgatgcttctataactcccatgccactaggattatcaatgaattgagtccttttcgaatttcttttggtgctgctgcatttgttttcctccaccaccctgaaaaactgaaagtcgtagtatgtggcgccatctgcagcagccctaattgttgcagaattatggtccaaatctcacgagcaaagacacatcatatcagcaagtgatttatgttactaaccttaggattaacaaatgataatgagtccctaaggactatatgatatatataggctgtaggtctgggcctaatgggccttaacacccctcctcaaactcaatgtggaaaaggaggatctgaagctgtgagtgagcaggattgaggaagaattgttgtatatagaatgagggcagactgtgtacatatataggagaggaggaagagaggtaaaaggaaacccctattttctagaatacgcaggagagctgcacatctttgtattaatagaagaaaagaaaggggggagagaaccccaatacagcacacacaccactagagagtaactacggatcaccgactaaaacatggaggaaacacgacccacaccgctgttttaagccagcaactcatcgacttggaggaaggacaaggccttggcaccagtcatggaccagagcaccgcctcttccctagccatcctaagggccgtgaccaagctgggattacaaccatcaaaaacacacctattcctatgcttccaaatggtccaagcacctaggatcactaaagaattgaaaccttttctcacaagatccgatgcttgggagctgctagacttccaccacgactcaaaggattcctcatgagctggatacagatcccgcagccccactgaattaaggaaatcaaaccagaactgcttagcaaaaacacacttgaccagcaaatgatttatggtttcagcctcttggtcgcataaggggcactgctctggtcggtctagccctctttttctgagcctgtcagcagtccagcacctattatgttccacaagccatataaagaacttgcacttcccaggagcccaagatttccacacccgctccgctggttcgaactgaactgaaccaaggaagagagcattataagaagaactagatgtataatcacctgaagcgctgaatttccataaatgtcgatcccctattccaggctggagcacaactgcatcaagcacttcacaaagttccaggaattcagcaatgactctgactgagattgccccttgcacatcggagagccaatgtaaattagggagagcatctttgaccaaccgtttgttggcaagacgcaagggcaccaaatcaaacaatgcaggagctatgtccttaatacatctcccctccaaccatctgtccttccagaaaagagggtattggctccatcaccgagcttagtaataatggctgcaacaatcagatttttaaccaccttacaaacatgaatggggaagtccgcccaaggcctactggggtctgttttctgcagccatggccagcgagctctcaaagcccaacataggttctttaactcactaatcccaagaccacccaactccttgggacgggtaaccttaggccaagccaagaggcattgaccaccacggaactctttcctacccctccagaggaagcccttcctcagcttatcgattgctttgaggcccatacaggaaggtcaagtgccagagctgcataaatcatcttagccgtcatgacaaactgcacaagaataactctaccagccctggtcataagttcagctttccaacttggcaaaaggctggccactctatcaacaatggcctgaacctggtcacttgtgagtttcttgggagacaaaggcaaaccgaggtacttacagggaaaaactgaaatattgcatggcagcaagtcctgtaaacaattcacctctttttttttctcgaacgcgcaagagacatgcacatcttttcattaagaaggaagagaaaaaggatccaaaatggatcagtacaggaagacccccattacggtggtcgaaaacaaagaaacaaaaatacatccataagtaaaaggaaccagaaactactttgacctaaagacctgggattggggctgttaagagatctaagtttgtagcccttcctaacacccacatgtccctttcctcctcggttctcttgatggcttcattaacgcatagggtggaacgaggatatagtttgtggggggcaatgggggtgagattagggtagcacttgcagccgaaaacccgaagatgttcatacgaggggtgtttgccaagtaaggcgaagtggggtgtgccgcaagtaagtgtcttggtgggaagaatatttaggagatatgtggcagtaccaagagcagcagcctagaaagtgggagggatgctggcttggaagagaagcgtgcggacgacattattgatggagcgaatgatgcgttcggccttgccattttggggggaagtgtaaggacaagacatgcgtaaaagaactccatgggtggagaaaaaatcgcgagcgttgaggttatcgaattcgcgaccattgtcacattgaacaccctggacggtgacaccaaattgtgtgcgaacataagcgaaaaaatttgtaagggtggaaaaggtgtcagacttaaggcgcaagggaaatgtccacaaatagtgggaatagtcatcaagaatggccagatagtatttatgaccagacacactagtgattggtgaagtccaaagatcacaatgtattaattgaaaatttcgagtggcatgtgatgaagaagaatggaaaggtagacgaacgtgacgtcctagctggcaggcatgacataagggggtatttttattcggggtacaagggatggcagaagactgagctagctgagtgaggactgtagatcctggatgtccaagtcgttgatgccacaatgaagaggtggtagcatgaagggaagatgttgtgctcttgagtgggtagagtgggccggagctatcacaccgaaggatcacgcgccgagtgggaagatccttcacagagcagccaagagggtcaaattccacagaatagttattgtcagtggtgaattggcgaacagaaattaaatctttaatgagagacggtgaaagaaggacaatgttaagacaaaaattgtaaggaagttgagtggtgccagtggaagtgacaggaagaaggttgccattgccaacaacaatgttagagggtagatgattggaagaggagaggtgggaaagtataccagcgtcggaattcatgtggctggaggcacctgtgtcgaagaaccactcttgctgttggggatgttgaagagtggtggtttgaaaattggtggcaagttgttggagatcccaaccaggagggggtgcagcagcgccaggtgcagcagcgccagtgtagttaggggccaacccatatgcctgaaggggggggggggggcaggagcctgcccactggccgggaggtccagcaagaaaggcctgaggcagttgaggtggagtagcaggcactgaagtcggtggacgatgtgttggcggccgtgaccctggccacatgtagatggatcctgtccagggattgtagtagttgtggccacctgggggagtggaagtgtggctggaaccaccgcggttgccaccggaggaccgaccaccgcgcttgccccgcttgccacggtgctgaaaggaaccgccgccactgccacgcccaccagtctgctgctggtgattgggtgaaggtgggcgcggctgggacgactgggatccagtggagctgccggtgttggacagggcagcgagggcagcggccggagcagcttttgccatcgtgagttcctcaagagccaggtcgtcgcggacctgcagaaaactaggaaggggattggtgcggcgcaaatggagaccaagagcctggaagcgctcgttaaggcctctgacaatgttgaggactaaagtccgatcagaaacaggttcgccgagatcacgcagatcttcggcgagtttcttgtagcggcgacaatattcggcgaccgggagatcgccttgggagaaggagcggaattcttggtcggcataaagagcacgtgtggtgcggtttcccaggaactgggactctatagagagccagagggtgcgggcagaggcgctgcgctgagagatgatgtcagcgagggcatcggaaagggtgccaagaagccaagtgcggacgacggcattcatgcgaatccaatcaggtgactcgggaaaaacagaatcagagaggacgtggcattccagggaaaatttggtgagggtgagaaggaaagattcggaccagcgggcgtaaaagttggagttggtgtcaaggagtagagggacaagagcccggatgttggttactgcaacagcctgggcgtgaaggtttagcagcgtggctgcctcgtggtggagaagagcagcatgcagagttgcaggtgggatgtcgtcgtcggcgtgagtgccagtcgaacaagtgtcctcctccggctggggaggagcagcagccgcgcgctctctggcggcgcgatcctgggcagcgcgaacgcgggcttcagccgcgtcgcgttcctgctgggcaagcgcggcctcgctgtcggcagcagccgcgcgcgcaagggcagcctgacgggcggacagagcccgtcgctcatcctcttccttggcggcgcgaagatcggcgcctgaggaagtgtcggcgatgttgggatgctgaagcacctcggagccggagacagcatcgagaggcgacgcaggaaggctggacatggcagcgccgagtggtgggcgcgcgctaaggcggaagcgaaaaaaaataggagaaaggatcggtcggtagacctaggtctgtgataccatgtgagtgagcaggattgaggaagaattgttgtatatagaatgagggcagactgtgtacatatataggaggggaggaagagaggtaaaaggaaacccctatgtctatggaagctaataatatactggatcaatcagatccggactcctctccctaattccctctatctataatagtagtggtcggccgacacagggttgccaggctcaggcccttccatatgtagcagattctctaacagaagcgttgagtttgatcaagtgaaattgatgttgtgctcttgtttgtgctttggtgaagaaatctgccaattgaaattctgagggtacatatggaagatcaatagtcttctgctgataatgagaccgagtaaatgatgcatcgacaccaatgtgtttagtaagttcatgcttcactggatatgagaaatctgtatagcactcaggttgtcacataatagaggtgtatgagtgtcacaagaaacaccaagatcagccaatagccaacgcagtcaaataatttcagcagtggtagtagcaagagcccgaagttcagcttcagcactagaacgagatatggccgtttgcttcttggatttccaggcaataggagaggatccaagaagaatacagtaacatgtagtagaacaacggtcaatagggtcacttgcccaagtggcatcagaatacgcatgtagctgaagtggactatcagaagcatagagtaaacatatggatcgtgtcccgcgtaagtatcgaagcacacgaagcaaatgaccataatgaactgaggttggtgtggatacaaattggctcaacatatgaatagcatgagcaatatcaggtctggtgatggtgagataaacaagactacccacaatatgacgatagtggggtctgctagaggtgtcccatcctgcggacgaagttttaaatgaatatccattggtgttgcaactgtccgtgtatcagtaattccagagcgatcaagaagatcttgtatatacttggactgagacagatataaaccttttgaagtctgctgaacttcaatacccaagaaatagctaagtggacccaaatcagacatttaaaattccttactaagttgcttgacatgagagatatgttctgagttgtcacctgtaatcaacatatcatccacatataatagaagtaaagtgcgcccttttggagagacatgaacaaacaatgcaggatcatgttcactagaagagaaaccagcagctgtgatgatagagatgaatcgctcaaaccaagcacgaggagcttgtttcagcccatacaatgcgcgacggagacgacaaacgtgccctgagggagtatcaacccccggaggaggatgcatataaacttcttcacgtagatcaccattgagaaaagcattcttgacatccatctaggagatagtccaagaagatgaggctgcaactgcaatcaaggttcgaacagtagtcatatgtgcaacaggtgcaaaagtctcatcataatcaagtccttgagtctgttgaaaaccacgagccacaagacgagctttatacctctcaatggaaccatctgattttgtcttaattttgaagacccatttgcatgtgataggaacaacatgcgagggtaaaggaacgatatcccatgtaccagtgcgttcaagagcagccaattcatcaatcatagctagctgccactcaagaatcccagaagcttcctggtaagtagtgggttcaacaattgccacaccagctcgtgggaaaccatagcgatctggaggttcaatggtatcatgatcacgaagacgatatccctgattaaaaacatcgttagactcataattgttagtacaagaatcaggtacaggatcactatcaggaccagccgcaggaatagaccgggaacgacgaatgtaggtttggaacagtaagtagaggatgacgtggaggtggaaggtggtgttatggaaatgagaacatcagatgtggatgtagaagatgatggttcaacgataggaatggaaggaagacacatgaagtagattatgtgggataatatgaggagtgagtagattggttgtgaaagaagggacaattttcattgaaactctcatctctagaaattcgaatatgacgagtagatggatcataacaactatatcctgtgttcaggactgtatccaaggaatagacactctacagattgagcaatcaatttagtccgctcacgaggtggtaacaagacataacatatacatccaaacacacgaagatgatcatatcatagagaagtcccaaaaagaacttcacccgatgatttgtcagaaagtttagatgatggttgtctattaatgagatacacggcaatggaaacaacttcactccaaaagtgtgaaggaacaaaagaagataacaaaagagtacgatcactatcaataatatgacggtgtttgcgttcagcaacacccactattcttaaggcgtcgcctaggcgtacgggcggtggtctaacgcctaggcgccttgcccgcctacctcgcctaggcgtccaggcggcggtccaacgccttggaccgccttaccgctttaaaaaccatggcaacaccattttgggcatgagcaccaggacaagaaagttgagctagagtaacctctatggtcaatatctggcgaaaattattagataaaaattcaccaccagaatcggaacgaaaatttttaatagtagcagaaaactgggtgtgaaccatgcgagtgaaggacttgtaaatagaaggcaattcggagcgacgtttcatgaagtaaatcccactataacgagaatgatcatcaataaaaatgtcataatatttatgaccacctttagaaacaaacggagctggaccccaaacatcagaatggattagatcaaaaggtttagcagaatgggaattactaataaaatatgggagttgtatttgttttccaagatgacaacatttacaatggaaactagactcaacatgtgtaggacataaacatcctgactttattagagtagacagacgagatccacataaatgaccaagacgatgatgccactgggcgaatgacatcgtggggcccgaagcagcaagcacatgaggtgtagtggtatggtatgaaggaagacacaaagtatccaagatgtagaggcgaggcgaagttttacggcgacggccagtcccaatcacatcccctattttgcgatccttatcaaaacaagacgagtcatcaaatccaacaaaacaattatgatcggtaatttgaccaacggatagtagatccatggataactcaggtacaaaaaatatatttaggacaataaattttggatcagaaagagaactcttgttggtgacatgacataatgtaccatcagcagtctgaatagaagtaccctcggtgacaggtgtagtagtcgcgagccgtgactggtcagatgtcacatgaaatgaagctccagaatcaagaacccaagatgatgacaaagcaccagcagatgaagtagcagccaccgcaactgagcctctaggagatggtcctgtaccacgaccacgagcagcacgacgaacacgaaaatcagccagcttctctggaaacttagcgaagcagttctcagaccgatgagtggtctttttgcaatgttcacaaggctgaaaagaggtgtttctggacttttgagcagcagccaacacactttgagaactcacaccagtaatagaagacatggacttaagacgagtctcttcagcaagtaattcagataacgcctgagccatggtcagagtatcaaaactgtgaagcagccttgcacgaagagaatcaaattcagatcgaactcccataacaaatctgtatgtgaaaaacttctcaatgaacttgtgggctgggcaaggcacagttgtacaagcaggcaccatggaggtcaaagcattcataagacgatcaaaggctgaatagtattcatcaatggacatatcatgttgctcaatgacatgagtttgttgcataagggtatgtaaaagagcaccgctgttttgaacaaaccggtccttcagatgtgaccagatagccttaacagtggtgaatttagacagactcataatcatagttggtttagtgctattgaccattctggatgaccgtgacttgagcgtgaaggtgggagacgacgtccatggcgcggttgtcggcgtcccgatgtgggtcggcccgctgccgtgtagcggccatatccagttcgagtccgacaaggacctccttttcccaggatagtgcggcggacttctcctgtcgacgcgcatcggcgacgacctgctatagtgctgtggtggccaaagtagcggcgagggcatccttctgcagcaggcacgcaacttcctcctcagcagtcgccaggcttgaggtggtgtcgtcggccatggttagggggtggggctgagacagtggctggctgtgatggataggtaagcggaagtgaaacctaggtcttgtgataccatgatagaggatatactgccatatgttttgtgtgtcattgattgaggagaacaatacacatatataggcagagcgccttgaggtgtcgggaaccccttccctatggttggccagtgcaactacggctgggaaggtgataggtgcatcttaggctgggccttagacacacaggaatggcccagcccacaccagcggacagaacagacatattgtaacagattcaaccagtccctccgaaggagtaccagccaacgtagccttaggcttcctggttctcgaccgatgacgacaatgtttgctcctcgtctcagaagcagaagtcaccattgctgccattgttgaatgagaaacttgttccgtgggagggctgagccgctgccaaaatgccaattgacgtggtgcggtctgaagaggtccactggcaacgagatcctagatggaggcacgcccaataggctccttaaccaacttcctagcctttacatcaccgccggcgaggcgatcccagattgaaacacccatcttacaccttaaccagcgtcttggtaccaccctttctcgggcaggaggacacccgatgtggcactggactccaccaaacgatagtacttggagcgaccagaacgcttggtggtaaacagagccaaggaggggggggggggaggaagccagcgccgcttggggaggggagggacccggggacggtggtcgccggcaccgaagtggctggcagtgaggggttgggggttgggtggagccgacaatggtgggaaatgaaggggcgggagctgagggggcaaccatattgtgccatctttatatcttgaggtttgggatcccaacattatgagttggtacttaaactaccatgttttctattgcaatatatttttttatcagaacctattgcagtatgttatcccctagatggcgggaagaatggctccaccgcttgctctcgcgctctcccccaccgccgtttccatcaaggccgcacactgtatttgcgcctaccaccatgcgtctaccctagcgtcgtcgtccgtctagtctgcccctcctgacctcccctgcccgcgatggcttccccatttgtctgggatgataggggaaaattgctcgcaaattctttggattgctcgccgggtaatgctttctagctctcggttcttcagagatttggatcctcggtccaccaagcctcctcctcttcgtcgttgggctctttccttctgatagtggtatttcgtcgctacacttttcgtctttcagttgaattagtcagcttggctttgcattcggttcttggtggctccccgacgggtttccatgttgttgaagaatcaaaccgacattttcgtttttccgtggccactaagaaagttggcttcatggtccttgctcttaaacgcatcatctctgcaaactttgacgtctattttgatctttggggaaatggaagtccaaactggagaaaggaatatgctctttggtgcagagaggaggatgaaaaatggacagttgttcgacgtagaagcagccgttcttctaaattggtctcctttggtaagaatttggtgcaagactcaccaaacaagaaacatagcccttcaggtcatttcaacaagggatttcttagatcagctatgaagagaaagtcgaagctcatccctcatgatactcccactgttcaatatcagaaggattttgtgcaaattgggagtttcaaatgtcctttgcaaattttaaattcatactttaaatttcgttttagtttgaaaaaccgctctctggtgtctgccttggttcttgttccagctatcttttctcgtatttccccggatttggatagggtggagtcacttggggctctgtgaaatacccgtccctcatcggctgggagtgttcgcacgttgcatgcgcactcgtcttatgtgggacccacctttctattgggtaagctttgctaccggggtctttcgaacacccacttcgtcaggacttgttctagtttggtcaggtgccgccggtgttttctgctcggtcacttggaaaaatattgcaaaagttcgcacgtccagccttcgtcgcgtctgatttggaggcctaaggcacactgcattaatggattggcggcaggctgcaatgatgctcctgctgcattagaagttgctcctggagacttagccaaggcctctttgccttcggtcaccgggcccactcaatcttccggtaaaggcgccttttcgttctctgtcatgggcacccgttcggctcccatccctaaaagagtttcgctcgactttcaattggcttcggttgctgggtcgactgctatactcggttgcaggcatcttctcgtttctaacgctggccacctctcgcgtactgttgccgagcaaaccctcttgccctcaccttctcgatctcatcagttcggtggtctctcgttgttgccctcgtctctcttgcaaatggccaacttcccggtggatcctcgtcccttcctcccgccggagatcgtcattgaaaatgctcagcctgctagtggctaccagcctccctctgcccccctttgcctttcgaacctattggctcattttggcatgatcaggaggttttaaaggaaaagcaagtgatctccaaagtctacaaaaggcaggcgcctaagaagattgagcacattgacaagaagactaggtctgtgcgtaagaaggctgctcaacaatctcaccctcttccagccagaagaagtgcaaggatcaatgctgtaacaaagggactcaaggtctccttcgagcttggctcgacctctgggtcccgggaggtacccactcagcatctgcctctttcgttggaagatttgaatgatctcaattcttttcctgggccggttaaattaaaattcttgcaaaatctcttagattttgatggtacttatccagaaattaatgatatcaccttgcagaaggtggccattgagcattgtggtgtgccccctgaggaggcatccgtggaggtgctgcttcatccggacccaggagcggagggcaacatcatcctcgctgaaaacactcaagaaatatgaagattcacaaaacaacgtctaatgatgtgtgggtggctgtgttctgttgcgtcccaaaacttatgtggtggtttaatagtcttctctacccgtggggtactttctgatggtttttggatcttgggcgacaaacatcatctggccttggtggcaacttggccttttatttgcattttgatgatgctgttttttctgatccattttgacctgggtaagtctgtggggagggctctaccctttggttgcgtcctggatgtgatatccaggtgcttgttggccctatttatttttgtgatatttaatgaatcacaatgttagaaattggaatgttcttaattggaacattagaggtttgaatgatgaaggcaaagcccatgcaatgcggcaaaaaattgaagaaagtggttgttccgtcttctgcatccaagaaacaaaaatgaaggactttacccctcattctttcaaacgtttcgcccctagcgcttcaccaaatttgcctttagcgcctctagaggtgcctcggggggtattatgatgggttcgaataattctttgcttcagggctcgatccaagaggttaatcttttctctattacggtggagtttgtctctcgtctttctgcggaccattggaagttaacaatcgtgtatggtccttgtattagatcggatcgtattgcttttatcaactggttgagctctctcgacatctcttcaatagataactggatgttgttggggatttcaatttctatcgctcagcggccgacagaaataagccaggagggaatgtttctgatatgaataccttcaactctatcattagcagacttggtattatcgaaatcccccttaaagggtgaagtttcacttggagcaatatgcggtctaatcctttgttggttcaattagattggtgtttcacttctattagttggactactgctttccccaacaccttgctttttcctttggcgaagacctccgaccacattccttgtgttgcctaaatcgattcttctattccgaaagctaatatctttcgttttgaaaattattggattgagttgccaggatttactgaagtggttcttaatgcttggaacgaagaaatcagaacaacatctagtgctgcaagaatagttgttaaattcaaaaatgtcagatacgttctttagaaatgaagtctacctccaatttaaatcgcttgatttcgaactgcaataaggtcaggacttctttgactgtctagccaacagggtacaaccaaagatgtcgagtcttattcacagaaaccaatatgggtttatcaagcacagatctattcaagattgtttggcatggacctatgagtacattcatcaatgccaacagttaaaaaaagaagcggtggtcttaaagctggattttgctaaagcctttgacactatagagcacagtgccatcctggcgatgcacagacaacttggtttccctgacaagtggatcagttgagtccagaccattctcggttcaggttcctctgcagttcttttaaatggtgtgttggggagattttttcggtgtatgagaggggtaacacaaggtgatcctctttcactactcctctttgtcattgcggtggaccttctccaatgtatcatcaacaaagccgcaaatatgggcatcctctcggctcctcttgatggcgtcacccattcagactttcctgtcattcaatatgcagatgacaccctaatcatcatgaaagcctcgcaaagagagttgttctgtttaaaaggtattctacattctttctccatgtcgacatgactcaagattaatttccacaaatcctgcctcttgccgatcaacctggatgtcaccaaaaccaatcagctggaggcagtatttggatgccaagttggcaccttcccgttcacttatttgggctttccaatgggtctcgcgagaccaaaagtcaaagactacctccctctcatcaccaaagttgaaagaaggctcaacgccatcagttcttggttttctatggccggtagactcacactggtcaactctactttctcggcgatgcccatctttgcaatgtgcacccttaagattccaataacggtcatcaacgctatcgactgtattagaagggcctgtctctggcgcagcaatagtgaaatgcgcatcgtaatcctctggtcgcctgggacaaagtttgttgtcccagaaatagggggcttagcggttctcagcctaaggatccagaacacggccctcctgctcaaattcattcacaaattctatggcagagaagacattccttgggtaaatcttatttggaccactcaatactctggggcaagatcccccatgcctctcctgaaacaggttccttctggtggaaggatgtgttcaggttggttgactattttagagggcatgctatgccctgggttggggatggaaggacaattttgctgtggcatgatgtttggaacaatatctcccccagatccaccttcccttgtcttttctcatttgccaagaaaaaagattgttcacttcaagattttttagccaacatggatatggagcgcaattttcatactcctttatctcctcaggctgctcacgaatacctggctttccacgagatgatgagcaatcttcaaaattctgcatttgccaaagataaatggacctattcatggggcaataccactttcagctcgtccaagttctatagtctcacttttcagttaatccagcttcccgttgcctttaattggatttggcagtctaagcttggcaagaaattcaagatttttgtatggttggtctttagggacataatcaactccaagaacatcctcagaagaaagaattttttgccgctggacatcaaccttgattgcgatctgtgtgacatgcactgcgaagagacgacctatcacctgctatttcgctgccccttcagtatagattgttggagttatgtgggtcttcactggaatcatgacctcgatttcttccctatgattcacgaggctaagggtgcctggtcatagtttcttcatggaaattctggcactggtgctatggtgcatttggaagcagaggaacaactacatctttaggaatgaggccccttcgttttctttttggcgacgctgtttcaacgacatgttgaagttacagatgctgagatttaacccctcttctagagctaggcttaaactctcgatagcttcttgctcgtcttctttatttccccttctaatcactatttcattccaaaaatagttccaataaaatcgtgctataggggcttcccctatagcctttttcccctcaaaaaagatagatggcaggagaagtcctgtgcttttgccacctcaatctcctccagaactagagattgtttttttatcgaacacgcaagagagctacgtatcatttatattaagaagataaaaagggtacatcgaaaacccaacactcgagcacacactccctaactgcctagcacaaagacagatgcacctgttacagatacaccaagaggaacgaccaacacatcaacagcccaactctagagcctgggcgactaggtgggagacaccctttgcccctgctaaacaccaaagatcaagctcctctaagacctggttcacaaggcctgcaaggctaggcgaaactccatcgaacacatctattgcgaagcttccaaagagaccaagcccctagaataaccacatagttcagtacttgtttgatgagaccagagactacctcatttaaatgctgccaccaatcaccaaaggaaacaactctaggttcagggtagagagactggaggccaaacttctgaagaagctggaaccagaactgtcgggagaagacacaggaagcaagcaggtgatcaatggtctcaagttcctggtcacaaaggaggcatctaggatgatgttgcagccctctccgatcaagccggtcggccgtccaacatctatcctgagcaaccaaccacatgaagaagcggcaattacccggtgcccaggatttctaaatgcgctcccaagggtcaaagaggatccctccctggaagaaaccctctttttttttgaacaaacgcaggagacctgcgtgtcattatattaagaagaaaaaaacataggagagacaagacttgtcaacccctaatacaaaggcccctaggccgagacccccctgacattaacacaacgcgccacgcacacagagcaataacccgaccaaaacgaccaccagcaggcaaactgctagggtcccctagggagctggcgtaggaggaggtcctgcagagctgatgcaccagccaagcaccaaacgctgccctcctcaatcacagcactctgaactcgctgggtgcagggcacaaccccttcaaaaacacaagcattacgatgcttccaaatctcccaagcgaccaaaatgatcaaggaattaagaccttttcttagtctcttctccacttccttgatactttggcaccaccaatttgagaaacgagtgcatccaggctgaggtacaatggaagaaaccctcataggctgacttcgcagagtactgtccagagggtgagtgttgattggtgaaaccctaatctgataccatgtagaatagtggagtgacttgtattgataatagatgggatacaatatatatagagactcaaccctaaccctaataggccggcagcccaacagtggtgccggcccacacacacagtctaacagtgagaaccgccaaatgtgtctatcttcaacttctgggtccagcacaatctgagagagattatcccaaagctgcaaatactcaagtaaggcagcaacaccaagggcgcctttgaggcccgaaatccaaatattttgagtcaaagcatcaagaaccgttcggctgttggctcttcgtttgggaaccagccggaatagcagcggtgcaaggtccgcgatacactgtccatggagccatttatctgtccaaaaaaatgtattggctccattcccaatctcgctacaaatagcgattgagaagaaggactgcaccatatttggggcatgaactggaagtgaatcccaaggcttatcaggctcagttttttgaagccaaagccatctcatgcgcaatgcctagctaagcttctgaagatcagtgatgcccagaccaccaagctcctggggtcgacaaactttttgtccaagcaagcagactatgactaccgttgagctatttccttcctctccacaaaaatctcctcctgatcttatctatttctttgaaagcccacggcggaagctctacagccattagcaaatataccaacatggaggtcagaactgattgcaccagaattctcctaccttcccgagataacaggtcggccttccaaccaggtagacggtccgcaatccggtcaacaaacagctgaatttggtcccttgtcaacttaagcagggaaagaggtacacctagatatctaaaggggaattctttcagctcacatggaagaacgttctgaaccactgccacatccgtttctgtgcattggattgggaaaacattactcttaagcaggttggcctttaaaccagaggcatcaccaaagagttccaacatatccatggttaggttcaaatccaagtcagcaggatgaagaaaaataaccacatcgtcggcataaagggacaccctgtgttgcaacgcccttgtggataggggttgtagcagtccagcagcggaagctttagcaaaaatcagactgaggacatccataactaggatgaataacataggggagagggggcccccttgtcgcagccctcttctatgaaatatggtgaatccggggattccattcagtaagacctgtgtagttgaggatgacagcagaccactgagaacatcccgccagatcagcccaaagcttagcttctggaggacctccagtaaaaatgactaggatactgaatcaaaggcttttgtaatgtctagtttgaggagaatacgagcctgcttctgaaggtggaggaacctggctgtttgtttaacaagcaaaaaattgtcttgaatggatcagcccttgatgaaagcactttgattcggtttgaatttcttaactgatttgcatgcccccatgtcagactattgaaagttacgtcaccaaatggaagtgtcttgtcagactattgaaagttattatcaccagttggaagtgttaactagagtcattctgagctatagattttacatatggaaattacaacagtcacctttactttagaaatttaatgaaccttgtaatttaaatagcttccactcatgtatgcaattcggaaattgtatatgttctcccctaaaaatgttttaaaattagagatggtaaacatcacattttaaggtttatctgaaaatctagcaggacattttgtgtttgttgcaaatctgcataggaatcatcgtgcaacattatctaaacattgaactcagaataaagagcgcatgtctaattcatacatccattccacatacattccacacatgatttttaaacacttcgtgcacaatcttattcttgtgcatataacttcaagtttcaggatatatgtgtttctcactttgctaatgattgatatccatttagat

SEQ ID NO: 426 - DNA, 55271 bp, Zea mays
  Intron number 1 from transcript GRMZM2G049495_T02 (locus G RMZM2G049495) derived from phytozome v7.0 (chr-ID 2; pos 1 046801 to 1102071)
tccgcttctgcgtcaccgatcggtagtaagcacaggtgattttaacgttttagtccctagcactttcctcttttttactttctcacctttctttccttcccccagtctcccaccaccccaactccgcacagaaggcccccgtgcccctgtgttatatttagcataggcttttatgactcattagatatttatatgtgttaatccataaaatactaacgatcatcactaaggtagtgtttggttgaagaaccaagtagaacgaagctattctgttacagttttgttgttgtttggttacaaagtaactagaacggaatggctccaattagagaatattctcctcagatccggaaccattccgctccaaaaaatcaaccggacagagccgctccgttcccatcccgttctcacagtcacgctccgttccgttcactctgcaaccaaacaaaaaacagagccgctccgttccagattaccaaacacagaacagagcgactctgttcctagaatcagggatcgaacggctccgttctacttggctcctcaaccaaacactacctaaatttcaggccacaatctcaagtacgacgttctttgatatacccgctttttagagatcgttaagttgaatatttatctttgacagttttatgcgaagcgagttttatcaaagtaaggttttaagcacataagccacaattagagacatttcataagtatttagatattacatatatcttatagactataactagcggttgaactcatacaattatatgtttcttctaggatgttctggggggcaacatctctgctttactaagccacttgaatcatattaagaacttaaccaacctgtcgtgcgacaatgaagaaatgtgtatcccaaatgctttataattttatttaaagagatgtctccctcagtcaaccactagcttgtttcatcgttccattttaaggattccttaccattatggtgtgacaagtgggttttaagctcatctctcgatgcatcttctatccattacattatcttatatcacattattggcgatgtgtttttcttgttaagttagtaattttactctatcatgtccagatggattgtcatgatttaagtaattatcgtatgtattccattctgctagtttgcataagaaactttgtcaaaatttataatttttatagcttattgtatttagacatattttgtttggctggtagttagcatgggtcttacatgatgctcgcgcctgcgtacctaggggccgatagcgacgcgacgtgtggtcatgcattccctcctcttcggtcgccacatagaagattcacatttctaggctggattatcgaatgcaaaggaagatttccttatgaggagacaattttaagttggtaatggacaagaaattaggttcttggacaatatttggattaatgttttaatgctcaaggagcaattccctaacctatataatattgtgcactagaagaacgtcggtcgcagacattctaccacaggtaacacaaaacttaactttctgtggatcgattgttggggtcaaattgatagaatgataacatttgttgaatttagttgataacatcaatatagagtcggaaagatatttctttatatggaagcaaatgcattctgacatttctcggttcggtctatacacaatattctaatgaccactccaaatttaaatcaaccttgctacttgtggaaactaaaactcccctttaaaatcaaaatctttctttggtatctaggaagaggagtaactcttactaaagacaaattgaaaagatggaaatgaagcatgaagtgtagtttatgtaacaaaaataaaattattcaacactaaatatagaaatgctcattaatcatattataggggcatggcaaagtagtaacggaattttgtaaaaaacaaatattaataggggtaggagccatgatttggtcaatctagctctattgtaatgatatagttttttaatggaaacagatttaattatgtaggtgatttttaaggagtggctcagattctagagattgttgtaaaaggtggagttatactagaactaggtgtatgctcgtgcgttgctatggagttaacattgtcggggaccataattaggggtaccctcaagacgcctaattctcagctggtaacccccatcagcataaagctgcaaaggcctgatgggcacgattaagtcagggatcagtccacacgagtgactcgatcacgcttcgcccgagcctagcctcggccaaaggcagccgacctcgagagacttccgtctcgcccgaggccccctttttatggcggacacatcaccggctcgcccgaggccttggcttcgctcagaagcaaccttgactaaatcgccacaccgactgaccaaattgcaggggcatttaacgcaaaggtggcctgacacccctatcctggcacgcgcccccggcagagccgaagtgactgccgtcactccaccgctccactggccagtctgacagaaggacagcgccgcatgcgccactccgactgcagagccacttgacagagtgagtctgataggcaatcaggccttgccaaaggcgccacggcgaactccgctccgcccgaccccagggctcggactcgggctaagacccggaagacggcgaactccgctccgcccgaccccagggctcggactcgggctaagacccggaagacggcgaactccgctccgcccgaccccagggctcggactcgggctaagacccggaagacggcgaactccgctccgcccgaccccagggctcggactcgggctaagacccggaagacggcgaactccgctccgcccgaccccagggctcggactcgggctaagacccggaagacgacgaaactccgctccgcccgaccccagggctcggactcgggctaagacccggaaaacgacgaaactccgcctcgcccgaccccagggctcggactccgccctggcctcggccgaacgacttccgcctcgcccgaccccttggctcgggctcgaccacggcaacagaaagcagactcaacctcggcttcggaggaacccccacgtcgccctgcctagggcacagaccgccacgtcaacaggaggcgccatcatcatcccaccctgaatcgactcgggtcacggagaacaagaccggcgtctcatcccggccagctccgccggaggggcaatgatgggcactccacaagctctatgacgacggcggcccccagctctcttacgtaagcaagacaacgtcagcagggactcgaccgctccaacagctgtccctccgtcaggctccgccgcacctccgacagccacgacatcacgccagcagggtgcccagatctctccggctgccacattggcatgtacctagggcgctagctctccctccgctagacacgtagcactctgctacatccccattgtacacctggatcctctccttacgactataaaaggaaggaccagggccttctcagagaaggttggccgcgcgggaccgaggacgggacaggctctctcttggggccgctcgcttccctcacccgcgtggacgcttgtaacccccctactgcaagcgcacctgacctgggcgcgggacgaacacgaaggccgcgggacttccacctctctcacgctcggctccggccacctcgcctctccccccttcgcgctcgcccacgcgctcgacccatctgggctggggcacgcagcatactcactcgtcggcttagggacccccctgtctcgaaacgccgacagttggcacgccaggtaggggcctgctgcgtgctgacgaacagctccccgtcaagctccagatgggcagtctccagcaacctctccggcccgggacggtgcttcgtttcgggactctcgagttcatgtccttcgacggcagctacgacatgacacttcttccaccgccgcgcgactacgacaatggcggccgacaacccgcccgccggcggcggaatcgacgacgtcttccccgcgtggtggaagagcaatattcgggctcgctccgttctctcccccgccaacggaggaggaggcggagccgtcaaggccagacgggaggccgcgcttcgtcggccgtcgagcgaatcgacgcccccgacgccccgacggaaggcacgccggacgtcgacctcgcgttcgagacggaggcgagcgccgtccccccgcggcacgctgaccttgagcaagaagacgacgccggcgcgctcgcggaaagcctgcaggacgtcgccctcgaaccagagatgacggcgcaaccagtccccgatgtgactacgtcgctcctcgtcgaccaaaaggtaacgactaactcccatcttgcgtcatttcgactcggcctcaacccgccaaacgacctcgttttggcgggcgctctcattgaggcgagtgcaaccccactgaggttctgtatgcggtcgcctcgggaccgactgacggacgtctcgacctacgggccctctgggtccgaggaagatgacgatcccagcatcggttgggatttctccggacttggcaaccccagtgccgtgcgggacttcatgaccgcatgtgactactgtctgtccgactgttccgatggaagccgcagccttggcgacgagagctgcggcccaagccgcgaatgtttccacatcgagctaggggatcccaccgaaggcaaccatcttggcatgccggaggatggtgatctccctaggccggtgcctcgcgccgacatcccacgggagctagctgtggtccccgctccggcggggggttacgacccacaactcgagcaagtccgcgaggcgcaggccaggctcaacgagggaacaggagcgcttgagccgatccgtcgggacgtcggacaggcatgggtgggccaacccctggccggagaaatacgtcatctgccccaaggtctccagcaccgcgtcgccaacgatgtcaggatcaggccgccgcccgcatccagcggggtcggtcagaacctggcaaccgcagcaatgctcatccgcgcgatgccggagccgtcaaccaccgagggtcggcgaatccagggagaactcaagaatctcctggaaggcgctgcggcccggcgggccgagagcactgcatcccggaggcaaggatatccctcggaacctcatgccgcgacttcccgattcatgcgggaagcctcggtctacaccgggcgcacgcgcaacaccgcgcctgcggccccgggccacctcggcaacgagcaccatcgacgcgaccgtcgggctcacctcgacgaaagggtgcgccgaggctaccacccccaggcgtggggggcgctacgacagcggggaggatcggagtccctcgcccgaaccacccggtccgcaggccttcagtcgggccatccgacgggcgccattcccgacccggttccgacccccgactactatcacaaagtactcgggggaaacgagaccggaactgtggctcgcggactaccgccttgcctgccaactgggtggaacggacgacgacaacctcatcatccgcaacctccccctgttcctctccgacactgctcgcgcctggttggagcacctgcctccggggcagatttccaactgggacgacttggtccaagccttcgctggcaatttccagggcacatacgtgcgccccgggaattcctgggaccttcgaagctgccggcaacagccgggggagtcgctccgggactacatccggcgattctcgaagcagcgcaccgagctgcccaacatcaccgactcggatgtcatcggcgcgttcctcgccggcaccacttgccgcgacctggtgagcaagcttgggtcgcaaaacccccaccagggcgagcgagctgatggacatcgccaccaagttcgcctctggccaggaggcggtcgaggctatcttccgaaaggacaagcagccccagggccgcccatcggaagaagctcccgaggcgtctgctccgcgcggcgccaagaagaaaggcaagaagaagtcgcaatcgaaacgcgacgccgctgacgcggaccttgtcgccgccgccgagtataagaaccctcggaagccccccggaggtgcaaacctcttcgacaagatgctcaaggagccgtgcccctaccatcaggggcccgtcaagcacaccctcgaggagtgcgttatgcttcggcgtcacttccacagggccgggccacccgccgagggtggcagggcccgcgacgacgacaagaacgaagatcacccagcaggagagttccccgaggtccgcgactgcttcatgatctatggagggcatgcggcgaatacctcggctcggcaccgcaagcaagagcgccgggaggtctgctcggtgaaggtggcggcgccagtctacctagactggtccgacaagcccatcactttcgaccagaccgaccaccccgaccatgtgccgagcccggggaaatacccgctcgtcgtcgaccccgttgtcggcgatgtcaggctcaccaaggtcctgatggacgggggcagctgcctcaacatcatctacgccgagaccctcaagctcctgcgcgtcgatccgtccaccgtccgagcaggcgctgcgcccttccacgggatcatccctgggaagcgcgtccagcccctcgggcgactcgacctcccagtctgcttcgggacaccctccaacttccgaagggagaccctgacgttcgaagtggtcgggttccgaggaacctaccacgccgtgttagggaggccatgctacgcgaagttcatggccgtccccaactacacctacctgaagctcaagatgccgggccccaacgtggtcatcaccgtcggccccacgtacaaacacgcgttcgaatgcgacgtggagtgcgtggagtacgccgaggccctcgccgagtccgaggccctcatcgccgatctggagaacctctccaaggaggtcccagacgtgaagcgccatgccggcaacttcgagccagcggagacggtcaaggccgtccccctcgaccccagcggcgacaccaccaagcagatccggatcggttccgggctcgaccccaaataggaagcagtgctcgtcgactttctccgcgcaaacgccgacgtctttgcgtggagtccctcggacatgcccggcataccgagggatgtcgccgagcactcgctggatattcgggccggagcccgacccgtcagacagcctctgcgccgattcgacgaggagaagcgcagagcgattggcgaagagatccacaagctaatggcggcagggttcatcaaagaggtattccatcccgaatggcttgccaaccctgtgcttgtgaggaagaaaggggggaaatggcggatgtgtgtagactacactggtctcaacaaagcatgtccgaaggttccctaccctctgcctcgcatcgaccaaatcgtggattccactgctgggtgcgaaaccctgtccttcctcgatgcctactcggggtatcaccagatccggatgaaagagtccgaccagctcgcgacttctttcatcacgccgttcggcatgtactgctacgtcaccatgccgttcggcctgaggaatgcaggcgcgacgtaccagcggtgcatgaaccatgtgttcggcgaacacatcggtcgcacagtcgaggcctacgtcgatgacatcgtagtcaagacacggaaggctcccaacctcctctccgaccttgaagtgacattccggtgtctcaaggcgaaaggagtcaagcttaatcctgagaagtgtgtcttcggggtgccccgaggcatgctcctagggttcatcgtctctgagcgaggcatcgaggccaacccggagaagatcgcggccatcaccagtatggggcccatcaaggacttaaaaggggtacagagggtcatgggatgcctcgcggccctgagccgcttcatctcacgcctcggcgaaagaggtctgcccctgtaccgccttttaaggaaagccgagtgtttcatttggacccctgaggccgaggaagccctcggcaacctaaaggcgctccttacaaaggcgccagtcttggtgccgccggcggacggagaaaccctcttggtctacgtcgccgcgaccactcaggtggttagcgccgcgattgtggtcgaaaggcaggaggaagggcatacattgcccgttcagaggccggtttacttcatcagcgaagtgctgtccgagactaagatccgctacccacaagttcaaaagctgctgtatgctgtgatcctgacgaggcggaagctacgacactacttcgagtcccatccggtgactgtggtgtcatccttccccctgggggagatcatccagtgccgagaggcctcgggcaggatcgcaaagtgggcagtggagatcatgggcgaaacgatctcgttcgcccctcggaaggccatcaagtcccaagtgttggcggatttcgtggctgaatgggttgacacccaactaccaacaactccgatccaaccggagctctggaccatgtttttcgacgggtcgctgatgaagacgggggccgatgcgggcctgctcttcatctcgcccctcggaaagcacttgcgctacgtgctgcgcctccacttcccggcgtccaacaatgtggccgagtacgaagctctggtcaacggattgcggatcgccatcgagctaggggtcagacgcctcgacgcccgcggtgattcgcagctcgtcatcgaccaagtcatgaagaactcccactgccgcgacccgaagatggaggcctactgcgacgaggttcggcgcctggaagacaagttcttcgggctcgagctcaaccatatcgctcggcgctacaacgaaaccgcagacgagctggcgaagatagcctcggggcgaacgacagtccccccggacgtcttctcccgggatctgcatcaaccctccgtcaagctcgacgacgcgcccgagcccgaggtatcctcggctcagcccgaggtaccctcggctcagcccgaggtaccctcggctcagcccgaggtaccctcggctcagcccgaggtaccctcggttcagcccgaggcaccctcggcccagcccgaggtactctcggcccccgagggcggggcattgaacgtcgaggaagggcagagcggggccacgccagaccaggattggcaggccccgtacctgcaatatctccgtcgaggagagctacccctcgaccaagtcgaggctcggcgggtagcgcgacgcgccaagtcattcgtcttgctgggcgacgaagaggagctctaccatcgcagcccctcgggcatcctccagcgatgcatctccatcgccgaaggtcgggaactgctgcaagaagtacactcgggggcttgcggccaccacgcagcaccccgagcccttgttggaaatgctttccggcaaggcttctactggccaacggcggtggctgacgccactagaattgtccgcacctgcgaagggtgccaattctatgcgaagcggacgcacctgcccgctcaggctctgcagacaatacccatcacctggcccttcactgtatggggtctggacctcgtcggtcccttgcaaaaggcgcccgggggctacacgcacctgctggtcgccatcgacaaattctccaagtggatcgaggtccgacctctgaacagcatcaggtccgagcaggcggtggcattcttcaccaacatcatccatcgcttcggggtcccgaactccatcatcaccgacaatggcacccagttcaccggcaaaaaattcttggatttttgcgaggatcaccatatccgggtggactgggccgccgtggctcatcccatgtcgaatgggcaagtagagcgtgccaacggcatgattctacaagggctcaagcctcggatctacaacgacctcaaccagttcggcaggcgatggatgaaggaactcccctcggtggtctggagcctaaggacgacgccgagtcgtgccacgggcttcacgccgtttttcctggtctacggggctgaagctatcctgcccactgacctggaatacggctccccaagggcgagggcctacaccgagcaaagcaaccaagccagccgagaggaatcgctggaccagttggaggaagctcgggacagggccttactacactcggcgcggtaccaacagtccctgcgacgttaccacgcccgaggggtccggtcccgagaactccaggtgggcgacctggtgcttcggccgcgacaagacgcccgagggaggcacaagctcacgcccccctgggaagggccattcgtcatcgccaaagttctgaagcccggaacatacaagctggccaacaatcaaggcgagatctacggcaacgcttggaacatcaaacagctacgtcgcttctacccttaagatgttttcaagttgttcacatacctcgcacctacgcaaagtttagttgtcaaggaagggtcggcctagcctcggcaaagcccgaccctccctcgggggctaaaaggggggagaccccctctgcgtcgaattttttcctcgaaaaaggacctctttttagcaggatttcttccgtgcttcttgactactttggaaagcggatcctggaaacgacgaggtacacgtaagcagccaaggctgaccgagccgagggactcctacgcctccgggatacggatacctcactcgtccccttctgcgataagtaacttgcgctcggataaagcgactccgtggaccgaacgagtcatcacgttcggaagctctcctgccgaagcagtccttcaagctttctcgactaaatcggggacagggcctcatggacgggtgaaagtacgcgtaagcggcaaggccgaccgagccgagggattcccacgcctctgggatacggatacctcactcgtcccttccgcgaaaagcaactctcgctcacacaaacatccctattaccgacagagtccagatgctcgaaacaagagggaaaaaggacgcggcttcgcaagcgcggcgagggcgtgttcttctggcctcggcggccgcagaaagcgcacgctacaagatgatctgatcctgcaggctcgggtcttcacgccgaagggagccgtagcaccctcggcatcgacgacgtctacagcaaagcccgacccagcctcgggcggcgccgaggtccaggggctcctccaggaatccggcccgagcaggcggctcaaccggttacccctggggcctcgggcaaccggcttccaagggcgctagcccgattcgaggcctcgactgaccgacttgggcgtcggcaccgctgacgggcgacacggctaggctccggccgaccaggttccccattctcgagccaactccgcctctgttcatactgatatcgctacccccggcctcgatccaccaaagggcggccgaggggtcccttcaactaagctagaggagcctcacgtaacaaggacgaacgggccgagggattcctacgcctccgggatacggatacctcacccgtcaccttgacacggggcaactcatgcttggtaaagcggtttagataataaaacaggcgagacttagtgctcggaaatgaggaaaaaacacggctccgtgccaaaattacatacacgttcaggcctcgacagccacaatgaacgaactcactggcattcgaagtgccattacaaacggaactccggttccccctccgcaggtacgaacaaccccactccgagggggaaggcctgcggagcaacggaagaccgacgaacggcgcgccgtcacctgctccagcagtggcgacgacggcgacttctgctccggggggccgaacagcggcaacgctgacctcagggtggatgccgctgtcaggaggcccccgcccgtgccaaaactcgtgaggcaaggacgggcagaaggccgtagaagatggaggtcagcccgtggctggtcccggccgccgcgccggcggaagaacctcttccggctgccgtggcagacgccgacgccgcaaggggccccgaagccactcgcggctgaagaccaggcacgctgcagctgccggacgccacgggcaatgcccgcttctccccccatcactgagtgaaggagcgggccaccgcccacgcaggggccgaccccaactcggcactctcccctccccagccttggtgatgaaaatccttgaggctgagaaaggggcagaggccgcagcccggctcgctttcccccaccatcaagctggaggtcgccatctcgggtgaccgccggtgaaggggtgtgaccgggctgcgtgatgaaaatccttgaagccgaacgatggctgagaggtaccaactcccatggagttgcgttcctccaacgaggaggcggaaaggcggcggatatcccccatccgggggcttggaagacgggaagacccggcgcttaagggaggaagaagacatggtcgccttacgaaaggagcctccctccttttaaaggcaactccccctacgtgcgcccccaggcgccgcgggccgagtcttctccaacacgctccaaggccctcccctgcgactcgggggctgggtcccgcatgtcatgaaagccggctcagggcagaagaagccaaaccgccgcgcatggtgcgcacgaccgtccagcggttacaggcgaccccccatttccgcccagaccaacgggcagaaggggcgagcagccatgcaggcggcatgcaaccgcgccagatggacgcgcttctccaacttctgacacgccagcctggggctcaggcccacgcgtcgagcaactggcacgccagttgctgcatgcaagcaactgcaccgccacttgtgccaccgtcgcgcctcttcggttgcgaagcctatgccacgactcgaggcgacccaacagcgccagactggcgcgtcggtcaaagcgaccgaaagtgggccggcagtaatagcggtggcaggcgggcaggcgcagcggtcacgtcgtcagccaggctcacgtcccatcctgagacagcaagagagcctcctctcacggcgtgaagacggtgcacccgtgacccgttcctcgaacggatcacctacgcgcaacggccgccccgccaaccactcgcctcgtcgcattaactccgcggcgggacacgcggcgcttctggcgggaggagcgcgcgacgcttcaccttcgccttaataaccgcgtcagaaaaggtacgccacgtcgtctgatttcgtatccttttccgttttcctctttctctatctcttgcaacagggaccggggaagggggataccccgagagggatccttctccgcgaaggaaccgggctccgcgccccccattactgatcaggggttcgaaggctggccccccgagggttcaacagccgcctcagatcgcgtgggcccgacacccactactggtcaggggttcgaaggccagccccccgaagggctccatggccgcctcaggctactcgggctccgcgcccattactgatcaggggttcgaaggctggcccccgaagggttcacagtcgcctcagacaccgagcgagggatgaccaggggtacgttcgatacataaccgaggctcgggctgcgctcccgaggtaccctaggacatatccgagaccagcgggaacgatcttgtaacggaatcccatcggagggaggcatcgagccctcggaccccgtcgccaggggaccgggtccggcaagtcacccgcaggtacttttgggcgtgcctctgggcccctagccgacccccaacgaacggggcacggacgtccactcggattacccgcttgcagctcaccggagacaccatgttcggtgcccatcgagggtaacatggcgcactccccccctcctccttgcggaaaggcgacgtaggggcgtatgtaaaaagccgagtctgtccctgatcgtcctctcgccctgtgcagaggctcgggggctgctctcgcataaaccggctccggccaaatcgttgacagcgtcaacataccagcccgagagcttgggccccgaccgtgcacccgggctacggccagttcgcatgagggaacgaccagaccagccgaagcgtaaagcgaagcattaagacctcgaaggagtgtaaccactcctccgaggcctcgggggctacacccggcgggtgcgctcgcgcgcacccaccggaacgaaatgcaaccgagaaaggctggtccccttgcaaaaaagtgcgacaaaagcctccaagcgagtgctaacactcccttcgaggctcgggggctactgtcggggaccataattaggggtaccctcaagacgcctaattctcagctggtaacccccatcagcataaagctgcaaaggcctgatgggcacgattaagtcagggatcagtccacacgagtgactcgatcgcgcttcacccgagcctagcctcggccgaaggcagccgacctcgagagacttccgtctcgcccgaggcccccctttttatggcggacacatcaccggcttgcccaaggccttggcttcgctcagaagcaaccttgactaaatcaccacaccgactgaccaaattgcaggggcatttaacgcaaaggtggcctgacacctctatcctgacacgcgcccccggcagagccgaggtgaccgccgtcactccaccgctccactggccagtctgacagaaggacagcgccgcctgcgccactccgactgcagtgccactcgacagagtgagtctgacaggcaactaggccttgccaaaggcgccacggcgaactccgctccgcccgaccccagggctcggactcgggctaagacccggaagacggcgaactccgctccgcccgaccccagggctcggactcgggctaagacccggaagacggcgaactccgctccgcccgaccccagggctcggactcgggctaagacccggaagacggcgaactccgctccgcccgaccccagggctcggactcgggctaagacccggaagacggcgaactccgctccgcccgaccccagggctcggactcgggctaagacccggaagacggcaaactccgctccgcccgaccccagggctcggactcaggctaagacccggaagacgacgaaactccgcctcgcccgaccccagggctcggactccgccctggcctcggccggacgacttccgcctcgcccgaccccctggctcgggctcggccacggcaactgaaggcaagactcaacctcggcttcggaggaaaccccacgtcgccctgcctagagcacagaccgccacgtcaacaggaaacgtcatcatcaccctaccccgaatcgactcgggtcacggagaacaagaccggcgtctcgtccggccagctccgccagaggggcaatgatggcgctccacgagctctatgacgacggcggcccccagctctcttacggcagcaggacaacgtcagcagggactcgaccgctccaacagctgtccctccatcaggctccgccgcaccaccgatagccacgacatcacgccagcaggatgcccagatctctccggctgccacatcggcatgtacctagggcactagctctccctccgctagacacgtagcactctgctacatccccattgtacacctgggtcctctccttacgactataaaaggaaggaccagggccttctcagagaaggttggccgcgcgggaccgaggacgggacaggcgctctcttggggccgctcgcttccctcacccgcgtggacgcttgtaacccccctactgcaagcgcacctgacctgggcgcgggacgaacacgaaggccgcgggacttccacctctctcacgctcggctccggccgcctcgcctctcccccctccgcgctcgcccacgcgctcgacccatctgggctggggcacgcagcacactcactcgtcggcttagggacccccctgtctcgaaacgccgacagttggcgcgccaggtaggggcctgctgcgtgctgacgaatagctccccgtcaagccccagatgggcagtctccagcaacctctccggcccgggacggtgcttcgtttcggggctctcgagttcatgtccttcgacggcagctacgacatgatacttcttccaccgccgtgcgaccacgacaatggcggccgacaacccgcccgccggcggcggaatcgacgacgtctaccccgcatggtggaaaagcaacattcgggctcgctccgttctctcccccgccaacggaggaggaggcggggccgtcaaggccagacgggaggccacgcttcgccggccgtcgagcgaatcgacgcccccgacgccccgacggaaggcacgccggacatcgacctcgcgttcaagacgaaggcaagcgccgtccccccgcggcacgatgaccccgagcaagaagacgacgccggcgcgctcgcggaaagcctgcaggacgtcgccctcgaaccagagatgacggcgcaaccagtccccgatgtgactacgtcgctcctcgtcgaccaaaaggtaacgactaactcccatcttgcgtcatttcgactcggcctccacccgccaaacgacctcgatttggcgggcgctctcattgaggcgagtgcaaccccactgaggttctgtatgcgatcgccttgggaccgactgacggacgtctcgacctacgggccctctgggtccgaggaagatgacgatcccagcatcggttgggatttctccggacttggcaaccccagtgccgtgcgggacttcatggccgcatgtgactactgtctgtccgactgttccgatgcaagccgcagccttggcgacgagagctgcggcccaagccgcgaatgtttccacatcgagctagggaatcccaccgaaggcaaccatcttggcatgccggaggatggtgatctccctaggccggtgcctcgcgccgacatcccacgggagctagctgtggtccccgctccggcggggggttacgacccacaactcgagcaagtccgcgaggcgcaggccaggctcaacgagggaacgggagcgcttgagccgatccgtcgggacgtcggacaggcatgggtgggccaacccctggccggagaaatacgtcatctgccccaaggtctccagcaccgcgtcgccaacgacgtcaggatcaggccgccgcccgcatccagcggggtcggtcagaacctggcaaccgcagcaatgctcatccgcgcgatgccggagccgtcaaccaccgagggtcggcggatccagggagaactcaagaatctcctggaaggcgccgcggcccggcgggccgagagcactgcatcccgaaggcaaggatatccctcggaacctcatgccgcgacttcccgattcatgcgggaagcctcggtctacaccgggcgcacgcgcaacaccgcgcctgcggccccgggccacctcggcaacgagcaccatcgacgcgaccgtcgggctcacctcgacgaaagggtgcgccgaggctatcaccccaggcgtgggggacgttacgacagcggggaggatcggagtccttcgcccgaaccacccggtccgcaggctttcagtcggaccatccgacgggcgccattcccgacccggttccgacccccgactactatcgtaaagtactcgggggaaacgagaccggagctgtggctcgcggactaccgccttgcctgccaactgggtggaacggacgacgacaacctcatcatccgcaacctccccctgttcctctccgacactgctcgcgcctgggttggagcacctgcctccggggcagatttccaactgggacgacttggtccaagccttcgctggcaatttccagggcacatacgtgcgccccgggaattcctgggaccttcgaagctgccggcaacagccgggggagtcgctccgggactacatccggcgattctcgaagcagcgcaccgagctgcccaacatcaccgactcggatgtcatcggcgcgttcctcgccggcaccacttgccgcgacctggtgagcaagctgggtcgcaaaacccccaccagggcgagcgagctgatggacatcgccaccaagttcgcctccggccaggaggcggtcgaggctatcttccgaaaggacaagcagccccagggccgcccgtcggaagaagctcccgaggcgtctgctccgcgcggcgccaagaagaaaggcaagaagaagtcgcaatcgaaacgcgacgccgccgacgcggaccttgtcgccgccgccgagtataagaaccctcggaagccccccggaggtgcaaacctcttcgacaagatgctcaaggagccgtgcccctaccatcaggggcccgtcaagcacaccctcgaggagtgcgttatgcttcggcgtcatttccacagggccgggccacccgccgagggtggcagggcccacgacgacgacaagaacgaagatcacccagcaggggggttccccgaggtccgcgactgcttcatgatctatggagggcatgcggcgaatacctcggctcggcaccgcaagcaagagcgccgggaggtctgctcggtgaaggtggcggcgccagtctacctagactggtccgacaagcccatcactttcgaccgggccgaccaccccgaccatgtgccgagcccggggaaatacccgctcgtcgtcgaccccgttgtcggcgatgtcaggctcaccaaggtcctgatggacgggggcagctgcctcaacatcatctacgccgagaccctcaagcttctgcgcgtcgatccgtcctccgtccgagcaggcgctgcgcccttccacgggatcatccctgggaagcgcgtccaacccctcgggcgactcgacctcccagtctgcttcgggacaccctccaacttccgaagggagaccctgacgttcgaagtggtcgggttccgaggaacctaccacgccgtgctagggaggacatgctacgcgaagttcatggccgtccccaactacacctacctgaagctcaagatgccgggccccaacggggtcatcaccgtcggccccacgtacaaacacgcgttcgaatgcgacgtggagtgcgtggagtacgccgaggccctcgccgagtccgaggccctcatcgccgacctggagaacctctccaaggaggtcccagacgtgaagcgccatgccggcaacttcgagccagcggagacggtcaaggccgtccccctcgaccccagtagcgacaccaccaagcagatccggatcggttccgggctcgaccccaaatagggggcagtgctcgtcgactttctccgcaaacgccgacgtctttgcgcggagtcccgcggacgtgcccggcataccgaggggtgtcgccaaacactcgctggatattcgggccggggcccgatccgtcaggcagcctctgcgcctcgatcatcaaggaagggtcggcctcgccatggcggagcccgaccctccctcgggggctaaaaagggggaacccttctgcgtcaagatctttttaaatcaaaaaagggggcctcttgcgttctcccagctacgttctcctggctatgtcagaagccgggtctcgaggagcgaatgcgggtacatgaaaatggcaaggccgattgagccaaggaattcccgtacctccgggttagggatacctcactcatcacctgccacgaaggatggcccaactcgagaagccactctattattgacgagctaggacgaacatgcagatggaaagaaaggagagtacgactccatgcaagaaagacaaaagtgttcaggcctcagcggccatggtgagacacacgttcaacaagaaactgttcaaacgagaatcaggcgccgccttgggaaggagccgcgccttcatctccacccccgccattggtggggtccatctcggcctccggtgacgtcgcaggaggaaggacctccgcctcaaaggtggtcgccaacaccacgctcgggccggcggcaaccgcgtcaagccgctgcacctccgccagagcggcatcgtcttcgtcaggaagacagtacccctcactaacccgctccagatccacaacgtagtgagaagcgagcacggcgaaggcccgccggacgccgtggtgtagcgcttcgcggactctgccgcgggcgtgaccacccaaggctcgaaggcggctctgaggggagcttcctgaagggacgtcaacggagccgagggcacgataaaagtccgagacggcctcggacatggccgcgaggtccgcctccctctgctcggcggctccggcgagcgcctcagcaagcgccttggcggactcgtcaagggcggactcaagctctgcaagtagccaggagaaatacctcaagtacaagcaagggaaacggacaagaaaaagaactaggaaggaccaagacgtacttccggctcgggcacggtgctccgaggccgcgacttgggtcgcagctaagtcagccgcgagggtctcggctcggctttcggcctcggcggcccggccttgaagtcggttccgttcctcgacgacctgggcgagctccgatcgctgctgttgcgcctccgcacgcgccgctgccgcctcggctctcaggtcggcgcatagcagctggaggtccgccaccttggcatcttgctgagaaaggcgcgtggtagcctcggcgagcgaagacctcagggatcgcagcgagccccagacatcaacctcacggcggatgaacaacgacttagcggcgctccggtccgtcagatcctgggaaaaggaaacagggcgtcacagcgagtatcacacagaaggaaaaaagggtatgcccgaaaccgctacctggaggattttggggacgtctctgcagaaaacctccagcgacgaccggagcgaccccaccgtcgcctctgcgcactcgtggagctcaccccaggactggtcttcctgctcatcatcaagaacgaagacggggtccggggcctcgcgggtccggaatcggagcaacgggcgtcgggccttggagttccgccgcacagcgatgaggctgtcgcccggctggacggattgcgcgaccgcgcccacctcttctggggtcttgggcaccgacgcatcagccatcctggcgctggcggcggctggacacccttcgacaaggacggcggcaacctcggcggtggcaggcgccgacatgaccggcacgacaggcgaactcagagccgcgtgggtgtcggccgcctcctcaaccacgatcgccgcctcggctgaggagccggcctcgggagcccgctcctccgagattggcgacgcccgagcccccgatgtcggagtaccccgcgagagggtcggctgaatggcgctggccgcacagctcggcgccgtcttgagggccttccggggtgccaggtcggtctagccgtgactccgcttgctggataaaaaaggaaggggatcacaaccgaaacatacgaataggaggccaagacaaagacattccgaggtactcacccactccgggccatgatccaccgcgcctggggagagccttcttggatcccggctctcgaaacggccgccgaggtccgcttcgccggcgcttggggcgcctgggaggcaggttccccgggcacggcagcgacgacctgagggtcactcccgtccgccaccagcacaagcggcggcctctggggaacagacgccttggtctggacctccggaactacttcagctcctccggcggaggggtcaggtggcctctcggttcgcccccgcgcctcgggtcgggagcccgatgccccgacttcgggggctgacggagtcggttcgctcgggggctggctcgacggctcttgtgccacaccccaggccgaggctgaggccgagacgggcggccatgccgtcatcatcatcatcatcatcgtcgtcgtcatcgtcgtcgggcgtctccggcgacggctcccttgggagtccgtccctctcctgctggcggcggcgcttctccaaggcgtcccgagcccgcctccgctcgcgggcccgggccttctccgcgtccttctttttcttcttctcctccgcggcgacccgccgcgctgcacggtccaccgcgtcctccgggacccgtggcagggagggtttgtgacaccccacatcctaaaaggaggggagaaaggaacccgatcataagaacccggagcagccagatatacgaagaagggaggagcaaacgctcaccaaagtcacggacccctgatcggggcgcatccgaagctgggagtatgcgtgggggtccggcttccccatcgcggccgacacccgccattggagggcgtcgaaagggagaggatcaggggacatttgtgagccctcccagtcggcttccggggtcatctcccagagcgacagccgccgctccgccaatgggagcaccctccgacggtgaatggcggcaatcactcccgcagcagtaagtcccccctcccgcaactccttcagggcctggagaaggggttcgagatttttctgcctctcgtgcggggtcccgtggcgccaggcgtcggtggcagctgtaactactcgctgggaaaatggtgggagcaactcaccgtcgttccggaggtagaaccaccggcgctgccaccccttgttcgaagacgcgagaatggcaggaatgtactgcaacgcccgcgactgcctcaacaagagaatgcagccgccggcccgcaccgctgcacggatcctcctctcccccgtcgacaaggcgaaaggctcggcgaggaagaagtaagtccacaaatcccaatggggagcaatccccaagtacccttcgcataacgctacgaaaatagcggcctgcgagatggagttgggggagaggttgtgcaactccaccccgtagtggaataagatggcccgcataaagcggcccgtcggcgcaccaaatccccgctcatggaaggagacgaagctcacaacataccccggcggtggggacggagcggctccgcccatgggaggaatccactctggccgctgcttgtcggtgagggggcggagcaaacctttgccgaccagctcctccagatcactcgccgtcaccgtggagaagggccacggatcgcgcggggggattatggtcactcggtccgccatcaccaaaatggagaagatggcggcgcggggggcagggaaggcggtttctctctcctccgactaaagtttcccgggtggcgaaaacctgaagggaaaagaagggagcagagtgaagaaccgtcaccgggccccctctcaagtatatgaaggccagggcgaaaccgtttccagcacgccgcctggatcggacgcaggattcgaaaaacgcgaagcggcacagccgttcctcgaaacggctcgcacacgcgcaacggccgccccgccgaccactcgccccgtcacattaactccgcggcaggacacgcggcgcttctggcaggaggagcgcgcgacgcttcaccttcgccgtaataaccgcgtcagaaaaggtacgccacgtcgtccgatttcgtatccttttccgttttcctctttctctatctcctgcaacagggaccgggaaagggggataccccgaaagggatccttctccgcgaaggaaccgggctccgagccccccattactgatcaggggttcgaaggctggccccccgagggttcaacagtcgcctcagatcgcgtgggcccgacacccactactggtcaggggttcgaaggccagccccccgaagggctccatggccgcctcaggctactcgggctccgcgcccattactgatcaggggttcgaaggctggcccccgaagggttcacagtcgcctcagacaccgagcgagggatgaccaggggtacgttcgatacataaccaaggctcgggctgcgctcccgaggtaccctaggacatttccgagaccagcgggaacgatcttgtaacggaatcccatcggatggaggcatcgagccctcggaccccgtcgccaggggaccgggtccggcaaatcacccgcaggtacttttgggcgtgcctctgggcccctagccgacccccaacgaacggggcacggacgtccactcggattacccgcttgcagctcaccggagacaccatgttcggtgcccatcgagggtaacatggcgcactccccccctcctccttgcggaaaggcgacgtaggggcgtatgtaaaaagtcgagtctgtccctgatcgtcctctcgccctgtgcagaggctcgggggctgctctcgcaaaaaaccggctccggccaaatcgttgacagcgtcaacataccagcccgagagcttgggccccgaccgtgcacccgggctacggccagttcgcatgagggaacgaccagaccagccgatgcgttaagcgaagtattaagacctcgaaggagtgtaaccactcctccgaggcctcgggggctacacccggcgggtgcgctcgcgcgcacccaccggaacgaaatgcaaccgagaaaggctggtccccttgcaaaaaagtgcgacaaaagcctccaagcgagtgctgacactccctttgaggctcgggggctactgtcggggaccataattaggggtaccctcaagacgcctaattctcagctggtaacccccatcagcataaagctgcaaaggcctgatgggcacgattaagtcagggatcagtccacacgagtgactcgatcacgcttcgcccgagcctagcctcggccaaaggcagccgacctcgagagacttccgtctcgcccgaggccccctttttatggcggacacatcaccggctcgcccgaggccttggcttcgctcagaagcaaccttgactaaatcgccacaccgactgaccaaattgcaggggcatttaacgcaaaggtggcctgacacccctatcctgacacgcgcccccggcagagccgaagtgactgccgtcactccaccgctccactggccagtctgacagaaggacagcgccgcctgcgccactccgactgcagagccacttgacagagtgagtctgataggcaatcaggccttgccaaaggcgccacggcgaactccgctccgcccgaccccagggctcggactcgggctaagacccggaagacggcgaactccgctccgcccgaccccagggctcggactcgggctaagacccggaagacggcgaactccgctccgcccgaccccagggctcggactcgggctaagacccggaagacggcgaactccgctccgcccgaccccagggctcggactcgggctaagacccagaagacggcgaactccgctccgcccgaccccagggctcggactcgggctaagacccggaagacggcgaactccgctccgcccgaccccagggctcggactcgggctaagacccggaagacgacgaaactccgctccgcccgaccccagggctcggactcgggctaagacccggaaaacgacgaaactccgcctcgcccgaccctagggctcggactccgccctggcctcggccgaacgacttccgcctcgcccgaccccttggctcgggctcggccacggcaacagaaggcagactcaacctcggcttcggaggaacccccacgtcgccctgcctagggcacagaccgccacgtcaaaaggaggcgccatcatcatcccaccctgaatcgactcgggtcacggagaacaagaccggcgtctcatccggccagctccgccggaggggcaatgatggcgctccacaagctctatgacgacggcggcccccagctctcttacggaagcaagacaacgtcagcagggactcgaccgctccaacagctgtccctccgtcaggctccgccgcacctccgacagccacgacatcacgccagcagggtgcccagatctctccggctgccacattggcatgtacctagggcgctagctctccctccgctagacacgtagcactctgctacatccccattgtacacctggatcctctccttacgactataaaaggaaggaccagggccttctcagagaaggttggccgcgcgggaccgaggacgggacaggcgctctcttggggccgctcgcttccctcacccgcgtggacgcttgtaacccccctactgcaagcgcacctgacctgggcgcgggacgaacacgaaggccgcgggacttccacctctctcacgctcggctccggccacctcgcctctccccccttcgcgctcgcccacgcgctcgacccatctgggctggggcacgcagcacactcactcgtcggcttagggacccccctgtctcgaaacgccgacaaacatataatgataagatatattgagatgcatagaaacattaattattgttataccttcttgttagcatcttttagaggttaaaaagatttacatacattaaaagatatatatatatatgtccctgctttgccatacaaattaaaaaactatcaaaaagtatttatacaaaattgtaatagatatagatactagatagtatctttaagcagtgtacatgtgtagatactatcatgaattcaaatccatcctatggaccctaccccaccacatccccgggaagacaaacagcatgataaaaagcaaggggggcacatgtttaagttttgagagcaaagattgatttggatcgggttagaaatagatgatcaaatcgatctcaggccaggtgtttaatacttggagggtcttgtccacgttcttggcccttttcttagttcgctgggcagcttggtgcccttcatcgcaaggaaatcgtcctccttctccttccatgacagcgagatgtagaacaacggcagctcgaaccgctccacgcccagcttctcgccgacggtggcggtggcggcgccgttgcctgtcaacggcgacacatggtggtggtggtagacggtgtccatggtggacctgtgcgccttgtccggcgacgaccgcttctgcccgacggcgccgccgcccgatcaatcctcgacggtcctgaaaagaacggagaagaaatgttaatgaagacgcgattgcggtggtggagtgagtagtcggggcggcggttgacaagtcgaggaaaaagggcggggtcgggtggtgtggtggatcgcctaccagagagccttggggcttcactcctacacttagcccagcctcaacaaaggtggactgagcaaagcactcctcctgctgttgtatactatgtggtgtctacaactctagatagaaagattggataggaagctgagatttgtatatttataacccatctactctatagtgcatcaaagaccctaaaatatgcaattcattcatctcattgacaacatcccaagtacaaaaaaaacagattaatctgccgaaagcactcgacgagtacatatacaaccacctaaccacaagatttgtaaataagataacaaatggccccatcatgatgcaaacaatgcgtgacaaatacggctactgctttctggccagagacacaactttcccaaaactcataaaaaagtatatatctagaaaatacccctaaaatgagctaaaaactggaatcgatccatatcaatccgatactaaaatatattaagagaaaaccctacttcgatttttataatatctactaactattaagaaggtagtgtagaccaaaacgtgcctccgctcaccatgcacctactctcccactcacactgcatgcaagcatacaactatgcaagctacgggtgtccccctcatccactcatgctgcatgcaactagcctcccaagctaggccctgtggctccttccgctcacgctgcatgcgttcttattgaggcaattttttgcatgtgttcttaattaaaataaaaatttgaagaagctaagtgtagcccagttggtcgacagtatgcatgtacgcccacatccgatccctcaagtccaagtcattgtcgaggcaaatttttgtatgtgttcttaattaaaaacccttaattagaaacccttctatgttggtcatgttttttaataaatatatctcgtttcttaggcatacttctctttgtgcacaatatatagaaaatggtgattaactatcaaccaccgtcaaatttactcaataatttccacaacacttttacaacatgctgcttataactagcagatatgaatgctcatatgtgaaaagtaaggatatgaaacttataccaaatgtcgtattagctactcacaagagtacaatatttatctctcagattgtttgatctattttaacctacttatcaatgcatatagctatgctatgctagctttgatagatgttcaattcataaggatgagctgaaccgtgtgcatttgattctttctcgtccttctaaattgggttcttgttgtgttctcagttgtatctgggcagtgaatgattaatcaagtttttccagttaaatctttgactgtgaataaatatcaaacaattcagtttatatttagaatataatattagtgttaaggtgatattttgctatacggatcgttacatatatatgttttatacaaatttttaactctcgtggcaacgcacggacacatatttagtaaacgaataaatgattttttatatataccatatataaagaaagaaatgatgcgatgggaggaaaagaaaggaaggaatatcttccatccaacttagggcttgttcggttattctcgatacacatggattgaatgagatttgaaaaaattgtgaagaagtttgagttgtttgggattcaaactcatccaatcccgctcaatccacatgaattgagagctaactgaacaagcaattacggtgctgaaagatgtgacagcatagctcaccagaaccaaagagaccgaccgattctaggagagaaataaataacactacagcgacgccaaggcacgaacccacccaaagaacgcgaccacgactcccaactacagaaccaactactcgtccagatggtagcgcaccagcagtttccgcggggggtaaaatcggaaaccgaaaagaaaggtcgtcgaggcaaccagaagggaatagataggcggacacgacgagcaggatacgaaggtggagggaaggggcatatcgcagttacctgtggtggtggggcgggtggtggctgtcggcggcagcggtggaggcggaggcgcgtgacgagaaggaggacgccggccacaagttagactcgcgcgtgtaggaaccggcggctggcggcggcatgagcttctccgcatgcaccggcgtcgacgcgcgccgctggatcttgaccccgccaccgacggcagactgccggcgctacgcggacggtgccgcagcggtggccgagtcgcgcccgacgccgagctcctctcctgcctcatctcatgatgccgccgcgcatccgccttactccccgcgcgtgcgacgcatgcctacgggatcaagaacgtggcggcgctggccttctacgcctcgacaggtccgacgctggtcgccttgtacgcgagccgcgagaaggttggtgcggccaggagggtgtttggctacatgagcggcttggacgtggtgtcctagaacgttgtcctcggccggtcgtggctcgcgcggtgggggagacgaccaatggggatctagcggcgacgcacgcgggcggggtaggggtcataggatggacggtctgggtagcagccaaagaacggacggtccagattaacagaaggcagagcaagggaggcaggctacccttgcagccttaatctctacaactattaagactcatctgtagactgcccccgctccttgcccaacgaaacccccgctcccgcgcgccccgctcccgccgccgcgaaatccgcacccacccgcgcgccgcagccctttgcacgcacccccaccccaatccccgcctcagcgccgctcccccgcccccacccccgtcctcgccgccccgctccacgctcgcgtggcgtcgtcatcgctgcgctctgcgcccgctccgcccccacccccacacgcgcacacacacctcaccccgcgtcgtcatccacagcccctacatcgccaccatggactcggggttgaactggtagcccgagggctcgggaggtgccgccggcggcggaggatgaggcaggcagggcgagggcggcgacgccggaagctcctggaaatggctgcgcgcgcggtggtggtgagaccgctggtccgtgccgggaagcgagaggctgagcaaggtgagcgggtcctcctcctgcggacggctcatggcagtctgccggctcgaacccgccggagcgcgccacagggcggtaaatctggccggacccggagccggcgccgtggctgctgaggtcgctacggtgtatggttggaccccgaccacgaccccgataggctgtcgggcgagaggctcatcatcagcttgcccgggcgcgcctcggtctcggtggcgtcagtgggaaccggcgaaccggacacgacggcccaccgcctccctctggtatccctcccccgaccgtccaccacctcccctttggtatccctcccccgcctccagcctctgatgcttcccttcgacagcttcctcccgtcgaagccctccacctctgacacggcgaccgaccactcctccgactccgactttgccaccacgaacagcaacgaggacactgccatcctcggcatgacgggcgacggggcattcgcaatctccttcgccgattgcttcaccgccagcgccagcgcagcattgttcgtagaggtaactcgcctatctacccatctccctccctcccactcccactcattttccatctccccacgcgacttcacttgttggatcgccatcaccccaaaatctgacttgcttcctttcatttcctgctcctttcccttgccgccgagaccgtagagagaggggatgggaggatcatgaagcccatgacatcgcatcccatcccatcctatcccatttaatttggtgcattttctcgcatatttcagaagaggatggttcatggtagcaaaagtatggcggtaccagaacaagggattccccctaatgttgttgaggatggggaacccttccggcacaccagtgtgggcacttacagaggagcagatgttctttagaggcatgttgtgttgtactcttccacccactctctgccaggtgtaaacattgatccttctcacacagtttcagttccacatggttctgtgcctgaggcaccacagtcggattcacatgtttattcagtggactccaacgccaatggcaatcttgtgagctcattgcatttaaattttttagtctctacacaggttgtggtggaaaacactcgtgtgggatctagctggctcttgtgcaattggtatgccacagctgctcttctcaccgtgtgaggacgagcacagtaaaagctaagcatttcttggtaatcctgcctgtcatggcatcgatcagttaattcctagagtcttgatcattttgttttgcatacatgttgagactgtgcacttgccaaactacatgataggtaaactatgcctggatgttggtttgaaatctgattcaggtcccacattcagccgtgccttatgtaattagttgtaagctgacatgaagatgatgcttttgtagattcatcctcccagcttcgttaattactatcaatgatgttgctgcatatttctttggcatcttctttgggaaaacaccgctgatcaagctctctccaaagaaaacgtgggaaggctttataggtgcatcaatgacaacattgctttctgcatttgtggtcagtaaatgcgtactggtcttctaaaattgtcgatggtccaacttttttctgaaactatcgcagttaactatcttctgaagcatttacctatgtttagctactcctgctgaaaatgtactaactgaaatttagtatgttatatgtagccttatttagaatctgaaatttattctgttgagattcagtccacaagaacttggttataactgagtattggatgcaccgttatgttctgttatcttgagacaacatccttggctttgagctccgtaaatgatgatcttactcggattccccttcaggacatctaaatggatgatgcaaattcgagtttctgatgcgcttatgcacagttaaatgcagtttagtcaattactttccctttccattttaaggatgaagaattgctgtgaggggttgttttgtccccctgactaaaatttagcctgtgtcacatcacattgaatgcttgaatattacttacgagtattaatatatatgcttaattagacttattaaatttgtctcactgtttagtcttcatctgtccaattagttttataagtagaccaattgtcacactcaagatttctttagtgaggggttactttgatgatcccatagactaaatgcaatgcgttccagcgaggatcatgtttacactattactcctctattacatttctgaaaggcaccatatgtttcaaataagcttctgttactgatagtccagcttcaattactgcatccaaataaaactttagtcttatctgctcatgtagttttgttgttaaattttgattagctggtgtagatatttttgtgaaccataagtgatttagcatcatcagtcacgtcgtgtaggtcatagtttgatcaggacgtagattaggacgtgcattggagaggcaaactgcatctgtcacaaagatgcaggttctttacctttacggctttacaacttctttgtcttgtgattatgttgtattacagatatgcaattttaaaactggtgacagatgtagttacaagtgttaaattggacaagtgatatgttgaaccctcagttgctttagacttcagaatttatcatttttaatagaatggaaaactttactgtcattcgtttttcctaaaacatgcatattcatgtcaaggccatcatctgctcatcaacttctctcttgcaagtgatctaaagaggacttgaacctgggtgtggggggtttactttacacccatacctccaaccagctcaggtccttataatttggaatggagtgggtatttgttagctacagagatcagaaggaggttgagaatggttgaaccactattgttttgctaacagttctcagcataaatagcagttgacagtctagctatcaaaatgcagaaactctgtcatatatctaaatatgatccagataatgtttctcaatttcttctcaacaaaaaatatctttttttgcatacataatttgatgtttcatgcgataattgaactttaaactattgcctttgtacttattaatttaaatataggagcttctcaatttattctcaaccaaaattaattggttagtacagaggagttgttaatcacaaaagaaaaaattgaaatgtggtcgggtggccacttcatccatgattattatatacacacatatttctttgtaactaccaaatgcaaattcatccatcgtccaagtgctttgtgatggctttataggcgtcgtggcaagaacaggaaagaggctgagcgcttgagcatatgtgctcgatggacaccacttgctcgttagggggtagtgatggggcggcacgacaggcaaggcaacggataactcgctttgtatggcattttttatgctacaggtctctaaaagtgaagtaagacaaaggtatttgattataacgttgagaatgtgagctttgatagttgaatttatcgtttgtttagaccctctagagataattgttagcagctaaattcctgtattactaatggcatcttaatgtttttttaccatgattgttagcagataattgttgattctgaggaactttgcatattcttcacgtttggttattctgaggaactcaaagctacatgtccattgcatatccatagtttcaaaagccaaggatgagttgccacaggcagtgcgcgcctgggaatggtgtcgtgcccacttctcttcaccttatggtggaaacacgctgctgtatgccgttcacgaccagcttcgagccgcctccaccttgatcactgaagttggctgtgggacggaagccaaccgagggcaagcagccgcggtcctggctggctgctgaagcacctgcagcgtcagaagagggcgtgcaaatggggccactttgggagtgaaagggaattaggcttacacctagttcctatataattttggtggttgaattgcccaacacaaatctttggactaactagtttgcccaagtgtatagattatacaggtgtaaaaggttcacactcagccaataaaaagaccaagttttggattcaataaaggagcaaaggggcaaccgagggcacccctggtctggcgcaccggactgtccggtgtgccaccggacaatgaacagtacctgtccggtgcaccaggggactcagactccaactcttcactctcgggaattctcggaagtcggcgcgctataattcaccggactgtccggtgtgcaccggacatgtccggtgctccaaggaagctcggcctcctgaactcatcagcctcgggttcgcgcgacagccgctccgctataattcaccggactgtccggtgtgcaccggactgtccggtgtgccagcggagcaacggctctctgcggcgccaacggctctctgcgcagcattaaatgcgcgcgcagcgcgcacagacgtcagggctgcccataccggtgcaccggacatcaaacagtgcatgtccggtgtgcaccggacacccaggcgggcccacaagtcagaagctccaacggctagaatccaacggcagtgatgacgtggcaggggcaccggactgtccggtgtgcaccggactgtccggtgcgccatcgagcagacgcctccagccaacggtcacttttggtggttggggctataaataccccaaccaccccacattcattgccatccaagttttccaacttctaaccacttacaagagctaggcattcaattctagacacatacaaagagatcaaatcctctccaattccactcaagcctttagtgactagcgagagagatttgccgtgttcttttgagctcttgcgcttggatcgcattctttctttctcttttgctcttgtgatcaacactcaattgtaaccgaggcaagaggcaccgattgtgtggtggcccttgcggggaagttttgttcccggttgattgagaagaaggaaagctcactcggtccgagggaccgtttgagagagggaagggttgaaagagacccggcctttgtggcctcctcaacggggagtaggtttgcaagaaccgaacctcggtaaaacaaatccacgtgtcactctccttatttgcttgtgatttgttttgcgccatctcttgcgaactcatttattattactaacgctaaccccggcttgtagttgtgtttatatttgaaaatttcagtttcgccctattcaccccccctctaggcgactatcagggagattatgctgctgccaatggtctttgagcacattgaaccactcgacgcctggtactgctggttctgctcctggagctgctgctttgtgttgaggaaccgccctcctgactcctgagccacgggtccgcttcatggcatgacggtgtcgagactcatgaaggtatggctgcgaagaaaggaaacttcgtgatgcatatttgccaggtgaactatatagctgaagtaacaggactgtacaacctgtatagaaatgcagggctaattcatgcagctttcagatcagagaagaacagatgaaaacgtggtgcaggagccaagaaaagcttggtcctagctatttagctgctaacaattatctgcaacgaataactcgatggacaccatttgttgattccttctgcaaccctgagcgcctcaagaatgaagtcagagagctgacctcccgtgtgaaagctctccaggactaacatgtttatgtaggctggtaggtacaagacaggacatgtagttccaagtcccttctaaccttgcttatttttcctatcacattgctctaaaactcgcatgattccaaccattgaaaaatgtctccgtgtgccaggtttcacatatcatcatgcttttcttgtgtaatgcattggggaacagacttttatgtctccattttggcacacttgtggtttatgctacatttcagactccgaattttaaaaactgttgtgatgtcagcaagcgcgggctgccctttgtgctcaagttctcccaagatatcaagcgcgtgcgtgtccccacaattgagatgctcgatgccaacgtgtccaccgctgtcactgttgccttccgaatgttgctagaggagcaacaaatggtggagttcgtggaggttgttagtatgtgtcagagataaactttggaaattggttagacgactctacaacgctcttgctctaatccttgttttttgggtctaacaataaataaactatcagccactgaaattatggatttactttctagcgacactttggctacaactcataaaaataaaagatcattagtcctagagctagcgggttgtagttgacttcaacagcttctacatgagcttctacgtggtgatgcttgctcaccttagaatttagatttacaacccgccacattgagctggtaccctctttttctcacccgattggcagcctagaaggcgatgtctttttgccttatttttaatttgttttacctgtgaagatcaagaaggctaaaactatatgtgaatgtttagttgcatatgagagcacagacctagcgacttcaaagtactagaaattcaaattcaaagagttatagattagataaaaataaagacatcagtgacaactggcaaggttactatgaaccaatcactggtatgttgcatctgtttaatttgaacaaataagttttactattactcgttcaaggctcatggcagacaacttctttactatcaatttgtggctgaaggatgtggccctttttattttacggatacaaaagattgtccgccatctttgatactgaaataacataaaccacaacatcttcgattaactattttaattttctaattcttcttatgccacaacaactttttttggagctactaagcatgtccttaatagacccaagtagaaaatgggatgtgtgccgccctcccttcgctcgcctctaggcagtagtgcacgaggcccacatctgcagatctcaactccttcgtgccggtgccatggtgtggggtgccaccaccagacacgcagtgagagccacacatggagtttgtaagatagtaagggcgatggtaatttgtgttgtttgctttcatgtaatcattgtgcactaatattttgttgaacaatttatataccgttgcaacacacaggtattgtaatatctatgttttatactattttttactctcgtggcaacgcacgggcacggacctagtatagtatagtagtatatatagtagtatagatatagatatatatccgggcctgacctggactgaacaccttacttttcctccttcagttttcatcacacgacaatggagtggggctagcaatggcatggtaacttttccaatatttttgcattaaaaaagaaatcctaaagaaaaaggattactaaacgagcacgctcgccgacgccgggaccaggctctcggagtctgggtctcgcatcacgatcagatccaatccaaggccgcgccctagctcgacggatggattccgccgccgtggccatcgtgacggtgtcgttcccggcgcagggtcacctgaaccagttgctgcagctgtccccgctcctcgcatggcgggggtttcctatccacttcgccgcgccggagccgcacctcagggaggcccgcgcgcgcctgcacggctgggccccgaccccgcgacggtgtgtttccacgcgctggacgtgcccgcgcacgactccccctcccccgttcccggcgcacatgcaacccttgttcgaggccttctgcaccggcgcgcaggcctcgctagtcgcgctggagaggaggcggaggaaatggagaggaggcgcgacgcacagacggaaggtgttgatttgatggatatagatggacggtccagattggttcgaggcagaactagtggaggcatactacccttacaaccttaatacagtaagtatagatatcaaagacgtcgtgtaataaaagtgatcataatgaacatctttacaacatatggatgatgatgtaatgtcagaatcaagttgtcttagtttctttttgtttaatgagaaattggaaggatagcgacgattccaaagtccgaacagagctagtttctcccgagcgcaaattttgaaaaccctcaacccggcactccgcactcagatctgcctgccaggcccccccacaaatccacaatccaaccgcacaagactcggaagaagaagcggggtgatggaagacggcgacgagagcgcggcggcggcgctggggctgagcccgcagcttttcgtcaacgaggtccacggcatcatcgccgacatcagcgccgaggccttcgagtactgtctccagttaagaagttccctccttaattccttatcgctctacctcgaatcactgcgcgtaatttaagccggtctctctcccttccttcgccaccggctcgcaggcttgttaacttgccatgttaccgtcgcttctcctctccagggcagcggccgcaccaggggtcgtcggcgccgccaaggctgcagagaaggccatggatctccagcgggtaagtgacagacaggggcgggcggcgggccgacaaattcagaggccctgtactaaacttcaaaagaggtcttattttatagaaaaaatataattaaaattacattataatataatttatgtattctgaattgcaaaaggtttactagataattcttttaaatctatctatttttacgaaattatattgtaatagagtatataaataaacatacgtattaatagatgcgttggaagagcaatagtctagctgctaactgagttcagcttagatggtgtaatgttagtctgttcattgatgcatattatttaggcttactactgagctaagaagttttttaggcccctcagaattttggaccctgcgcggtcgcacttgtggcacatgcatcaggcccggccctggtgacagattcccgcatcatgattcgatgctgctcagttcgttggttggatatatggaacaaatagttggttgtctgctagtttattccaacccactaataagctggctactgatgtgcgctgatgccctcatgccctgagaggctgagactcgatacgtttcttctctgccaaatttcaagtgtacatggatactgaatgaaatgaagttccagaacatggtgaaaagcaacggaacatggaagttgttctacactgcacctcgattcatattcctcccgcatgtcatcagcttccctggatgttccttatgtagtggagtggagactattagctgattcgctaagtgctgcgacccacatttcagtttctgcttgtttgcgtagcattgcggtgaagaaaccgagaactaaaaaaatgcatgacttcattacgtgcattgggatctaacagtggactgagcttccaaccataacattgtacttagatgcttgggtgatctgcttcgaatgttttagtcagttttacttgtgcattgctagctccataacatgatttacatttggtagttaatttatttaacttacgcatgctgccatttattatcacatctcttctaaaaggcatttcattacatttgttaatgctgcaaactcttgttccattttttggaccagctgaaccattatgataagtagaagtatctctatgttttttctgcagggattaaatgctgttcaccatgtcgtaaaggatcgactggacaagagaatggccaactgggagaaattctgccttcgacattgcttcgatgtacctgaaggttttgtggccgatgaaaatgtacgtgccttatcctaacgttaaagatttcactccagcatgcttaagcttaagttacattcataatgtgtaaaagtttcatttgtgttcatgaaggttcataatttagaaaagtgatgcatctttattgatatgagcagtagacatttaattacagatgcccacacactcttgtacagtgacaaaaaatgaagaggttgtggattcaatattggtttgatcatcttaactgctggattagttttcatgagaagggggatgaaatactgtgttttgtttaactgaatatagtttcaggaatcttacagacttgcaaattttatgttgttgaaaccagtgtttctgccctttctggtgaatgccataattgaaataccattattcacactgagcttgaaaattaccaatctatatgcaatatcggttaagcttgacttttgttgttgaacctgcatatcttttgttaatgaatgtagtgatgatttatttcacgttttcttcattccctcatctaagaatgttaatgcaatgtaaatgactttttcaggatagttcttgtgcaaaagaatcacacaaaaatgggacttcagattcagatttggatttggaacttgactccttaaggagaaagctcgaaagtgtaatcaccttagctgtaatgaatcaccttataatatatctagatttctgtagcaattgccagtatttcttacttttcaccaggctaacaaggagtctgaaaatcttgaaagagagatgtcgtcattggaaaggcaaagtatgcacaaaagaaaacttgattcttcaatctctgagatacaaaagttgtttgaagacaagttaatgcagggatttgaaggtacggcatagtatgcagtacttcgtagttgaatacaaaaataaaagaatgagttctgtctagtttttctgaagttgaacatgcttatctggttcacctatgctgcagttttatattgacaccaacgcaaaagttttatattgacaccaatgctacaatcttaacgtttgatggcaagtgatattattagttttccttacagcaaggacttagggaattaactgtcttatcgacctgatcagagcttgaaacatgctcaattgtttatactaactagttctgggccttggcgttatgatgttgtgttatgacaaccttatgccttcatgttgaagatttgctttcgtgccttgtgtcaagggcgttagttcctagggtagctggccctcgactccgcaactcgtagtctcggtccgtcttcgccggcagggttatacccccgtgtcgtcggcttggtagagaaaggaggaagaagactagagggctaaattcttgcttgccttcctcaagtgccgattacagagataagtagccttggcttgctaaccgaatggaaacaaactcctcctaaactttaggttctaattccttctctttctattctagcgactaatttgttcctggtttccttcctggggcgcgctggacttggatgcggcgcgctcagcagcccgtcgaacgtccctggtgcgccgtcttcgggtgtagtggagaccccacatgacatctccccccctcgacgaccagcttgtccttgagctgaaaggacgggtacttggcggtgaagacgtccaggtcttcccatgtagctgcagaaaccggctcgcccttccagcgcaccagcacctgttgaacgccacgagccacgcggtagcgcaccgcacgctctggagcaggcaccaacaccccatggtgcaacttgggcagcggaggaggagcgttcggcggtgcgcccacccatttcttgaagaggccgacatggaagacgtcatggagcttggcctgggccggtagttccaaccgtacaactacctcattgatcatctccgagatgcggtacggtccgaagaagcgaggctggagcttccccttcggtgcctgggacaaagaagcaatcggccgattgcgcagccgcagcaggacccagtcacccacgacatatgtgaccggcccgtgggacttgtcgtagtggcgcttctgaactgcttgagcttgttccaggcggccgtggacctcggccaggaactcctcgcgctctgccatcgtcttggcgaccgcagccaccctagtgtcgccagcctcatatgatcggatggatggcgggtcgcggccgtagaccacccggaacggagtgtcgcatcgtgaagactggtaggcggtgttgtaggtgtactcggcccacgacagccaacgaagccactcgcgcgggcgatctccggtgaagcagcgcaagtaaatgccgatgacgcggttggcggcctccatctggccatccgattgcggatggagcgctgaggacatgtgttgcttaatgcccgttaagcgcatcagctcgctccagaaagtagacgtgaagatggggcctcggtccgagacgatcgactggggcacgccatggaggcggacaatgtcggagaagaacgcctgggccaccgattcagcagcgtatgggtgagctaaggcaatgaaatgacaatacttgctgaagcgatccaccacggtgaggatgacggatttccatcgaacacgcggcagtgcctcgatgaaatccatgccgatgtccgtctagacacccgacgagactggtagcggtagcaggaggtcggccgggtggaggcgctcggtcttgcagcgttgacaggtgaagcaggagcggccgaagtcctggacgatgcagcacatgttgggaaagtgaagtcgcgccggaggtggtggagggtgcgttgtacgccttcgtggctatcaccatgtacgacggccaagatatcctagaggagaggtgatgacagagggacgtagagcctgccgttgtaggtgagcaggttgtcgacgaaacgacgatggcctagggatcgtcacgggtgccggccgcgacctcgccccggagggccagtagggcgggattggcctcctgctcgtgcctcaggcgtgtgatgtagtcgaaccgcggcgctgagactgccaagacaactccctcctcttgcctgtccctgcgagataagtcgtccgccacgacgttctgagaccccggcttgtattccacgtcgaagtcgaagccgagcagcttccccacccattggtgctgcggaatagtggagaggcgctgatcgaggaggaatttcaggctgtagtggtccgtccggactgtgaagcgcctgccccagaggtatggcctcaaatggcggacgacgtggaccagaccgatcagctctcgctcataggccgcaagcgaccgatgtcgtggtgccacaggcctgctgaagaaggcgatggggtgcgcctcctagatgagcaccgcgccaaagccgtgcgtggaggcgtcgcattacaccacgaacgactttgtgaagtcctgaagggccaagaccaacgacgtggtgaccgctgccttgagcgcgtcgaaggccgcagccgcctcctctgaccacgcgaagccctctttcttcaagagcgcggtcagcggggcggcgatggtgccgtagtcgtggacaaacttgcggtagtagccgaccagccccatgaaacctcgaaccgcgtgcgccgagcgtggttgaggccagtcgtgaactgcctgcaccttagcggggtccatggccaccccggactcggagatcacatgcccgaggtaggcgacggaggggaccctgaaggcacacttggactgcttgacgaacaattggtgctgccggaatatcgctagcacggtgcaaaggtggcgcagatggtccgcccaggtggagctgtatatcaagatgtcatcaaaaaacacaaggacaaatcggcgaaggaagggcctcaagacgtcgttcatgagagcttgtaaggtcgtcggagcgttgcagaggccgaacaacatcactaggaactcgtacaagccgtcatgggtgtggaaggccgtcttgtggacatcatcggccctcatgcgcacttggtgataacccgaacggaggtccagcttggtgaagaaccgggcgccattgagctcgtccagcatctcgttgacgacggggatggggaatgcgtccttgacggtgagcgcattcagtgcatggtagtcgacgcagaaccgccacgacccgtcgggcttcttgatgaggacccgcaaggagaatgccgagtcgctgtgtcgcacgatgccttggtcgatcatggttgtgcactgccgctcgagctcatccttgtgagccgctgggtaccggtatggtcggactgctaccggagccgcgccgggaacggggatgatgcggtggtcgcggcctcgttggggaagtagacccgtgggctcggcgaagatgtcggcgaagtgagccagcagtgcgtcgaggagctggtcgctgtcgatggtgacgtcgagggctgacgtcgcggttgacgtgtttcggaccagcggaccgtgcatccttggagctggaactgcatggtgcggttggtgatgtcccaaacgatcgggcctaaggtggaaatccactgcgtcccgaggaccagatcgaagcctgccagtggcatgatgtagaggtcgacacagaacagaacgccctcgatggagatcggcgcctggggcatgacgcccgggcacgcgatgcgctccccgttggccacccgcgccgtgagcagtgggcgagcccggatctgtaggctcgtgcggacagtcgcctcctcgccgatgaaattgtgtgttgaaccggtgttgaggagagcgaccagagtcgccgcacccaccttcacccggatctgcatcgtgccacaggcctggacacccacgacgacatgcagggagaggaccgtggcgtctgcggcggggtcaacagcctcgggggcggcatctgcggcgtcgagctcgaccccttccacgtagaagatgcggcagcatgtgcggttgtggccccgaaaatacttttcgttgcagttgaagcagagcccgaggcggcggcgctcctcctgttcctccctgcagaggcggcgcctaggttgtcgatccgcgccgagttgggtggcatcggccggaggcgcaggcagggccaggagaggtggcgcctgtggcatgggcggcgcttgacgtggtgcggtggccggcaaaacggcgcgagacgccgaccgagcagccacggaagccaggaccggctgtgccaactccatcaactccacctgtcgggctagactcatagtcactgccagcgtttcagggttatggatccggacgacgtggctcagcagcggcaggagcccccttgtgaagggttggacgcgctggttctccagatggcccgcttgttgcaggagggcctggaagcgattggcgtacagaggggcagagtgcaacaagccaacaacgacccaaaccgcaggctcagaaggtccttgagacgaccccacggcggcgtgccctcgtcctcttggagttgaatgaactagagctgggcgacgtcctcgagattgtacgacgccatctagacgcgttcctctggcatggtgcgcttctggcggaaatacgattcacacctgctaatgaagagcatggggttggacttgccatcgtagtgggggaaatctagtttctgcaatttggggggtgatcaagatcgcgtggcccctccgggcggccgacgacggtggtgtccaacgtcgaagccggcttctccttcagagtggccatgtcggccttcatggtgtacatctctgtggtgatggacttgagcatctccatcacatccttcatagtgggatcgaccatggctggcggctgtggggcgggggcagtggatgactgtggtgatggtggagggctggggttgggcgtggccgctgtggaggaatgatcggaatgggttgaagaggatcgacgtgaccgtgataccaggttgtcaagggcgttagttcctagggtagctgaccctcgactccgcaactcgtagtctcggtcgtcttcgccggcagggttatacccccctgtgccgtcggcttggtagagaaaggaggaagaagactggagggcttaattcttgcttgccttcatcaagtgccgattacagagataagtagccttggcttgctaaccgaatggaaacaaactcctcctaaactttaggatctaattccttctctttctattctagccactaatctgttcctggtttccttcctggggcgcgctggacctggacgcggcgtgcttagcagctcgtcgaacctcccttgcgcgccgtcttcgggtgtaggggagaccccacatgacacttgtttgacaattccataccatgttgcaattcttcaatgctggtgtgggttcaactcttaaaactttggttatagatgaatttgaaagtttagtttacaaatttatcttatgcatagatttgtcttggaagtacttttataaaaaacataaatttgttaggatggtcagctgtattctaatagaaagtagtggtcaaagctatgctttctcgactgtcattctccaaaacattaaatttttgcacactgcaaagtgcaaactggaaggagttttacgttgtgggaaaaaaagccattgcagttttctgctcccatgtgctagctttagcaagaaaactggtcaaaaaattgtagattctgccacttattttatttgatgttctctagtcttctatttcatgtaaatctcaatatttgctacagaacgtgtgacacaaataaaaaaagttatatggagcttaatctagatagagcttctacagaattgtggattctgtcgcttattttcatttgatgccctctagtcttctatctcatgtaaaccaaatattgctatggaatgtgtgacaaaagtaataataaaataagagtacatatggagccttaatctagatagcgcttctaccatttatcaattctacctacagtcaatctagttaccgaatcagaaagcgtgcctattcaactgtgctgaacctgcagaccttgtgaaggcaataccggcattgcggcagaaaataatagatatgaacaagaaaaggactgagatcaggtgtttggtagatcaacaggtttggaacacgagcagtgtgagaggcaacaagcgacaaacactggataagggtactgccacagctccccgctttccctcttcagttctcccgtatataattattacgccatgtatttatacgccattaaccaataacttatctagcaggttttactgcatgtggtgtagacactcgagaggtcgtcagtatctttgagaacatgtagcttgttgttctttacctgattcatgttgcttacccatagtgcccgcagcttgcttgcttggagcttttccccagtcttgttattgattgacaccagatattatttgggctaattcaattcaagaatgactggagatattattggccatctggcacaggtaaatgctacatgtaattgcttccagaagcatactagattggaaatgtaatccttcctgcggctacttgtctacctctggtcgagagattttctgaactgcttcggtcatcatagttcttttagcatacagtatgtggtataacttgtcctgtacatgagaaaggaacattaagcagctgctacatatatctgagaagtttcccattttatgttacaactagtatggtgcacatgtgttgcaacgaaacacaaactatttgttaaatgcttatgacctaagcatgtctatgtttttgaagcggcatggtagacttgttacatcatttaaaccgttgaatttccatgtcataagaacctgcaaaatattagccattaggattgtaaagaagtgtcatttataaatattagttataagaaccttgcgtcttttgcctgagggtggccttatgcgatgcgtgattgcgtctcccgttcgagggtggtctcgtgcgagctgtgaatgctttctctcgcccgagggtggcctcgggtgaggcatgactgtgtctcccgctcgaagttagccttggacgaggcgtgacttcgtctctcgcccgagccgtgattgtgtctcccgcctggagatggcctcgggtgaggcgtgggcgtgactgcgtctcccgccgggggatggccttaggcgagctgtgactgcatctccggcccgagggcggcctcgggcaagccgtgaatgtgttctctcgcccgagacgtgactgtgtctcccacctgaggcctgagggtggcctcgggcgaggcgctaacatctcctgtccgaggtgactgcgtctctcgcctaaggttggcctcgggcgaggcgtgactgcgtctctcgcccgaggttggcctcgggcgagtcctaactgcgtctcttgcccgagggtggccttgaggagtcgtgactgcgtctcccatccgaggttggcctcgggcgagtcgtgattgagatacaaggcgatgaactcattggacctaaattagcgggggaggggagcaccgacctggggcccgtagaccgaatcgaaggcgatgaactcatcgatgtcgttgttggaccacttgaggaggggctcagcgtggcacggatctacagggggacgtgcacgaatctccggccatcgcaggcacagatctctggtcgtcacgagcgcggcaatctcagggatcctccggccacatttagactcgacctcagatttgacgtcagctgccgctactgccgtggcctccatcttggtcgcacactctgtcgtcttcacatggcacgtgctccaccgtcttcacctgggtgcgctccgccgcagcggcctagatgacttgggcccggggctgaccttccactcctccttcgctacctcgtgcccgtcgctcgcctcttcgacaggtgttgcggcctcagtgtcctcacctgtgccgcatgcgatgctgagatcccgtgcgatggcgagatcgacgagaaggtgaagcgctccaccacaaacgtgcctccaccgccgcgagcagtagaagcagtggtggaggaggtcggggcgctcgcaatgcggagaagccgtgcgacggcgggttcggcgagaagaaggtgaagcatgccatgaccatcgagctgacgacatcgatctagggttagggtttgtcgtgggctgcgactgcgagacagaggggagaagggcgcgagggacggagcagtctctactctctagaggcgggcatcgcgccttgatggtggtggcagcggcgggggtgtgggactaggatcgtgcggtgggggcgaggaacgagcggcaggggcggagggggcgggggcgtgggaggtgtggacgcggaccttagggtcttaataaagtagtatagatacatgttttattcaatgctactaaggcttctacgtatgctagaagtcaactacttttgttctagatgcaacatcaaacctggttttagcatttatttactgtatcaaatatttactgttttgtataaaaagaaattagagagcaaaattataacagaattggcaggggcatgcgaacgtgtacccctctaccacaaattatgacgcccactaacatcaaatggacaggttctatcgcagacacaggaggcgaagggtacttcaaccgttatcaacgtcgaggtccatgttcaagaaccatcgaaaggtccgaagcgaagggttctaccgtttaaagtggggggctcctcgtgacctcgcgaaggcaacccccgccagctcgtacggttccgagctgcagccttggcgaagatcgaagacctagcgacttagagcgaagggtgccatgcacgggcgaggaccgcaccgtccaatggcggggcccatgctacgtcttgctatcattcgggccaatttgtaagccccttcctctggtagggtttactgtgtatttgatgaggctgtacttaacattgtcgtaatgacccataatgactccgtaggggtgggaatatttcggggctgtagcaggtaaccgagaggataatagtacttggaaggtgacttaacatcgccataatgatcccgtatggggaatatttcggggctttagcaggtaaccgagaggataatagtacttggaagggcacacccacccacctggttacctataaatactcccaaacgactatacattgatgggacacacttaacgagacgctacaattctctatctattgttttgttgagcacctgaataccccttttccctagtgtttggtcccacctggccacgtgtcaatcaatcccaacaataagccttcttgattgcccatcaaccccgtcaaggtaagtatggagtaacgtcggcctgaggctttcttatataagcggttagctcatcctcgcttggcagcggcgccgaggtgggactaaacgcaaggcaatgcgacacttactgtgaagaaatagaacaaagggaaaatgtggtgctttgctgggccgaaaaggtgcaagtagctaggccaaaagccttgttggtttattgtgccagcttggagttttgtttcttgtttttagaccatgtacaatgtactagtcgatttgggcgcaagctagacctagcccgcattaccttgtgatttgatcgttataagactgtctccagcgatagtgtaaaatagaggatgtataactgtagatgacactgcttacagattgaagtttgaaatatgggaagcaataggagatgagatagaggatctgctggagacaacctaatcttcgaggagtaaagtcttcattcatcttgattttgatagtctttgaggtgtttaaacaaaaaaaaaacttaactttcttatcttatattaggggctatttggaagcactcgggtttttaagaaacttgtttctaattatttttttataaactggtttataggaaaaaaactgggtgtgcgcgtttggaatcagtttcttgaaaactagttttagctttttctatacacaaagacaagtctaacattattgggtataagcctacaagcgatggtaatcactgtaatttctaccaaactaattaagggcaatgtgtaatttaccaggcaaaaactggttttatctagagaagactggtttcttggtttcttagaaactggaaatacaatttctagaaaactggagcataaaccgatatgtttggaagcacccaagtttctataaaccagtttattaaaaaccggatgctttcaaacaagccctttagtacctctatctactattggattgcgagaagtttcttggtttaaattcttttaaatacttcctcgtttttatagtctcttttcgttttttgtttatgttttggctggttttctttttctcccgtacttgttggttcacgagaaagtactcgctctgtttcaatttatattgtatgatactgttttggctgggggttttctcgcccgttggttcacaagaaaataaaccaccacaatagcgtacattggccacaactggatgattatggttggtgattttatttgtatacttttagaacatctcgatattagggagagatagatgcccatctagtgtaatgtctcaatattatataaaatgcacaaaaaaccaaactgaacctattgttcggtctctactcatgtgtatatggagtttgccagaaatcattgaggagtaaccattgaatgcttctacttgatgtagatgtggatatactcgggattaatatcatattctcatttgacttattggcatttaatctattctgcgaggacgcctacgaatatgatccatcgaccttagtcaaaacatacattctaattgcagattcacatggtctataataactctcctccgatgaactcacatttctactacggacaatacgaaggagagaagagaaccgtccaggaccaagctcggaccgtccgactctcaggcgcggaccatccaaccattgaaaagtagagaaccccgaaggtgccggattcggtaaaattcatttttagtgtcctcgcggaccatccggggtgcacgaccgagccgtctacaactgctttatctgacatctgacgacgcatttaatgcacttatagctgttgatatagcaattattgataatcgttgtgattttagccgttgatgtgcaggggcggaccgttcgggccaggagcgcggatcgtccgcggttggtagaaagtaggcaacaactaggaagtggttggtggctataaatacaaccccaaccacctccattcacttcatccaagcattccattcatcctcatccaatacaagagcaaaaatttcatccaaagacatattcaaagcttccaagctcctccaagtgccataactgtgactagtgatcgttagtgattagtgcctttgaaagtctagagagagtgtgatcttgtgtttttcttgttgcttggctttcttgatcgtgctttcctcatctccttctaaactctcaagtcactggtaaagctagcaagagacacataattgtgtggtgatccttgcagggtttaagtgatcctcgagattaagaagaagtattcaactagtctaagtgactgttgatggagggaaatggttgaaagagacccgacctacatggcatcctcaacggggagtaggttcttttgaactgaacctcagaaaacaaatcgcccatgtctttgtgctaatcttgtattgcgatttgattcttcctctcccctttctctaagttctcttgctttcaatcgttttgagttagctcctaaagttatccacattgattgagcaactcatagcaagaactatctctgatttcattattactcattctaatgctaacgttgggtaaagtttgtgttcaaagtttataatttctaggtttcgcctattcacccctctaggcaactttcaaagactcatccccacatatgtgttgaataaatattgttctactatgtaatatatctggcaaatgccatgaattgaaatatgtagttaaatgattctgaagatccatcatgagatccttagaggactcatatttttgaattataaatatgcaacatataaatattttactaataatacattcctgatgaatggtcactctcctatgtagatagaacatctcctagttaagattataattccttgatggaacctttttagaagaaataaagtctgagttgagcaccgaaatttgttaatcccgataaagggataaagacccatatagacccaagaggaataggatgaggtaccaaatgatttaaagtttgtcgaataagcacatgtgcattccacgagttgtactcatggtatatccactagatgtggaattgtggtgtcctctaaagccctgattgtaaaatctagaaggtttagatgttactggcaaaatatccccattatgccaaaataatagactataacgatgcatcttatcgataaagaatccttgatggattttgtctgatcttcgatggacttttgttacaccatcacagaagttgtaatgaatgaatgccataacgatgagtcatatttagaatatatattattacaactatattatttcctaagtcctttggaaggataagttatttgctttatacaactatgtttacattatggtgtaagatagaaaattatagcaccctaacatcatccatcctcattatttcagatgagcaatgaaacacatatcttgaagaatatgtttgagtcacgagggataacgactttgacagatgtcatcgttagggggatgaatgcttaatactgatcacaattgtgagacatcgaatgtcatattatatgccctgaagacgttgtttgatgatcaatttataaacctttatggaagtttctatcaaatatgtagaaccagttgatcgaacaccactagtaaaagtggcctatttatgttgacacgtgcacttacctcgtgtatcctataagcgagttgaggtgaagttcctaatataatccttgcaacaataggcaattcgtttgctaaatctctttgtgcatatacttcctgaagaaggtattttaccatattgagacagttttgcaaggaccaggggagcatatttctaagttagcacttgtagaagattcgatgcaatccagatccagatgatcgcaatctgtcctaatgaaaatagttgtactttttcccttagtgagttttttctgaagtttctgacatgaggtttttaacgagtcaacaaagtgcaaatgcaatatgcatcatcatgcgctctttctccgtatttttttccaccgggtttttgagagttttacgaggttatgtgggcaatcaggggcggatccagaatttttctatgacccgacccaaatctactaaatttctttctctccattttattttaactattttataccgtataaatagagacttatatacttacatggattaagcgccaggccatggacctggtggcccgggttgtagatctgccactgtggtcaaatactgaattgctcatgagggtctcacttcagtcaatgactgctatgcaagcagtccttatttgcaagcgtgcaagcaaaccatctggtccattagattacgatccaaacacagatacaaccatagtttgttaggagtttttttataaaaaatattgagctggtggtggaagggtttaagtgttaaatgtgacctacggttggatcatgatctaatgaatcaggtggtttgcttgcacgcttgcaaaaaaagactgcttgcatagcagtcgttgctctcacttcatctatataaagatcttgtaccctttataatacaatagtgaagatagaaaaaaaaggctatagacctaaccatacatattatctctcgtgtattccttgtcatgtttttagaaagagatatatatattttctacaacttctgcggtctgcggatgaaagggaagagaatgaatctattaaagtagttctcaacactccttcgtggggcgtgctcgctcctagaatcctagggtccgcttctgcgtcaccgatcggtagtaagcacaggtgattttaacgttttagtccctagcactttcctcttttttactttctcacctttcttccttcccccagtctcccacaccccaactccaacacagagtcaccgc

SEQ ID NO: 427 - DNA, 823 bp, Zea mays
  Intron number 4 from transcript GRMZM2G040182_T01 (locus G RMZM2G040182) derived from phytozome v7.0 (chr-ID 5; pos 3 6066759 to 36067581 reverse strand)
gaaatttgaaaacactaggatatcactgcagaactgtaagtcagtttcttggtattgttttctaccacatcactaccgccaatagttggaagtcagaatagtgtgcttgctacttatttcctaccacctcacttttgcaaaatgacagacacactgacttcataattcaaacttgtccgttaatttttagaaattcataggagggaaatgcaattaggggctgtttggatcccttcatcttgaaggaattggaatttacttaatagattaagttatttggtttggaatttgatattcgagcacttttcaaagtttatatataagcctatccaaaattcataggatgaggggggtgaaaattgattttatgtatcactagtttatgtttctactcagcagcttataacacgctctttggtttgctcccctatagtagaaatgcagcatataaatatctcccccataaggccaatagtagtatacaaatatattgtatcatgtatataaaaccattttagcttaattgacctatatctaaattacaattattagaatggaattcaattccaaggatccaaatggggcgttaggttaaagccgttggtttgaagactatgactaatgactatgatttgtagttaaatatgaattgccttcctctaaattatgtattgttttggaaggttatgtctcgcagaatgtacccatgcttatcaatatttagcaacttttgagatcctacaggatttacttgacgctattcatgttttaatatgttgtttttgcagttgttaatatttgccgtcgttacccgagtgtaaca

SEQ ID NO: 428 - DNA, 26325 bp, Zea mays
  Intron number 1 from transcript GRMZM2G176905_T01 (locus G RMZM2G176905) derived from phytozome v7.0 (chr-ID 1; pos 2 46327968 to 246354292)
tgctcatcaccggcgcctcctccggcatcggcgaggtcagtacaacgtacgtacttgcaactagtagccgtacgtgtttttgcaagtaaactgtgccaaataagatctagctattatatctaacgctgtgtgttattgttagagcaattcgaagagtttctttatactttttccctatagatagagattaagatttttggggaggaaacccatcaaacacagtttatttaactctagatctctaactatatatttgacatatccctcgcttctaaatttcttgctagccaaaaatagagagcagggttaacatactttctagattgcacataagatataaaaaatgttataaaataaaataaaaataatctgtacaaaaagtaactctctctaaatgatgccacagagagtgagttcaaaagtgactcttggagaccaatgcaagactgtagagaagtcggccaacaactaattttaaggctctcctttggaatatgtacaggaatttcacaggattcatatggaatttcacaaggatcgattcatttttaccagaacaaacgcaggaaacagaaaaaattcccgcatttcaaaggtgggctaagctcggaagtggtcctaggcaagacgctacttgcattggcatatttatatagctaagaatctaaacatacattaactattgttttagcaactaactattaactatttgggattaaacaagctagaagctagctaccaaaccagtaacaatccttaatgtagtatcatagtaaattttggctacacaaacatttagataaaaaaaatcacaaaaatgaaggcactgcatgcacacaccttcaaacgaaactacagctatctgctccttccattattgtaaaaaggaatatacttctttttttagtgcttaaacagtttaaattctaatcgaacctattaaaaacgctaacatttataatgtaaagtacgtagcgttgcactaaataagtaaatatattttgttaataaatgtagcagtttgactcgcatgaatattgaagctgtattatttttaggacataaggtagcattctagctttcttgcagtaggaaggttgcccgcatgcagtcggtacgtcgctctctattgccgtacatgtcccgccgaagcattggccggccaattttggcgattaataaaattggccgtccccaaattttgctgcgcatgcatgggccacctactttggccgtgcaagccaaaataaggtatcgatacatggatcatgatctaaatgtttctttataatttatcaggactctaaattaatttagtttaaaaataaataaaagtagagcttgatcataatttaatttaatccttaaattttaaggtataaattttagagctcattattatcttaatctctagggacggcaacgagcacattttacccgcgtgcccgcgggtaaaaaccctatagagtgcgggtttgggtgtgagtttatacccgtaggtacgggtttgattctcaactcgacgggttttttctcgtgggtatgaaaatgttgtacccgtgcccacaaacccgcatacccgcgtgtgtgtgtctgtgtagactgtagagcacatgcatctcaatttagtgccaccccgaaagctttgagcgagcggagccaatcaaatgatataaaagaagactacaggcgccagcgaactcgtagaacttttggctaagatcgatacatgtttttatcatgttaataaatatttattattatgtgctatcagtttaataaatatatattatatgactgtgcccgcgggtgtacctgcgggtgccataaacccgcgggtagcgggtttgggtaacatacgctacccgtcgcgggtagcgggtgcaggtataggtttaacattaatctcgcgggtacgagtttgtaatctccatacccgcgggttttaaacccgttgccatacctattcatctctaggtcaacgaccacgttttggtctggcacaggcctcggcttatatacgtgtttggttatcatgtttcaatgacgcaaccttacgtgtttcgttgtttggttatcatcttccgtttgcatgcatcaaccaattcaaactaaaagtttaagctgataggaggaggtagacaattcacttatattatatttcaacactcctctcacatcaagccgtctctcttgggtcacatacaataattattttatttaattacgctagctaggattcaaactcatgacctctgactccgataccatattaggttgcatgcaccaaccatttaaacctaaaagcttaagctggtagaaggaggtgaccaattcgcttattatatttcaaaactactcctcacatcaagcctcttttgggtctcagacgtggaatatgggtgagcaacaactatcttatttaattgcgctagctaagattcgaacccatgacatatggctttgataccatattaagtggcatgcaccaatcagttcaaactcaaaaacttaagctgataggaggtggtggacaattcataaatattatatttcaacactctccctcacatcgagcctctcttgggtctcagacgtgaaataggagcgagcaacagttattttatttaattgtgctagtcaggattcgaatcctgaactagtgacctatgtctctgataccatattaagttgcctgcaccaaccaatccaacccaaaagcttaacctgtgtcgggtaccgtaattaggggtacccccatactcctaagcatggctggaaaacatcttcaaaacagaccgtaaagactggtaagcatagctcaaagttaaagcctcatctaccaagggacgcgatctcgtctcgctcgagcccggccttgggcaagaacagtagtcccggacggattcacgcctcgcccgagggcctcctcaggcagtgggcgcacccccgactcgcccgaggctaagctcgggcgaactttgtcgtatagcaacctcggccaaatcgccttaccaccgaccgtatcgcatgcgcatttaatgcggggatcacctgacaccttatcctgacgcgcgcgcctcagttggcaaggtcgaaatgaccgcagtcacttcacccctttactgatcgttctaacaggaaaacaacactattcaccctgttccgactattgtgccaaccacaagggtaagactaacaacagtaagtcacggcctctcccgagttcagcctcgggcgcaacagggagctccgcctcgcccgacccctggcctcggcctcagcctcagcctcgggagaaggtctccgcctcgcccgaccccagacctcggcctcgggagaaggtccccgcctcgcccgacctcagcctcggcctcgggaggagtcacaacctcacccgacctcagcctcggcctcaggagaagtcaccgcctcgcccgacctcggcctcggaccgactacgctacaggggatacatcattaccctacccctagctagccgcctcaggctacgaaggaacaagaccggtgtcacatctagattactccggcaacaggtaatgatggttccctgcatgcgtcagcaggacccagggccgcaccgccagctacgcttctacagggctcaagcacttctccgccggccacgttagcacatagctacacccccatatgtacagctggaccatccccttgtatctataaaaggggatgcccagggccttcccaaggcacgcgaaggaggctaactcggacggcccacttcaaggcaaaaccctctctcgcgaagcttgtaacccctactacgagcaccccggtgcaagataatataagcctcatcccccctcttgtgtttcatcttgcatcaatccatctgggcagggacacgcaacgtcaaattcactagtcggttgagggtcctcgcgggtccaaaacgccgacagttggcgcgccaggtaggggtccagctgcgtgttggcaatactttcccgttgagatccagatggacaatcttcagcagcctcttcagcccgggatggtgctccgctttgggagtctcgagttcatgtccccagacggcagctacaacatggtactcctccccccgcagcacgacaacaacgacggtcgtcggctcgcctggcggaggcgaactcgacgacgacatctccccgtggcggaagaggaacacccgggtttgccccgccaccctcctcgccggaggaggaggagacggagcaaccatggccaggcaggaggcagcacctcgtcggctgtcggcccagagcgagtcgacgacgccggcacccctgcgggggcacatcgggtgttatcctcgcacctgggacaacgacaggtgtcgcttcccagcaacatgccaaccccaggcggactgatgatgccagcacccttgcgagggacttgtcgggcattagtctcgcacctgagataacgacacattccatctccgatgcaacttcaccaccatccatcaaccaggaggtaccatcagttttccatcctgttccctttagatcatcttcgatccaccaagcgaccccacttcggcgagcgctttcgcaagggcatatcctgaccttccggggtaccatatgtggtcaacttgggacctactgacggtagtctcaacctccggacccgcgggttccgaggaagaggatgaccccgacttcagttgggatttcctcggactccgtgatcccagtgccatgcgagacttcatatccgcatgtgaccactgcctctccggctactctgacgatgaccatagccttgatgacgagggttacgacccaacttgcgagtgtttccacatcgatcagggggatcacgacgaagacaaccacctcggcatgctaggaaacgacgacgcccctgtgcctgcgtctcgcgttgagatcccgcgggagctagctgtggcccggatccctgcgggggtcagggcacacagctcgagcaactccccaagatgcaggccaagctcgacgaagaaatggggcgacttgtgcagctccgacaaaacctcgagcaggagtgggcaggccgagcactcgccggaggagcgcgtcatcgggcccgggacgtccagcgccgtattattcacgatgccagggcagggctgcctccggccttcaacggggccggccagaacctagctgcagcggcgatgttacttcgaataatgccggagccatccaccaccgaggggtgacgtatcgagggcaaactcaaggacctcctggaaaatgccgcagcccgacgagccgagagctctacctcccgaaggcgaggatgcccctcggagcatcacgcagcgtcctcccgacacatgcgggaggcctcggtccacaccgagctcacaggagacaggacgcctgcagccctggctcgcctcggcaacgagcaataccgccgcgaccgttgagcccgcctcgaggaaagggtgcgccgaggctaccaccccagacgcggaggacgctacgacagtgaggaggatcggagcccctcgcccgaaccaccaggttcgcgggtctttagtcgggccatacgacgggcgccgttcccagcccggttctgggccccgactaccattaccaagtactcaggggagacaaggccggagttgtggctcacggattactggctggcgtgccagttgggagggacggacgacgacaacctcatcatccacaacctccccccttttcctctccgacgctgcccgggcctagctggagcatctgcctcctgcgcagatctttgactgggacgacctagtcaaggccttcgctggaaatttccaaggtacgtacgtgtgccctggaaactcatgggatctccggagctgccgccagtagccggggaatccctgtgagagtacatctggcggttttcaaagcagtgcaccgagttgcccaacatcactgaatcggacgtcatcggagcattcctcgtcggcaccacttgtcgagacctggtaagcaaactggggcgcaagacacctactaaggcgagcgaattgatggacatagccaccaagtttgtcctcttggtcatgaggcggtcgaagccatctttccggaatggacaagcagcctcagggaagccagaaggaagacgtccccgaggcgtccgtccagcgcgacacgaagaagaagatcaggaagaaggcgcaagcaaaacacaacaccgttgacgcggatctcgtcgctgctgccgagcacaggaatcctcggaaacctcccgaaggggccaacatgttcgatgagatgctcaaggagtcgtggccctatcacaggggtcccgtcaagcacacccttgaagagtgcgacatgctccgacgttacttcaataaggctagaccctcggcggagggtggcaaggaccaaggcaacaacaagaaaggaggcgacaaggaagaagagtacccagatgtccacaactgcttcatgatctacggtgggcaagtggcgaatgcctcggctcgacaccgcaagcaagaacgccgggaggtctgctcggtgaaggtagcaacgctagtctacctagactagtccgacaaacccattaccttcgaccagggcgaccaccccgactgcgtaccaagcccaggaaggtacctgcttgtcgtcgaccctgtcatcggcaacgctaggctccccaaggtcctcatggacggaggcagcagcctcaacatcatctacgctgagaccctagggcttttgggggtcgatctgtccacgatccgcgccggtgcagcaccctttcatgggattgtccccgacaagcgtgtcctgccccttgggcaacttgatttgcccgtctgctttggaactccctccaacttccgaaaggaaaccctcactttcgaggtagttgggttccgggggacctatcacgcggtattgggaagaccgtgctacgccaagttcatggtcgtccccaactacacgtacctcaagctcaagatgccaggccccaagggaaccatcaccgtcggatccacataccgccacgcttacgagtgagacgtggaatgcgtggagtacgccgaagccctcgccgagtccgaagccctcatcgccgacctggattacctctccaaagaggcgcccgacgcgaagcggcacgccggcaactttgaaccagccgaggcggttaagtccgtctctctcgaccccagcaacgacgccgataagaaagtcaggatcggctctgagctcgaccccaaataggaagcagtgctcgtcgactttctccgcgcaaacgccgaaattttttcgtggagtccttcggacatgccaggcataccgagggatgtcgccgagcactcactggacatccaagccggtgcccgacccgtgaaatagcacctgcgccgttttgatgaagaaaagcgtagagccataggcgaggaggtccacaagctaatggctgcagggttcatcaaagaagtattccatccagaatggttagctaaccctgtacttgtaaagaaaaaaggtgggaaatggaagatgtgtgtagactacactgggttaaataaagcatgtccaaaggtttcgtaccctctgcctcgcatcgatcaaattgtggactccaccgctgggtgcgaaaccctgtctttcctcgatgcctattcaggctatcaccaaatcaagatgaaagaatctgaccagctcgcgacttcttttatcacaccttttggcatgtattgctgtactactatgccatttggcttgaggaatgcaggtgcaacataccagaggtgcatgaaccatgtgttcggagagcacatcagcagaacggtcgaggcttacgtcgatgacatcgttgtcaaaacaaggaaagccttcgacctcctctctgaccttgaggtgacattcaggtgcctaaaagcgaagagcgtaaaactcaatcccgagaagtgtgtcttcggagtccctctaggcatgctcctagggttcattgtctccgaacgaggcatcgaggccaacccggagaaaatcgcggccatcaccaacatgggacccatcaaatatttaaaaggagtacaaagggtcttgggatgccatgcggctctgagccgcttcatcttgcgccttggcgagaaaggattgcccttgtaccgcctcttaaggaaggccgagcgcttcacttggactcccaaggccgaagaagccctcggaaacttaaaggcactccttactaatgcgcccatcttggtgccccccgctgcgggagaagacctcctgatttacgtagtcgcaaccactcaggtggtcagcgctgcggtcgtagtcgagagacgagaggaggggcatgcactgctcatccagaggccagtctacttcattagcgaggtgctatccgagaccaaaatccgctacccgcaaatccagaagctactgtacgtagtgattctaacacggcaaaagctgcgacactactttgagtctcatccggtgactatggtgtcatccttccccctgggagagatcatccagtaccgagaggcctcaggtaggatagcaaaataggcagtggagctcatgggggaaacactttcatttgcccctcggaaggccataaaatcccaagtcttggcagacttcctggctgaatgggtcgacaccccaattgccgacagctccaatccaggcggaactttggaccatgtactttgatgggtcgcttatgaaaaccagagcaggtgctggcttgctcttcatctcacccctcgggaaacatgtgcgctatgtaatacgcctccatttttcggcgtcaaacaatgtggccgaatacgaagccccggttaacgggttacgcatcgtcgtcgagctaggggttcggcgcctcgacgctcgtggcgactcgcagctcgttattgaccaagtcatgaagaactctcactgccgcgatcgaaaaatggaggcctactgtgacgaagttcggcgcttggaagataagttctatgggctggaactcaaccatgttgcttgacggtacaacgagaccgcggatgagctggctaaaatagcctcgggacgaacgacggttccctcgaatgtcttctccagggacatatatcaaccatccgtcaaactcaacgacgcacccgagcccgaggagacctcggcccagccaccctcggctgccgagggtgaggccctgcacgtcgagatagagcagagtggggtcacaccaaacctaaactggcagaccctgtaccgggaatatctcctccgatgagagctgcccctcgacaaggccgaagctcggcgactggctcggcgcgccaggtcgttcgttttactgggtgatgaaaaagagttgtaccaccgcagcccctcaggcattctccaacgatgcatatccgtcacccaaggacaatagctgttacaagaaatacactcggggggcttgcggtcaccatgcagcacctcgagccctcgtaggaaacgctttccgacaaggtttctactggccgaccgcagtggccgacgccactaggattgtacgctcctgccgagggtgtcaattctacgcgagatagacgcacctgcccgctcaggccctacaaacaatacctatcacttggtcgtttgtcgtgtggggtctggacctcgtcggtcccttgcagaaggcacccgggggcttcacgcacttgctagtcgccatcgacaaattctccaagtgaatcgaagtccgacccttaaccagcatcgggtccgaacaggcggtggtgttctttacaaacatcatccaccgctttgggatcccaaactccatcatcactgacaatggcacgcaattcactgggaaaaagttcctagacttctgcgaaggccaccacatccatgtggactgggcagccgtagctcacccaatgacaaataggcaggtggagcgcgccaatggcatgattttgcaggggctaaaacccaggatctacaacgacctcaacaagtttggcaagcggtggataaaagagctaccctcggtggtttggagtctgaggacgatgccaagccaggccatgggtttctcgtcgtttttcctagtctatggggccgaggccatcctacccacggacttagaatacggccccccgaggacaaaggcatacgacgaccaaaacaaccagaccagccgagaggattcattggaccagctggaagaggctcgggacgtagccttactacactcagcgcggtatcagcagtctctgcgacgctaccacgcccgaaggattcggccccgaggcttccaagtgggagatttggtgcttcggcttcaacaagatgcccaagggcgccacaagcttactcctccctgggaagggccgttcatcatcgccaaaattttgaagcccgggacataaaagctggccaacgatcaaggcgaggtctacagcaacgcttggaacatcgaacaactacgtcgcttttacccttaaagtgtttcaagtcgttcatgtatctcggtccctttacatgtataaataaaaagtctaactgtcaagggaggatcggccttgccttagcaaaaaccgaccctccctcgggggctagaagggggaaccccctctgcgtcaaaattttcctcggaaaagttttctaccaaaacgactttcgtgcctttcgactatgtcgataacggaatcctaaaaacgagcgagagagacctcgaacggcaaggccgaccgagccaagggactcctacgcctccaggatacggatacctcacccatcaccttccgcgaaaagtaactcgcgcttggataagtgattctgctaccgaacaagtcctaacgctcgaaacaagagtaaagaaacgcagctttatactctaacactaaaaatgtttaggcctcagcggccgcaagaaacatacacatacttagaataaactgttccccacaggctcaggtgtcggcagggggaggagcagcaccctcggcgtcgttcctacccgcggcggaatctgacccggcctcggacggtgacacaggcggaaggatctccacctcaaaaaaggaagccaacaccgcgcctgggccctcagcagccgcatcaagcctttggacctcggctagggcggcctcctcttcgtcgggtaagcagtagccctcgctgacccgctccaaatccacatcatagtgggaagcaaggacagcgaaggcccgcctaacgtcgcggtgtagcgccccgcggagtctgctgcgcacgtggccgcccaaggcccgcaggcaactctggggggagctgcccgaggggatgtcgtcgaggccaaaggtccgacagaaggccgagatggcctcggacatggccatgcggtcggcctccttctgctcagccgcctgggcaagcgccttgcagttcttgacggactcgttaagagccgcctcgaaccctgaagacagccggacaatattcttcagatatgagaagaatgaagctaaaacaaaatcacaaagcgggcaaaacataccctcggcccgggcatgctgctgcgaggccatggcttgggcagaccaggcagacccgacggccacggccaggccctccgcaagggtcccggcccgagcggtcgcctcggctagccgctccgtgacctcagccagctgtcccctaagggcctctgcccggctcacggcctcggtagcttggctccgaaattggtcccgctcactggtgacctggcccagctccagctgccgctgttgcatctcctcggcttgggaagccacctgctcacatgccgacgaagcctccgttcgtgccgacgccgcctttgtccgcaccaccgctgcctccgacttcagcttatcacatagcagccgaaggtccgccacctcggcgctccattgggcgaggcgctcattggcctcggtaagcgcggcccaccgggaccgcaacgactcctaaacgtcgctctcgcgacggatgaacagcgacttagcggtgctcatgtccacgagctcctgagagagaaaataggatatcacaaagaatgccctgatcatgcgaggtctacgtctaaatccttacctggaagccctgggaacgtccctagaaaggatttccatggtcgtccgaagcgacctcatcgccgcctcggtatattcacggaaattatcccggaactgctcctccaactcatcgttaagggaaaggaggggctccgaggtgtcgcggctccagaacaggagcggctgcccacaccactcattgggattgagctgcatggggataaggccgctcctccccaagacgggccacggttctgcgtgccccgcgaccgaggcatcgggtccccctgcagtcggtgcatcgggtgccaccgcagtcgacgtatcgggcctctcctcggccaaggtgacaagcctccgctcaccgacctcggcagcaatgaccgccccctcctcatggtcaaaaatggggagataggggatgaccaggggtggaggcacctcagccatctcaacatcaggggtgacgggcggctccgagggcgaatcagcgacggccccggcaggaatcgatgtcggcgccggctacaagataggcgggctcggggccgcggccgcgtcaacggcctcccccggcatgatggccgctccaacaggagggtcgacctgggaggcttgccccatgacagcccgtgccgcttgggccccccgccggagggagccttgcgcggaggccaaccaaccagcgtggcgcgctgcaactccggctgcagaggtcggccccgtcttaagggccttcgtgggagccagaccagtcgagccctgcctccgcttgctgaaaggaagaaagggcaaaatcaagacacacaacgaaataactgaaacaggggtaccctcagatacttacccactctggggcaaggccaatcgtgcctgcggggagacccctcgggccccggtctccgcaggcgctgcagagggttgtcccgcagccggcttcgacgccgcttccacctcggacgcccgaggcaccaagggggcgaccagcctaggcgacgtcacgacagccgagggatcaacttcctgtacggctggcataggcacctgctcttgggggacatgcggttcggcctgaccccccggagtcgccccaattatctcggccaaggggtcaagtaccccctcgtcccgcctccgctcctcggaccgggaccccggtgtcccggccctgaacgctggtggcgctagccctcctggaagctggcttgacaacctctagcccagcctcgggtccggactgaggccaagccgggccaccatgtcatcgtctttgtcatcatcatcatcatcatcatcatcatcatcatcatcatcatcatcatcgtcaggcgtgtccggcgacggctccaacgggagcccatcccttgcttgcctccgacgacgcttctctaaggcttcccgagctcgcatcctctcgcgagctcgggccttttccgcgtcattcctctccttatccttctccgcggcaagcctacgcgcggtttggcccgccacgtcctccgggaccggtggacgggagagtttaaaattcctcaacccctggagacgaacgaaaatcccaacagtaagaactaaagacataagaagcacatcacaaaacagaaggagggtcggacacttacctgggacacataaccatggtcgggacacattgagggctggctaaggacgccagcgtccagcctccctaccgtgcctgctacccgtctgaggaggtcgtcggcggagaggtgggtcgaggacatccgtgaaccctccaaatcaacccccggcttcatctccgaaagtcgcaaccgccgctctaccaatgggagcaccctctggcggtggatagcggcaacgaccccagcagcggtaaggccctcggcttgtaacttctgcagggcatagagaatgggctggagctttctcctggttctcgcgtgtggccccccagcgccagttatcaccggcggcggtcaccactcgttgagaaaacggcagaagcatcccgtcgtcgttccggagataaaaccaccagttctgtcacaccttgttcgaagatacaagggaggtggggatgtactgctgtgcgcaccctgacctcagctggagggtgcagccaccagcccgcaccttcatacggaccttcttcacgtccgtcgacgcggcgaagaactctgcggagaagagatggatccacaggtcctagtgggcttcaatccccagaaacccctcgcaaaccgccacgaaaatagtcgcctgtgcgatggagttggggttgaagttgtgaagctccaccctgtagtaatgcgggagcgcccgcatgaagcggttcgccggcatcccaaacccccgctcatggaagggggtgaaactgactacgtaccccggcggtggagtcgggtcggcctcgctcctaggggccaaccactcaggctgcggcccaccggagagagaacggagcaaaccctcggtaacaagggcctgcagatcctccatagttacgatggagaaaggccacgggtcgcgcgacggaatgacgattgccttgtcagccatcgccgagctgaagcggtggaagcggaggggatgaggtgcgcggttttctcttctctgtctactctcttaggttgcgaaaacaaaagcagaagacaagcgcaaatggcaggtaaagaaccactaccagcccctcttccgggtatataaaggcccgggcgaaatccacccaaaacttcgcccgaaactttgtgaatttcaaactcgatggaaaaacagttttcccattcctcgaatgactcgcgcacgcgcaacagataccccacgagtcgcccgtcccgtcgcattaactccctggcaggacacacgtctcctctggcaggcgggcgggcgtcgtttcgcctccgtcatgatgactgcctcaaaaaaggtacgccacactatttcgaaatatctcctttcttcctttcctctctctttctctctctccacagggatcgggaaaggggacatttcgaaggagcccttcgcagcaaaagaaacgggccctgagccctcctactgatcaggggttcgaaggttgcgccctgcggggttcggcaaccgccctagagcactcaggctccgagccctttactgatcaggggttcgaaggctggcccctcgaagggattcgacagccgccccagaacatgcagagtcaggtatgaccctgggtacgtccgttacatggccaaggctcgggctatgctcccgaggtaccctaagacatttccgagaccagcgggaacggtttgtaatggaatcccaccgaagggaggcaccgagccctcggaccctatcgaatgggtccgagtccagcaaatcacctgcaggtacttttggagtgcacctctgggccactagctgacccttatcgaatagggctcgggcgtccgctcggattacccaatagcaactcactgaaaacgccatgttcagcgcccaccgagggtaacatggcgcgttcccccccctcctccttgcggaaaggcgacaaaggggcatacaataaaaagccgagacggtcctcgatcgtcctcttgctccgtgcagaggctcggaggctgctctcgcactaggctacggccaaattgttgaccacgtcaacaaaccagcttaaaaacttggagcctgaccatgcacccgggctgcggccaggccgcatgagggaacaacaaggtcgaccgaggaatcacaagaagaattaagacctcagaggagtcaaaccactcctccgaggcctcaggggctacacccgacaggtacgctcgcgcgcacccatcggaacaaaatataaccgagaaaggctagtccccttgcaaaaaatccggtagaacctccaagcgagtgcctacactccctttgaggctcgggggctactgtcgggtaccgtaattaggggtacccccaatactcctaagcatggctggaaaacatcttcaaaacagaccacaaaaactggtaagcgcaactcaaagttaaagcctcatctaccaagggacgatctcgtctcgcccgagcccggcctcaggcaagaacagtagtcccagatggattcacgcctcgcccgagggcctcctcaggcagtgggcgcaccctcggctcgcccgaggctaagcttaggcgaactttgtcgtatagcaacctcggtcaaatcgccttaccaccgaccgtatcgcatgcgcatttaatgtggggatcacctgacaccttatcctgacgcgcgcgcctcagttggcaaggtcgaaatgaccgcagtcacttcgcccctttactgatcgttctgacacgaaaacaacactattcaccctgttccgactactgtgccaaccaccagggtaagactaacaacagtaagtcacgacctctcccgagttcagcctcgggcgcaacagggagctccgcctcgcctgacccctggcctcggcctcagcctcagcctcgggagaaggtctcctcctcgcctgaccccagacctcggcctcagcctcggccttggggagaaggtccctgcctcgcccgacctcagcctcggcctcgggaggagtcacaacctcgcccgacctcagcctcggcctcaagagaagtcaccgcctcgcccgacctcggcctcggaccgactacgctacaggggatacatcattaccctacccctagctagccacctcaggctatgaaggaacaagaccggtgttacatctagattactccggaaacaggtaatgatggttccctgcatgcgtccatgacgtcgattgttctcagctctctacgaaggcaaagaaacgtcagcaggacccagggccgcaccgccagctacgcttctacagggctcaagcacttctccgctggccacgttagcacatagctacacccccatatgtacagctggaccatccccttgtatctataaaaggggatgcccagggccttcccaaggcacacggaggaggctaactcggacgacccacttcaaggccaaactctctctcgcgaatcttgtaacccttactacaagcaccccggtgcaagataatataagcctcatccccctcttgtgtttcatcttgcatcaatccatctgggcagggactcgcagcgtcaaattcactagtcagttgagggtcctcgcgggcccaaaacaccgacaacctgataggagaaaatgggcaattcacttatattatgttccaacatagatattggttggtccacagcgccgtgtaggtagcccaaagtgcctcgatcccactgtcgtactgcttgtcgtcccgacggccagcctaggcgctacagaggtcgttcacggtcttaggattcgacctggtggaaccttttaaaaggcacccaggggctacacgcatgtgttggtcaccatcgacaagttcaccaagtggatcgaggcctgatcgatcgccaaaatcatgccagaacttgcaaaaaaataccatcattgtacattgcattgggataccaaattccattgtcactagacatgtctggtgcgttataaccctggtagattgcatttacatcctctctaagcaacctatcgggtgtagagtttggtgtatcaccagatatgtttaatgtgttataatcctccacatacatgttgcagacgtctatatatagttatcatatctggtgtgttgtttgatgattcattcaatacacacatgtgtgtctggcgtactctgaaatcttgtcctttctttagctcaacattgctcctatcaatgctttatctagtgcaccacagaacatgtttgatgttgctctgaagtctgatttcttcatttcatttttgtttggtcttcttcagtcttgcatgatgcttgtagggcttcaaggagtcttgtaatgtcctacttgagatgttgatcttcttgattaacatgttgccttcatctaagtctttgatgcatcctttaaactatatcaaaaacaattgcaagtaatattagtccaaattgttatattgttcatcaaacaccaaaatctaacaatcaaatgggttgcgatttattttctttatggcctcttaaagaaaaatggatggtgttctcaaggtggccttttttagggtggtccggtttgcctagaggaatggctcaagatgcttaatccacttggtatcgtgctccttgagtcaatcatatgttgcggtctcaagaccctagaggattttagtgttcactcacttgatttgcccattgcttcagggttgatgcagtgaggcaaagtaaagtttgatgcccatgttctcatagtaattgttgaagagacaactggtgaattgagtaccgttattggtaatcattctttttgggaccatgaagcgaggtacaatatccccaaaaaacttgataatagtgtgctttgttagtttttatgatagccatgactttgaaccactttgtgaacttatcagtggctatgtaaagatactcgtaaccattgacaaccttaaggaagggccccaagatgtgccaggacagagagatgaactatcacacttgcgtcattgtgtggatttgctttgagtataattgacatgctcgtcatttctttgccagcttagttcatccttgatggttgttgactagtaaagttattaccaaaagactttattggccatcgtgtaagacgatgaatggctagctcactcatcctgatggatgtcaacgtggctagctcactcatcctgatggatgtcaacgtggctagctcactcatcctcatggatgtcaacgagtatatcattgccctctccacggtatatatgcgctttaagagaactctgttggcaccatgacggtaaaagttcccttccaccaacaagtaccttttagtatggcgagatatgtgttccatgacaatagtagaattagaaaggtaattgtcttaaagtagcctaaaatcttagagttctatacatcaaggtatgtctgagcatttctagcttggtttggggccttgaggggttccaatccatcgttgtcgacaggtaggggcatttgaatgcaacgttgctagggccaccagtgctcacgtgtcaaccgttctgcatcactcaaaatagcatgctaagcagcaggttcaaggagccttaactcgaaggtgcccataggcaatggtgcctgagtcgaaggaagtctagagagctcatatgttatcatgttttatgctataggaatatacatatagtgcacaaaatagagtgagagcttcaactactttactttgatggcttaggccactagttgtgcttagttatacgcaaagagcctacaaatttgggtaatcactagttgcaagtcaccctccactaacagctggtgaaccccaatggatatggaggttttcgggcctacatcgccgcctcatactcgctcatattgtttgtgtagagaaatggatacggtatatgtagcagatctattttttagttgatgaaactagaagaaatcatgtgccaacgttgtcgcgttggttagatccatgaaagcagagcatccaagggtcatcatcgaaagatgatttgagaataacctaggtggacccgagatctaagttcagatgtcctctgggagtccactcaaccacttgacttgagggagaatttctcattttcataacttttaacataggaattagaacttaaaatataatatattgatagagtaaataatatggatgcctatattttttatattttatataacttttgatagtttgattgcaccacaattgcatggaaaacttgattgcacaacaatttttaccattttgggacgcttgattgcaacgtcagtttttaccatttatagattatctagttctattacaattagtatataaactatttaaaacaaataaacatgttatgctattgtacagatctaatatgcatgcatatgcataagcgacaaaggtttatatttatgtttcaactgaaacatcatgatatatttatatgatagtattgttgtactgtcgtctatttaaaaaaaactataccgttacatatataattatattctttattaatagaactagtgtataacgcgcgactagcacgtgtcggtcgtttctgtatagctatacaaacttgtataaaaagatgttatacatgagggtacaagtgtaatgaaacattaatatttttacgcaaataaaccaaaggtataaatatcgacatcagttcgaaattattcaacatgaaaaatattgtattcatctgttaccttcaagaagtaggtagcatgatctaaaggctaattgtacagttatgcatatattgcaaccagttacaaaatgatggcttatatggcatcatgccatatttaagtgggtcattatccaaaataaacataagttgcagtgcatcagttgacttcaccttttagtagcgcgactgaaagttatgtatatgcaattacaaaatggtaagattaattgcaaaagatgtgacgctgaagatgcttgttctgttatgccccgctcttttgctcatctcttttacattgctggtaaaaataatattttgatcttggttccttttgtttgaacctacattatgccctaccagattcagaataaaagctgatgggcatcaatacggtccatatgttgaagctttggcaagcgatttttatagactatcattttagaaaataattaaagatttttttatttttaagtggatctagtcgcacacatgcccatatggaagggcttggcaatgttcaatgcctatattggtctctgaaaatgtgtgtgtatgctattcgttggaaaacactgctatatatatgtctctattcattggaaatcggatcgattagggatgtcgaaatctagatgtaatgtttgaaaattctatcgtgtcttaccgtgacgccaggtagctgtcaggaactcaggatgccactgccaggcaccagccccctctcgaaggctctaataaactgcatcagaagtgaagcgaccccgtggtcgtggtcgcggtcctgctctcagatctcgtggcagaagtctttgatgtagtcagcaagcgagagccacatgtcactacggattcccagaccagagcaaaggaatccaacatgcggcagcgaccggtgctctttggcaaatccttcaccgtcaaacaatccttcgtgtccggtggatgagggagccacactcacctactgcctcgcccgcgaggtacgacttcgccgtcggctacctacgaggctgcgacgattgagcgtgcgtgggcgtgggctgttagtgtggaatcggcagtggtaaggatgtgcgcagtgcgtgggggaggcgctcgagaccagaagcgtcaaactttcaccgaactcaacagggtactgccctctgcttcctttttctggaatgctctggaggaattgacgagccggccttatacgaaggatggtcgcgtggatgaggggcatccgtagccgtcgatgcataatcttacagatgaggtgagatgggctgacgtggacaaacgacaggcaagaaatgctcccgctgttaatatatagaaagaactagtgtctcgacgcgcgcttgtttgttttataatatatagacatatcatatatatatatatataaaggtactggtataatataatattgatgattctttttacaggaacaaatacaggataggatgatatatataatcttaaatacagtagtaaaaatattagttactggatatggagcttataactatatagaagcttacctgtttggaaaagattgaaatggagacctgacctttttacctttattagtaggagtttgatgcgagtgttttaaaatagaatgagtgagaggtacataaattcactcaagagtgtaagtcaaatcccataaggacaatcactgtgcaatgtcctaaaatattaagagtagagtaacccgccttatatattttactacgatattttgagcccaagtgaatattaacaatctgcaaatgcggcatcatgatcagcgtgaatattatattgcagcggtcctgcttgcagatagttgaaaaaacaaaaaaatggtaccggtcgcaacaaaataattatgcgctagaagaaagtttgttgtgagtttgtgaagctatgcatttgagagcagattagacatatgtacaaagtttatgaggcaacaaaatacttggtctaaaggccacaaaatgcagagagtagcaatgcagaaatatgtgagtctttttaacagtcgtgtttaatcttcatggagttaatgttttttatttatgttgtgtgaagcagtaaatagtgttaggtatggattactcaccttgctaatataattgggtactacacattttaatacaatagattttttacgtgtctaaattttaacttgagtaaatcttattcgtgcaagtagatatatacaggtaggtattgaataaaaggtactcccttcgttccaaaataaaatttgcttagaaaattaataggttcatataacacttagcgtatgtgttttatatatgcattcatcatcatccttctgaatatggacttaaaaacaagagctgaagcttctactattttgatgaaactgagggagtatatgtttagaagtataatcttttttgaggagatccaattgcggttatggtagtttttcttttggcattactggtggtctttatttggtcctagttaagaaaaataggattattactaataagatttttttggttatgtagtcacttactttactacaggaaaacataatcagtaaatttggaaacataatggtgaaacgaggagtaattgtacctttgcatttttttcatcagtatcagacctggaatgatggtgtctgcagttatgaagtaactgtttgtttattatgaattgtttggatatataattgtgttttgtggtgaagtaagtatattgtacgagagttgttgaatatgttatcttcattgtaacctgggacatccgttatctaatatgaattacttgatatcaagtgggacaatatatattattaaaaataaaaagataggaaagatcatgtttttgggagttgttggctgcacttttccgaatactaagttggcttactaaataattttaaaagagcttaaattgtgaattggtatggtaaataaatcgaaaaggtagtgtaaatatgaaggtttatgtagccgtgctaagaaggaagctcgcctgctgcagctcctagtgttgactatgttggtcttcaaaatacacaaataaagaagttataacctatgcgacagaattgtttcttggtatttgcttgttctggttctacatccaccttatatttacagtttataatttccttagtttaccgcttgctccaatcaaagcaaaccataaaattgatgcaaataatcaaatgatcgatgatgagggcttgttgtaaaaaatgaatcctggttgaatgccaatgacatgacaccagaactgaaacgcgtagtacaaagaaattaaaccggacagcaacactatacaaatcgtgatacagctacagactgaacctagatgagccttccactgcttacgttggccactcaatattcaacaatatttaagatgtatgtatcacagtttgaggcacactacataaagaacagcaagaacaatggtaagtattgtccgcttgtgatcctcgctgatccctctctagtactcctaccaacatatcatattttttgtttgaaatgttaagccagagctatgagaacttgccatttcttcagaatcaatcaagagtctaatgtatatcctaaagacatgtgaatgcagttaagtacgtaatagcagcaacttttattttaaacacagtctaatgcgtgcaaatttgcataccatcttcacaccatggatcttcttagatgtgttcttctttttcatgtgcttggatcggattaggattaggacaatgagctctaaattttatactataagatttaaggattgcatcggattaggatcgagctctatttctattcatttttgaactacaaattatttagggccctaccattttgtgaagaagcatttggatcacgatccattaccacccatacctagtaggctaatgtatagttttaaatcgtttacaatttacatggtaatggtcgatgtctaatttctgcagctcctgcacatctgaatcagtataaatgtgttgaagttagtctattcttgtcatcaatattgctatcaaaagcataatggatagattttacctagaaaccacttcactcattacaatttacatggtaatggctgatgtctaatttctgcaggtactacacatctaactccattttaaacgacacatgtgtttaagttagtccattcttatcatcaatattgctatcaaaactataacggagagattttacctagaaaccacttcactcttgttcactaaacatttctatgagcttatgctcaatctccagccggcctcttagtaactaacaatgtgtaattgttcaaaaactcagtttctctctaacaatccccaaaaggaacaaccagtttcctgccaagtgatgttccatccaatcttcctaagtacacagatgggaatgatacgaactcatcttgctgcttacaaatgcaaccgtgtgctccgtctgcaatgtcattcggccacagacgtggtggcgacacatgcaggaaccacaatagtgttttaagggggtgagcaggggatggcgacacagcccgcgccgacacggcggcggtgtctcacgcacagtaaggccgaggatctcatttaccgaggaggatggagcgctgaccttgagtagtggatgcgcgttcttcggggcttggcatcctagcgtggggcccgctggaggactcgatggtggacctggagttgcacgtcggcgcgggcgtgggcacgttggtgagagagtgagagccgagcgtggggagggggttggagatcgtggtggcgtccatgtcgagcggtgcagagagcttgaggccgagctatgggtgcgaccgaacaaggccgacgaagcgcgtccgttgtggcagtcagcgtgggccatcatggcttgccgcgactaagcagcagcacgtagtcgtcacgttttgccgcggcttcgcagcacgcttgtgggcgcctcggccgacatcctggaggaggatgaaaggtgagcatgaggagggggaggggcccataacatggggaaaagagggacacaccatcgccaacgaagaagacaccgcccctccatataatctccttttgattgtgcgtccgtgctctctggaagtctcccgtagcctcaggctgcctgttgaggcgatctgtctgagggtggaacgttcatcgcaaccatttggaaacgatccgacggctagagaattaagggatgacgtggataggcccatatgcgccgtttcgaaccgtctttgttatatagtaaatttaatatcttgaggaattgagtagattaatgaactgacgatatgcccctgaccttaaacgtcatgctatggcggtgtatatatggaacaactaacctagctccctgtttggaacgactagctcactgtttcattttacaaagccattttgtctaatacaaagagagtattacaactttaagggctagtttgggagttcaaaaaccggaggggattggaagggctaaaattcccttcttattcaattttgaataaagataagattttatctcctccaattcttttcggttttcccaaactagccatcaaagataactttgcaagaggaatcaaataacaaaaaactattgggggtatatatatggaacaactaacctagctccctcgcttaaaattgctactatttatacataggccacaaaacaccttttcatattgatgatcactagtataaaaaccggtttttactgacgctggtggttttctcactaacagctttataatacatagacttcagtaacacatgcatgtttataaactattagtgcaaaacctacggccacttgagggccggtaagcttaaaaaaggatccattaaaaatgcatttgtaatgttggttgataaaattaagcgccagaaaactataaaaagtgctgtgaataaagatattttatgtaacggcggtggatatatatacgtactgatatgcaacgtgcatggacggatcggaggacaggagcttgcctaccagtacgcgaaggaaggggcgtg

SEQ ID NO: 429 - DNA, 9078 bp, Zea mays
  Intron number 1 from transcript GRMZM2G012350_T02 (locus G RMZM2G012350) derived from phytozome v7.0 (chr-ID 2; pos 2 28325547 to 228334624)
ggaggagcgggaggaccgcctgcgccgtcggtgaggtatgtccccgttcccctctccccttacccttcctcggcgctagatccgccgccgccgcttctcgcgcgggggacgggggttcccctcttcctcgccgcccgctggcttggaggccgggcgcgccgcctcgtggggttcgcctgcagaggtccagtctccgctcaggctggctgggggcgctacggacctggagccggagccgggggcctgctgctagggtttcggagtgtcggcttcccgtcctcagcactagtccagtctccgctaaatttcataatggcataaatccaattttctcgcctacctcctcgttggccagaagctctcctctgttcttcacttgtgcggttgtgcccagcatgagcctcctcgttggcttcctatgaggccagattgagccaagtatttctcggctctctattttcctgttatctcaaaggctgaagatttcctgtgtcctgttgttgcttttctacttctttcctctcctgcgctatgttttatatatgttatcctcttcctatagttctttctctgctgcgcttatacatgtggagtgcaagtgctattgagagatgagagatttcaagtgctattttctattttatatgcataatgaaaatgctattgaaagacgagaggcttcatatttgctattttgctattttatattgtgcactagtactccagtagcgctacttactatggtattacattgctaagaattgactatattaaggtatgatttgcttctaaattttagtagtgttatatattaagatttgtgtatggcgttgcctaggggattgtcttattgtgtatggtacaggcaaaaagcagcatgtttaatcattgtttctgctccagctagcagctactgtgtaataatatataggtttttgcgaatggagagatgagcaaattattattcactagaatagacgaacatgttcttatattcttattctccaaacatccattctgtaaaattcttgttttttattttttgtttttccgactgcaattattttctattcctgtgtttcccttttttttctctgttttttatttgtccgctctaattacacgtacctacatgcttatgaaacagttatttcctcatacaagtcagcaaataataattaagttgtgaaacggttatttgcaaaaccctgagcaagtgatgccccctgttcatttctcgttcaattactaattgttaatttgcgaggatataattgtcttgaatcaacttattctattaaaaataaacaaaagtaaataatgatcaactacattccaccaaccaaacgtccaataataggatgcaacttgaaaacaaattcaagcttgaaaattgaattcctagggcaaagatctagaagactcaaaatggttagggacaatatggtaaatctaatgaaatagagatctcaagttctcaacacgagctcaattccttcccgcagcgcagttgctcaagtcagcaaactgaacccgtccggattcgtgcgccgccgagcacccctcgacgccagcggcgatggcagccgacgacgtgcgcgagctcctcctctccaccacagccgacgcctctgacccgtccacgcccctctcagcgcccgacctccgcctcctcatcgaccgcctacgcttttgctccgaccgcctgaacgcctcggccctctccttcgctgcctctaaccgcggggtcctcgctaatgctctcctccgcgcagcctccgccgccgattcctccgcctccctcgagtcttccctcgactccgcgcttgccccgctcgcctcctggcccgacctctccgacctcagggcccttgccgaccgcctcctcgctgcccgccgcgagctcgctgagcgccaggagcacctagccgctgcctccatgattgcctcgctttcctcccgcctccgcgaggcccgtgccgcagcgagcccccttgacgcggccgctgccatcgctgaactcaagaccctcctgatcgatctcgagcgatctggatctggtcaagacgacccggtcgtatttaggctcctcaggagcgactgggagcaacttgtcgatgaggtgatgatgaaattccgctttagaatgattcagcttatgtcagggtttgcatttgtgctaatgctaattgttgttgggttgtggttatgatggtgatacagctgcaagttaggctttcaaagaatgtggaggagtgtgtggactttgcgccagagggaggtaaggtggtggtgagtgctactccaaaaggccactccgatggaagtcatggtgttgagcttcctgttgctctgcaggcattggaggttagttttactgagaaaattcagttggtacttctgcatcacaggttgactgcttcagtaagtttgcccataagtccataaccgtaacttgtaaacaaaaaaatgcaattggtaatggaacttagttgggagattttgatgggcattgaatggaacataaactgtacatactttaagttgcattgctgtagaaataatgaatacaattgttgttaaaagatagctattgtgttggacgtttaagccactgatctaatccttcagcggctaaaattttgacaactttggaaaaaaacatctacatcacttgaagctccaccaggcactacctccctgagttcgtatgctatgttcttttgatatgttgtggaatgcggactagattgaaattgacaatacttgttgttttagccttagcatgggaactcaggtggtaaatgaaatgcccattgaccatcctacccatgtttaatcgtctataaggtggtcatttaatatgccaaaggcacactcacactcccccatgctagtcaatgaaggaattaagaaggtgtaagattggaaaaatgaatcaaatttacctcgaaattgaacaagtattttgaagatatcagaagaggctaaagcaacatgtattttgaactggaacgagtagatggctgggtgatgttgtgcaccttggtggtgtagctgtgagaaggcggtgtcatggctaggttgggtagacctatttggcttagagagcaagaaggatctaaatatcaaatccatgttagccatttattgataagttcctctcctgtaaagagaggagtttcctgacaacaaacacacaatggatggaagcatatatccttaaatgcaactaactcctatttatgccttctgtatctctaactgatagcaatatggttgctgtctgtattgatgatcagaggaggagtacaggtgcacatatatatagagatagagaggagcaggagatctcaggtttatggaaacaataccctgagatctccttgattagagggatcctatctctacccctgaatagagagattgcatctatagcttcctatatgtggcggcactaataaggcaagtatgcctgtggcgcctgtatggcaggggagcctgcgactgtatggaaggagagcccatggcagatatatctgctaacacgcccccacagtctgatcgtcgataccactgacgttcaggctggatctgaactcagtgaagactgtagatggaagccctttggtgaagatgtctgcatactaggaggctgtaggcacatggagggcacagacatcaccgagagccacccgatctcggtcaaagtgcaaatcaatctcaatatgcttggttcgctgatgttggacgaggtttgaagacatatagactacattgatgttatcacagtaaaccagcatggcacaacgcaacgggtgacgaagctcggcgaggagctgatgaagccaagtggacttagcaacagtgttagcgatagctcggtactcaacttcatcactggaacgagaaacaatcatctggcctttggagtaaataaggttatcactaagaaatactgcaaatcttgaagtggatcgtcgtgagtcaggacacccaacccaatcaacatcagagtaggcaattaactcagcctgagaagaagggcgtagctggagatccaaatgcagagtgccacgaacataacggagaatgcgcttcaatgaggcgaggtgaggctctcgaggatcatgcatgtgaagacaaatctgttgcacaacataggctatgtgtggtctggtaaaggtgaggtactgtagtgctccggctaagttgcggaaatcagatgggttagaaataggagcaccagtagctgtagagacctttgggttaatgttgagaacagggcttgcaatctgccataccagcccgatccagaatatccagcatatactgacgttgagaaagaaaaagtccaccatctcactgttgaacttgcatccccaagaagtgatgtagatcacccaaatctttcatagcaaactccaactgtaaggcctgaatgatgtgccggaggagaacagtggaggatgctgtgagtataatgtcgtcgacatagagtaataagtaagttgtgtcaggtcctctatggtagacaaacagagatgtgtcactcttggcctcgatgaaagggagagcagatgagtagcaaaccgactataccagacacacagtgcttgtttgagtccgtagagggacttgttgagcccacaaacatgttgtgggctggctaaatcctcaaaacctgagggttggctacaataaacagtctaagagagtcccgtgaagaaaagcattcttgacatcaagttgatgaatcgataagtggctagagacaaccaaagataggacagtctgcacagtagtaggcttcacgatggggctaaaagtcccatcaaaatcaatgccagggcgttgcgtaaatctacagtgaacctagcgagccttgtacctttcaagggagccatcaacattaaatttgtgcttgaaaatccacttgtcggccacaatgtttgcaccaggggggcgaggcaccaaatcccaggtgtgattctgcaacagtgctgcatactcatcttccatggcagctcgccaattaggatcagcgagagcaccgtgaaaagtcttcgaaatgggagacagaggggaggcgtggaacaagactggcaaccggaagccaaccttgcaagcgtgaccatacgatggtggttgatcacttgggaaacaaccactgcgctgggtgggagagggcgatccaatgcgcccgcgggagatgagcgggagatgagggtggagcgacggcactgccaggcgtggtggcagagccgtccagacgacgcgtgaagacctggccgaaacgtcatggtgcagggacgtcaggtgaagtcggtgctgatgcagaggtgccaggagcaacacctggtcctgctcggatgctgggagcagcaacactagatggagcatcgcctgctgcttgggtgctgtgagcagcaacacctggtcctgctcggttgctaggagcggcagcactggttggagtagagcctgctgcttgggcgctcggagcagcaacactaggaattgcagtggtgccggggacagcgtgggcgctgggagcagcgcctggtactgcagtggcgtcgagaatagcttgggcgctggaaacagtagcgcctgaaactgtaggtgtgcctagaaaaaatagaagaggtggccctataggtggtggcaccgggttagtgctaatgttgtccaggaagtcaaatttttgggaggtggcagtgggttgctgttcaacaaagggaaaggtggactcatcgaaaacaacgtggcagaaaagaatgatacagtttgataggaggtcaagacaccagtaccctttgtgatgcggctagtagccaagaaaagcacacttagcggagcggggatcaagtttgtggctagtggtggcagagaggttgggatagcaggtgcaaccgaacatgcgaaggtgttcgtaggagggtattgagttgaagagggcgaagtgtggagtggaaaaatgaagggtcttggtgggtagtatgttgagaagaagcgttgccgtgtggagagcttcaacccaaaaggttggtgggatgctggcatgaaatagaagtgagcgaatggtgttgttggtagtacggatgatgcgctcagctttaccgttttgaggtgaggtgtaggggcaggacatacggaggacacatgggtgaggaagaatgttcgtgagctggagttgtcgaactcgcgtccgttgtcacatttcacagctttaatgatgacgccaaactttgttttcacataggcgaaaaactgagtgagggtcgggaaagcatcaaatttcaggcgcaaaggaaaagtccataagtaatgggagcaatcatcaagaacgactaagtaatatttgtagcccgggacacttaaaacaagagatgtccgcaagtcatagtgaataaggtcgaaaatgttgatcgcacgagaagtagtcgtacggagcggaagatgaacatgacgacttaactgacaggtatgagtatgacataaacgggagctagcatcttcattacacatgggaatgactgatgtgagcttggagagtctcgtgaccagggtgaccgagatggtgatgccaaactgatagtggagctggcgatgaagctgtgtgcagcaggaaggcacagggggtacaacggtccagagctattgcacctgacaatcacgttgcgagatagcagatcctttacagagccaccagacggatcaaattcaatggaactgttattatcggtggtaaactagcgaatggaaatcaggttcttaataaggttaggtgacacaagtacattgttgagatgtaaagaatcgtgtagagtggtggagccaatggaaatgacggtaagatgcgagccgtcaccgacaataatggaggaaggtgtagtaagaaagggagttgaagttcctgatagagtaccgacgttggatgccatgtgggaggttgcacctgtgtcgaagtaccagtcggtctgctggggcgtagtcagggacacgatgctgaaagatgatgcaagggactgggcgtcccaagacggagtggctggctgtcccaggattccgtaggaccctggggaacacctccctgcaggtgccaatctgtagagtgtgatgcagtggagcgcctcattgtccttgtagagcaccatggatatatttctaggtcttgtgggccagcaacgcctgatgtggggcgatgggggctggagcggcgtagagtgcctgctgctgttgtggagtcggtgcccctggaccgggccacatttgaatggccccagtctaagggttttggagggagggccacaggccggaggcgccaggtgctagtgctaaaaggatgccctggcggccttggccacccctcttgctgcgacggttcttatagcaattggggtttcctgaacgtggagccgaagacgccttgttggaggccgacgaagtcctgccttgcagaggcttggtggaggcaaggggcggatggagcagacgcacaatgagccatcgtgagttcctccaacaggagagtggcccagacgtcgtggaacgtcggaaaggggcgaccgaggggaagatggcggccgatgttggagaaatggtcgctgaggccgcgcaaaacgttgaggaccaacatccggtcggatactggtttgccaagatcaccgagggcatctgacatgattttgaaatgacgacagtagtcggagacagatagatcaccttggaagaagtgccggaactggacgtcgaggtggagggcgcgagtctctcgattttcgagaaactggttctcgagagttagccatgcagtgcgggcagtggcgcgcgtaccatggccacctcagcaagctccggggagatggaactagagatctaggacttgacaacgcagtccatgcgtgcccagtcggggaagcgaggcgcgggagtgtcgtcgacgatgtggctttccagggaatatttgccgagggcgagtaggaactcatcacaccatcgggtgtagttgttgacgaggtcgaggatgacgtggacgaaactccgaatgttctagacagcgacggcccgggagtggaggttgacgatagcagcagcctcgtgaaggaggatggtgtcgtgtaggtccttgccagcatcaccccctggatcagagaggtgagactgagcgtcgtcggccagaatgtcattggtgacatcccgagcagcgagggcgcgagctgcgcgaacgcgttcgacagccacgtcgcgctcctgggccgcggtggccgccttctgctctgcatgaagagcttgggtgagcgctgcatcgcgccgggcggcagcctggaggcgtgcttcatgctcagcggcggtctgtgtcgcagcgtcgtcgacgataggtgtcggtggtggttccagaccagccatggccaggggggggggcgctgcctgggtggcgcgcagaggggagggaagagggaaggtgcaacctagaggtggcgcacagaggggggaggaggtggcgcagcctgagggttgcgcctagggcagcggaaggaggataggaacttgagctcgtgataccatgatagtattatggttgctgtctgtattgatgatcagaggagtgcaggtgcgcatatatatagagatagagaggagcaggagatcttaggtttatggaaacaataccttgagatctcattgatcagagggatcctatctctactctacccctgaatagagagagattgcatctatagcctcctatatgtggcggcaagccggcaataataaggcaagtctgcctgtgcctatatggcaggagtgcctgcgcctgtttggcaggggagcctgcacctgtatggcaggggagcctgcacctgtatggcaggggagcccatggcagatatatctgctaacactaacgtcacctaattaggggccagactatagacacgtacctggaggttttttctgagatggcaggcgctgccatgggcgccttgcataagttttgaccccatattacatgataacattgtacttctccaaatgtatgaccttttcatttctttgttttgcagattattg

SEQ ID NO: 430 - DNA, 7713 bp, Zea mays
  Intron number 1 from transcript GRMZM2G047042_T01 (locus G RMZM2G047042) derived from phytozome v7.0 (chr-ID 3; pos 9 6221957 to 96229669)
gctcgctgcgactgcgcgcctcgcacaacaccaaagtacggcctctgattgattgcgcacctttttcctcatcaaattttgttgctgaccttggtcttggcgtgtcgacgtgtcgtgatgaattgggaatgataccaacgtggttcaattagcactagttttccaacatttggaagcaaagagaattgataggactgtgtaattatgaaatatgaaaacgaaacacaaatttgtctgcgaatgaaatttggcagaaacaaggaccatatacagagggactttgtccagagctcacctgtcaggaacaacagaatcggaatacagggttagctgatatttagtgttgtacttgtataaatatgaactttaaaagttaaattgagctcttatctattgggaaatactcttggaatgctagaaaacactagtgggctagacgttcttgatttttgcgaaggaagaataaaaacacttctcagttctttctttattgaatggttctactttgtaagaacaccttcagggattgatgtaggtattgattattgaaagccatgagcccatgagacaacatttctttctctgaaagtatgttcctatgcggttatgtcagttctactgcatttaggctgaaggttgttgagggtctttgcttctgtggtgtgtcagtgtcagtgctctcttactcgtggtatgccttcacaagttgtatgttgagagctatttccttgattccacagcatgttggatcatggacactgtaaacaaagttgctgtcgggccatatgttcatttgagaatatcaacgtttactgttgaaaatgtactttgaaatagtaaagtgtgtacaattcactgacaatttccggctcatgaaatgttaacaggggattggagagcccctgctctatgttggaaatgtagtgggaagtagttatgcatgctcaacatactgatttaactgtcatgttttttcaaatactcatgtcatgctaaacaaagttattctattcattaaatagctgatccaggcatataggtagaaaagcaaagaattgaaaatcatatactagcttgaattatgtggaatctttaattacatgtcgttctatcaggagtggttcaaaaggctgaagaactgaatgctgatatgttacctttactccttgagtaagtacgatctttgattaatgggaacatgtggttttgttacttaaatactggtccatataccatacctatcatgtcttgaaacatcagtttggtgggattttgtgattctctagataagcggtgaacttgatgcaaactattgtttcaccacttttctaacaaagctgaatccaagttcataaggtcatagatcagctcaggaataccataagcctattctctattgtaagtgcatgcggttgcagcatgttttagttgcctgtactttatccttactgtaaacttcagattatagagacattttaggtctgtctgacacaaattattttccatgttatgtttattttctgctgaaaattgttatgaaaattttcatagtaggagttcagaagttggaaataacacctgttgtttgtatatggctccatatagcagtaccatgtgattttctgaaactggcttgtgtttcagaactgccagactggagagcaatcatattatattcatgtcggctgttcagcactctgtttatctatgtcttgcaactatgaatatgacaaatctattgtttcttgcattcaattggataggtgctttcaattcaagtaccacagtgtaaaggtgtgttctattcattgagatgttttggttaccactgtcaatttgtcatatttcctaggatgaaaattttaggagtattttctatatttcattttatccattcattctatatattatttctcttcaccttatctccatgtgcttcctcatgtgttttttaatcaaatctgaaataaatcatatagcatatcatgtaatttgtaacaaaagaaggccttttcacctgttcttagcatacattagttatgtgctgtacctgcaatgtggagttaacttctatcaaagtgaaaactttgaatcatggatacttatcagttgtgaagagatgatattttggttgttactgagctttaagttcaatttttttgtactaaggttgaatccactggaaaaccacctcattcttttttgaaaagagtactgcatgcattaggatggtttctcatgtaaaaaataactgttttctcccttttctacttggacatctcattgacacctctggaatgcacaataacttgatagtttgcgtcatacaatgcaaacaaataaggtcaagaatttacctgtattaaaaagttcattttcacttcttcaacgggtgtattgttcattcatcttgctcccgatctttcgatcagtggaatcgagtgtaaagctatgtttcctcactcccattaggatataatgcaaacaaataaggtcaagaatttacctgtattaaaaagttcattgtcacttcttcaacaggtgtattgttcatttatctcgttctgcaatatatttgtgttcaaattgcaacttctttatgggccaccaaccaaaggaagaattgacatttcttgagcccatgatttccatggctccaggttaatggatcctataaaaaaaatgcttgataggccatcttagctgaatgctatccatctctgtcttggcctgaaccagtgatgcggcgggagaaccctgaagcaagtagctagcagtagagtgtgtgtttgaatcactgttttcaagtcgtccgattaatcacgattaatcgtccaagtcggtttggaccaatcacgattaatcgcccaagtcgtccgactaatcgtgactaatcttgattaatcgtgattaatcgcgattaatcgccctagtcggtcagccagaacgactagcaaatcgtccgacttgaaaacattggtttgaatgtaatggcattagggcgtgtgggccgtgtagcttggtccggcccagtagagtgcctataaaggctagattttttactctctaaacaactaagaaataacataattcaaaatatccctacctcgcatgcatacctgagtccttcaggttgttcgtggcaactctcctcgccggagttaacctcacgtcgcgatggcgacgccgtgggcacggggaggcgttacagtggtatcaaagcctcttcccttccttggcgtgggtcgtgtttggtcccggcaattctcggcgagggcgcagaggttggagtcgtgtgctgcagaggttgcatacatccctgggtggaggagcggctccggctttatcgctacggtgcccactaccacaccttcggttcagtcgcggctcctgctagaggcgatggtggaatggaggaaggagaacgaggtgagatggaaccaggtgatgaatcggttggatcgtttgactctgttggcttgtccaaggatggagacagaactggaggtgtcgcggttgaggttggcagccatggccatggacatggaggtggagcctgaggaacggggttggggggatccacgatctggagaacgagggtgtcgttgtggacttgatgcacaggttgatggaggtatggttcttcctgtgtttgatgaaacgcctcacaatggcagcgaggaggtgattgccctgttctctgaaggttctgattcctcagtgttcgatgaaatgccattggagaatgtgatttgggatgaggaatctgggcagcgtgacttgttggatcagctagcacaagatgaggattacttagttgttgccgcgatgaaaccaactgtacataccatcattgtggacaagcagttgcagtatgggctcaatcagggctgtttcgagatgcctgccaataccgatgggtctgaagatttgttccaaaaccatgatgctgttgtctcagatgtcaagatcattgaggaagatgaattcatactcactggaggcaaagatggggctgatagggagatgccacaggcggatgaaaccagtgaagaagatgtggaagattacctcgctgaatctaaagaaggggctgaggatgaggtgctgcaggttgagttgacagatggtgaagttcagtgggatgaggagttttcatctgacatagaggcttacttcagcacacagttgtgggaatgggatgtctaattggtttcaatcaaggagaagtgataccggtcatgacacaagcccagaggtgccaccctttagatccattatatactgctgaaattgcagttgttatagtaactgtaagaagtaagaactactggaagaactcctgagggaagatacaacatgcactgtgttgaagttgtgctgttcgagtcagagaagaaggttgtggcattagcggattcctactcctttccacctttccagccattgctgctccctagaagcaaaggttctgctgtcagaccaagtaggttacttcctaggaggaccagacttgttggctacaacaaacaatccaatgggactagcatttggatcgtggaactatctgaagtgcatgcagttattatggctggaccacacagagggaaggtggtagcctctgaagttgttccagatgttcaatctgtaatggatgctatggattatgctgaaggtgaggctacactcaacaattatcctccatttattgaagctatgaagggaaattctaatgtggatttggttagcaaaaatatgccaacaaatgtgaatagctctcttctggaacttggtggcatggtggatataatattcggctgtgatcatggcttactagatctcagtttggtagatagtgccagattatgcactgcgatgttcttgcaggtcaacagtaacttgctgctgaaagaacatggggctgattttggtattgtcttgtcaactgctgagtgcgtggcatgatgcttatccccacaaagtcttaaccaacagggtgaagatagtttcagcattatcctatatgaagtatgtactggacagaagatgagatgtgaatgcaagtttgggttgctctttgatgggatgcagaacaagggcagtgttcgagaggtgatacttgaactaacacaatggtggctcaatgctgctagtctaggaaacaatgatatggaagttcagttacaacctgatatccaaagaaaagccatgaacaagttaatgggcttacaattcataatggtgtatgagaaaggcaaggagaatatattggctgatgcattgtcacgagtgggtccgtttatggctctgtattgtggcattcgtttccaaccagtttggatacaagaggtacccaactcttcgatgactgactcttatgctcagaatctgttgccaagagtgaccattcacagtccacatggagttgtgttctcagtacagcagggcaatattagaagactccatcagctttgggtgggcagaatttcagcactcagcactgtgttgatttcaacctttcatgattcaactgtttgggggcattctagaggggttgcatcttaccttgagatggcaatgggtacccggtatgtaggtaggtatggaatgatttctatatctgcgggtatgttaatgggcaacaacctctacccgttaggtagatgggtatgggtgggtactacccatacctgcataaatatacccatataataccactattattatctaataaagtcaatcttagttaaaataaaaccttttttcggctattgtttattaaactatcgaattatgtaatcatatggttttttatacttcaagttgaaattatttttgtgtatttatttgacattttgagtgatcggagtattataatttgagatcttagcgggtacgggttacccgacgggtaaaattacccgcgcgggtacgggtatgggtaagattttatactcgcgagcgtatatgggtaactcgacgggtataattttttgtgatcggtatgggtatggaatgctactatccgacgggtatatacccattgccatccctaatcttaccatatagtgaagagggtgttttggtggaagggtatgaattctgatgtggagcaattatttaggcattgtgcaactagtcagcaggctaaaggatagcagtcctttccctctggactcctacagcctctttaagtaccagagggcattttggaggacattacaatagattttgtggaaaagctacctaagtcgaaaggctatgatactagcttattttggaagcaccttttcacattgatggatggcaaattgtctttgaacatggcatatcattcacaaacggttggccaaagtgggaggattaaccaatatttggaaatgtatcttaggtgtgatgtcaatgataattctcacgagtggaatatttggttgtctcttgccaaagtatgtttggctgctccaaattttaaaggcaatgaggttctagtgtcaactgattgggagcagcagaggactgtctacagcacaatgttgcaggaacagctgtccagagctcatcagcgttgcacagaggtcaggggttactctaaagcgagttttgatccatggtcgggtatggcacttgagttttctacctggcggacttcaatgttgtgaagagtcattttcttactgcacttgcttgggggcaagcaagttctggcgaaggggcagatttcatggcctgaatcagtgatgcagcgggagaaccctgaagcaagtagctagcggtagagtgtgtgtttgaatgtaatggcattagggcgtgtgggccctgtagcttgggctggcccagtagagtgcctataaaggctagatttgttactttgtaaacagctaagaaataacagaaatcaaaatatccgtacctcgcgtgcgtacctgagtccttcattttgttcgtggtaactctcctcgccgcagttaacctcacgtcgcggtggcgacgccgcagccacggggaggcgttacaatatccagcacatctccacattgtatcatgttggagctccacctgtattactaaatcccagttatcaagatatttgaacagggcagctaccgatggagcttcctgtatatcttgaaccagcagcgatcaactgaaacttcctgtaccatccactgattggttttgcataatatatgcgggcaaataaatgtgggccaggatcagcagtgggctctcccaattactgcaactattctctttttcttagatgttactcattcaaggttgattttccgagtttacacattgacctgtattatataatatcatcatgcaatggtcatataatgcattctagacttgatttggttttcgatttcgatctgcctactaaacgttataacagtaaagatttaccattatatgaggtaaatatagtgttgaatctgattcttatcttatattcatgagatctctgtattgattcctttctcttttaaatatgagaaattgcacttctttgctaatactccctccgccccaaaatataattcgttttagactaatgatacattcattaagtaacatatgaatgtagtttgcatgtatgtctatattcattatcatttgaatgaatgtggatgaaaaaagtggtctagaaagaactatattttgggatggagggattatgtgacatacacttacgttactgcataacag

SEQ ID NO: 431 - DNA, 2169 bp, Zea mays
  Intron number 1 from transcript GRMZM2G140885_T01 (locus G RMZM2G140885) derived from phytozome v7.0 (chr-ID 8; pos 1 343059 to 1345227)
ccgcctgcagggcaagtacttcttccacgagcagagtaagtgacgccatccctctggcacaccccgagatcaccctcccttgtccatcgattagcggagcactacgggcgtagaggggatttcgtctgccctgagcggccgaaaggagtgagcgaatggggattgcttgataccgttagtagcggttagggaaaggaaggataggctggttcgctcgagactgtacgcagagttttgtgtagttatcttattgacctatgatttgagctgaattggacctgctcttttatgcatgttgtcgctgatgttgcacagtgactgtctggctgatcgtattgaatgcacagaattgataagattgatagattgagtaggtcaacaatatctgtatgcattgtggttattttgtttttgggtagcattgggttttaccaggtggtgcaaattttgtatgagtggagttcccgatatgtcaaattgctgtgttgatcatttcaatgatggtattaagttgagtatatatagtactatcccttgtttctcttaccagacaagcttgaaattggacaacaagtccactccccaaaatgtgactatagacatatagtactgttactctctctctttgtactggggctttatttggtcttgtgaaagtctggagaatgcgaattgacatcattgtctccatttagacctgcttctgtgtaagtagatgtagatctgcttcagtgtcagcatgagaatgtttatttcatgagttgctgggaccttaagcataagtttacaagaatactcatctcaaccttatacttttgggtgtcatttaagtgcaattaaacttccttaggttctgtttgtttttgtatttcttatcttacttctacctaatcttgtatgtacatgttagcttctttgctctggaaaatatattgttgaaccagatgattttgagcagccagtcatctagctggacccttggaacctctcttcaggcttcagctataactgttgctgtagaacctatgatttgaatctaggatgttaggggtggagcaatttacatcctcaccccagttaccacttaccatgattgtcttatttccttcagaggaaattcattcaccaccctttcctaaatgtcattttttgatgaagatggtcgaaccggtaaaccaatgaactaggagactacgatgtttaccagttcatggacaattctggccgtaacaagtactcataataactagcattttttgggtgtgtgtgtatcgcgcgcgcgcgtgggggtggggtggggggtggggggtggggggtggggtgggggtggggtcctgttgaggaaactgaaagtgcaagaacttttttctcatggcatacttccgtcctctacttatcttagaactagctactctcatggggtgttttttggtgcattgggcttcctaataactatagatgctaaaatctattgcaaatattattaactatccatagtatctgtggtaaattcttggtattagcctccatgaaatacatataattttaatatatatccaatgttgataacatggtaatgctatctataatgaaagcatgatgcaagaattctttgtggaaaggggaatctcatgactaggctttgcaattcatatatctggagtatggatattgatgctcctgcttgtaagcatttaataactgttctatcatgtgtcttacattggagaaattctggagaatgcttgcaagcagtataatatgttatttatccttctggtattaattttttgcatctacaaagtcaaaaactcagataaatttggttcccgtggcctgactagaatactggttcacgtgaaaccttgtcatctgccatattatgccttttacttcagccttttctttttcttttggtccatgttttctgatattttttaagtctatagccccttcctacttccttcagaattagaatatatatgctctcttttgttcaacctggttttgcttttatttcatgattctgtcttcataagtaaaattatcattatttgtttcattctactggcatcataagattgttatattgttgtcatccaatgcacaattattaaataaataaacgctaagattactgccctttcagtttcaaggcatcgcaccatc

SEQ ID NO: 432 - DNA, 2756 bp, Zea mays
  Intron number 6 from transcript GRMZM2G334791_T01 (locus G RMZM2G334791) derived from phytozome v7.0 (chr-ID 8; pos 1 66180971 to 166183726 reverse strand)
gaaaggtgagcttatctcccattgattctttcatgaactacatgtttttttttgtttcaggatattctgttaggtcacttgcaatcttcatctagacactgttcatgactttgtgcaagtatccttttgccttactctctctttcatatgttgaagatttgcaatgtaagcataacagtactgatttacccacttgttttaggtgcataaattaaatgatagtaatcaaacttccccaccacaaccacatttgtgggggcatatttgtccatgattgtgacgttacatgcttggcttctcagtgtagtggaaagtcaggttgaatgatcaatcattctgtgacaaaagttgttcttttaaaattctgcatacgcaaggaagaatcttaggaaatatctgatatgtaggcttatttgttaatcttaacaagtagttgtgtacttttgcagcaagtttatgtggtttttggtcgagccaaataggtcactattaagatgatgaactaataagtttgtataattctattgcattcgccaaacctctttgttgtgagttgtgacacatgatgtcgatgtacagtcttgttcggcaactagctggacttcacaactattctttgatagtgcatttcattcttagctgtagccacactgaaacaacaatctcttgataaatgcttctaatttggatgaggagttattttcggcatgaggtgctggaacattttctgtttggtttattgaggtaatatgtactacaagggatgttgacaccagaaaagtggagtggggctatttgatgacctacatccacaaaaaggaggatctcatcctacagattctccatgttcctataaaatagttcaactttggactgtggatggaggaatttagcttctaatttgctgtcaacaacattgtcatgaataaataggttctagtaggttcattactaactagtttaaaaaactcggccggggagggaaaggccaccctcccggtattatattaagaagagaccgaaacattagtcccggccgagaaaatccccgaactctggcctcccatcactaacgggccgacgtcaaccatccactctgcaacggtccgactggagggtggcgcacaagacatcgtaatccgagagcggataaggcgcaacaaggagatttttttaaccaagccagaaaattcgttcatgaataaaatcgaacccgggtcttgtaggtgctactcggaagccttaaccactaggctacatgccctttcacattattatctagtttataaagacgaagtttctgcagtcttatttgctaccatttccccctagtttaattgtcagaacacagtaagtgcaactaaatagataggaaaactactatgaagtatggacatggatcacaattacatcaataaggaatacccctatgaagtatgaacatgtgcatcactcggtccaggtgccatgcaaaaaaaaaaaaaatcgagttcactccatattataggaatctgctctcatggctagcattaagtttgatatgaggaatttttgtataccaacttccttttaagaaaatttctaatagcagtttatacatccacaactagttggccaaccattgatcttcatgcatatgtcatagtgctaacttgaacaagattgtagattctatttatgttttgaatttgatgcttcttctgatttccttgttgaacataaaatatatgttcatagtggtggtgattcttcttctgacttcattgtagattctatttggttcctttgattattatggatttattttgtatttggttttagagttaacttcatggttctagctagcctgctatagcgccgctaatctgctatagctatgctataacattttcgctggccctatcaccaccactacgatattgtcaattgtttcgctattacatctaacgatgctttagctccactgaacaacactatttgtcttacccgtgaaattcttttagcactgctaattctgatcgagtcaaaatattcattctttgctctagatgactataatctatgtctcttatatttttacttcaatgaatgatgcaatgaaccattgaataattgttagtttattttttgattgaatggataatgaatgttgattatagaagtgagttatagctggttgattgaatggttatgaattaatgtccatggtgacatgtcaccttgagcttttgacatgtgttcctgagttcgttaaacttcctttccattttttaaaacgctaaataaaatagcttcacctatatcatgatgaagcttttttttggcttctggaggaggccactaaatatcttagcctgctatttaaaaccttggtttagtttgttacggtttatgctgacatgatttgtcactactcacaagcaacccgcatactggttatatgttttctatttttaatgcaatagcagaacatattgtaccacatgaaagccacacgatcaatcaaatatcagtttgtcttgacacttcagaaattctcatgtaggattagtgatttttcgaagctttgccagtttagcacaaaatataaacagcagtaagtcttatcaagtgcaaggaacagattattgctgaaaatgtatatcttgaccttgtaattcactctatcctaataaaatttgttaatatttaactaacagactattcatcaccactcattgattacagtcgtacttgttcatgtagcttgcagacgt

SEQ ID NO: 433 - DNA, 12533 bp, Zea mays
  Intron number 1 from transcript GRMZM2G042027_T01 (locus G RMZM2G042027) derived from phytozome v7.0 (chr-ID 5; pos 2 04612518 to 204625050)
caccaccgcagcttgagagttgagacctgcagttggtacaaattctcgcggtcctcaacagtatcttgattctcgtatttttatctgattagaaataccttggttccaattccttttattaatgcaatgcattacaaatgttattagaaataccctgaacttgctggatttgattttgtgtatgcgactagtggacaaacggatatatccgcggatatctaggtatactttttttttctatccgtggcagttaacgggtacgtatggattcaggtatccgatttaagtcgtgggtatggatgtccagagccattatccgtggatggtttacctgttgtcatccctggtcgcgagccatatacactcactaggtggatgcccgtgcgttgcaacgggaccactacattgcaatcatcaatacaatatcgacttctatatatgatagtacaatatgttatgacgtcacataaatttttatttgataaaatgttaagactatatagaacaaaataaataatacaatgccgcaagggtttcatcaaacaatgtcacatagtaacaagtatgtcaccatataaaacgaagaacatgcaaaaactctattcatgtaacccaccacaatagagccagagataaatgttcatgagttcgaaggcattgtagtgaatgtatgaatgagcctagaattctgattaagatcccttggtagtaaaaattatctttcttctcgccatctcgccacaaggtaggacaccgattgattcccattctaacgtgaaaacaacatcctacacaaatccataactatattagcattatatataaataagaaaaattgttcacttgagcaggtgaagacaagggcttacagaggggttctggggatctatgtcaaaagatttgatagcatatgctttagcaagcaattcaaggggtctctcatctcctaatagaaaaagaagccacgataagcaaagatgataaacactgaacaccgacaatccgaacactacatgtacatctcacttgccttgtttgacaattgcaaggatcccatcctctaaacacacgtcatcactggcaaaatattcttgtagacatagaagagatgagcatcccaccagcaaacattcaaaaatgagccatgttgcagatatgactcatgtaatcacacccataatactcatttgaactatgtggtcaataggggtggactaaaattggagagtggtaagggtcaacacaccagcaataacatgaactttctgctcctcactatcagcaatgcagtgacctatatccatacagcccatggtaccaatggactatgtcactgctcagactcacttattagatatatgtgggtgcaagagcatacaatacagttacggacccttgtaggaccaactcatctcaaaaaaactaattattagatgaatttggatatctcatatcataggacaaagttactcaagtataaaacagtaaatcactttcagaaaagatgtaaaccaacacagacttctgattcttgattgcatgaaaaggttgctcatttaagaacattcctgtggtcgccaaccacctcaagaaccctaggacacgaagcttgcaaatgcaataaactaacagagtttagcaggcatattaattaacacaaagttatcatgaccatgtatctaggcatctttgatacagtactcctacttaatttttctatacacaagcttgatgcatattagatatcgtaacaagaatatagtactacagatatgaattgagtttggttttgggtaacattaacataagcaaatgaaaaaggcatcaaagcatttcttctattagaaaatatgttcccactgtaccttctttcctcggatgaccactctaggttcaccttggatcaccatgtattttgtacctccaacaaaaagacaagttggtgcaagagttctaggttcatcaaagtccaacaacttcctcatcctttaacagcaacaagcaggaaacataaacatgagaactcagccagtcagtctaagagtgcttcatattatatagatcatagaaacttttaacagaagttcttaaaacaaaaaaatgtgtctaaacaaacaccaagaactgaaatttacaacaaaagtgcaccttttttgttcaaggaagaaatatcgcattcaaaacagagagtctaagtgcataatcaaaacagtaagtgcttacaaatatttaagaaagtgcaatcccttaactatggagggtcacagtttctacaaagacatttaaaattagtacttcaggaaaacattatgattgcgaagagaataatgagaataccctggttaccatggttgagaataacatcacaattgcagcacacttgaagtgctgacacaatcgggcagtaggtagcttaactggagaacctagaatcctgttaaatgaactaaaatttattgaaaaaatgctgacacgatactgaaagggcacaaaagatatatgcaacaatcatgaatatcacctggtattttagcacatatgtcaagcaagatcttcttggtttcaagcattctagaaaccttatttcctgcttcaactatacacataaaccgggtttcaatgtccttcatgcttgacacaaaatctttggctcgatgagtgatgaactctgaaggatcctttgcctctacacatcatcacagtctgctatatataaaaagctttcaccaattagaaatcttgtttatgataattaatagtctttgctccttagatcctatcaacaccaaaaacaatacttgtgagactatagaacatataaaatgtagaaatgaatcttgacagaatcgaccaaaaccaaacatagagtacttggaattggaaaacaatatcatgccccctcactctctttgccatatgcttgttgcccgaactggaggcccaagggctcatatctaaaaacaagtattagaggagaagaaagtaagtacttggagtggttgatgcaaaatgacctcaagcaattgaagcaatgtgtcacctgcttatcattattatcgcctgagaataattcatcactggctgcacctaaagatgaacatctgccccaactttctctgttagagcttgtgaatgaacatgactcctcattgcgcctacttcttttatcctataagaaaggaatgcttctgatcagacattttgcaagcaagaagtatatgagcatcagttctcaagacttctaatgtgtttcttaggaccctaactgatgggacatctctatatcacacatactgcaataaacaatttaacacaatgggcaatccagtggaagcaagagaatgcatcgcatgggtaaaattgctagacttgactaaaaaatatatagggtccaaattctgtgcaaacttacttgaagttataaagtgaactttacctgcaatcgtgatccaacactatcactatcaatctctggtcagttcataatgttgaccaaaattgaatgcaaatggcagcctaaaaatagcagcaatcagttgatgtgtctgtttccttcagaatggtggttatgtggacgctaacactataggaactatttctcattctacgcgcaatggaacaggtaggcaagtacctaagtaccttgctcattctatttctttcacgtctctaatctgtcaccgcacaacatcaatatgtcacctatcatatcctatcaacattaaaagctagaaataatgcacatattaagtgaaccggtggaaacagccagttcataagaatgctatttgcaagtagcaaaaccaagcagcaggcagtttacaatggtggctaaaattgcttcaaaataggaacctgacaatagcagctttgttttgctgtcagttcataatgttgaccaaaattgaatgcaaatggcagctttaaaatagcagcctaaaaatagcagcaatcagttgatgtgtatgtttccttcagaatggtggttattttgagtgatgaacgccttcggcgtccaggggtcacggatcgaccatatcctattcaattctccccaactctgtatctgtagcttatattttcactatacatggaatttggttcacagtggcaccatactatctgatcacatacccagggagtagaaccagcataccacaaacgagtgcctgtgcaaaactaatctacagaacaatacaattagatgcactcggtcggtcagttgtgatatactaacctcgtatagggatgtgggaacaagcctctcgtatgattcattaagtgtcaccacaccacaaactccaagcgtctttagccggagaacatcgctagggaatggaacagcaccgagcaggacatgctgatacaccaaaagcgattgaaggcgatgagagcataaccagcagaaaattctaaacgaattggaacataataggtcagcaaaacattgtaaaacgttgcatgacctttattcatgtgcttccaaaatcaattaagaaaaacgaaaactaatgcagaacaacataatgtgtgtcgtcatctagctttgtatcttgaatatggtagcagttatctgaaaacactaagaattcagtgcacagacaactgtgaataaaaaatagagagaactgtgaagttgtggcatgtggactgttaatatgttttttttgaactatgaattttacacagagaactgttttgtgtcgtgttgtttcttgataagtgtttttgaactgtgaaactgaaaacacacacaactaagaatatgcgaaccaagggtttatctagtagctgcagtgtggtgcacctcgttctcatagacacagttagagacctccttaatcgggccaggaataatactgttaacttgtaagcagaataaatgatgtttgagggatgtcaaattatttagttaactattcatcaaacaaagacatgattgataccgtaattgtaatctaatctcaatgaacctggataaaaaaagtgaagatatgattgccttcacaattattatccgaatggaatttagaaatgcaaataagcaaaaaaagcgcaaggatatctcttaccagaaggtgggagtaggggcagtggcgaagatgagccctcgtggcccctgtcgtaggggtttatgacctgaatggttcttgaccttggacatgattgaagggaacaactatatccatttgttttgcaaatcagaagtaaattttcaaatttaaaataaaaacaatagatgatctagctagttaccaggaggagagatccactacacatatgaccagaagaagctccataaatacatgtataggcaccattagttgctagtcaaactttttgattgacttacaaaacaggtaaacacatgtcataaatatcgatataaattagaagtctaaataaagcacaaagcaaacagttgtacattcatagaaaactaatacctccaaacaaataaataaacatctaatattgtttacctctgatatacgacacccgtagaaattaaagcatgtccaatttgaggtgcttactcaaaatcacatttggtaagcaaacatgtatgaggtcacttagacaaagaaaaacaacaatatatatcatttgcttatgtaattacattatttgttgaaactgattgatcaaactcttctaaatcataaaatagcttactacaaaagcaaggttcctatagttcaccgggacaattctatgaaatgtgacatcagctatccataagtaggaagttagaactgaaattacaagcaagtaaatcaatagtatgaaatgccacatatgtaaatcaatagtataatcaaatctgagaaagaaaatatcattccaacaatgtaaggtcctagcaagtaggaacaaaaatccacccaaaatcaacctgaaaagtgccttttgaatctaattatccacttgccaccattctgatttgcaggatcctggccaattgaaaacagttagcaataggaacagacatactacacatagacagagagatgatagagaatgcatactctaaatatgcatcagggaaactgccaccaaagaggctacagagattttattcactgcatatggaggctgcaaagattcttggtggaccaacacatggagccaaggtgtattctccagccaagatttagggttattgtgccttaatatataaattgtaacattcgcatgatctcacaatactttatttccacatgtggcagaaatatcaacaattattcagactatcaatcatgcttggttgatcctatggcaatcctccacaaaagcacaaacaaatagaagaataggaaatggaattatattataaaaaatcataaaatggttgcaagagaaggtactacaaaagggtaacaaacataacaaaagtattttattcatgactaaccatttcatcaaattgatcagcaccaaagacttagatggatcaaactttcccttagatgcatttcgatcagcaccaaagccttagatgcatttcgatcagcaccaaagctatgtgtgtgaagcattgctctgttgggataaaagatctcattgccccagttcataactcaagattagaaggcccccatatgttcacttgatttcaagttagcaggaagaagactacagttagttggttgaaacacttttaatagagaatgcataaatgcatctgttgatagaaaaaacacataaaaataaaccatgtcaacataccgacatgccctcacctccaattcttgctaagctgacactgtcctctggtttgttgctccaaaaacttcattaccacgttacaaaaggattctacagcaaaaggttatctgaaactctcaagtatgaagctcctaagtaatgcctctatgcaaggtttggatttaaagtgaggaaacagtggttgacacttcatgtacgaacctcctaattctatctcttcaataaacagccgccggcgcagtgggatggcgacgccgacgcccatgcccggaagcgaggggacgctcgtggcggtgatgccgcggtccccgtccccgacgccggcggggacctcggcgactgagacgcccgtgctgatattcctttacttccacaaggcgatccgcgcggagctcgaggcgctgcacggcgccgtcatgctcctggccaccgagcgcaccggcgatgtcgcggcgctcgctgagcgctgccgctttttcttcagcatctacaaacaccactgcgatgtcgaggacgcggtacagatgctggctaccccgtgtggagctctgtttttgtgtttctggccattttcccctgtcgcttcctgttgggcggggggccttgacccgcggtcaccgttgcggctccgctctacctcatacatacccttccctcccttacctagttcctgtcgccgccaccccagcaggcacagccgaggaggagcaggacccaacaagcccgccgggctggaggggcgctagggttggacggaatcgacgaggacggaggtgtttgtgcgaacgtggcggcggcacggcgggcgatggggagatgaggaaagatgagtggtcgacagtggaggcgcggatctgcggggaaacgtgaagggtgggatggcgggtggggaaacgcgtagctcggcgcgagaggggcggggacaccgagctcatggcgaggagatcatggcgcggagatctgcggggaaacgcgtagctcggcgcgagaggttggcaaggctcatggcgaggagatcaagctggaggttggcgcggagctcggccgaccgagctcgtcgcgacgaggagggtggaagttgcagagcgcatcgaggacgggaagggctggtgggcgagggggagagcgatgcggggatcgtgggagggtgggcgtcggtggaggactggagagagcgcgcatcggacgggggaggagctccacggcatattggacgatcgagatagctagatggcagaacggcagaacagatagaggcagactactcttacatacttaatatcaactttttgacaaaaaacacagtccaattaccaaatcttattcaaccaaatttcaagtaatcaatttgatcatcctttaatgccactacttttaattttaaaaatacagatgactgttggacgccgacatcgaccacaatctgcaagctgaattgccataggttattggccaactcaacatctgaaaatatagcaagattgtttagttcaatcgagttgtgtagtctagcatagattgtggttgaactattccttttagaatactgcaacattgtattaagtaaatccacacccaaactttatttaacattattgtggatctaactgagccctctgggttttgtccattttcaaatcaaatatatttatgattgagtgattgacacttggtgggatagagaagtgaaccatttataggttaaaaaatcatacaattctattatcagatgaacgcagataagggaaaagaatgtttgcgacaaaaaagagacaagcatcaatataatagttcataactttatccaattaagtatggaagttttgtgatcagtaagccccattagagcttagcaaaaacttgatggaaaaattgattgtaaacaaataggtcatatcaccattcaagaaaacttacttgatttgtcaaagtcgcagcagtatgagctccaacttcaacagcttgtgctacaacctacaagaaaatgattcatttgaagtccattatggaaaagctagagaagtttattattcctttcttatcttttatggaggctacccgagtatatggatatgtggaatcatttgtgctatttaagaaatagcggaattctgcttgatggttaaaaaaggaaagagaaaggtgtatgctagtcacgcaccattttttaacacttaattgcttggtcagtttggtgatataatgtatctcatagctgtcatatgaatttgatttaccaatatgctatttactcaacatttatctggatgaagcactctctctaaaagtttacattctcaattgtgtgcaggaaacatgtatgttttcttttcatgagttattagccatcctcatgttttaggatttagggtaatcactccatttggttctattttgcagatgtttctagatgtctagcattacacattttagtttgatctagaatgttatgtctcatgctgataacgtgcactgatcaacatccatgttctacagaatatataagaggatccatctattactccattagtacatatattactccattagtacacacaattacatgttctgaaccctaatagttgtaatgtatgttcatcattttattgaaccgtagtggacaggccagacagaactggttgaagaatgtgtaatgaacctgcggcattaaggatccctgttaaggtcctatttgattcagttgttgcttattccatggatgaaattgacatggtatttgttgctgtataaaattcaatcaacaatatcataccttaaataattattggtgtgtgaattgagatattcatttgagtactaacctgtctttttttgtctcgttaaggtacgaccaaggtgctgataccctatcttccgtaccatgtgcgtgcttgctcacttgtgaagtatcttggtcaggaggacttaggagcacgctttttcccttcaacatcacttgtgctcatgtcaacagtattttacgagcaacaacatatttactgccaccggtgtctgccaagcatggtgttcaactgttcatactgcagttgagcagggtagcactatgtatgaatcttcttttagaatgcagaaaacactgcttaccaaagcatttcttccctcgtctttatgtaatccaaccatcctttcgcacaggcagcagatttggctgctgttcgtcggacgtcaaggaccccagcagggtgtcacaactgttggacgccgacatcgacgcggaggaggatgcagacgcggacgatagcggcgtcgataaggacgtcgagcatgggtgcgagagcctgataacctcccatgccgccgtaggtggctgtttattcctgtagatgcccttggctcactcaggcgtggccgctggccaggcgcagagggagatgggcggtgctctctgcctccgtcgccacttcgccacgcccccaacaatatgggagtcagagctagggtttcggctaggaggccgcggcgggggccgagctccctggggaagtcgtgtggcgagaaacggatgcaaacagagatcaaagggtgaaggtttagggtttgattgatggatgtggttggggaagggatggggcgggagatgctcacctctgcagacacaacacgtcggcgctggggccgcgcgattgcgcgccagtgcgtcgataggttggcccacggggttggagctggggcgggacgggaggggttggagggcgcccacctctgcagccacggcacgccggtgcattgggaggcgtgctcgagggagcaggcacgaggtgcaccgggggaggagacattaggtgcggtgataaagaggagagggagaggagcggtggcgagggcggttccgtggaggacgcgctgcacagcttgagcccgtggaagtcggacggtgcacagcttgagcccgtggcagtcagtcggtggaggttggcgcggagctcggccggccgagctcgtcgcggcgaggagggtggaagttgcagagcgcatcgaggacgggaatggctggtgggcgagggggagagcgatgcggggatcgtgggagggtgggcgtcggtggaggactggagagagtgcgcatcggacgggggaggagctccacgacatattggacgatcgagatagctagatggcagaacggcagaacagatagagacagactactcttacatacttaataggtagtagagatttgcatagttgttaaggcggtaaggtgactgaccccttttaccttttaagcgataaggtgtaagccgaggtgacgtcttaaatatagttaaaaattaaaaattgatattcgagaaagtatttaggataaaaacattaataaagaagagaaaaatataaagaaaaaactagctcccagcctaccaatcagcccaaaaagcccactagcccattaaaattaggttaaacccacttcctcttcctctctcccattactctccctctatcttcctagctgcctcactctcgggcgagtgcctcctcccagtttggcctaggcataaaaaccaaacaatgaaaccaaaaaaactggaaccgaaactgaccaaaccgaagtattttactgttactattcttcaaaaatcgaactaaattctggttttcggtttttagttcggtttaaatcgattaaccgaaatattgccccactacactatccaccgtggttcgtggcccattgcgggatgcccctgttggccgttggcccattccttttccagcgaagggcaatcaaccggcagcaatcagccaacactagccaccgccaccgcgtcatgctgtcctcgctcctcgctacgagccacgtcctgtcgcctttaatcgctagatgtccaaccccgtcggccgtcacatgcagtgacaaacacaacttgttgttcgcccagaaccgaatcttgaagcttcaacggatggggtgctagggtagcgatgcaatcacgtgtatgagaggtagaatgcaatcacgtgcatgagaggtagaatgcaatcatgtgcatgggggtgatgtcatgttcggttttttggttttaccgaaaaccgaaccgaactttccggttaaccgagaggttggtttttccttttttatatagaattttggttgtcatttttcaaaaaacgaacttaaaaaaacacgaaaaatgaaccgaaaaatttgattaaccgagtgcccaggcctattcccagtcacctctccctctctcccgctggcatctcttcctctctccccgctggggtttctctctctccacgttcgctccctctcttttgtgtcggggccgccgctgtgctggagccgccgcgagccgctgctggaggagccgccgccggcctccccaactcgccttaggtgccagagtaaggcgagcaggatgccttacattgctgggacgccttagcgcctagacgacgccttaacaactatgctcattcgataaataaaatataataaaagctataattatatacaagtgggtatttaaaccatagttgttgactgcaaaggcatgactcgtgagtcaccagctaaacgatacggctgacctagttcgtgccagctcgttatcctaaccagttaggccttgttcggttacgtttggatcgaagtggattgagggggattaaatctctttctattcaattttgactggggagggatttaatcccctccaatccagacgcaaccgaataaggccttactgagccgaggttcgataggagtattctgtcgtaatcctgccattcatttccatccagacgaccagaggccagagggcgttgctgcgctgcgt

SEQ ID NO: 434 - DNA, 749 bp, Zea mays; identical to SEQ ID NO: 396
  Intron number 4 from transcript GRMZM2G008730_T01 (locus G RMZM2G008730) derived from phytozome v7.0 (chr-ID 10; pos 146727241 to 146727989)

SEQ ID NO: 435 - DNA, 5541 bp, Zea mays; identical to SEQ ID NO: 202
  Intron number 1 from transcript GRMZM2G143086_T02 (locus G RMZM2G143086) derived from phytozome v7.0 (chr-ID 1; pos 6 6170294 to 66175834)

SEQ ID NO: 436 - DNA, 2162 bp, Zea mays
  Intron number 4 from transcript GRMZM5G883871_T02 (locus G RMZM5G883871) derived from phytozome v7.0 (chr-ID 8; pos 1 1389386 to 11391547)
ggcaacttgtgcatcgggctactcttcaccaacaggtaccctcatcctcccccttcttgtggctcttgattttgtgttttcaactcgtctctgtggtttgttcttgcaaaatctcataacacatggtcacaaatacactgacatcaatctgtcatgacatgcctttatttgctagacaaagatcgttttatcccatgtgtttgcagagcgggcagcctgcctcccgctgacaacagccacagcagtagtgcagtgtgcactgtgctttttcactgtcatcgagcttgctcaacgactgagtcatctacaattgagtgaccaaataaaatcagtaaaattgcaaaagagcattacatccatatttttagataaaacatgttaccaaagacattattgtattcaggcgttaaacaacatgtatcttgcagatttaccattatccaggcttaatctttactactctataagagagcaaagtaggcgtccacctgcttcaccgtgcctccgctcccgtgattcgcgtgcccccacccccgtgatccatcttcgcctgatgaacgcatgtgctccttcgtcctcgtccgtcgtccttccgtcgtcctcccccgtgattcatctttgcctgcatgtgctccttcgtcctcgcccgcgccaccacacctcccccgaaacctcgctgccacccctccacacgctccttatcacccacatcctgcctccctcatctccagttcttctctcgcctcctctgtacacacctcgccgcagggtgcatcctcaagctcgatccctccccggcctattcgtcgtgacctctcgcattgccggcaacgacgctggctccccgcgcaccgcatcctcatcatctcgagcctcgccacagggtccttgtcctaaggctgcatcctctcatcgctctcctcccgcggcgtccacactgtggctctcgacctccccggccaaggcctctctccatcgccgccctctgcgcctggacaagcgcgctccatgtcatcatgaactacgacatcttccacgcatgtgcggtctccttcctcgcccccgctcaagcccaagaccacagcagcaccgctcccgatgcccctccccccgccctcgagccccgagacattgtcctgcccccacccgccacacccgcctcccgagcatcgaggtggtggtcgaatcgacaaaggtcgtgtccccgccgctcgcctcctcgccagctccatccgcccctcgcaaccctctggcctcgcccagccaagctccctcctactcgtcgcctcgtctagggccagggtcgtcgtctctgccctacgggcactgaagcccctccgtggtgccactcagcgcccccatcgaccaatagtgttcctataaagctaattagaaagatgtaaatgttgaacggaggctgtccttggagatccgggttcacagggagcgctggtacgtgcttagtttatacatttattatgtagtttacctttgagagaatcatgtccctcctttttgctacttaatattaggttcatgttattttggtattgttagatacttagattggcccttaaggcaaaatcgtgtgtttgtgatacatgatgtgtggaagcagttaggcagttcaattaggcacaagtttttttacctaaaaaagttagcccttagcgcgatgtgacaagctacgattgtgcatttgtgcttcttccatgttgttctcgataatttagctctcccacaatgaagcactgcaaattattagattcttgtggcagtgtccacaatggggcttgtgatttctgcagtgtgaactgattccacatttctactagcttttgagttgcagaaattacaggtcaactaatacaacaaggtttatatgaagcttaaacagcctcataaaaaatccattgtaggcttgtatacaaattaatgccgcttgtgaactgattccaaaattcttgccacttgtttgctaactgctctggactcaaagttactgctgcagtaacggtcaaactctttacacgacaacaccacttgcatgtatataaataggatcaatctatttttgatacggccatgttattgatttttttttgcatgctactctgatttggtcagaaaaccatcactgagaaagagcagttagcaactgg

SEQ ID NO: 437 - DNA, 1222 bp, Zea mays
  Intron number 4 from transcript GRMZM2G340762_T01 (locus G RMZM2G340762) derived from phytozome v7.0 (chr-ID 5; pos 9 3854032 to 93855253)
ataagaaacaactgatcagcatttacaaacaaaaggtaaggaacttgtctctttgtaatttcaggttatttttgttataaatagcacttgtattcattatgagagctctaggccgaatatatgcaagtacatgagtttacaaatatgcacaagccccttatagaacggggaattacaaatagagcctattcatctaacacccccagtcccctcaaactcatgttaaactatgtttggatagatacaatttatgttgagctctagtacgtgagtttacaaatatgcacaaaccccttatagaacgaggaactacaaatagagcctatacatctaacaccccctcaaactcatggtaaactatgtttggatagatacaatttatgttgagctctggtctgtcgctttgtgaagaaatcaaccaactgatgctctgaaggcacataacaaagagcaattacataatcctgaacatgtgcatgtgtgcaataggcatcaacgccaatatgcttatatgcttggtaagctcatgcctcactggaccacgagcagtactaatacccacttgtgcttttagaagcacaagatttccatgtggctagaaagcacaaggacaaaagcagtcacacctcaggcctcttcacttgattgctctttcaagatgtgaaattgactaagagaaacattgcaagtgaatttagagaacttagagaaaggaagaacaatcacaaagaattaagcacaagtgacacgatgatttttcccgtggttcggtcaaacctcaaatgcttgcctactccatgttgtggtgtcctatggacaagtgttgcactcgacccctctcaagcaatcctatgatcaacttgagtgccactatcttccttatatcgattataatcccctcgcaagaaatctccacaaattggagtctcttgcagctgtacacaaaaatctgagttacaactcgaagcacaacaatagagagaggagagtacacacacaagaaccaaaagcagcaacacaacacaaaaaacaagatcacaagaatgcaattacacagaattacaagaacacctcagaactgcgctcgaatctcaatagaatcgttagaatgtgttgtggtagagtgttggagtgatcaagtgctcttggtatgcttggtgtactgaaggaggtcgcctagggggtccttttatagcccaaagaccccacagccgcaactgca

SEQ ID NO: 438 - DNA, 3778 bp, Zea mays
  Intron number 5 from transcript GRMZM2G003984_T01 (locus G RMZM2G003984) derived from phytozome v7.0 (chr-ID 1; pos 4 8987764 to 48991541 reverse strand)
agccacttacagttaaagttgatcatctcaaggtatatataccataacttttagcgtcccaatcttaaaaagttattgatgtacagatgttcaaacatttcaaaccctggaaacaggggcagatggttttaaaagtcgtccggttgatccaggtgaccgaccagccaactaatcgcgattaggatgtcgaccaggacgattagtcagtgcatggtcggcccctggtcgtcctaaacgtcatgtactgttcagactatatataattatatatagttatatacactacagtatatagctatataatatataatatatttattggaagatgggaaaccataaccctaattcagggttgggtgtagattatatagatcagttaggtgggccaagcccattacacatggataaacaagtaaatacaagggggtcaagcctaaccctaatcaggagtctaaccctaatcaggagtctaacaatactcgatatataatgtatatgattttctgaatcagattttaaagatattagactatataagcaacaacaggtctgaaatatgaatatcaaactcaaacagcactacagcagtagcaatagcacctctaaagtctgaactctgaacagcagtagctaatcaaactcaaatagcagtagctaatcaaactgaatgcttgatccaataattcaaaactgaaaccaaactgaatgcttgatccaataattcaaaactgaaaccaaactgtaatgatgtcctcgtgatcaaaagttcagaactacgtgcttgatcagggatcacggtaccttcagatgaggtactcatgttcctgtgttcttgatattttattggaaaaattgtaggagctctgccttttattaaagcgggaaagagggtatacagaaacagacaacacttatcaggaatacacctcctgcgtggtgagactagaagaaatagaccagcaggagcctagatacaactagagactaacaccagacccagatgctaatggatagcagcgctcctgaagagtgaaaggctctctttaattttccctgccacctgcatcaccaacagcgagttgtgctcaaagatccttcggttgcgctctttccagatattccacatggtgtagatcacatttccattgaattctctactacggtctctcgtgatgtgagaagccgccgattcccaccacacactaatgctatcgaagtttgatgggtttgcttgctgtggcattgtcaatccttccaaatgagaatttgattccagacttcctgggcgaaagggcacttcaaacaaaggtggagtccactttctagaggcccatggcaaagtgagcaggatgtttggtgcggctagccacgacatgcgaggttgtcagtcgtgagcaacttattttggataagaatccatgtaaatagtttgcatttattctcagaccttgttgtccagatgtggctgaccttgtggcgtgtatgagagcctaggaactgagctctataggcaccctcgtaaatggcacttatggggagaggttcgctcataagcgtggtgtgagacaagacgaccctctctcgcctatgctcttcatcctcaccattgaccctctttagaagatcttggacattgctactcaacatggagttctaaagcccctcccactcgcaacgacaaaattatgaacctctttctatgcggatgatgcggcgatcttcataaatccataccgtgatgaattgcaggccatcaagtgcattcttatcacttttggtaacatatcgggtctatccaccaattttgaaaaaaaagctccattaacccgatccaatgcgatggtgtggagctggacgacgccctccagtccttccccggggactgcaaaaccttcccttgctgctatctcgacctacaactccattctcggccactgcagaaaatccatgttcatccgttaattgacaagattggacagcggcttgctggctggaaaggacatctccttaacagagcaggtcgcctcgcgctcgtctcctcggtcctttcctccatgccgacctaccacttatccatatttccactggcagcttgggctaggaagcgtatagacaaagttcgcagatccttcctatggaagggagaggaacaagcaaacggaggccactgtctagtgaaccggcctacagtgagcagaccaaagaatttgggcggcctaggagttcttgacctcgacaaatttagtcgggacctccgccttcagtggctttagcaggagtggaccaatgaagagaagccctgggttgggctgcaagtgccttgtaacaatgtagacaaccttctgtttcaggcttccacctcagtggcacctggcaacggctcaaaggcaaggttttggcatcatagttggttggatggagaagccccccaaaatttagccccacacctctttgagctagtgaagaggaagaacaaatagttgcacaagggctttccaacaatgcttggatagaggccctcaggaacaaagttacaacatccacgcaaattgaggaatttgtttccctttggattagaattcagcacattcaccttcatccagaggttgctgactccatcacatggaaatggaccccagatgggattttttcctgtgttcttgatcagggaggagtcgctggagttggtcagggaggagcgctggttcttgatcagggaggagccgccggagttggtcagggaggaggacctgccggaggttttctcagggaggagctgctagaaaggagaggagccatcggcgtgatcagccaccaggaaggagaagagaccgagagaggaaaggaaaatggaatttggaaagccagccaaatagattgttgctttcctcattaacccaaatcagggaggtgccagattatgaatgaggcgccagattgaaagcctttccaaattccgaaatttctaggttgcaagaactgcctgttcgaccgattaatcgcgattaggcgacgattactcggacaattggacgaccagcccacctaatcgagttgtagtccctaaccgactctacaaaaccgacccagacgattagtcgcgattaatcgaacgactcgaaaaccatgacggagtcagaacaaagtatataaagggggctattagtaccttctatataacggagtgtaacaaaagccaatttctataaacaatttgaactgttttatgctgcattttgtgtgtgggttcatggagtacatagagcatttgggggggggggtgtgcaggggttcaggtatccccctcgcaaccacctgcctccatccctgcttgtcaagtcccaaataggattggacaatgtgtttattagagttttataaaggattctatgaaaatcaacacagtccataaaaaaatatctctgtttttttcttgaagatacagatagaaacaataaaaggaatcttgttcctgtctatctagggaaaaaatagacgttttcacttgtgatacaaggtactacaacgtggacattttcaactaaaattttgcttcagatgtgtttataatttactgcactgttgtgagatgagactcctctcactaaagttcactccctgtttcagtgagtgcatgccttactaagctgaaaatattctgtgaaatttgttattggtgtgtggtaccttttggcaccaattgtttatgtactcagttttgaaaaatattcagttcttattacttcataactagcggccattctacaggaactgcctt

SEQ ID NO: 439 - DNA, 2867 bp, Zea mays
  Intron number 1 from transcript GRMZM2G448104_T03 (locus G RMZM2G448104) derived from phytozome v7.0 (chr-ID 10; pos 143535694 to 143538560 reverse strand)
cgcccctggaccggtagacactgtggtggtgactggtgagtgattttctttagctagggtctggacatgatagttagcactggactataaaccagagcataaaattggacatgacaggaccgagtcatgaaacaaaaaatatcaaatattacatttattttacatgtattatcacaatttagttaatctatggtcatgtataccgtgttcttttaattttatcatattgcatatgaaaattttggctaggactaccttgtttcaaatcctgcgttcaccactgctgcctcgtgtcacgtcacgcccaccccaaccctattctgtgtgccgtggtgtgggttacccagattcatggttgcttgtttgtcttggaccgtaactggtagttgttccaggctgttgtgtttcacatcatggggataatgataataccttttttttctctacttgatttgcaagccagcgctgctgatacattttgttactgctgtggcgtgtttttggtagtaagggttgtgctgtgcattttagcttctagcgggtacacctgagtctgctggctctttgcagtttgaacatgcaccaagttttttggcaccagctttaaatgttcttgtaacaaagtattcgaaacataagaacaatttacaagccgttgggatttaaggaaatgtgcttaggttcttagaattcaaaatttcaaatggcatcctgacctatcttgcagtgtctccttgcagaaagttacatggaaatccctaaatgacatgccctgttagaatgacatattgctaaaaagcactccttcaaaatatagctactgctggattttgaaatagtatgccagtcaatgctattagatatcgttgttttgattccgagtgtgttttgtgtaagggctcttactcctttcttcttacatacacagctctcctgcgttgtcgagaaaaaatgttgttggatatagttagggttaaatgtagtggcatagattcatccttgggacattttgattctcaccacactagaagatactggggatagctcaatgcttaaatcatggtaatcgatttaggaccaccaggtttcttgtggcatgttaaaaagccccaaagcgccaacttgttctatataatgtattatactcgttctgttctcgttaaacatgttacatagccgcagaataatattgcatctttaaatttagtagcattgatataccctatcatatcttttgcctgtccatgctgaaactgaactcaaagatcactgaaaataaaattactcgaggagatgaggaaactgatagattgggggccaaatgaaatgagattttttttataatcatggcatcaccttctgcaggcactatgaaatttattacgaaaaagcagcctttaatttgtattctgggaataatggtgcatcttatactgagtacttgagccatatggttatcctaattcctaaataaaaaattgaggtggtttgaaatatcatccacctgttttagattttttgagctattgatgaaaggaaagtgcttagtgccagtgatgaccatagataagatgtgtgaactttcatggttcaacaatatttaaagccttccaagcatgcatattttcctatgtcgatgtttcaacttatacatagccatctaccgattgatagtactgagaattaatgcgtgaatattatattacttaccatgaccccccaccccaccatgaaggtgtataaaaattttgaaaaacgttttaaagtggtttgcggtaatgtgaaacaaaccaaacattgacaatataatacttcaaagatttgattgtaccaatctttattgacgatgcgatattcctatgatgttaatagaggtttgtgttttgagttgccagttgcaaagaccctagccaacaaacaacaacaaagccttttagtcccaagcaagttggggtagcctagtgaaaccccaatagaagccacaattcaaggttcaggcacatggatagctgttttccattcgctcctattcaaggctaaggccctagccaaaagagaaggaatttacttgggacagataagctgagatctatgaagtccttcttttaataaagatggtttcagcagaggacattttcttccttcttgtcccccatggcccatgggtgacatcactgaagccaacctcggtgccgtcatagtttccagttctccaccactactctaggatgggctgttgcagctctgtgtgtacttgtggtgttggaaggagtatcaccataccttcacagggctcttcacaactaattgttacttttataacaatggtggagttagagggttattttctacaatgcaatgaatgctgagtgttaatagtatatttggtagttagggatattgttaaacctgtactgtcatgtgtattggggagacgtcttgaccaagtcttgtgctctatttatgtcactatagagctcaatgcaatacatccaatacattataaacagtccttccagttttcactgagaaatgtcaagagccaagcctgtcactaaatccttgtgctgttggcttgtacactatttctcaaagttttaaaaaaaatccaagacattcgtactgtcgtacatgtaggcacatactaatatactatcctacattgcaatgattagaagatgtgatggtggtttattttttgagaatttgtatcaatctcgaggcacacttgattatggcgattgtacatataccagaatagtcttgtactcaaattattccattgactgtctccttccctttgttactgaagagctcagtaataaagtccagtgaattgtgttttcaggtagtattagtgattttaa

SEQ ID NO: 440 - DNA, 1390 bp, Zea mays
  Intron number 2 from transcript GRMZM2G104481_T04 (locus G RMZM2G104481) derived from phytozome v7.0 (chr-ID 9; pos 5 9154097 to 59155486)
tttcgtagggggtgtagcctgggagacaactgaaggtagcgagcaattcttttgaatctaactatgaatctattttggtttatatcacgtgaagtgttgtagcaaaacacaatatattctgggaaaacaacacagtacaaatgagaattagttcttagctgtgttctgttagcataaaagaaaaatacgttgcaacatgttgcgctgcaaaagatatagctgtttctgtttttgtgagttactgatcaatttctgcattgagttggatcttggatgagtcactgatgcacttcgattttccttagctagtctaatttatgtggtaaaagcttagagttgggagctactgctgcctccattatattgatgatggaaccaatcttatattttgtatatctctctccatcatattgatggaagcaaccctatactttgttttcttgttggtgtattctgaattattattataaaacattgctgtttggtgatttgtgccagcctacttaatggatttcagaaacatggcaattctgaacatttagttctttttttcatgactgttgctacataatctgtctaattactaatctggttatgagatgctgttccatgtttgtctgctccgttattttttgtgctgatcagctacttattgtgttgcgatgatgatcatatcaatacatccagacatgctataaattattaatcagtatgctttattttatgcaattattctggaactgtatataatttgaccaatacagattggacttcagttggcgcattggtaggagatgttctgctttgatctgtttgataacttagaactgataattgtgactcattgtgcatagatgtgtgaactagaaaacagtaaatgaagttcatttcaataatttagtgacaatgtgggtgaactggaaaaatagagttcttttatttgagaaatcgaatgacaattaagtgtgtgtttgcattgatgttctagaattgtttgtcagtttcttgtgttcctaacttacggattataggagcatcatggtcttaatgtcacattattagttcgcaatctcacatggtactgcactgtagctaactagctaaccatagttgtcttcaagatgaatccttcgcattaatgatcctccaaatctactccaaaattgtatgtgaaccttttacgagtcatgttgttcattcacacttattttagtatctagtagtgccaagtatctgcagctacaaaagaaacattagaatatagattgctgatctcatagagcaataagtttttgttagattagattgtgttaacttgtttatttcactcatcttttgttacatgcaccatttgcatgagcagaaacattcacaaagcattttcagaagt

SEQ ID NO: 441 - DNA, 12034 bp, Zea mays
  Intron number 2 from transcript GRMZM5G868908_T01 (locus G RMZM5G868908) derived from phytozome v7.0 (chr-ID 5; pos 1 69669713 to 169681746 reverse strand)
atttcagcttatttttgcagatacctgggtaaggacccttcttcctcccttggtatgtgatgagccattgacattatttggacttcaatattagtgtgtatgatatactgtggcattggcagtatggctgtctggttgagaattgacgtaaaccaaactaataattggtaatgcaaaaaaaaaggtaatgcaaaaacaagatctaacatcatgtgtgggaaatggaaatccttgggtgatcaaggttgtccactatccaaatgatgcagtaattatcaaaattaggtttcaccaataaattagctttgcaaaaaaaaatacattggtctgttgggacatgagccaaacaggcaaaatttgtgctttgtgaaaatgcagctatgtcagcgagttgtcttctctatatattactgttacatcattgatattcacatgttaaatttatgttctatttttgctattttatgatagagcaaacattttatccaagcatagctttattactgagcaacaactcctctgtattttgtgctcattttgtcctttatttactcctggagtatttggagttccttatacatgatagtaacacagtagaactcatttataaagatatgctatatggcagtttttctgttaggctctgctgcctgaaagtggcgaaatatctgtttgcagttgttttggattcacttctgtggtgttgttctggatttcatgtaacatgaatatttttgttgcttcggaccaatgttatcaggttgtctagtcgaggctagtcataagatcaccgatcagatggattagtcgtcgatcagggccggttagtcagtcatagagttgtccaagtgcctagatggatgattacccatgtatatatagtgctaatgtatgtcaacaccatcatgaattggcaaatggagactcaaacaaagcaagcagcacagcacaaattcagtcggttgaggatgaaccagtgactgctgcagcttgagcacagggcgctgctgcttgagaacctggagtcagagctggctgagaactgggaaccacctgtggacactgcagcttgactgctgaggacgggcgtgaggaaaggagctcctccagactctaggtaacagtgagaggaacaagcagcacagaaaaaaaaatgagcggatgcccgtgtgagcatgaaaaaagcggcagctacgtgacttgggagctgcctgtctcctcctgtgcacgatatatatattggaaacttaatgggtctgctaagcctgatcataaatcttcctccacccagtcaagcagtcaccacaacggaggcaccacacacgatgagactagagtagaaaccgaagataggagccgacgggttgatatccctcgcagtctcgtgagggtgcaaatgttgcggctggagtagagactggtgtggatttcgagaagacgatagcccctggatgtcgaggtagtcgaagtcgaggtggccgtggtcgggagacatgcaacagtagcttgtttttcaggaggggtcgacgttcgagcgtcaacggtcggtagggcgacacaacaaaagagcaccaacaggccgaccttcttgcttcttcgatcgttcgaacatccaggagccccgccagagaggtcggtggctgcgcacgcgtctgcgccggtcatggtggccgcgtccgcggcagaatagaaggggtaacggtggatccggccggaaaggccacgacagcgatggatccagctgggaagacgacgatccagccaaagggacggcgaatctagacgggaaggtcgcaacaatgacggatccaacgaaggtgatgaacgggatgagagcgacatggcggttctagtcgggcaggggcctgcgctagacctcgtaggaggggtttgacatgcagggcactgctgggcagcggcacgggcagggaggagatggtcgatgctaaggggaggctgccgaggcaggggagaagctggtgggacagccacggtccgtccactccggcgagggggaggaggctgccatgaggttgacgacgcagatctgggtcgacagcaggttccttggtcgtggatctggtccggtggcggggtgccctggcgaggtcgctggcgcgctgctccctggagggcctcggcgaccagagaaaaggggagggacgacgcctgggtgggagacgcaggagaaggacggcgctgcgcccgcgcctggctcgcggcggcgacttttcttggccacggatctggtttggcagaggatgtcacacccggatttcggggcaccaagacccgggcgcgaacaatcaccaggtgtgctgggaccaagtctcacacatatgatgaatcatggcacaggatcgaatgtcacatctttactatataataggagttctatacaaaataaataattacattataaggagacaacggtccagcaacccaaagttgactgggagacgacggcctagaccactcacgaactcatcacaacatcctccatgcgcctcatcttgtggtacctgttcttaacctgtgggggggggtgagacaacaagagtgagctcacatacgttcatcgctcaacaagttgtggggaataatgtgcatgaactcgcaaaaggtgggagctcacgtgaagtgtaaggcttaccaaagaggatggttagagctgagcattgcttttaaagttggtcaaaattttattagcaattactaagtataagtaaataccaacccaattaaatagtagaacaaaagtaacaacatcacctgcgatgcaatgcatatgacaaattgaatttaagttccataaattaatcatgtgagggtccgagctgctcatgaccgtgagcacggctagtataccagttttacactctgcagaggttgcgcatctttacccacaagtcatgttacccatctgccaagggatcgcgacttcccatacacctctaccgaggaggcgaggcagggtaacactacgaggcctttacaaagttccactagcttcagaaaacccgctacagtttataggaagctccaatgcagggttcttgcctgaccgccatcgcagcaaaatcaaccaaggacctccctacactgaccactcccctactgcccttgtccctttcgggtaaggtagtcctccactagctttcctaattaatcagccaagggcgtccataaacccttgtggtaacactgttttcccgggtggtcgctccatgttccaattaacataatgatcttatcatgaacagtaataataaacatataataaaagtgtgatcatgaataatgtatcttcatacccaaaaccacataaagcactagcaagtactacccaaaaagttcagtggtaaacaaggtataaagatagacaaactagggtaacctattgcgtcccatcaaaattaacctatacagatcattatgattaattagaacatgagtgggtaaaaagaagtgatcaaggttacaacttgcctgggacttgagattccaggtaccaacttgctcttcagatgacacgtgaccttgctctagtcgtagtaatacaaacaaacattgtataggaaaaattaacattacaccaaacataagtacaaatatatattaataatccacatattaaaataagatcacaggaacaagaattattaattttggagttatagattttaagttatggatttccaaagattctatgtgttttgtacaagattaattaggatataaattttaatgtggctttcatgtcaaaatagtggcactaattgataaataataatattacaaaattataggaactagaatcaattaatttggagctagaatggattttctatgaattaactaaggtttctggaattattttaacactaaaaatcattttctatattaattttccctgatttattaagtgtctggctgcacgcacaaaaaccataaaatgcaggggcctctgcgcaataattctcaagactcagactgctatgcagtggatggcgggttctaatctataattccagaggggctcttctgcaaagttacatggctgaaagggtaagcagcgatatcggccgtccgatttgaaacgaggcgcccagattagatccgtgacggcgtgaatcggtacgcaatgtcgtccacaggatcacgatcccacggcgcagatctaatttttcccagagccacccgatccatccgatcggatatcaacggccaacgtgaatccgaccgaagcgttatgcgccttctaatctgagccgtccgaatggaaaccaacggcggccaggtcgtccccaacccccaggctaacgcggtggcgctgcccacccgaccacggcggaggccatggccggcgcgcccaatccccgaattttggcccccgaacctaaattcgaactgcgctatacgtagagaaggacgaggtgatccgttcagatgggtttcttaccgggattagaggcggcgagcacccagtccgcggcgtgaggcgggtctgcggcggcggagttgctccgtcgagcaattgctccagcccgattgccgatcccctccaccgagcccacggtcgacaccaccacccacccgcgacactccccggacaaccgcccgtggccgagtggtggcgcacaatcgaccacaagtcatggtggcggatccatgacggtcgcacggatcgggtgcccggcacggatgaggtgagcgagggcaggaacgcgccaatttataccccgtagtagcgcgcggaattcggtatccgttgcgcaagagaagggctcggtctccgcgcgaaatccgcggtgattcgttgtgcccaccggagtttgccgcggagcagcgagaacgggtagcgcggagaagacagaggagagcgggtcttcccgggtggcgtgtgggacccgcgctgtcagctgaccgagcgcgcgcgcagaagctgggtgctgcggtaaggctgcgggtcgggcccacgagtcagggcgtcggcgcgcggttggtcttgggccgcgcggtgtatttccccctggtgggccgaattcggatacagcagcccaggtaagtctttccccctttctttttattttattttattttctgcattatctccaaatttgaatttgaactcaaatttaaattccagcttctatggctcatcaccccaaattatatttatgagattaaatataccaatctttgagaatttaatttattatctatatttttatatcatttctcttctcctcttttcaaaacccaattttcaatctagggtttaattcaacttctagtaattattattctattatttttatccttactattttatttaatgcacaaacatatagaactccaacatgatgcatttttttaatcatttgtttgaattaaactctaaattttgtgtatgctctttttatgatgcaaatgaggcacataaaatgagaagacctctatatactccttgtatacaattttgagtattacaaatcctaccccccttaaaattaatctcgtccccgagattagtaagaaagaggatatacttagtttggttcattttttttccaatacccttttttttgctcaagttcttccatgggtcttttcagtatctagccatttattaggtaggatatggttagagaaagtctagaatgaagtgagaaagattagggcaagaaaatcttccatcctggctcgaagatcttgatgcatccggagatcggggttgtcccttatcctcccttgacaaagttgctcttcttcgatcttggtgtctccagctagggtttaggtggttttagatagctacatggttgggaatcacaaggtaggtcaaacaatgtttacttgtacttttaggtttggatcgatggatagacgacctttcaagtaggctaagtagtcgtgtttagccgagttggcctaagacattaatttaggttaagatatgtttgtagaagtagtgtctaacccatatcaccagattaactaacctactaataactcctttagattagataatattaggttagataggatctagattagatcggttgagatatgaggtcagttagatctattaggataagataacatcttttcaaggtaagattaatctattaagataatagagtatcttttaagataagatggatctattaagcttaatacattttagtgtggaataatctaagttggctagttatttttattaacattttttttcctctatatatatacagatgtaattgtggatgttactccacaactcatcacactcaatcaaagatccaaatcataaatgtatcacaagaacaaacattcaggcatacagatatttacaaaaatagttttgattttgttcctaagagtaggtctcctattactaaaggtcactttaggcacaggatttcaaagtgtgaaattcacaaatgtctttagaaggaaaaggtaagaataatcagagtaaagcggaaatagatgagaaaagattaagataagtttagaaaaaaaatcagagtagcaaaggtaagtaggtaatggttgtccagttctatctaggtttcgtcctacagtcaacattcctctgataccacttctgtcacacccggatttcggggcaccaagacccgggcgcgaacaatcaccaggtgtgctgggaccaagtctcacacatatgatgaatcatgacacaggatcgaatgtcacatctttactatataataggagttctatacaaaataaataattacattataaggagacaacggtccaacaacccaaagttgactgggagacgacggcctagaccactcacgaactcatcacagcatcctccatgcgcctcatcttgtggtacctgttcttgacctgtgggggggtgtgagacagcaagagtgagctcacatacgttcatcgctcaacaagttgtggggaataatgtgcatgaactcgccaaaggtgggagcttacgtgaagtgtaaggcttaccaaagaggatggttagagctgagcattgcttttaaagttggtcaaaattttattagcaattactaagtataagtaaataccaacccaattaaatagtagaacaaaagtaacaacatcacctgcgatgcaatgcatatgacaaattgaatttaagttccataaattaatcatgtgagggtccgagctgctcatgaccgtgagcacggctagtataccagttttacactctgcagaggttgcgcatctttacccacaagtcatgttacccatctgccaagggatcgcgacttcccatacacctctaccgaggaggcgaggcagggtaacactacgaggcctttacaaagttccactagcttcagaaaacccgctacagtttataggaagctccaatgcagggttcttgcctgaccgccatcgcaacaaaatcaaccaaggacctccctacactgaccactcccctactgcccttgcccctttcgggtaaggtagtcctccactagctttcctaattaatcagccaagggcgtccataaacccttgttgtagcactgttttcccgggtggtcgctccatgttccaattaacataatgatcttatcatgaacagtaataataaacagataataaaagtgtgatcatgaataatgtattttcatacccaaaaccacataaagcactagcaagtactacccaaaaagttcagtggtaaacaaggtataaagatagacaaactagggtaacctattgcgtcccatcaaaattaacctatgcagatcattatgattaattagaacatgagtgggtaaaaagaagtgatcaaggacacaacttgcctgggacttgagattccaggtactaacttgctcttcagatgacacgtgaccttgctctagtcgtagtaatacaaacaaacattgtataggaaaaattaacattacaccaaacataagtacaaatatatattaataatccacatattaaaataagatcacaggaacaagaattattaattttggagttatagattttaagttatggatttccaaagattctatgtgttttgtacaagattaattaggatataaattttaatgtggctttcatgtcaaaatagtggcactaattgataaataataatattacaaaattataggaactagaatcaattaatttggagctagaatggattttctatgaattaactaaggtttctggaattattttaacactaaaaatcattttctatattaattttccctgatttattaagtgtctggctgcacgcacaaaaaccataaaatgcaggggcctctgcgcaataattctcaagactcagactgctatgtagtggatggcgggttctaatctataattccagaggggctcttctgcaaagttacatggctgaaagggtaagcagcgatatcggccgtccgatttgaaacgaggcgcccagattagatccgtgacggcgtgaatcggtacgcaatgtcgtccacaggatcacgatcccacggcgcagatctaatttttcccagagccacccgatccatccgatcggatatcaacggccaacgtgaatccgaccgaagcgttatgcgccttctaatctgagccgtccgaatggaaaccaacggcgaccaggtcgtccccaaccctcaggctaacgcgacggcgctgcccacccgaccacggcggaggccatggccggcgcgcccaatccccgaattttggcccccgaacctaaatccgaactgcgctatacgtagagaaggacgaggtgatccgttcggatgggtttcttaccgggattagaggcggcgagcacccagtccgcggcgtgaggcgggtctgcggcggcggagttgctccgtcgagcaattgctccagcctgattgccgatcccctccaccgagcccacggtcgacaccaccacccacccgcgacactccccggacaaccgcccgtggccgagtggtggcgcacaatcgaccacaagtcatggtggcggatccatgacggtcgcacggatcgggtgcccggcacggatgaggtgagcgagggcaggaacgcgccaatttatacgccgtagtagcgcgcggaattcggtatccgttgcgcaagagaagggctcggtctccgcgcgaaatccgcgatgattcgttgtgcccaccggagtttgccgcggagcagcgagaacgggtagcgcggagaagacagaggagagcgggtcttcccgggtggcgtgtgggacccgcgctgtcagctgaccgagcgcgcgcgcagaagctgggtgctgcggtaaggctgcgggtcgggcccacgagtcagggcggcggcgcgcggttggtcttgggccgcgcggtgtatttccccctggtgggccgaattcggatacagcagcccaggtaagtctttcccccctttctttttattttattttattttctgcattatctccaaatttgaatttgaactcaaatttagattccagcttctatggctcatcaccccaaattatatttatgagattaaatataccaatctttgagaatttaatttattatctatatttttatatcatttctcttctcctcttttcaaaacccaattttcaatctagggtttaattcaacttctagtaattattattctattatttttatccttactattttatttaatgcacaaacatatagaactccaacatgatgcatttttttaatcatttgtttgaattaaactctaaattttgtgtatgctctttttatgatgcaaatgaggcacataaaatgagaagacctctatatactccttgtatacaattttgagtattacagaggagcagcggggagggaggaagccggagaagcggaggggccgccgcaccagccgtgcctggctggggacggacgacgaaggggagcggcacggtcgcgctggccgcgggaaggggggcccgccgccgaatgctcatgccggcttgagaagggaagggtgcagtcgcgacagacgttgagggtacgaccacgagggaaggagacggaggctgcgagcgggcggtaggggccgccacgccgccagggagcagtagagggggccgccgcgccggggaatgggtccccgcacagatggacggggggcgcggccgcgacgagaagaaggccgtttgcagcggcggggggcagtcccgcgcccacggcagggaggacgcccacgcgcgcggtgtttgggccaggtcgcgggtgtggtctgaggtggtcaagcgagagggaggggagtagcggcgacagagtgtgaggtggagggcggctaggctgctgtgattggcgggctaggatggtggccgaccctaggagggaaggatgagcctctcgcggcggcgtcggctgtgggtggctgccctgtggatggacaaaatctagctagctgataccatgtttggaactatgaactcttgattgtattgcatagaggtggtggttacatatatagacacagaaccctaaccctaatgggccggcagcccaacagtagtgccggcccacacacacacaatctaacaagaccattagctacttttgggtccggtctgttagttatttttgggtccaatccgtctcgtgtgaagttttagtaagccactaacctctctgttttggtatttaacttcatgttattgtctgaaattatgatatattggtatttttcctatgttgtttgaaactacgtttaaacgattttaaacgtttatgtggcagaacacactagtagaaatatgtggcaaattctctaataatatctgcatgaatgagctcagctcaacgtatttattgtattctccatgcagatccagatatgagtctaggtttgctggtgaataaatattcaagaattgatgtctttgtaccattatccgttatgaaataatgtttttaagctggtccacgttctagttttgatcatggtgttttttcattatagaccaatatcattcagtcacctcttatgttatgaccggtagcccagcagccctaataaaatcagtgagtttgtttagatggataagcattagttagtttgtttaaatggataagcattagttagtttgtttagatagataaacattagtttcgaactcctggatagagttagttagtttgttaggggctgctatcacaacctatatattgtactcctttgattaaggaagaaatcaagcaggcaagtgtcttgcccttgcttccccctcaacgtatctactgttcaaccgtgcactgttcatcccaaatgccgagtccctggtcctagactttaaatctaccactcgtactacctttgtaaccctaatttcaacaatctggtatcggagatgccaggttccgacgatgtgacgccaggatcagcaccacccatcacctccaccgttgtcacatctattgatgtgacgactgctgccaccaaccaatttcataggtggacttcatggcattccagcagctgatggtgcagcagttcgccgccatctatggcatgtccaacaggacactgccaccactgccgcctccatcttctaccaccaccagtgctgctgcttcccctatggcatgccaagctatggtggcaccccccttcccaccaccaccacgccatccaccaccatcgttcccttcccatctgccacggcaccccttccattgccgatctccgccttggtgccatcgggacaaccatacctgtacccatccaccagattgccttcccacactccccatccccgattcccagcttccccaaggatgctcttcctgcacaccatcaccctgctgcaggcgccatcaccaccaccctcacttccacaaattatccttccctaccaccagcataaccctaggaggacggcgcccaaacgccggggtactggtcctagacttcaaacctatcactcgtactaccttcgtaaccctaattccaacacttacgtcagcagagcgagcagtaattgattgcatgctctattttggtgtag

SEQ ID NO: 442 - DNA, 382 bp, Zea mays
  Intron number 2 from transcript GRMZM2G451357_T01 (locus G RMZM2G451357) derived from phytozome v7.0 (chr-ID 2; pos 1 22943757 to 122944138 reverse strand)
gaggagagcgaacctttataaggataagcaagaaggtatgctgtcatctttagctattattgagcacaatgttctttcttttagtttggatttcaataaattgattagattagacagaattatgaaacctgtgatgcaactttgtgagtataacctacagttgaagtctttcaatgtctctaatagcttcaataaagttggaatagttgagaagttaaaaatcatcatgaaccttttgcagggtacagttggccaactccataaaatggcctgtaaggtttttgacttggcaccagatgaggtagctgtttattttgatgttaacgtttcgttttacttgctaggattttttttgtagttattgtggacatcattggcaggt

SEQ ID NO: 443 - DNA, 7542 bp, Zea mays
  Intron number 1 from transcript GRMZM2G493155_T01 (locus G RMZM2G493155) derived from phytozome v7.0 (chr-ID 4; pos 1 67281451 to 167288992)
acgacctggtgctcgggctcgggcgcgtgcgagaggtagccaggccggtggacaggatgatgatgcagggatgcatgccaagtgcagtgacatatggtgttggagacttgttctcaagtgctaggagttaagaacaaggcaacatagaaaatgttaatcgttaacacccttcgtcccccgaagcattatttcccttaggatataatggcttacggacgaaggctatgaaagacatatcttcataaattcatcaaacaatgacgaaggataaaatataaagaatgtaaaagaacacatgaacaatcatttattattattgaacataaacaaaaatattattaaactataagtgtaccttcaatcggaaggaaacgatagtacaagcgtgacgcaaaaagcgaatgccaagtcagcgtgaacagtacggggatactgttcacctatttatagacatgggacacagcccttacaaaattacattcatgccctttacatttgataataactctatagtagtctatcgaggtctgaatagccttttcatctttaagtcggttccactctttgctgttacgccgaagctttcctactcaacaccttcggctctgtatcaagcttcgtattattccgatctgctgcaatgccgactttagtctgagggtacctgttcacacattgtactacagaaatactgttaaatcctgtttttgaggaccttcggacgccgaaggtccccaacagtagcccctcgcaatattaatttgtttgaaataataaatttagattgcgatatggacgaaggctttacgccgaaggtccgaaaaaacaccttccctttgctagaatagcaacattcaatgacaagtggggtctttcaactttcaacgtaccgagcgtataaatatggccataccgcaaactcattttgcacgctttctggccaaccactcccgcttactcaatttttagcttttgcgcgctaagattccctgagtctttagttttaaagcttcggcattgaaaatagttttttagtgtttccgaagatgtctggagacaaggaagctgttactgaggcgaaactgtctcttgatgaggagaaaagcctggggtttcttatagcgatgtcgaagacaaacacggaaaaaatcaccaaggaaattctggaaggcttgtctgaagatactggtgacagtgacagttttgatgtagatagtggcggtgaagactccgaagaccgcccctggcgaccaagtcatgcggttttcggcaaatcagctatcaaagaaaaccatcttgccaatatgaggggaaggtatttccgggatctgtccattgtgagggcggacgaaggggaaaagacttgtccacaccctgaagaaaatgaagttgtggtgtaccgaagctttttgaaagccggattgcgattccccttgagcagcttcgtcgtggaggtgttgaaaatcttcgaagtctatcttcatcaacttactccagaggcgattataaggctaaatatcttcgtgtgggccacgagaagccaaggtctgaagcctgacgcaagaagcttctgcaatatacatgaattattatatgaaacaaagccttggggcaaagaacagtaccacaataactttggctgctacagtttcgtctctcggtccggggcaagctgtcccgtaccaacctttcggaagagatggcccggggattggatgacagaatggttttatgtgaagaatgacctatcagcacgagaagacatcaaaggtataatcatgcgtcctatttggcaaagcttcggccttcggaggccgaaggtggaaatgaatgaagctgccgaagaatgccagagggccttcggcgtcatctgctcttttattggaacaagagatttagtacaagaacatattgccttccgggtgtggccgcttgcggagaaatgggaaatgcctcaagaaactataaaagagaccgacgaaggtgggcttgtgagactgaagtacaccttcaagtttggagataaatttactgagccagatgacgactggctaaagagtattgaaaatttaagtgacgaattgcttggtgcttattcgaaggccgaagataccgcgatgtcagcagccttcggaggccgaaaaaagaagaggctgaatcgggtatttgatgcaattgggtttgtttaccctgactattgctaccccgtccgaaggcagaaaagaaagaacataacttctgcaaaagaagaagctgcaactgctcctagcgagccagagcctgaaagaaagaaaataaaagtcctcactcaccggccgcgttatatcgaaccagcttcggtgccggagtttaccgagaaatcttcttcggttaccgaggctgaaaagccaaccagaccagtcacgccacctgcagctgcagggataaccgaaacggcgaaaaagatagaactagaagaaccgaaggtttcactgccagaaaccaaagaaatggccgaagcgctatccacagaaaaaattgcagaagtggaaaaaccaactgaagaaaaagtaccagaaattgtgagtcctgcagcaaatgttgagacaacaaaaaatcaaaaagcgccagcagtgactccaaaaagaagaagaatggcgaatgtgctagatgtactagaaacaattaagacttcaagcacacctccgaagaaggctgttgttactcctgaaacaacagctgaaatttctggttctacagctccagggcaagaaattgaagccgaagctgggccctcagagtccgcaaaggcaaaaaccttggatagtgaggcagaaaaaataacaaagccaacctttgctgaagaaactggtgttgttacccccgaagcatcctccaaaattcgtgattatatttttcgtcatgcttcggggaaaaaattatcagaaaaagaagaacaagaggcccaacactatgcccaaaagttgaaatatccaaagggggcgttgatatttaatggcagtggagaagaagatttcttgtattgtctccccgacagcaaagaaatttctgtctgtcgggagatgagcagaagcttcggattcccaactttagaagacggactttcggtgttgtcaaaaaacgatctggctgacagtctagcttacaacagtttaaaggtgcgacaaatggaattcttgtattttttgtcgagttcaaaatttttcgtttgtttaaaactattgacacagacatgctcctgtttgcagggcctgatactcagcaatgccctcagggcacagaaagatgctgaagacgaaagttgtactatagccctgagcaaccttcgttccgaagtaattgaactgaggaacgaaggtctcgaaaagacaaaatattatactcattaatagataaaataaaggaggacgaagctgcttttaaaagtcaagctgaagctcagaaacacgaaattgaagaccttcggaaacaactggccagagccaaagaagaacgtatacttgaagaaacaaagcgtgaactcagcgatcaatgggcagatcacctagaagtgactgttgaagagcttcgttcatccaaaaagagatgctacaataaatctatagattgtgttaaaaaattaaaggctagcttcgccaaggtcggcgcattctcaagtgaagaaaacttttcgagaggcaatcccgaaggtgtcattgaatggattgaccatgaagctgaagccttcgaagaaattttaaatagccgaggagatatatgtgccttctctggcgccagagggattgccactattttagagaagaagggctgcgaacacgtaaaaattttagcacagtccgaagctgctttgtcctttgaagatacaaaagatccttcggccgaagctagtataattggtggaaagttttttactgatatctgggataatggtggccgagagatggccggagaaattattcgaagaagtgaaaagggtattcacgatgctagagaagtagctgaggctgctaaaaagagcgcaggggccgaaggtcaattaggtatcaactaatagtttttatcgtgttgtaatcttaggctttaagatttgtttatgatttgtaatagcaaagtagccgtgtcctgtccttcctcagatcctactgaagtatctccgggtgcacggcctaagggtgacgatgagattaaaaagatggctgaagctattatggatgaggttgtcgatcgactgttgaacgaagctgcagaagtggtacttagggaagactagatgctattgtaaaaacattttaaatgtaacacgtgtaatatcttgtaatcatgtatgtaacatatttgttttatttttctttatggtttaattctttacgatgcatgaaacttttcatacataccttttttgagtctttggcgaaaaaacaccttcccttcttttcatgcttcgtgaagaaaaatttttatgtatcacaacaatgtccatagcgctcagatgaagaatatccaagcttcgtgaaaacattctccgaagctatactccgaagttgaagattgtgtctccttgtgacaatacgattttcactctttcaaagcatacttccgaagatcaatattgtgtcccccgcttgtaccatatgcaacatgatgtatgatgcttatgctatgcaaaatgatgtgatgatgttatgttacgtagatggcatttgttccgaaagatacacacatatccccacacaatatttttgtatcagcgctgattcttcgctgtaagctctgcattcccttaggaacgtctttggagcttcttcgccttttacttaggcggtataagctctgcattcccttaggaacgtctttggagcttcttcgccttttacttaggcggtataagctctgcattcccttaggaacgtctttggagcttcttcgccttttacttaggcggtatcagcgttgacttttcgctgtatgctctgcattccttttggaacgactttggagcagaaaacttacactgcgctcccttcggaacgactttttgtgacttcgtcagacttactctgcgttccttagaacgacttttgttgcttcgaagaattttcgataatccgaaggtcctttttattatcacaaacctgtgaagaaaacatatttttcttgtaggaatcaacgaaactaattacatgaaacctaaaacaatgtcctttattacagaaaataaaactgaatgaaaaagattgctattaaggtaggatatttgtcaatagatgtgctttgattctggcacggtgctgttgaccgtgcgagcttcggactgttctctgaagtccctttgatgtggagcatattggctcccttctggctgctggccttgttgcaatggaggtggaggcggaggctgttgccaggaagcttgaggctgactcgccgaagcagcagagactgcaggatggttgcccacatattctgggatgtagggcgaatgatacgaagctgtatgcatgacctgcttcggctgggcttgctgtgctgctgcttcagctatttccttttgcttctgtatagtgacatggcacatcctggtagtatggcctttgttttcaccgcagaataagcaaaagattcttctcggttgatcgccaaatcttcctccgaagcccctggcgcctctgcctcttggagctggtggccggaaggagctttgctgttgtccagaagcctgtgaggagcattgtggcctttgctgttggcttcctctgtcatcattttgtgtagaattgtgaattgatctcacatgcctcgggtaaaaccttcctccgaagcccctggtcatttcagaaaacctgaaagcctcctcccttctttggcgaaaatcattgtcggcccgaatgtattcatccattttctggagaagcttctccaaagtttgaggaggcttcctggcgaagtactgagctgacggacctagccgaagccccttgatcatggcctcgatgacaatttcattgggcaccgttggtgcctgtgccctcagacgcaagaaccttcggacatatgcctgaaggtattcttcgtggtcctgagtgcactggaacagagcctgagcagtgaccggcttcgtctgaaatccttgaaagctggttaacaacaaatccttcagcttctgccatgaagtgatcgttcctggtcgaagggaagaataccaggtttgagcaacacttctgacagccataacgaaagatttggccatgactgaagcattgccaccatacgaagacactgttgcttcgtagctcatcaaaaactgcttcgggtctgagtggccatcaaatacggggagctgaggcggcttgtaggacggaggccaaggtgtagcctgtaactcagcggacaggggagaagcatcatcaaaaacaaaattcccatgatggaaattgtcataccagtcatcttcgttgggaaagccctcctgatgaaggtcttgatgctgaggccttcggtgttgctcatcctgagcaagatgacgaacttcttcagaggcttcatctatctgcctctgcagttcaactagcctggccatcttctccttcttgcgttgaacctgctgctgaaggatttccagattttgaatctcctgatctagatcatcctccggaggtgttggactggtagccttcctcttctggcttcgtgcctctctaagagaaaggacgtcttgattggggtccagcggctgcagcgtgccagcccctggtgctgaagccttcttcggcggcatgacgaaggtgatgcttgccgaagatgtcaaaaagctcaagaaatggaagtgagttcaccggaggtgggcgccaatgttggagacttgttctcaagtgctaggagttaagaacaaggcaacatagaaaatgttaatcgttaacacccttcgtcccccgaagcattatttcccttaggatataatggcttacggacgaaggctatgaaagacatatcttcataaattcatcaaacaatgacgaaggataaaatataaagaatgtaaaagaacacatgaacaatcatttattattattgaacataaacaaaaatattattaaactataagtgtaccttcaatcggaaggaaacgatagtacaagcgtgacgcaaaaagcgaatgccaagtcagcgtgaacagtacggggatactgttcacctatttatagacatgggacacagcccttacaaaattacattcatgccctttacatttgataataactctatagtagtctatcgaggtctgaatagccttttcatctttaagtcggttccactctttgctgttacgccgaagctttcctactcaacaccttcggctctgtatcaagcttcgtattattccgatctgctgcaatgccgactttagtctgagggtacctgttcacacattgtactacagaaatactgttaaatcctgtttttgaggaccttcggacgccgaaggtccccaacatatgggttcctcctgcaggggctgtgccgaacaaggcagaccgacgaggc

SEQ ID NO: 444 - DNA, 1006 bp, Zea mays
  Intron number 1 from transcript GRMZM5G823004_T01 (locus G RMZM5G823004) derived from phytozome v7.0 (chr-ID 1; pos 9 299314 to 9300319)
ccagctgccggcgcccttgcccgagtggccgcaaggtttggggctcttctctctctcccccagcgcctttcctttgctggcttttcatttgttgttcgtgctgattgactgtggaaccagttcgcggttgagtcgtatcagtatcaattattggtagatttgttacagttcgttgatagtcaccttgttcgttcgtttccgctgtatgctactttttctgtggtgaccggcactgggatcggtcgttgctttaaattcttctgatctgagtgttggatacttgtattgtaagttgtaacaacctcttgccgtctcgtttgccctcgattctgcgatttcagtgcggtacttcgcctgctttaaccatgggtttctttgatccacgagcatttttttaacagttcggttttggaatgactgaataagatgaagcagttcgtctactacctaccactctgctttactttcaagtgataatttacatggtactcccgacaaagttaaatattaaattgcatgcaccatctactttaaccaaaaatttaaacggatcgagccacaattgttttattttaattatgctaaccaagattcgaactcgagactcctctaatagcatattaagttacatggaccttccagttcaatccaaaacattttggaagggagagagtagaggggggcaggggtcaggggtcagggtaaatttttaaatcatactgtcactgattaactgtataggaaacactagtatctgcctgtttgcttatttgcaggaggcaatatctgtaattaacttatcttgtacaggcaactcagaaccttgttcttgtgttgtcacgtgctgaatactggaaccttgttcctagttttccaacaataatatatgcatgtaccaatgttcactatgcattgttttaccagataaataaaatgctttccagaattccttactaactttcttcagcaactccttcgcaggaggggattttgctaagggcacaat

SEQ ID NO: 445 - DNA, 2966 bp, Zea mays
  Intron number 2 from transcript GRMZM2G090736_T01 (locus G RMZM2G090736) derived from phytozome v7.0 (chr-ID 5; pos 2 4438039 to 24441004 reverse strand)
gagttacagcggttccatattttgttttctgcaaggtatttgcaattaccgaagtgtcaattaagattttattcccctttttatgaacaaaacttctgatagaatcatggtatttgtcatcttcgtggaagttaaataaccacatatatttcttattgccgatctaatatcatgagtacaatgtttaataaaatgagatttgctcttctattatgacaagtggttaacatgatttggatccatgccttcatttttctcattatactctgtcaaaaccagtgattatgtaattggtactatacagagtttttaaggctatgcctagtcggtgcctggtgcaatggtcagagctgtatcactgagtctctaggtcgcgcggttttgaagcaatctccccgtatttgcgggggaagtcttgcttcggtttatcccttctccagaccatactcatgtgatagcctctggcactaggtctgccctattttgcctagttgtcgcctaggcgacaaggcacttattttgcctacaaggcaacaaggcgctcacagggagtaaggtgtccctgacacctagccaaaagtagtgagatatccatggggactgaaggaaaaacagaggaaaatgataggggaagaccatgcagctgcctcctcactcatccctattgaatctagtgtcgcctagatcatatgcaacgaaggcggcggttgattgagatgtggatctgagggaacaacagcaagaggtagggaaggagcttgcacatccctatcaaatctagtgccgcctaaatcatctgcaacggaggcggcggtttatctagatggggatctgagggaacatcagcaagaggtagggaaggagcagagggcaggctgcgcgtgcgcatccatgagcagcgcgagggagggaggccggtgctgcatctgcatgagccatatgggaggagacacagcggcactgcgcctgcgggagatgtggtggactatctctagcagcttacccattcccatattcaaacagtggaatgtacaatgcaaaatggtgcaaaacagtgttttgggtgaccatatgagtgcaatgtacaatagttcacccacatggtcaccaaaacaccgtttttgcactgtagattgtactgtttgtagagtgtagtttgaatatgggtatgtgtatgagtaagctgcttgagatggtccggaggagaagcagagagctcctaggcggtgtgtgtgtgtgcctccgtgagatgacatgtgtgaagggataagtacaagagggcactcgtgggctgcctagtgttctgggccaaacacttctctttacatttgtccttttttgtttttttttctccctttttgtcttcttgcctattccctgctgctattttcgtatttcttagaatggtaaggcctcgtcttatgatcgtctaggcgaggcgtggcctagttgactcaaatgagtagctcgctacatctcatgttgctgccttaaaagttaaaaccagggtactatagtatcactataaaagaatatttgtttttacgtgcaacgtgatgcatgcacatgggatagaatgattagttatcctgttattttcttttctttcaaatggattccgtgcatcagaaaactgttcttggtcttgtagaagccatgttaaccagtctcattgaaatcaggcactgaaagtctctagtttccttcccttctcatccaggattttgagccttgacccctggcatgggagaagagtacccagccagctgcactacaatgagtcatggcccttgttctaaggcccacacagatctatgtccacaatagagatatgttctttttatatatactataaataaaattttgtattttttttttgccattttcacttgagccctggttggcaagtttagggggggtgcttagttgggtgtggggatgacccacctcttgtaaatgaactttctttaattgaatggcagagctcctgccttttcatttaaacactctgcgtacattgaagttttcagtataaatttgtttttgccaatttcctgtcctctacgccaaagagtccatttggatgcacaataaaatttggttaggcttaggggacgtttgaatgcactaaaactaatagttagttggttaaaaattattagtggaattagctagctaacaaatagttacctaactattaactaatttaccaaaaatagctaatagctgaactgttagctgggtgtttggatgtctcaactaattttagtcagtaactattagctctagtgcattcaaacacccccttaggcgtgttttgattttgttggctatagcctttcagaggttaaaggcttcagactgccaaatgaagtcttctctttgatatcagtggcttttggctcaacctgtgcaattcttgcaattacatttcacaaaggatgcttgcagtttctttcttcttagttaccacttaccccgtcatggcatggggattccagactccagtaggacctgtatatctccaacaattgtgatatccatgtacattgttaatttgttcgcaacataaatataaattagttgattttatctgtggtgacttcctcttacgtttggttgtcctgtgtccaaattctgcaactgcatgatggtatgatacaattatgctgcaaggaaaatcttcaaatatgttacttttcggttagtgcctttattattttatgtagataattcctctgacaaactctgtaatttcgtcacttttggtaatgatattcgggcgagccctggtgaggaagaaccactcctttggttggttaacttgaggagttgcatgtttaatgtttgttactggcttgtttgaaacacttgtatgctgattttattgtgagaggtgccccttttcatgcatacattatctgattgcaggaaggaaaaattgttgatactttggagggagtaaa

SEQ ID NO: 446 - DNA, 7181 bp, Zea mays
  Intron number 2 from transcript GRMZM2G700265_T01 (locus G RMZM2G700265) derived from phytozome v7.0 (chr-ID 7; pos 1 52242961 to 152250141)
acctggcgaccaacgtgcgcctggtggctgtcacggtccccttggccgtggcaactccaccccgacgtgagcacgcgcacaggtaaccaggaataagatccaggtatgtggttatgatttctgttattcttcttatccctttcttcgttcacaagtatgagtacttatagctattacaatctaggcttaatccttccaagattacacgacccaatatcggtctgacatttcaaaagataattgctatactaagtagtagtagaggttctcacatctcccccctgcttcagaagttgattgcctccaatcaagctcatttggaaacctggccttcaaaacatcaaaatcctcccaagtagaatcagcagaatccaaatgagaccaagccactttcacttgaaccaatgggtgactgcctttgcgcaccagacatcggtaaaaaatctacactggtttaacctccagcccagacaaatccaccaacttagacagatcagaaaatactggaacagcgttaggagtaaaaggtttaagttgagaaacatcaaatactggatgaattaaggcatgagccggcaactccaactcataagcaactgtcccaatacgcttcagcacagtaaaaggtctgaaatatttgaaagccaactttggacatggtctatttaccactgaactctgcacataaggttgcagcttaagaagagctgattctcccatctgaaattctctatcatttcgatgtttatctgcttgtaatttcatatgattgcgagcagctaccaacttgtcttgcaagagcttggaataactctgcctttcagccaacatctcatccacactatgctcaccagtaccagcaaccccaaactccacaaaaatagctggatcatagccatatagtgccttaaaaggagaacatccaatggctgaatgaaaagaagaattgtaccataattcagctaagggtaaccagtgcttccatttctttggagtatcataaatggcacacctcaaatacatttcaacacattggttaattcttttagatttgccatctgactgagggtgataggctgtagataaagccaactgagttcccaatgtctgaaataaagctttccagaattggctagtgaagaccttatccctgtcagacactaatgtcttaggaactccatgaagcttaaccacattatctagaaaaacctgggcaacaatagcagcagaaaatggatgttttagtggtaagaaatgagcatacttcgaaaaacgatccaccaccactaaaatagtgtcatagccctcagatttaggtaatccttcaataaaatccatggttagatcttgccaagccccactaggaattggtaatggttggagcaacccaggtggatgaatcctttctgacttgcatgttgacacaccaagcattgctacacaaaagaaatcacctcagctttcaaccctttccaccaaaaaagtcttttaactctgtgataagttgcaggtcctccagaatggcccccacaacactatcgtggagttatttgcccatttgccattatcaaatacgggtttcgcccaaatgccatcataaaaatgggtttcgccgctacaccattttcaatcattgttcaacagacaaaatgccattttatcccttcagcacattacgagagacttttatcctgggtaaaatcacgatgttatcttctcaccgtgagtcttcccatttcgaccagccaccagcgccgcccagtccttgccccgccgccgcccagtccctgcccccgcccccgcccccgcccaggtcctgccgccgccgcctaggccatccaggccttgccgtcgctggagcccaggcctcgtcaccaccaccgcccaggcctcgccaccagcactgcctagggtttcaagtccgcgacgccgcccaaggcctccagtctgcactgccgcccaagcccatcgaggtcgcgccgtcgcccaaggccatccaggttagttcattttggtggattggctaccatgacatagatgcaacactggattccactctaattgatgttttactctgagatgcagtgcgtaggatcaaactgtcctctttttgtaaacatggattccaatcttagtgatattgttgcaatgtaagttctctgtaccttctatttgcactatagtttgcagctaagatgtattagatcagttctagctaacttctaactactaacttcgttgcattaaaatttgttataggctcgatggagagccttagcttactttagctgttgttgacccaattgttgctattgacaatgtgccacaagcacaatatattgattggaacacactgcaaatagtagaaagacaagatgaagagggaaggctggaagtaatagatgaggatcagctgtataacctcttgggcttgacggttgatgaagagaatcctcctgcagatgctatgggcaatgatggtgatgctgggagggttgatggtgaggcagggagggttgatggtgaggctcctaatgttttcgatgatagttttggcgcagcgattctagttgatgatgatgtgcctgaggagagggtgtttgtgcacgacccagataagcctagcatgagtattggcacagtgtatcctgacatgaaagagtttagattggctatgcgccaatttgctataaatgaggaatttgagctgcacatcgcaaaaactgaccgaactaggtacattgggtattgcaaaggagatggatgtccttggcatattgttggacggagacaaccagatggaaaatgacaccaaggaagaagaagaagaacctgacagcaagtgaatgaacctgacagcaagtgtatgccaccaagcaaagtctgtttggacttgtttgaaatcaatgtgtatgaattgtgtgactctttttatgagtccaatgtgtgtaaattttaatatctttatgtctgaacatctatgaaaccagtgagtctaaactataaacacctatgtggtcatttgaattgtgaacatctctgaaattttatttgaactttatcgattggtgtgctgaaatttctgtgctgaaaattgcaccgtgctgaaaactgtactgtattggattttattgcagattggtgtgcttctctgtactgtgcgctagaaagcacagaattttttttgcgccaacttccatcagaacagcactagtcagcttggtctggacgctttatctgaacctgggttggagcaatttattggtctgaacgctactcttatttgaaccaagggtggagtagtttttgaacctggtctggacgtttttttttgaacctaggttggaacagcctatgtgccagttttcgaacgctcctcttatttgtacagttaaccgcgttaaatggtcgaaggttataatgtgctgaagggataaaatggcattttgtctattgaacaatgattgaaaatggcgtagcggcgaaacccatttttatgatggcatttgggcgaaacccgtatttgataatggcgaatgggcaaataactccactatcatgcatagcagcaattatcttactccttagagcagaattattagcaatccagatttgattccctttcttaatcaaaccttggttcaaagaaaaaccttgttcatttggactatggacacttaattgagccaacatatcctgggctgcctgatccgtgacataggaattgataacttcttgaatccaaactgatgtcacttctgaaacagactgcagagccatcacatgacccactctggacaaagcatcagcagctaaattctctttgccttttctatacacaattctgaattgcagccccataagctttgccatacctttcttctgcaaatatgaatgcaacacttgatcctccaaaaaaactcaaagctctatgatctgttcttatcacaaattctgcatgttgcagatattgcctccacttctccactgctaagatcagagctaaaaattccttttcatagatggacaacaactgattctttgtgctcaaagctttactgagataagcaataggtctatgtttctgcagtaacacaacccctattcccttctcacatgcatcagtctcaacttcaaatgtttcctcaaaatttggtagggccaaaacaggagtagtagtcatggccttcttaagaatctgaaaagcctgttctgcttcagaattccactgaaaattcttggtctgcaataagttggtaagtggcttagcaatcatcccataattattcacaaatctcctataatagccagtcaaaccaagaaatcctctcaaatctgttacaaaagcaggagtaggccatctcagcatagcatcagttttggagggatcagttgccaccccttgctgagatatcacatgccccaaataaagcaattcagttttgccaaaagcacatttggtcttcttcagaaaaaactggtgttccctcatcttcccaaaaaccagctgaatatgagatagatgttcagaccaagtagaactgtatatcagtatatcatccagaaaaaccataacaaactttctaagaaatggagctagaatagagttcatatcacattgaaatgtagcaggggcattagtgagcccaaaaggcataactcttaactaataatgtcccaaatgtgtcttaaaagctgtcttaaactcttcaccctctcccattcttatctgatggtacccagctgtgaggtctagactggtaaagtaacgagttcctgctaattcctccaaaatttcttctaccaatggcatgggaaatctgtttttatggtcaagtcatttaacttcctatagtccacacaaaatctccatgaaccatccttttttgactagtaaaacaggtgaagcaaaaggaccgacactaggagtaataaatccatcctctaaatgcagccacatgtttctcaatctcattcttatgcaatggggaatacctgtagggtttagagttgactggaacagctccaagaaccagtgatatgtgatgatcataaaccctaacaggaggaagttgagtaggtgtagcaaatatatcactgaactcctcaactagaagttggatatcagaatgttgagaaccttccttgttagcagcaaccgattccaatagcataaaggcccacacatcattgcccttaatccatttctgtacctgcaacacagatatcccaggcacagaagtaacttcttgcacttcatcaccaatcaaattcacctaaactccatccacaaactgcaacttcttatgctcccagtcacactccattgggttgtgctgcttaagccaatcaaaccctataatagcatcaaaagctcccaaaggtaacaccctcatatatgtatgatagaaatgtccattagaccaccattccagattttgaaccaaagtagcactcatcagcttctccccactagcaaccttcacctgcacaggctggcaaggcaccacagtcagacccaactgcttcaccatgtgctcactgataaagctagtagaactccgagaatctatgagcataaccatcacttgtttgttgactatggatctgacactcatactatcattgttgtctctgccagataagacatggattgacaaacgacaacactcctcctcttgttccaactgcaatagcacctcatcagttaattccatttggaaatcttcagtagtcagtgcattcaactgaccctgatttcttttagcacactttgctatatgcccgggttcaaatctttctccacaagcataacacaacccattaagtctacaaaaatctctgatctgcctttctcgactcaagtccacaggcttctaaacacccttctcctccatcctgacttgataaggttgttgcctcaccgtaccaacagacttgatacttctagttttactgcggtccaacacctcttgctgcatgcaggccaacagaatagcccgattcatggtggtaggtacttgaacttgaaccacattttgtatctcaaacttgagtccccgcacaaactgagtaacaaaaaatggttcacccatccttggattatgaactactactccatacttggctcgctcaaattcatccacataagtttccaaactatcagtctgacgcagagccaacaacttcctcaaggcttttggataggcatcaacaccaaattgttcagtcacagctgcaacaaactcctgccaattcccaattccatgactaagcttatgacatctccaccactgggcacattctgttccaaattcatggttgctgctgacacccagattgactcgggaacacgatagatagtgaaataatccaaacactgatcaatccaaacaactggatctccactgccaaacttgggaaaaggaagtttaggccgtacctctttgttagcatcaaattggtgtcgcccttatctgttcccctttccttgctcccccttcacctgtctgttttgttgaggaaatcgattctgattacggttagggagttcttcttccgatcctcctgatgcatctcccagttcccttcccatctgctctagacgcagttgcgacatctccttgtctgtctcctccaccttggcgtacaactcgttcctctccattgccgcctgctctgctactgcggccgccaactcggattgcgtcatcagctggtgctgcgcccgctccactttcttgacccgcccggtcaagtcttccagcgcctcgaacacatgattccaattctcctggttcgtacgctgttgctcctccatggcttccaacacgaatcgcgactgcacagatggtctcgccgagggcgccgtcgcgtccttccgaactccaccgcaagacaccaagctctgataccacttgtcacagtccccttggccgtggcgtctccaccccgacgtgagcactcgcacccaggaagaagatccagatatgtagttatgatttctgttattcttctcatctctttcttcgttcataagtatgagtacttatagctattacaatctggccttaatccttccaagattacacggcccaataccgacctgacatttcaaaagataattgctatactaagtagcagtagaggttctcatagtggcggacgtgcgcaaggctgac

SEQ ID NO: 447 - DNA, 7240 bp, Zea mays
  Intron number 6 from transcript GRMZM2G106204_T01 (locus G RMZM2G106204) derived from phytozome v7.0 (chr-ID 7; pos 6 316153 to 6323392)
gccacagggaagcattcagtgctgcagcaaagaatgtaagtttaataatttgctctagttaaatgaacaaaacataacttgtcatacctatgtacttgcatcatatatatcacaagttagtgaatccacgtcaccataaaagacaacaatgctacatttttatgttatggtagggcattacaaataatgtacaacccacatatacatgttttgaatctatttattttacattttttgcttacatagaagatgaaacataaggaatataattaaataacatataagttaattgaaagaacacaaggaaacaatatgtaagtccactacacgcccaaacaatgaaattaaacacacatgagccaaccatagtgttttatgcgtctttgttttggaaaatgctttatgtgttaggaacccaatttgacgtgagaccgtccgatcactactacataaactatctttagcactgttgaaaactggctacagtaacagtactagactcctaatcgatactaaaggcaccagtctttagggggtgtttggttagagggactaaagattagtctctagtttttagttccttttagtcccttttttgccactaaaatatggactaaaatgatttagtctttaggccatgtttggtttctttagtctagggtctaaactttagttaggggactaaagtttagtccctaacatgtttggttctgggagctaaaaatagtaagaatatactaaatgactcataagaagactaaaatggactttaacattctcctgcttttagtacaattgaactaaatgaggagtaatgtggaattaatatggtttagtcccttttagcacatatgtgaaggactaaagactaaatcattttagtccatattttagtcctagtgtttggcaaaaaagtgactaaatgggactaaaaactagagactaatctttagtccctctaaccaaacacccccttagtccttcacataggtgctaaaagagactaaaagcccataattatcatgttgctcttaccttttttttatagataactaatattatgagtatattctaagggtatttgagtctttggacagtgtatttaatgactttagaatctatttagtccctaaaaccaaacatatagggactaaagtttagtcccaggactaaagtttagtcctaggactaattgaaaccaaacatgcccttagtcatggttgtatgactcgatgctaattggtgcctttagtaccagttgatgactccaacaaatattaaacggggttacgtggccgcaaccgcaaaggaggcacactttgagcactgtgtccgtagaggatccacatactaagcgcttttagtatcggttatgctaccaatttgtactaaagagggtatattcatatatatttaaatctttatatttcatataattacacacacacacacacacacacacacatatattaagagcattatatattaatagctacatatatacattgtaaaatatatattattctagccttttcatttataaagtttctataaaataaatatacaactaattattactattactatgaatgtcattacatattatatatattttatttatctaacttaggattctgatggaagtcttttttcattatagtgaaactctctacctttggatgcaatttggttatataagaaccctataattttttttagttatcatgatcacatctaatggaagaatgtttcctcatttttattagctgcaatttgccaaataatcaatatagtaaatcaaagtctttggacacaatattattggtaaaaaatgtggtgcgttttcacatatacttcaatgttttttccactgtctttgttatctatgaatgtgtgaatgaatttataaacatagaatccacaaaatgttgtcttgccgatgttggtaaccaaaacataaaaggttatgaagtattattggtaaacaacatgcgagatgtacaggtctatacatactaaaaggtttgccttcagcataagcttttcttttagcctagaattattttttgtgaaagatactccatgccccgaacattaaaaggagtgatgtttggtctataacaaaacaaaatcaatggatagataattaagttggaatacaccaattactcattaagaatatccacaacctcttggtaatccaagactggcttcctcatcaagtctagcacatgcataatgtcatgttccatcgtgattattaggagtaaccagtggaagttgattataaacattagatagtaaattagatgggatatttaaatagaaaagatataaggtcaagacaatagacactaacttaaagttgtgaggtattagtatgtactacacgtaatgttgcctttgtaataatgttagtattacctttaatgcatgattatgatacaacattatgttattttaaatgatcactaaaccatgaagcacacattataaagttccctctttgagacatctttggatttccatcctagacgatgtgaaataatgttgaggtcacataaataatgaataaatctaagtgaaatatcaacaagagatataaagaacatttacaaaatccaatagttgaggagaaagatcaagagtgtcacactagtatacatgatagatatcttcaaaatctagccacatgatttatacgccattgaatagtcggtacctttgatgagcacaacaacacatgtcctctcaacgatggatttatccatgtaccactcatggaatccacatatattgaatgttctttgactagctctagcctaactagaggcttgccatgcttgtactaccaaactatagaagtagttgcatctatacttgctagctacaacacttgtctttcatcttgcctctagacttctaaaatgcccccatattaatgtgatgtttggatggcatgttaggaatagtttgtggctattttcttagccgcaagacatattttagcatgtttgtataagatttactgatagagcaatcatattatgatagaatagttttctttgatttcttgttcatcttcacaaagaacctcctcagtcctcgttgttggatctattgattctttcattggaaaaattctctttatgaagtgatcctttacctagacaaccacacaacttggttcaactccttgtaagttaagtcataagctcgtttctatggtattaacttaactacagagctatttggtgtgctctaccttttactttcaattgacttagtgcgagtttatcttttagttgttggatgtcgatgttcttgcatataggtgtggtgcttttgtgaggtagtgtggggctcttctataagaaggggtggggctcctacttggaggggtgggacttttgttaggaggagtggggctgctacctagagagtatggtggtgggaggcctaatcaactatcaatgtattctgaccttaggaaattataatgtattgcttctgtcatagaataaatttgtgtaatgtctaatcaatgttgactatggagtacccatctagaatctccttgctattgtatgtattgctttgctgtggaggtgaaaccgtaccaaaagccaccttattgttaagttgacactggtatatatagctcacatgatattcgatattgaatttcatcaatgggatatcgttgctctgcaaggagtttagtggaagcacaaccactccgttgttgaaaggggctaaccatgtcagtaggaggcactatcctttgttgagttaagttggtaattactcgtgttttttatgttgaacctcgataggaatggattatttggtttgagctagctgatattccaagttatgcactgttttctccacattggccttgcttctctattggctcttatatgtgttaatgtccatatcaaacccacacttccaaggaaaacttttgtatactctgatttagctagggagcttgggattctaaagggcaatagtgatcttataattttccatatcagggatgaactcccctttagaggacttatcaatggaaatggcaaaaatttcaattggttctttgataattcattggaagataaacttctatcttctaagatgcttcccatgtgggcataatattattttttgtgcactccaattgtgcgttgcgggggtgacacccgtttgctcaaagtcttattccatcttggtttacttctccacgccctttctgtaaccaccaaagccaagccaatgaaaatattccattttaagcatattacattgattcttttgtagaaagatagtgtccatcttttctgtgattgtattgcaggaacgcgtcctagtgccccctatacggtaaacttctaaaagtcaattgtttttccatctttaagtatttatggtaaagttttttcttatggctccaaaatagtaccaccatcttctagactgtctagatggattagtttctatgaaattgtaatgaggaatgcacatagatttatgattgcttttctaatattgtttggtagaatactccttaacacaaccagaagaaaatgtgtcatcaacacatagtaaccatgaaactttagacataccattttcttcaaatttacaagtctctttacattagaggagtaccaagctaagaacagtataactagtagggcttaagtattgttttcctttttctaacttttttgggtgtaggctatcttgatgatatttctagtgtatctttgtccatttcctgtgtgcctagaaactcaactgcttgacatatatatatttttcatgagatacatcacatcaattgcatggtagacgactaatacttctcaataaggcaggtcccaaaatattgacgtctgtttctacatacgtgtctttctattttcattgggaataggttggctactagatcccttgcaaacaccatgctaaggttctttaccatatggaacataatattcccattatgatgaaatggcttagcacgatgacctccttgcccgttaaagtgcttacttttattcctactggaatttttgcaactagaaatcgacaatgacccatgtaaacaacctttcgacaatgtttcaaatacatgttattaatctcatttaaacaatgagtgtatgccctaaattctttgttcaactgccctgataggtttgacgatatgatagtcattgatggttacaaaaactaaagctcgtaggtcaaattctttctgtttgtgctcatcacatgtacgcattcctttagacataacaataaaagttcttcagccaatggtttttggtacttatataagtgctaacatcataataaacttctacttcaagcatagctatgaaggtagttgtacaaacatagagtcattgggctactgtgttcttgcccccactttgatttccaattgtgattttgcccctacttttcagactttgtgattttatccccactttttagatgaagtcaccgagttacccctactctgttagaggtgcttaatgatgttcaaaatgttgtaaaaagacaacattaccccttattgaacattgtgattttacccccattttaccctaagacaatttagatcaaattcagaatttgaacatcattttagcaccattttcccaccatttcgcccacacatatatggcataaatcacaacacagagaacacaaatttaatatacaacatctaaactaattaatttgagtagtattccatcattatttcagcacaacagtgtcacacaaaaacatttcaacaccatcacactaccatttcggcaccatcacaaagtctaggaagtaggggcaaaatcacaattggaaatcaaggaagggggaaataacacaataaccctagggtcatagaccatatgctatgactaccgaccatttctctgaaaggattcataacatctgtgattaaactagaccttatgttcctcacatagattaataacggttggtgactctgaccggtactaaagctaggacattaatatcggttggagccaccaaccggtactagtgctcgcgctagggtcagacaattagaactaatacttgtacttgtgttaccaattgtaacttaacccatactaaatgctagggatccaaatcccatttctatagtagtgtatttgtatctattgatgatgtggacaaacttctatagacactagataagaatactagggattcctatatatagaagatttgttttgtatcagtctatatactttaaaatatttagctgtgtcaattatatgggtagttcgtctagcggtgtaaagtacatttccatatacatggacggaggcagcggtggggcggatagggcgacttgagccccccctaccgttgccgagcatatggagccccactagaaccttccctaaattttttagtgtacacatacaatgaagaaggggctcctatactacagtagtttagttcagcccttcctagatttttttctagctccgtccctgtccatgtatacacaatgcaacgtcaactgaaacatctttaaaccaacaatgaaaatgtcagtctgatgctggatagctagccaagcaaagttagttcttactgatatattgaagtaaagccatggtgcaatatacttgaaccacttaatacatttgttaaccttccactcaaataaaccttgattcatactacctgatgtttattatactacatgatgttgagtcatagtgtgtgtgttatatatacatacactcaagttgtattcaaatggttgtgcatagctagtgaatagaaaaatgggagagcttcagtgacatatgcatatatagtagctgtacatgaaacactacatgcttcatatagaaaatggagtatatgtttgtgaattgtgatgggcaggaggatacaggtcgtctgactaaataaatcacacatggaagacgatctgactgaggtcttgttcggttatttctattccatttagattgggtgagattgagtcgatctcacccaattcacatggtttaatatatatcaaaacgaacaagtcctgaatagagtgatccaccttgcatagctatatcggatgactataataataaaacgattctatatcaacttgctgttgtaaaatatgactctatggtgcatgcatgctgcagtgggctcatctccctcggctccatttcggcctcag

SEQ ID NO: 448 - DNA, 1780 bp, Zea mays
  Intron number 1 from transcript GRMZM2G172637_T01 (locus G RMZM2G172637) derived from phytozome v7.0 (chr-ID 4; pos 3 1084245 to 31086024 reverse strand)
ctttctcacggatcttcgggtcggtttgtgaattggtgagcctgttcgctactctatttagttaatttgatcgttgtattgattaaagttgtggtcgatgattttcttgtttatagcgcaagcatatggtgtgtcgactttcagattcattgttgtccacatgtgcgatagttggtgaatgaatatgtcaaaggagagtaaattctttaggtatatgtgtagtatgattaagacgagttctttttgtgatgatatattatgtggaatatacttgggtgaatatgtatatgtatagtgtaattaagtaggtgatcttagctttaatttataataaagtactagagaattctaagttttaagaacatgtgtgattcttgttgtttaatgctgcatgaccagttttacgtaagcaactagtttagtaaagtaaaccatgttttctgtgaatgtgttatatataaaagatgtaaataacttcttcatcttactggtataaaaatatcatggtcataggtctagtagtttgagagttatgaattttccaagtccagtttcagaatctgtccaaattctgtacaggtttcgaaaattggattgtttgattaagtaaaactgagaatcagctcttagtaattataggtgaattgtagtacttttcttaaggtttccaacaaattttggatcaccctttttggtggtctagaagtcaggttatggctgtttaaaatgtgatgtttgaagctgtcaaaatctggacagcaatgcttgtttgtattaactgacttcgatacacattgaatcgccttgagatgattataaatgaattgtagacaattctactagctttctaaaaagtctaggatcacctgatttggatttctgaaactccagttatgaatttttgaagtgaagagctgaattctatccaaatctggacagaattaaagtttagcactgtttgaccattctgtcgaatcatgttgtgatgataatataagagttatagaggactttctaagatttccagaaagtcttagtttactatttttggatgcatattttgtaagttatgagcaaaactgttgactgctgtactgctgtccaaaatcttcatgtgttaaattgattgtttggagtcattcttgtttggctaggttggattagtcaattttttattcttaattgatgaagtgatggcttattttagtaattgtcatatttaatatttgttgattgagtaaatgtcatagatggagatttacttatggttcattagtggtttgtcatattaattctatcaggtcatgtcgtttaagtgttctccattactaatagaaagttagtaagggatagtattgtggatttgtatatctctaggccttctcatgctggtacttgagtttttgtttggagagtaaggtatccaggtagtaataggtagtaatgatcatgcaacttaattaactagtaattcattgattacaatacgtgtgacttgggattagctttgtctatgtccctatgcttatgtagttgcaaataaatgcttgatcaaatgccttgttgtctaaaaatgatgtattgctttcttgatatttggttaggtccatttgactagaaggccatgagtgatattgaattaaatgtatctagtagttaccctcaagggttgtaatgtttgttttaagtgttatcctctttagtatagattatatatattgtgttttttatgcccatgctcatgtgcattatgcatatcatttaggtacgttaagggatc

SEQ ID NO: 449 - DNA, 1271 bp, Zea mays
  Intron number 1 from transcript GRMZM2G333454_T01 (locus G RMZM2G333454) derived from phytozome v7.0 (chr-ID 8; pos 2 1867772 to 21869042 reverse strand)
tgctctaacacagtatgtttccaactagcctgttgcagaccaaactatctagccatcttcatctacaaaacatctatactaaatacgatgttatgattattcgatcataaaagtcttactctctctgtcccaaattataatatgtttgactttttgtgccgagtataattggctcgtcttattcatttttttgcgaaaaagatgaaaaaatcaaatccatacttaaaatatattataagctaaacaatatcacaataaaaaatagtaataaacatgattttttttgaatgatacgagccagtcaaacttatgttaaaaaagtcaaacgaattataaattggaacggagtgagtacaaaaattctaattcaaataactaaactgtcggattagtagaagctcacttaaataattctaattggtaaggttacacaaacatatacaactagtactctaaggacaccataaactcctacacataatagtgaacgaagctaagtcaccctagcactactcactaacaaaactacacaagctaaactagggaactaccgattcttagctatgcaagctaagcaagcaactagttaagtataaaactacagcgaggttgttcttttgaaaatacgacacataataaggtaattgagtttatttctgagcatatcatacatagattcggcatccctcagacatattagttgttgatcatggaatgtcagttgtatccaaatagatatgaaattttgcttaattatataaaatcaagttgctcaatgtatctccatatatactatgctcaagcttattatattaataagactgatcaaacttgcaaaaaaacaaagatgatctaaggaggtaatatgatgttttgtttgaagctctatggacgtcttgcgtgttactaaagttactttttttaagctaatatgtaggtaagagaaaaaaaatatatgcatcccagaggtaaagaaacacctctacagcctctcacatccacccgcccacacgacagaaactaaagcccaccacttaactgcttggtttttttcttctgttcgtgtgggtctacaggagatgaatatgaagagctctaaagatgtttctttgcatttgggatacacatattttttttcgtaggcaagagaacgtgttacccgtccaagtaaatttagatgcatttagacttgcaaaaaaaagttgtatgctattatgtgtcatgatttgatgatagacgtatatcgataaggtagaaaacaggaaaattac

SEQ ID NO: 450 - DNA, 10886 bp, Zea mays
  Intron number 1 from transcript GRMZM2G143525_T01 (locus G RMZM2G143525) derived from phytozome v7.0 (chr-ID 6; pos 1 21766235 to 121777120 reverse strand)
cacagtgagattgcttccctccttgctatggtggtcgcttttggttgtgttgaaaacggagtggtttcctatcatatatcttggagtctattagtgtggtgcggataaattttactgttgaggtttagatgcttaatgttaacaattagagctacgatggatagaagttgattctgggagaagacttgctattagtgggatatttgttccaaagaagcatttgtgtttagttccaagtattttttaattaacaatagcactaaataacagaatgtgaggaaattctgttttaaacaaacgaagtgtaactgaaccagcattggtggagttacaccccagttttgcttaagttggtaattacaatatgtcgagcagcatgtaggaatgctggaattaggtgttgctctagttttaatcagattcgcgtaggatgctagccagggaattccttgtcaatttgagttgctattataacatgttttttcgtatgatatagtactaatagttacatggagtgctgacactgctaaatggttttttatttaagaatggtagtaaatcacaatccaacattcagatgagtgaattcctatatacagtatacactgtaggattcttgtaccatatgaattcaccaagaaagaataatttgcttgctgtttaaatgtccacaaaactaaaagtagaagctcctgagacgcttcatatgaattgctaacaagtcagatagatttgttactctttgttttgcgagcccaacttatcgagtaacatttagattatctttgggcaacattgaacgaccttggtgaaaataagaatgttttgcaggttaatcttcattttttctaggaaaatagctaggtaaaatctcctctcaaactgtgtgacattgacatgccaggacaaaaatccaggtgagaagaatgagctgtctgcacacctctctaccagatcatagcccctctcccttcagcaattgtgtcccttagaggatacgatctccatagaccacctcaaagacatccatcttatcctccacataggccagccaattctggctgcattgtctacatcgcagctatcatcgctggctcgctgctatactatcgaaagctatgtagttggttgtcaatgaacgatatatgcttcagtaaataattcaatacttcaactaatcatgctagaacaaaagaagacaatagatgaatagaataaaagatccttttcctattctataagtacaatgggtcaccctgcatcctccgctcggactccgatacaattgcgactggggccgcgcagtcattcggggcaggtggatgctattctcccgtttgttcaggttgttgatctggtggcgcccatgtctccggatcttgtggaggtgggatcagttgatgccccggctctcccggttgcttcggttgaggagctggaggcgcctggtcacccacccaatttggcattgggtctggcagtggatttgggtgagaacttccagtgtggcggctcgttgacaggcgatttatctcctgctaagctaagttctgaggatctcatagaagtggttcaggagaatgctatggaggaggttatctcagcagggcagcatggttccggaatctctcatttggtggctggtggtatttctgatatatgctctgtcagggtgaggaaacattgtccctgtcagtcctcgggggtagacagatggaaagctaagccgcctgttttcaaagtttattccagaagatggttgaccccggttcagcttgtccaggaagaccttatgttgcaatctgtggttgaaatggatccacctttgcaagagttcaagtctgggtctctaaaccacctgatggcctgttaccacccctcccccccggagtaccaaaagaaggaaaaagacaatgccgagtaattttcaaccaaggagaagtaggagagtggccagattccctccggagttgggttccaattcggctgctcatgtgtgcagacatctgggattttgtgatgataatgagaatatttcattcaaggatgccagcaattatgcaaaattatttgatactgggctttcgagtgagcatatcgctgctttggcgtctttgtttggttgggaggtgcctcaggttggacatgcttagttggtggtctgtaaggcagtgatggtagtggtagtttttttttgtttttttcatggagaatagctgttttcttatctggaatttgaggggtctcaatgatcgtgccaagagggactgggttaaaactctggttctggatatcaagccttccattgtttgtctccaggagaccaaattatgttccatctctgattttgatattctgtctattcttgggactggattcagtaattttgtttatagctccgctcaggggactagaggaggggtgttaattgtttggcgtgatgggtcttttgtctctgtggattcgattgtgaagaacttctctgtctcagtccagtttcaggaggagtctggttcttgctggtggttcacaggtgtgtacggacctcatcaggatagccttaagcaagcttttctccatgaattaagatcggtcagggaggagtgtgcggggccatggttattatgtggtgattttaacctgattttcaaataagaggataagaataattccaacataaacaggacaatgttgggtaacttcagaggtcttgttaattccttggagctaaaggagattcctttgattggtagaaggttcacttggtcgaatcagagggatgtgcctacccttgtgaaattggatcatgttttctgcactacagttgggaagattattttcctgattgttctcttcacagtaatgctacctcagtttcggatcactgtcccttaactcttaaagtcagagaggtgtgcttgggtaagagacagtttcattttgggagtttttggcctaagatccctggttttttggaggtggtggctgcattgtggaatcagctattacaggattcttgcactatggagaagatatcattgaaattaaaaatatgagctaagtctctgcaatcctgggggcataaagaagtgggcaatgtgaatgtccagttgggtcttgctcgtgaggcaatgcatagagtggaaatggcgcgagataacagaattttgtccagggaggaaatttggttatttttttttgacaatgggataccccctatttcattaagaaatagaaaccaaacatagttcttacaggaatcacgacaaaccaacagacacaagccgataagcctaccacaatatcagctacacaaaacattaaacccagcagaagtaatacggtcaaccaacaaaagaccgacagtctaacagataacactgaatatctacaaaggatatgccccaaaagcagccgggaacatcacatcaccaggaatgacaagaacactagtttttctctaccaaaagcagacacgctgtatacatccagaagcaaaagatgcatgagcagcagcaaaatgtcactggagacgcctgtcaaccggcttccaaccatgggccttgctgtagatatcacttgttatctttcgaattctgcggcttccttgttccaccagtctttttcccttctttgtctgtcgaatagaccaagcatcaatccaataacagcaggagaaaatcacattagatggatcatcaatcagtctagcattgaagcagcaatcattacgagtacgccaaatagcccaaataacagcaccacatccaaaaagaatcagcttcttttcaggattatgaaaactgtcaatccagggaccaaagaggtcagctgagttttttggggtagaagacaatttgaaagcaatttggatgattctccaaatgaatctggccacaggacaatgaaaaaataggtgatctatggattctaataatccacaaaagttacaggccgtattcccatgccagtgcctttttaccaaattgtctttggtcaaaatcttattatttctgaccaaccataagaacactttaattttttgcggaagtctggttttccacataaaattcacaggaaccacaattctggaattatttaacattttgtaaaaagattttaccgaataacctttgcaacccaacaaccaatttgaagaatcagcatttccagaaagcgaggcctggctacactgatccataaggtcactataggcctcacctaaagcaccaataagtcttcttctgaaagtcagcaactgaaaattagaggagacaaccttatgaacagtgatatctttgtcataagccacctcaaacaaattagggtatttgtcagccagcgtcatattgccacaccaaatatttttccaaaaactggaactcttaccatcaccaatctttattttacagtatttataatatttgtctcgaaccgagagaatacctttccagaaatgagaatctgaaggtctatccttcaccgaaataataggtttattcttaatgtatttgctttttataatggattgccacaaaccactagtattttctagtctccaaatccatttagccaacaaagcttcattcattttttgcaaatccaaaacaccaagaccgcccatatttttaggggagcagactaagttccaagcagccaaatgaaattttttctgatcatgccctccctgccataataatcttttcctgaagatatccattttttttaacacagctttggggcatttataaagagagagcatatacaagggaacgttggtgagactgctgttaagcaagactaaccggccacccaaactaaggaaccgaccttgccaggagcccaatttattctcaacctttccaacaatgggatcccacaaagatttgcacaattttttgttatcaataggaacccctaagtatttcataggaagaccactgggaggacaagtgaagatatcagcatatagatgttctctattgcaggcatttcccaggcaaataatttcacttttatgaaaattaatttttaagccagaaatctgttcaaagatgcaaagaataaacttcaaatttctagcattttccaaatcatcctgaaacagaaaaatggtgtcatctgcatattgaagacaacagcagccaccagtgacaatatgaggaataaggcctttgataacaccttcatccttggctttttggatcagacaagcaagaccatcagcagccacattaaaaaggagaggggagaaaggatcaccttggcgaacacctttatgagttttaaagtagggcccaaccacatcattagttcggatagcaactttgccacctttcacagtcttcaaaacccaatcactccataaatctccaaaccctttttttatcatcattttatgaagaaaattccaattaaccttgtcataggctttttcaaaatcgactttgaaaataaccccattctgtttcttccgtttaacttcatgaataatctcatgcaaagaaagaacaccatccataatatatcttccttttataaacccatattgaaggtcactaatcacagaagtaatgcaacgagccaatctgttagtaagaactttggtaatgattttgtagcaaacattaagcaagcaaattgggcgaaaagctttaatatcagtcgcatcagggaccttaggaataagagtgacaataccaaaattaagtctttcaatgttgagagagccatcatgaaaatctttaaagagattgaacagatcactttttatcacatcccaaaattcctgaaaaaattcagaagggaagccatcggggcccggagcactattgtgtttcaaagcaaacaccacatccttgatctcttccaaagaaaaggggttggtgagcagaatttttcagagaaatattcgaatcacgggaaggaccaaagagatttttgtaaaaggaagtcgccagctgattaatgccatggtcatcatgagccacaatatcaccgtgagaaagagtcgagattttcaacttcctttttttgtgtctagccatcaaatgaaaatacttggaattcacatcaccctctaataagaatttatccctagctttggcttctttgcaaaggacaattgcacgtctgaggtcacgtattcaatttttaaaagaaggtgatgccaatactcaattcttccaccgacatgcttgttaccgtaagaagcggaagtttatttcaaaactagaggatgatggaagggtgattacaaatcatgatgacatacaagaagttctggatggtttcttttccaaccttctgggcgctgattttcagaggcgtgttactattgatctatcaagctgtcatagggatgcggtggatcttagtgcgctagataatcctttcctggagaaagaggtaagagatactgttgcaggcctcccttctgataaagctcttggggttgatgggtttacggggaggttttacaagacatgttggaacattattaaggaggatctgctggctgccctgaattctttgcatcaaggaaatgctcataaacttgggttgctgaattcggactatcttatccttctccctaagaggttggatgttatgtcggcaagcgattataggcctattagtcttatccacagttttgctaagttggtcaccaagcttcttgccaacaggttgggccctcgtcttcatgagttggaaggaagaatgtaaacgatggaagctgtcttgttccatgggagatagttacaaggcctctaaaatttggcgggcttggagtttctaatttacaattcaaaagttgggctttacaggctaaatggttatggctgcaaaaaattgatccgtccagaccttggcatgggatgagtcttcctatacaacaacatgtcagacagttctttaatctgtcggttttttctgtggtcggaaatgggaccaatactctattttggttagataaatggttgaatgagaatgctatcaatgatattgcgccagccgttgtctatatggttgatcgtagagtcatctctaccaggactgttgctcaggctcttgataactggcagtgggttagtgatattgggagtcatctttcgctgtttggtatgcaatagtatttaaagttatgggatgttcttggggaggtaacgctttcacaggaggcggacagacatgtatggatgcacactgcttctggacaattctcatctaagtcttgctacatggctttcttcatggggtccatctcctttgagccatggaaaagattgtggaagacttgggctcccccaaaatgcaagtttttcctttggttagcaataaggaataagtgtcgtaccgctgacaggctacaaaggagaggaatgcagtacccggtgtgttgtcccctatgtgatcaagagcaagaaacatcctagcatatcctctacacctgcagttttgctagacaattttggcatcacattttgtcgtccatagggctaggtgatctcactccggttgatgacgaacaatcctttgctgtgtggtggggaaaggctcttaaaaaagtgtacaggtgcaagaggaagggtttcaatagtgtcataattcttggggcttggtgcatatggcttactcataataaggctgtttttgatggagtgaacccttccattagctcggttaaaaggttgtttttagatgagttgagcagttgggataaggcgggaagcatatagacaatctgggacttattgtcgccttaaatagggtctagtcgggcctgtcagccctctcctttgctttgtttcgccttattgggtgttggagaggaggcatgagtgttaggtcttggtgatcgggtccagtgtttttgtttttttctgccctatagggcgttgtatttcggtccactttggacctttcctctcttaatataatgatgcgcagctctcctgcgcgttcgagaaaaagtgtgtcaaatttttacaatattatacccataatatatagtctatgctttggtagaccctggaatctccaaatgttccaagatgtcgctaaactaccaaactgacaaacaagtactagcagaaggtaaacatataaaaagtcgacaacatctttgtaatttaagcaaaacgagggcatcacagtatataaatcagatccataacataacataacataagtatcattaatataaatcgactatatcaaaagtaaataaacattggtttgatttttagggtattagtctatctccagcagatcccctatcccatcccctatcttatcccctatttcaaactttactctacaaacagtgtcatctacagttccgcatcccctattttacactacctgctggagacattcttacagagagatacgagttgatctcttagaaacacataggtgtgtttccctgaaattttagatgtttgatattgttaatgtgagcttcatagaagtatgaaacatatgttaaattagttttgaacttggtggcaccgtggcactttgtaatttcattgcttttaagtaacgaaactcagacatggcccatggtgggagaatgtttaatttctcaattacttttgcattcttgataatttgatctatgtgcaccttaaatagtatatattattttctcgaatgctcgattagtcatgattactgtccaaggctacactttacaattgttcttaccgtgtacaacatgagtatcataatatcatttggactcgtacttttgagcatgaataggacaattatatagagctaaatgcgtttttacatttttattatattatattgttagtttatatatacaccggttatcccaccgagtcaccaggatgcgggttcgaagcagtctctccgcatttgtagggggagagattgtctcggtgtcgttttatttgtttcccagcccactcatgtgggagcctccgacactgggtctgctctttttacaaatgcactagctcttacctttatggtaaaatgatttcaaacactttagtagccttctatttttgatccatttgcagttgaatatttttatccttgtcttattgagcgaaatattgttgttttagctgttaaatgttgtaactaaccttggggatttgagagaataatcactccatttgtgaaggcaactatatatacagagcctcattggccatactggcctatatttgttagatgagccttcatatgcttaataaatgttacactaattatttttggtatatatacacacacacacacacttaaacttgtttaactgtgtcatctcggtttataaacttttaaagtatgtctcttaaagccttaatcactgttcgggtctctgttaggtccaaaacggatcaaaacagacccatctttcactttttcttccccaatctgaacgtaccacactagcaatcttattgcggattcactcgtgcacattttttttctttggccagccccctttccaaaatgcatgtatggttgtgtgcacttagttgtaggcttgcgtgtagcttttgtgcgtagggttggtctcccctaatctctgcttttgtgccctacgtcaaagtccaataccccattgtttcccatctctctagctgtacacacacacacatggaagctttctcacaacattctatgacgagaagattgtttgtgaagaaagcctagataaagtgagacaagcaagcaacgagagcatccaatagagagactgaggtcaacttcacaagagttacaataccaaatacaccgtagggtcacattctgtcgccgcgttcttacacgcttacaatagggacccaaccggtgttggcagtcgcgctcgtgtaccggtcaacatggccgcctccgcgagggaagcgcggagtggtctggagtggcgggtggccgtgccggagggtgcgtcggtgaccatggagcacgaggtgggcccctgcatgagggtgtgggcgtggctggtggctcgctttgccaaggcatggagcaatgtcgtcggggtcgcaaggaaggtgtggaggatcggtgccgaggtagacgttgtccgcggaacactgggtacgctctgcttgccgccgcctgcacctctcctgtgtcggctcgaggaagaagggaaagacatcctcctacccggtttgttttgatccgttttgtctctaatagagacccgaacaaggattaaggctttaagagacatactttaaaaagtttatggaccgggatgacacagccagacatgtttaaggaccggaagtgctctttactctctctctctctctctctagagagagagatgttattagtcaccctaggtgatgatcacccaccctgcgaaagggcctctagcgtaatggttaaggcttccgagtagcacctccaggtctcgggttcgatccccctcgggggcgaattttgggcttggttaaaaaaaatccactcgttgtgccccgcccgctctcggggatcgatatcctgcgcgccgccctctggctgggccgttgcagagtgggcaattgatcgacccgctagtgatgggggctagggtccgggggttttctcggccgggaccaatgtttcggtctcttcttaatataataccgccataccgggagggcggtctttccctccccggccgagtttttttatgatcacccaccctgaaatgacttaacaaatttaagttattggtgatctttgtaagtcattatttaagtcatttctgggtgggtgctcatcacctaggtgacgaatagcgctgctctatgtatgtatatatacatagtcttatgtagttaaagattttaatacttatcttaactagcaaagcactattgtaactaaatattttagttcttcag

SEQ ID NO: 451 - DNA, 3492 bp, Zea mays
  Intron number 1 from transcript GRMZM2G010357_T05 (locus G RMZM2G010357) derived from phytozome v7.0 (chr-ID 6; pos 1 55129916 to 155133407)
atcgcctcccggtcggccgcgccacctcccggaaggtatggcaacagtcgaaaccttcttcttttcattcctgccgtagaatgcttcctgcgctcgccttatctcttgctgtcgttagaaccgatcctaattccattcctgtgatccggtggctttggtcattagatggtttcatttgttgcacctgtcggtgaatcactgtcgtgcaggtagataacatcggtagacgctataacttttgcatctctgatccggtggttttgagttggttgtttgtgcttagctttccttcccagggacggatccaagcaccgtactgaggtgtctgagacgctatagcttttccaatcgcgtagttgtctatttttgtgcgtggtatatggatcagagaaccctctttgcagcagaggtttgttccttgtttatgctgcctgtagtcgcatgtcagtttaaccttttgagttctaaaagtgtttgggagacccattttaatcgaaagcacacgcactcaggtgctatgtcctttgacatttcatagtcacctatttcattgatgtgcgagatgcaccaggatagcacccttgtggcaggaacttacttttgtttgcttttctgctgcctgtcaaatcctgatatttgtgtgtttgcaaacttacttggttgtttaattcattgctattgattgtcaggtattgtgcttgtataattacattttcatctggtttctattgcatttgtagcagattagttgtagtcattgtcctgcaagcatatagtccttgggaagtatatgtccagtcgagttttgcgttggctatgcgtgatgtgatttaggtttcctttccttgggactgatcagagcacatgtgctgtggccataaagctgtttcgatagcgtagctgtcaaacttttgtatgtactatatggaccaggggacctgctttgcagcagagatttgttctgtgtttttttctgccagtagtcacccgacagctaaatcttttgaggttgagttactatggtctttggcatttcgtagttgcctatttcattgatatgcgagatgcacgatagcacccttgctgcaggaacttagttttcctagtttcttctgcctgtcaaatcctgttatttgtgtgactgcaaacttaccttcctagtttctgcttcctgtcaaatcctggtacttgtgttagtttgagaatggacagactcttgggaaagtgtgcaaactcaggaagtcactctatggactgaagcagccaccacgtgcatgattcaaacgagccatgtgttatatggaccattatcaatgaaatggagaccgcagtcttctacaaacatcaaggctcccgtatcattattctggctgtttatgttgatgatatagtgatcactggatatgatgtgaaggagattaagaaattgaaggaaaagctaagtagagcctttgaggtaaaggatcttggaccacttcgattcttttttgtgattgagattgctaggtcagctaagggaattattctctcccagaggaagtatgtcctcgatctattgacagtgacatgaatgcttgggtgccacccatgtggctcacccattgataagaatcaccaaacttgtgctgggttaggtaaccctgtggaccgggaaatatgttagaggatagttggtcgactaatatacctttgtcatacaagatcggacattgcttatgcagtgagtgtggtgagtaggtatatgcatgatcctagagctgggcatatggagttagtttatcaaatcctaagatacctgaagggaacccttggcaaaggattgtggtttagagcaaaccaacacctaaatctggaagggtattgtgatgctggctagaagcaagaaggaagatatggtgtctcggtccactgcggaggctgaacatagagcgatggatttagctttgcgtgagttgatgtggttgtaacttgtaagatcttccaaaggagcttcggtgttgaagaatgagactatgttgcttaattgtgataatgcatcagcaatcaacatagcaaataatccagttcaatttgaccgcatgaaacatgtggagattgataagtttatttttatcaaggaaatattgatattggggctttgaagttggagtatatcaagtcttgtaaccaattagcagatagtctcacaaaaggtctaggtcttaaggataatgagttggcatgtaacaagatgggaatgttaaatatatttagcccatcttaaggggggagcgttggtgtaaatagaacaagtgtaaatgaccttcttgtaagatgtggaaatatgatgtgtgtgtgggagtgttgaaagagcaacacacaaactattcaacaattttgtggccatacaagaaggtgatcaagtccggaacgatggtatacatgatacggtaggggtagcactaattgaagaaaatcgtgtccaacaacatttgagatggtttgaacatgtccaacaaagacctccagaggcacccgtgttgtccaacaacaattctactgcaacaacattttctgtgttgctcttttagcacccacatacacatattatatttccataatatcttgcaagaaggtcctttacacttgttctatttacaccaacatcaacgcaacatatgtgtttccacaacacttatctgctgaagatgtcatgtttttataggccaacattatgcatcatacaacatagtatgtctaatcgctgtcctatataaacttgccttttagcttctatggtaacctcttgtcacatagaacgttagatgtttgatgccacttcatccacactgctttgattctatggctaacgtcttcatcaatatccccgtctctctatagcattgatcctaaacaccgaaaaggtatccttcctagggactacatgatcttccaaattaacatctctttcctcatgtgtagtagtgccgaagtcacatctcatatattcagttttagatctactgaatacttaggttgtgtaagcccctatcttcctaaatcaggtttaatactttgtttttgtcttcgtagtttggtagcgcctattagtttcttcaatcttaatatggaatatttcttctgcatcagtactttcaggatataacatattttggatctctggctgcagtgaatagtttcaaacttccacaggcacctgataccttgcttcataggagcttcatactattgcactgaagtccccattcccaaatagattcttcatttgttattattctttattgctttaaattagaaatcaacttttagtctagctttgcatctgttaagtaatctagccatgtttactattaaaacttgctatgacaatgtgcttgtttagctttcatttttctttattttgagtaaaattcgtttgttgaaggatatgattgtataattaacctgcacatgtattatctcttcttggacttcagattggataacaatatc

SEQ ID NO: 452 - DNA, 4576 bp, Zea mays
  Intron number 1 from transcript GRMZM2G168877_T05 (locus G RMZM2G168877) derived from phytozome v7.0 (chr-ID 3; pos 2 25836203 to 225840778)
tttggagaagactcgcgctagaaagcggtactgggtgaaaactgcagagcgatctagagctcgcaagcctgccattgctctctgtagcaatagaaatcccccaacccacccacccacacaagttgcaattgccctcttacatctattttttggtggaacaactaaattgacattgaagaagttttttggagtgtgctcgttctgcaattagaagacttctgtaagatcattcttctctttgtttttttcatttagaacctatgttggttttctgattttcatggaccacataaatagttatgtattctgtttcatagattcatgtctatataacaatttatttgaaaggcatttatctgtgcagggagagttctataattattctggtttgtagtccgtgaatttatagtggattgcttgaggtacaaatttgtatataacttctattaagttgctcctaatttccttctatcgcttgtcattctattagatgatgcaattttttgaggtatagatagcaatttttgtattcaaacaaaacaaagaaacaagttatctttaattgacattctatcattgactatcagtgtttaagctatatatttgtgaagataaattgtttatacactaataactgagtttgatgttgtagatactgggtaacaggaatgcatgtttatgattttcgttttgaccttgcattgcatctacaatgaccagaggatgcaggtaaaaagttatttttattttctctgtattttgtctttttagacatttcttaaaccaatctttcctttgccagtctatggatccagttaatgtgtatggaaatccaatggaaggtgacatgattacaacagggacacctcttgttgtcccaccacttattgacatgattagcaatgacccaatttttggtaatatatgaacctaattggctgttaaatatgcatagcagtttgtataataatcgatttcctcaacatattgtagtttcatggttcttgttctcactacttcctccattgtatttatagcccattgctgaagatgggatgcaggaggcctctatcaagtaggtcaattacctcattaacagggacacctcttgttgccccaccacttattgatatgattagcaatgacccaattttttggtaatatatgaacatgattggttgttaaatatgcagagcagtttgtataataatcaactgcctcagcatattgtaatttcttggttcttgttctcactacttcattgtatttatagctcattgctgaagcatgggatgcaggaggcctctatcaagtaggtcaatttcctcactagaatgtttggttagagtggaatgtaaaggtaagaactttatactttcagtgacttgaaagtctttttgctacttggtactttctaaagaacaaatggagccttgtgcccttgtatgcttgtgagttatgcatgttgtgtggtagcaaattccaatgtggagcagtataaccatttattggtacacgtttctatgcattaggactcagttttcctaaagcttcttttaggtacattcttaatcttttttagaacaatgccataacctactaatagttgtttatcacgatattcttttgttccaactattccttgtagtttacttgggagttttggtgctggtaggattttgataatagtccatggtggaaaaagttatagcagaaaaagctctattttcagttttccatcgaacatcattttgataggttgaagagccaagacatatttgtctaaaaatgagaattatatatgtcacaataaatattgctttcctagcctgaaatagccaacatgtcacactacaccgtaacaaagaacagagcttaacaaagcaagaacatattaaaccaagtagttattatctgcaactcctttaggctacagaggggagaacaaagtcatattatatttcaagtaaacgaaagaaaacaaaacaaatgagaaggaactagcagactagatagccaaaagttaaaagagataatcacccgacatccaacaagtcagtacaataacaaactatttgcatttcctaaatctaaaaaatgtccattgatccaactatatctcttttacaatatctattcatatgtatttggttaaactgctaaaatttccagcctaaaatcggtaatttttattttgaagaataaacaaaacatcgttaatctttttcttatgtataatcgtttcatatcagaaggcagcatagctggaggaactgctggcgtgtgtggaaacatcactttatcctatctctacttatatactaatccttaagggtggtacgagggcgtccacagcatccgtgcccccgcccgaccccgcgcatcccgcagccctcagctccccgaaaacctactgtgtcgtacccgacattagcgcctccgcacaatgccctgcccgctcgccacgcagccttggcgccgtgaccgccgcctctgctccctgactccgccccgcgacgcccccagcctccaaaccgcgcccgctccccacgcgatggccgctcatctcgccgacgcgccccaccgcagttcacacccgcgccccggctcccccgtctcaccgcgcggctctgccagtgatcgtcgattcgcctcgccgcgctgtctaagagaaggaaagaggagctcaggacagcggcgactggcgcgaggtgcccggaggcagacgtgacgacgacgaggcctttgtagatctcagcaggcacggctcgcctccgcgtgggcaagctctaaggcggcatcccttcccttctcgccgacttccattctccaccgcactcactccatttttcatcgtgattccttcctctccatgggcttccatgaaccctagagctcgcccgtccatggagtacgtgctcaccatcagcggatccccaggtcgtacctactaaaccctagctcgtctggtcctgatcccccaggttctaccccaatccgcagcagcctccgcctcgggctcacctcccgctccatctcctctgttgcctcctcgcgctccacagcggcgtctcgatccccgaggccgtcgccttcttcaaccacattgccccttctgttgccaattagctcctcgatttctactcctcttgactggcattaatttggcgctactatctaccttgatttactagcaagacattaacctgtgtattagttttggaactgggtaacgtgaatttgggtgtcaaaattcagattctgaagttgctcatttcctggaaacaatatttgttcgttttattttttttaattatcacaaccagtatgatctgttacagagtttaagatgtttttttccttaagtcaaactatgtattaccagaaaactaagcaaattggcaatcaaactaactaattagtgaggggtaagttagtctaattgccagactccttatttggttctaaaattgcttggatgccttgtatttcaggatggatggagtgtttttttgttgtagttatctattctatctgatgagcatttctttctataatagagacaatgtttctttctataatagagaatatgatgagtgttttactattggaacttcatatgctaccttttttagtgtcatttctatctttgcatattttcaaattacatgtcatcctacagtagtggatggttcatcataactgatcagttaaattatctaaaacaagtagctaaatataattagtagtaaaaattacagatttaagggtttagaagtaacatgtatttggtgttagttttttacacatgtgaaagctatttgcttcagtacatagatctctgcagatgataaagtaatactaggcttgatagtattgtccatcatttgcttcagtacatagatctttgcttcagtacatatctctcacttcctatccaagtgcttgctcccagttctatagcactctgcagatgatttgcttcagtacttagtggctattttttctactacactggttaaagaaaaacagagaaaataaaatttgcatgtgtattatagttaacctatcatatataattatatatatgaaagtgtaagttgttgctttgaaaaacttgagacgcactcaaataacgcaagcagagagtatttactcagtctaaatacaacaacaacaacaacaacaaagccttttgtcccaagcacgttggggtaggctagagatgaaaccccgtatgaaaacctcagagctcaacccccaaagaaaacaggggaaacaaaggcaaaggagaaccgaaaacgacgaaacgggggaacacataaaagagataaaacccacaagaaccagcaaggtctaaatgggcacaagaaaaggtcaaacgatttaaagtagtcacttttttgtcattctaaataatgaaatagttattattaataccatgggatattcttattttgtgaaggcatctaccagaataggaaaaggttattattagtgctactgctatcagttcttagactttggtttaaatcatctgaattttttcaattgttctgtcaggtctggacactct

SEQ ID NO: 453 - DNA, 6710 bp, Zea mays
  Intron number 3 from transcript GRMZM5G861871_T01 (locus G RMZM5G861871) derived from phytozome v7.0 (chr-ID 3; pos 3 4501311 to 34508020 reverse strand)
acacaacaggtgaggtttcctgaacaacatggttttgtccatgtaaaaaactaaatgtcttctttagtgtatatgcccttagtttctaaagtgtatctttaaaattgtaccattgtacatgctatgaattatcagctaccattaatgttgtactaggtagatacccgtgctttgcaacggcatataaaatattcgacaaaatatcacttcaacaactcaatgaccttgcatcaagtagaaccagactaattgctccacaaccaatgcatgccaatattcaatgtgcagcactcactcctgcttgcactcaacaggtcgttcgctgctgcccttccccctccagcagcccccttggtcttttgttccaaagaagaaagaaaatgtcaaaacatacttagaacttagaagctggaaagggtgaagtgatattcctcattagagaaaaaaatgtttccataccttgtatcataatcatcatcatccgcgtcatctttgtcttcatcatcgtcctcaccatacataacttcaaattcctcatcttgagtagcctctctagtaaaccatgatacaacatgtggggtaatcttgtcactgatggtacatatggcagatatagaaaggataatttagaagtaataaacaaattcttaatcttccattttggacaataatttatgggcttttagataaaagagtggggcttatgtaaaacaaaaaaactattatttcactattgtagtgtagcaatatctggcaataatattcgagtacacctaatttcgaaagattagagcagatgatgagcgatattttcccaaaccattataataaaaatagagacatgagaaacgtaatagatatagatatagatatatagagaaacgagatttgtatcacgtaaatattctactgcagctaatttccaaagaaacagatcgatttatatccttgctcgcttctcgtcgtcgccacaatgtcgccagagcctcccccgtcttctctgtcgccaccatagaggaacttgttgctgaccttttcacgccaccctcagcaagaagcagcatgatgaaaggaaggtggagaaactcctactttatattagtataatacaatgcacgtacattgcgagaacacaaaaattattcgataaaatttttgcgcatatgttatcatcgactatagtatatattttctaatggccaacaattgacaacagttcaaaggaaaagtcatgtacaatggataataaatgaattattcaacactacagtatctgcgtgcttctgttagccatgctgagatgacagtaagagagacgatggacttctctttcaagatgcttggaaccaataatgaatttggtaagtcatactcttgactatagtgtgctattcattttgaagaccattcgagtgtgctgtaatttaaatatgtatagtattaataaagggagctcatccccaaagcacgatgctcaattcactcaaaggaacgaaaaataggaccacaataaacatgcacactttctatggatttacatgtttattataacatcgcccaaaaaatgttatagtttcactacaccagaggaagtaaaacagaaagagttttggttccttttgaaacagtagtttgttttattagatgcaaactgatatgctcacagatctgaggcttgtttatatgtagaaatcaatagcagtacgttctttttctttgataacctataataattttttatagaaagtaggaaaatatttatgtataaaagttaccttatctgctaaaaatgatacgatttcactacacctgagaaagtaaaatagaaatggttttgcttccttttgaaacagtattttgcttggatggaaactgatacgctcatagatccgatgcttgttaatgtagaaatcaatagcagtctgttcttctttgctaacctaaaataatttttttgtgggagaatagtagggaaatatttatgtacaaaagttactgtgtctgctacaattgctgatggtgcaaccaggactttagacctgttgatgaaaatcaataaattttttggtgcataaactaagaagagcacgcagtaaaaaaaattatgtaatagcagtggacttctgaaaagaggggggagaacagcatgagagttcatgtacatacaaaatatcagatttttataaatgcatgcattatggagcttgacaacttgggatgcagcaatatggagcaaaacaacatttttgttgtttgatgcagagcagatctgcaatctgcttgcaaaggtcaacactgtaggttgggatatcatagttgagatcccctaattgcaaaggtcaacactgtaactcgcatcccctaattgcagacttgcatcgacaaaagagcatatgcttaacacaaaataacacatggctaaacaaatatcattttgcttataccaaggttatgcacttgtgctcctgtttttatgcacaaacttacattgcacattagcagaccttatcatgcctccgaaatgcagcctgtaacacatagatcatgtaggggtcattatttctcgatttactgtaacatgtacaattaacatatacttacattacacctatttgaaaaaacgaaggaatattttgcatatatttttataccaagtgcagcgtctaacttaggcattttccactataggtgctggatgagcccaaagtttgcagggtttcgtaggcctcgatttccatcatcctgattgtggcatccttgagacggttcgtcatgtcgtcgatagctctttagtatgtagtctagtggcaggttgagatgagcgaaggtcaacacggggcctgggaattgaatatgtagatgcagagggcttacatggaggtcgaactcacgatgacttgtgtgctctccgccagcaacgatgtgggcatgggtgacaaatgacaggtttggaagcacatatggaactgcatatacatatgtcagtacgtcactctgtaaaattacatggttcattgttgacgcgtcgtgaatagctccgtgcaaaacatcaacaggattggcaatggtgcacatcaattctggctgcatgattccttggttaaatgggccagtaaggccgcttgatcctggttcaactccatagaaagcaagatgtctgtcttgtgaaagcagcatctgcaagcaacgatttacactgaacaaagcatatttaaaaataacacctagagggagatatggtgatcgagtgggtggctttacacctagaggaaaagcatgctgaaattcgccccgggatttttttgggcaaagaagtagacaaaaagcaccatgaactaaccagtgaggtagtgaccatatataaaaggaaaagcatgaagcagatcatgaactcaccagtccatcagtcatcagatattaaaggaagaccaggaaaaaacaaacctcaaggagcataagtttgatattttagccatagtgaattgggttgtgaacaggactggtgatttgctcctgaattgagtctcatctattttgtcgattggggtacaaatagcatgcaatagatcaaaggaatgaaaaaatatcacacaacactaatcttcttttgtccattgtggcaacaggaatgtgccaaggtagtgtcttcttttatcctcctaagtaaaatggcaaaggaaccaattcaatcgagggcaattaattaaattggatggcaatgaataagaagtatcatgtgagcagattaaaaagaaccacataagaccaaaaaaatctcatctgatctgctttggccgtgaggcatgggccgcctctagatgtccacggataacagcttgcagtttctatatatcactaaaagatcaatcagaccaatatggcaggtttagacatcccaggcatgtaacatgatgaaaaagatacaagaacataactaatgaaagtactatccaccataatcaatgactgtcataagaataatatataccaaatataaagatctggaaatataattgtggacgcaaagagcaagactgatattgttgtctgtcctgaattcgtcagtattaggctaaacagagccgaaaacacggaaaagtggatctcatctaaaactgagcatggcgttgcatagaaatgcaggatttagtcattcaaagcatgaagaacatttttgcatatatagttaaaatgcgacattggactggagcatatgttgacggtatagaatggataggtcatagacattcttgctgatttagcctgtcaaaataatatattttcttttgtagttcataggagcaaagagatccaagaaaatcattgaaaattacataccaagtgcatttcccaatacatgatctgcataaaccacgggtaaccgggtttggggattttgctgttgctgttgcggtgtaggcaaggcgagctgttgctgtgcaggattttctcggtatggcgggggcatggacgtgtgggcgcccacgttaggtgcttaattagtagtagggatatcatttgtagcagttacttgaagtgggttctaacatgtacacaggtttaaaaatggtacctgatctagtcagtcactgttgacacaaggcaccgatgggtccccagaatcttggtaatgttatgtcattagctgcatatgaccaaacgataatttgttaatgttaatagcaaaatcatttgataaatgataaaagattggtttacacaacggacaaaagtaggcaatgcaataaggtaatctacatgtgaacacattgcgagggaagcgtaaggcctaaattttttatttaaaaaaactgaatagcaaaagtttactgattgatttccaggtgattgtatccgaagcctgtcttgtttggaacaaaaagaggcttaaactacaagcattaggtttctcgtttgataaagtatacaactatgatacaatttgctactttgagtaaactgatctcttgagcatcagagaagtactgattgttaaataagatactaagatatactgaacaaatgcacaccaggacgggttaccaaacaatactgctttgacaatcctcccaacattattcactttaatggatccaaaccgacttgcatctgctcagcaaacgccaaacgtcgtaaaagggaacaacgtgaatcaaactttctggcgagctgaatcctggatcctctattccgaattgcacacacagaatcacaggagaaagaaattaacagacgcaaagagcaagttgcaaacaaagcagatcacggcaccttgaggaaggcccacggatccaggcggaagagctccttgatctgcgggtacttggctaggatctcccggcggcacgacgcgtgcagctcgtccgtgtacgaccagaagaagtccgtttcatgccaccctcaacaagaagcggccagacgggaaggcgtacttggcggcctcatcggcgagctcggcgtagcggcgctgcgaggcggagagcacatgcgaggccaaggccagcaccagcgacgcgcgggcctccgctccgctcacacgggtgcccgcggccacgacgacagtccgtggcgagcggacgtctcggggaggctggcctggggctcaaagcggccgtggggaagcggagcacagcggcgacgacaccatttgatttccccgcagctggatcacagactgggagcttgaggcctcctgcacgagcagcgacggcgggattcaaagtcaaccgcaaaaaccccaaaccctaataaatcttcgccggtgcctttcaccgccgccatgggtgggggaaggggggtgagtcgcaggggcaggggcgtgctcttgcagctgaactctacctcgcggggatggtactggtacttactatgcatggtggcgacggggtccatggatcgacacgttagcgatggtagatacatcgttagcgtcgggttctgctcccactctcgcgcagcgaggcggcggcgacgcttgctgttggagaggaggcggtggatgggttgagataatggcgacgacgagatttgcaggggcgggggaggcgagattcacagagacaggggcagacgagattcatggggcaggaggagccatcgcggctgatgaggaggtggcgcaacgcacgggcacgaccttccattgatgcgatgcgagatttcagggtggggaggggcgcggacgcgtgcggcagaaccgtgcaccacccaccactgtggacgcctacgatagtctcttaatagtagtagatatgggtttagttttttaatttatgctcaaactatgttgctatattttttaaccctaaactaaacacatatttttactggaacaatgatgtcttagccaaagtgttggtctaccatcacaaagaaacagattgtacttgcagcatttcatgaaaatagaattttaacgcaccataatcctctttgttgatgatttggtaattccagttggaacctcaatttttctgtgggttatggtcgtttaatgttacttataccaaccgtgtgcttttgtaagccttctagactctcgccttatttcagtctttgactatttcagatagagcttcagttattggttgatgttattttctcatctctcaatttatacctgctagcatgtctagagttaactatatatctactctattgtggtattttgtgtagccctgttaattattgtgcagcagcggagaagatcg

SEQ ID NO: 454 - DNA, 2548 bp, Zea mays
  Intron number 2 from transcript GRMZM2G448741_T01 (locus G RMZM2G448741) derived from phytozome v7.0 (chr-ID 1; pos 7 9074483 to 79077030 reverse strand)
gaaggaccgccatttaaattcaagcattccataaggtcagtagtcattactggtttctgacctagctaacagtgtatagctagctctttgccataattatttgttatgatcttgcttatcttttgccaatgggccagatatacacatctgatgtggattactttactacatttattgtgtgaatgaaaaccttcatttacccctttatcagtgatgtagtcatgttaacacgggtgtcttctattagaacttatcatgtcctacatttgcttatgtagtggattgaatcttatgaatgtttatgtgtgtagctatcttgttagtttatcagtgcctctttgagtatccattacagtccctgggtactgtcttggtttaggtaggcccaagcatctcttgacatttatctacattatcaatttgatctaacctatgcaatgtttattcagtacgatttttgaacaatctctgagttcgttgtatggcactgcatgtgtaaatgacagctgctccaggctcccacctcccattcacacgtgtgtcatatatggatttcagggattattccatggcgtagtcataatttttaaaaaacagaaaccctacaattaatgtcaaaaactaacctttcgttgcatctgcagtcaattctaggtgaaaccactccttggataaaatagataagtagatttggatatattgatatggtcatgcttgtatagaattcatgtcaaaggggattcaagaagaggtttcatgcctgattcaacattgggtagtggaagcaaagttggtgtggatgtgttttgtgtatgtacattaaatgccccctcaaatttagctttgtatttacgcttcttgtgcatagtttgccagtaaattttagccaactgcatgtattgcaaaccatgagcagaagttccttagatttttattgtcctgcttcattgcaacatgttcagttctgcttcattgcaacctgttcactgacaatgttctttttgctgtagctacactgggtatgggaatggaggtcgttgagatgaaatccctactactattaagcacgtagtgtagactcctagcgctaccacgcccccacctccctctctgcgcacgcgcccgcccgcccaccctgctccgtgcccatcccctttgatatggtccaatcataatacagtctcttctccctttgatatatagatttgggggtttggctccacctcccgtgcctgatccgggccgtccttttttctcttatctctttttccttgataaatatttaatcggtttctatgtgttgttcacgcaaggatcatcagagaggaatctcaaagagggtcgtctcatcctaggttcatgtatctggccaccctgcatccaattattttttccgattctttatatttttattttactttttcttgttgtttgtatttaagtttgtactaatgttgtgctcctaatttactatcatacttaaaaatgcttgattttttctattcaggtttggagggagaatatggagatagaagtctcgcatgcattgttaaccaattggaaatcattcattatttactttatgagccaataataatggtttcattctgttgcattgctaaaatatctaaattgttgaaactttttgtattactcaatgtgttctggatgccttcataggcaagacctatagctgtcggtccaggatagagaaggcctaggtagtccaatcgatgcctaaagggggtgaatgagataagcacttgagataagagtaaatattttagtctttatccttagagatatggctagattaggatgaaagagatcttcggactcaagtttccatacagttagactgtacctttttgtaatgttttcttcttgccctcttcaatctaggttaccaatgccctagcacatgctggtctcgagtcttctaatctgattgtcaggatcaagagcaacatttggatagagttttgttaaattttggtagttttctatgtatcttagcatgtttgattgaactaagttgaatgtctttgtttagatgatcattcaagtatgttgaaataattttaaccttccttttttctagaggcaccaacattctctcttttcccctacacaaacgatattttttttattaatgcactgtacatgtcccatttttagatgacatgtaaaggatgtgtttatattttttacttccatttctggattgggaaagattctagctaggtaggttttctgtgactgctcattcttttgcgatgagtgtaattcatcaagaaatctgagatttaaatgggacattcctcaagaaaaagatgtcggtattggtatgcagattgtcgtgatgattatggagatactcaattggaatctagggagagaatcaggaataacaatagaagttacaacactgtattttaaagttatatcccttaacttgtacgaatattaatatattagtcgtctgttcatgtgcctgattggagactgactctaacatgtttttttcgtttttgtccctatgtgcagg

SEQ ID NO: 455 - DNA, 2047 bp, Zea mays
  Intron number 3 from transcript GRMZM2G118437_T01 (locus G RMZM2G118437) derived from phytozome v7.0 (chr-ID 4; pos 1 63671884 to 163673930 reverse strand)
catccaagttagaagtaataaggtacttgcttttcttattagaagtaataagatacttgcttttctgctatctaattttggtaagcccaactaacgtgaaaaaatggcttcacaacttaatcgtgaacatgcatttttcttgacaagaatttatgttttgccaaatgctaccagctcggatggtattcttgtttactcctaacacactttattcttcatgattttttggtgctatattatatatgaaatcagaactttttaaattcaaagcagtttgtgtggttgttagtgttgcaagtattttgttattcctgttttggaccatttttctaccatcttgcctgtaagttgtaactcctgtgaacacagaaatactcaagaatttgtgatgttttcactgccccttttgataatcaattcatggattagtttagcacatcactcattttttcttctttgtttgaaattgtttgggttcctcctccccaactttcagaattacctatttctattgtatgtttgataatttgcacttccactccatccacaattttggttaattcagttaatatgagtttataactgggaatgtcattcagtagtataatgtcatgcagtgtcggctgtggtggagcggctgtggtcgctctcgctcaaatccaccaccaagataggtgattattgaaatctctctgctgttttgttccttcttcgatcctgatttgtgttttcctgtgatgtgtttgctcctggtgttgcagcagcgagcgagggcaagtcaatggtgaagtaatagggttttgggagccgcatcatgcatgtgctgctaaccggaaccttgccttgtctgttgctcaatgtgtatgtctaggccgtggcgagattgtacgaggctctggacagatgcgaggagattcttggcaagcgacgctatatttgtggcgaccagctgacttaatcagacagattggtatctttctaaaactcagcaaaacatatgctattgtccaccacacggagcagtgagaaatctactaaatcataataccattgagtagcctctactaaatcataatcattatattttagccaaaatctataaatagattttcctacattagacttataactacaacttctattttctccagcatttagtttgtaaagcagtttttacaatgagtccagtttaatagcactaataataatataggttgcttgatgtgcttttttctgcattccattttctccatcttttagtttacagagcagcttttacaattattacagtttaatgtcaataatactacaatgaattccctattgcacttcttcttgtgtaaattacagtcaactattgatttgttaaaatgtttcttatagttttgtcataaacaaataaaactctttccattttatctgtcacaccgtcaccttagtagcagtttaactacactgatgatagttgtgcattatccaaaactgacactgaatataattctccctcaaactaagagtcgcacaaaaacatgggtactgttgctgatgtggcaagtatgagtaatgatgaacaggtggccactgatgcagctagattttttttcttctgttgctgctgctcagctcatgtgcatgtgattggagcagatctagcacatatgatgtgctacataactaacattagaattgtactcgaagcagatctatctaaattgagatgaggcctgatctattaaaattgttgctgctgatgaactttcttttatcggtctgtggggattgtttttagataacttttgtgattagcaagtgatgattccttgtaatcttgtttgcagcggaatgaatgcaccgagctgagaaaggacagaacaaagaaagatcttaaaatctgaaaaaacctaatgtgtaagtggtttttatgccctggtacatcttaaagaccaaatttgagtacttctttttgttgtacttgagctgatcatttttttatgctcctggggcctcttcaggaggcggtcgcgcctgctctgccgaaagtgcgggg

SEQ ID NO: 456 - DNA, 4576 bp, Zea mays
  Intron number 2 from transcript GRMZM2G063144_T01 (locus G RMZM2G063144) derived from phytozome v7.0 (chr-ID 8; pos 7 4684083 to 74688658 reverse strand)
gagcaccagagctctgtggatccttcttctccaaggtgagctttctagttacatatcattatttatattatattcactaataattaatgtttgatggtcccataatataattaccaattatgattgtttgatgatactattcgcttatgttttcctccttgacaatgagttctatcatggtatgctatttcattttactcttaccattcccttgttactttctggtagaatccggtaggagctccaactcctagagtgacgctctttagtgtcttgttatgaatggttctatccaaatactatgaatctggataaagattctcatagtaatttcacatgagaaattttaattaaaatctgtccatttgtaggtacagatataaatgatctttttggttctatatgccattttcattatgtggtttatttttgtgcatgaatcaatctgattggtatttaccttttttgtccctattatgcaccaatagtaaccaataacctgctttttttttagaaagcgcaggagaactgcgcatcattttaattagagaagaaaaaggtccaaaatggaccaaggtacaaagccctaagcaggctcactcaaaacaaaaaaaaaacatacacacaccactccctagaccctgtgaaggttacgcgcaaacactaatgcaaagctctgaagatgcttggcaccagccgtaatccaacacccaatctcatcaagaaagacgcatctgatagagcttagcgaaggggtctccccatcaaagacagccttgttgcggtggatccataaacaccaggcccctaaaatgatgatgctgttcatgccctttctcttgcttttatgtatcttcttacttgtttttcgccaccaatcagcaaaggagatctcatctcttgagggagagagattaccaacattcaatccaaatagaatggaatgccagaactgtcttgcaaagacacatgaacacaaaatatgttgaatggtttcctgctcttgatcacagaataggcaagacactgggtggtccagacctctcatctccaatctatctgaagtccaacatttattccgaatggccaaccataagaaaaacttgcacttagggggagcccaagatttccaaagcctcttccaaggttcaaacgtaatagctcccataaataaagccctgtaacaagacctagaagaaaactgaccagaggaagtatgcatccaggtgtgaatatccgcctcctgagttaacacaatattgctaacagcatcccaaatcagcaaaaattgttggatccccatccaggaaagaggtgtcaagatgtcactgatccattgctgtccttcaagagcctgggccactgttctagttgagacaataattttatcaaccttggaaacgacaacaggagcaaaatcattgatgcagccgccatttatccatctatcagtccaaaataaagtgttgtttccgttgcccaccgcagtaataactgaagcatgaaagaacttcctgacctgcgacggcacaggcagcataagcccatgccagggcctgtttgagtctgttttctccagccacagccatttagcttgtagagcccaactctggtaatataaatttgggacaccaagtccaccaaaaagaagcggccttgtaacgacatcccaagagactaaacaattacctccattcacgtcctttctgcctctccataagaaccctctgcgaatcttatcaatcgatttgatcacccacttgggaatactcatggcaatgaggagataaatagggatggcagagagaacaaaacgcaccaacgtcgtcctgccagcgagattaagtagccgagccttccaattggggagtctatctgctatcttctcaacccagtccataagatctgcctttctgagctttctatctgaaattgggagacccaaataattacaggggaaggacgccgagctgcaacgaagaagattgcagcccagttgcacagcctgggcgctacatttgattgggattgcgcagcttttgctcatattacacaccagtccagacgctgaaccaaagctgtccaatattaccttaacacaattcagatcttccactataggtttaacaaacagaaccacatcgtcagcataaatagaaattctgtttaggacattcccttcctgaaggttatggagcagccctctatcttcagcgagcagaaacaaactgctaaggacgtccattattagcacaaatagcatgggggaaagaggatcaccttggcgaagccctctccgatgcctaataggaagaccaggagacccatttagcagcacttgagtggaagatgaagccagcagattcgaaatcaaatttcgccaaatatttccaaagccaaggtgagaaagcacctcaatgagaaaagcccaagaaacggagtcaaaagccttggagatgtccaattttaaaaataaacttgagactcttttattgtgaagagatttaatagcgtgttgcaccatcatgtaattatcatgaatcgatcttcctttcacaaaagcactttggttagcagccactaacttctgaagatgagggccgagcctattagcaagcaacttggtaaccaatttagcgaagctgtgaattagactaataggccgaaaatccctggctgacaatgcatccgtttttttggggataagcacaatatatgcagaattcagcagccccaaattatgagcatttccaaaacgaagatagtccaacgcagccataatatcagtcttaatgatgtgccaagcagatttgtaaaacctcccagtgaaaccatcaggaccaggcgctttatcattgggaaggcttgcaatcgtatcctgaacctccctttcggagaaaggagattctaaatcacttaggtcaactggatccctgtggcagtctagcaaattaagagtgaaaggtctctggatttcagtccccaaaagatctgaaaagaaattatccaacagctcctgcatctggtcatgattagtcacagtcctgccctcatcctccaaatgagaaataaagtttctcttttttctaaagcaagcctgcatgtggaaaaatcttgtatttgcatccccttccttcaaatattgtatccgagaccttaaccgggcaattgtcctctgtaaagaggttaggacgagacaatgttgtttcagctttcgcaacaaccaaacctcatcaacagtcagggtcctaatatcctgggcaatctccagtctgtgcaacacctcgcgagccatgcccaattgagtcccaacattacccaccgttttgtgcccccaagactgcagtctcttggacaatctcttcagcttcatggacactttctcaagaggacagaaacagtggactggctgattccaggaggcagcaacctcctcaaggaacccagggagtttaagccaaaaactttcaaaatgaaatctgcgcttccccctaatatccaccttgaatttgagtgttaagggacagtgatcagaggccacagtggcattactaaagagcatacaatccggaaaaaactcttcccagctgttagtgcagaagacatgatccagcttgacaagggtgggatcttctctctgatttgaccaggtgaatctcctcccacatagcggtatttcctttaactccagagagttgatccagcttctgaaatctcccatcaaagctcgattgatattggaattattcttatcttctgctctataaatcatgttaaaatccccagcaatgatccatggcccttcacattcattcctgaccacaccgagctcctgaagaaaggcaagtttgagattatcttgatgaggcccataaacccctgtgaaccaccagagttgacctgaccgcaactgaaactgaactgacaccgagaactccttgatgacagaaactccagtggaaaggtttatgtcgcgccacgctaccagaataccccctctggttccaatggcggggctgaaaataaaattactaaaagccgacccaagaattgtaataatatcaaaatcagaaatggaagacagcttggtctcttgcaggcacacaatagaaggcatagtgtcaagaaccaaatatttaatagagtctcgcttagcacgatcgttgagacccctcacattccatattaaaataccatttgaatccatgaaaaaaataaaaacagccagccccaccaaactgaatagctcaggactgcccaggtgggggcacctcccagccgaacagggctgccagcgcagtaatatgctctctagaaagaggtgaatcaaacagcttagcataacttcttgcatctgtgaaggaaatattctctctctcgtcacagaaacccagatgcttgcacacctttgcagcagagggagagcctacaataatcaaattcatttcttactattaagaacgctttgctttttatataaattattgccagattgtctataatctgaatgttctttatattgtttgtatccccaaaaaatgcagtatacaccagctattgacatttggagcactgg

SEQ ID NO: 457 - DNA, 19476 bp, Zea mays
  Intron number 8 from transcript GRMZM2G084491_T01 (locus G RMZM2G084491) derived from phytozome v7.0 (chr-ID 10; pos 137969554 to 137989029)
tccagagatttgcaggtaccttggctgcaacacattttttttctcgaacgcgcaaaagagttgcgcatcattatattaagagaggaaaaaaaatccaaagaggaccaaagtacaatgcctagagggcaagcataagactagaccagattgaaaacagtctagaccctactaacggcagcagtatggccaagacttgctagctgcaacacattttgaccaggacaatattaatgaaaagtataagaagtacagccttcaaatataacaaatacaaataattgcacagtggataacagctacatagtgtaacaaagacctatccattctcttgatctattttctcgtgcttcaaactcacaaatctatactactctattaagaacctaatgtgttgggcacctggtgctaccacggcttcacccttcgtgctgacactctggcctgccccgcacgtctcgactggttatcccaccccatgcgtcccgcctcggcgccgtgccctgtgggcccagcgcccgtgcagcgctctctcagctattgccctgtggaccccagcacctgcgcagccagctactgcgactgcccagcacccgaccccgtgcaaaaaatagtgcagatcgagcactcgaacccacgcctccctgctccagaaatttggggctaaccaccagaccacatgtaatcttgagattgttcctgtaatcttaggtgctctcccaatatgttgtcataactatatctatactactctattaagaacctaatgtgggcatctggtgctaccacggcttcacccttcatgctgacactctaggcctgccccacgcgttctgactagttctcccgccccatgcatcctgcctcggcgccttgccctgtgagcccagcgtccacgcaacgctctcttggttactgtcctatggaccccagcgtctgcgtagccagctactgcgactgtccagcacctgaccccatgcaaaaaatagtgcagatcgagcactcgaacccacgtaccttagtgtttagaaataaacaataattatatttgagtaaaaatctcaatacttatgtatatgatatataacagccgtagcaaagcactggcaactggctaataaaatagattatgctctttttttcctctatcataggaagagaccttctaattggctaataaatttattgatagcaccaaccaaccaagctaatgcttatttggagaaaatctcattgtgctagctttatattttcagttgagttgcatgaaataatagtttgatacttcgtctgttcaaactatagtttacttcaactttgtcctaagctaaacttctctacctcatagaaaatgcaccaacatctacaacatcaaattagcttagttaaattctccatgaaatatgtgttgataatgtgccttgcatgtcggtttggaagcgcttggagtggtcgaaggggaaggctccccataatgttattccggcacctcgagggtcaacctccgttgtgaaggtcctttcatgaagaaatagaccttggtctggagtaaggttgagcagtaggagaagaaaaattttaagttgatcggttctctagttcatggcaagggccttgatccggtgatgcggggaatgtgccctagaagaccaagaaataggaaatcaagacaaactgaagatgacaatgtggatcaaggagacaagggggccaaagcaacaacggagttgcctctttgggcaccgttctgaatgatggcactttcttgttggacctcgtcgatgtggaactgtaggggttgccaattcatgcgtgggaagcttccatggcgaagagtctgctcaatccttatggttggtgttggaacttgctctcggttgcaaggggatccaacaagggtgaacagtggtgtcaacagggcacacgcgctagatggcaaaagctctgttaatctggcctctcacgggcactgtgcaggggtatttataggtacctgagcgcgcagcgccttgagctaaggacgcatgtgccctcagctacctagattatccccagaatattcccataaagcggggttacagaccgtaattacagggatgtctttacaaattaggcccgtatagcacggcggccacgtggggcccgtaacgatgggccggatcacacgtgggcctctgagctggacgaggctgcactgtgggatgcccttcgtcgccagtcttcgtctggtgcggtacatgcgaagggtgtccctgcctgttttgtctccgttagctcagctgctgcagtgaagacttcgagcggagggtggcggctttgccttcgccccaacatttgccctccgagggaccagttcgacaaagttacctggtgccgaagacgtcgctagatggcggagacgctgccctcgctcgaagtggttccgcgggggtttttgatatgaccgttgattgacggcgtactgttggattgcgggtttcccgaagcgccgcgccctgttagattgcgggtttcccgaagagccgcgccctgcctataaaagggggcgggggtcggtgctttttgaaattcaccttccgcgctccacgaaaaccctagccgccctttccgccgtcttgctgctcgtctgcccgccgcgctcttgttcgccggagatctggctcgagtgaagcagaccgcccgccgccgccgacggtacgtagcgatgccgtcttcgtcttcttccgctgccgctacaccgccggccgttccctcgccgccggccgccgcctcgtctgagacgctgagtagtttaatggcggaggagttgcgcgccggcgattctgttgactttggcgtatcgcggatgtcgtcggtccgcgtgcaagatatgcagcggttgggttacttcggcggcggagttgctcgagtcccggggacggaggaagtccccgagccggagggcgagttggttgttttcgaggcgttcttcgccgccggactccgtttgcctgcgcaccgatttgttggcgaagtcctgcgcaagttcaacgttcaaatacatcagctgacaccgaatgccatagtggctctgtcgaagtacgtctgggcgacgacttcgtacggcggacagccatcagtcgaagtttttgcgaagtattattgtttgcactggcagaagaggatgattggagacgaagtcgctcagtttgggtcgtgcacattcacgccgaagactggcaaaaccacgatgcaggtagtcgagttggttccttgcgcccgcaacaagtggggcaactggaatgaattttggttttacgttgctgagggctccgtcgaaggccatgagggacttcccgtgtccgagatgtgctctcatttttactcagcgtacccgccctttgaagtggcggaggaggatgtggacgaaggggcccttcggtgcgccgctggtctgagcagcgggcgcgacttggttgaagaattcgtggcgtacggggtgtggcccttggcgcatggctgggcgttgggcgaagtgtgccctcgccagatgcctttccatggcggtagggtggtgcggagtcccgccttcgccctgaatctgcaaaaccgcgatccggccgcctttgtgcgtgaggcggaggatggggcggtgcggcttgttggacgttacgtgccgaggacggagggccagcgcagctgggatatccgcgggtcgaatgaccgtttgaacatggtttttgagttaaatcaattgccatatgacggctaccctggtcaagacgatgcggaccgccgtgggaagaaaccggcggtggagactggagacgaccctgcgccggcggccgccctatcctctaaaaagagaaaattaggtactgctatgggaggacttggggtttctgatggttttgctagagagttgatgaggacgtgcgcggccccgggggaaaggatgtcttcgcccgagctccgggagtcttcggctcggatgctgagggttaccgagggttgttggcctaggaatgttcctatcccccgcgcggctggcagggacttttttacatctcgcatggttcgtgaatggagggtttttccttatgggcggaatattgctgctgttgtgtcagcagtgatggacaaggatcgccagggagctgcacagaagcgccaggcggctgtcaggctcgttgaagccaggccgaagaggcagcgggggtctgcgaaggctacggcccccggcggaggccggccgccgctggcggcgaagtcgggcatccctgctgctagcaaggcgccggaggcaacggcaggcgccggaggctcgaaatcggcgaaggtggtgccgccgtccggcggagtggcggaggtcgcgaaggcggcgcgagcgttgccgttgtcgggcaaacgtgtcgccgacttcgccactgatattagtgtggaggactatcttggtggtaagtcgttggctctatttatttattatatatttttttattctttttttttaatttattcgttggtacgtcgcagggtcgggcgagggccaacttgctatggttgcgcctgccgcggcgaccacgacggctgccgcagtgccaaaggcgaagggcggggctcttagcgccgggggcgaggtgtcagccctcgcggttgtcatggatgaggcgggcgctgcgacccgccggctgaaggaggtgacagaggcgctgagtcaggtccgctgagctggacttcgtccccccctttttttttatcggcttgctggggccgctgtcttacgattgctctgcaggtggctgacttcgccagccgcactgcgtcggggtccctcacggcagctgtggctgccgaagtcgagagacttcggacacaacatgctgacgccgtccgtgagaagtcggccgccgacagcaagtgtcgcaagctggcggacaaggtggccacgctggagggagaaaaggctgacctccggtgccagttggcgggggagaggagggagaccaacgaggctcttgttaaggcgcaggctgcgcaggcggaggctaacctggcacaggcggagggcaatcttgccagggagcgcgctgagcagctgcaggagcggctcaccgccctggagagccgcgtggagagggccgaggccatgtcacgcgcggaagcggagcggacgcgcctgctgcttgtggatacataccgtgggctgggcgcggggaccggtgatttcgaagtgccggaccgggagcccggacttcgctgcctggagtgggtgcaggaggagttgcaagcactccccactgtcgtggagggatttatggcgtatgcctccctggtcacctgcgagggggcgatgaacgcgctctcccgcgaagggtgccggcacttcgaggtcttcgaccaagccgatgaagattttgagcgagatatctttaaggttgaggaccccgtagtgaaggaatccgccggagccctctacgaccggatgtggggtctgcatggtcgcgaggtggtcagggagcgggccgagacggcgagggcgcaggtaacgttttcgtttgtttggtgtttgttggatgtgggctgtgtgtgtgtttgctgaattttgtgtgttttttcttaggcggcgcgtggcgagagggtggacgacttcggggcgttgaacagcatgctgtctgacccggagccgaccctggggaccgcggaagacgcgccgggtgcccccgcatccgctgtggccggcgaagacctgcccctggaggtcgccgaaggcgcgcctgatgccctcgcagccgctgcgccgagtgctgaagatcccgcagcggtggcggcggaagcagcagcggaaacaacggcggagccaacggcggaggctcccgcaacgtcagggccgtcacaggtggcgtagtgggtgtagagggttagggaaatttgtatatgttgctgaattttggttgttgcgcaggttcaagatttggggcctgcgcacgcaaccgctactactaaatttttggcggctttgaccgcggaagatggtaatgaatatggtggatctgcatctgagtgttttgattgtgctgactctgggagctcggttgagtggactgaggagtcgtcggaggaggacttggactattttgcggccttggatgtggctgcggcggaggcttcgccgcgcgtcgcggacgcaggagatgcgccaggtcctagtaccgggcgacgacgacgaagggcgattgcgaaacgtagagttagtggggcggagggggctcggcttcgtgtgagtggggctggccggcaggaactgttgtctttgccggccgccgtgaatacaggtgaaggggaactgcgaagtctttttgcgggtgaggagcttaggataatgttatttaattatagggagatgggaattattcctaaggctgagccgatgtagagtgtggtgccctcgcttgtatatgtagaggcttgtatgatgaagttgtgtgccctcgcttgtatacgtgtgcgaaggcgttgtgtactttgtctagtttgttctattgtgttgatgtgattatagttggtcttggcgcggacggtttgatgttgtcgtttctgcctttgttatgctagtccggttgcacctttaggcgacttctgagcggatggtcttcgcggcagactttgcgcatttgttgtgctagtccggctgcacccttaggcgacttctgcgcggatagttttcgcgatagactttggttttttcgcacttgttgtgctagtccggctgcacccttaggcgacttctgcgcggatttgtcgcacgcgagggttgctagcgcttagcctcgcggtgacctcgtgttggtcgaatgtcgaagaccgtcgtcgcggtcttttttcgacgcatgtttttgcgggggatttttcacacatatattacatggctccgcctcgttaaaaacctcaccccccgggaggaaaagagtgcgggccgatacaagattgtttttgcgaattacaagggcgaaatcagccctgaggagtcaaacaaaaaatttacggaggttgtcgatgttccaggagtgctccaggtccttgccgcttggcgttgtgagcctgtaagcactgggggaagcttttgtcttgactataaaggggccctcccacctgggctccagcttgcccttggactccgtccgagctgtccggacgagtacgaggtccccctcgctgaactccctcgggatgactgagtggtcgcgccatgctttggtctgggcttggtacttgtttagggcctgtagggcgaagactcggtctccgtcaatgagatcctttgaagttggctcgtccacgtcgaggacggttgacggaactgttcgcggggacccatgctttatttcttgcggggtcatggcctccgatccgtatagaaggcggaagggagtaaacccggtcgccctgcactcagtcgtgtttagtgcccagactgcctcaggtagcagatcggtccatctgcccttcttttcatcaaggagcattttcttgacagctgtgaagattttcgcgttggcgcgttccacgaccccgttggactgcggatgatagactgaagcgaaggcaagcttggtgccaatggagaagcaaaaatctttgaagtcttggttgtcaaactgcttgtcgttgtcaactgttagttcggacggtactccgaagcggcaaacaatgttctgccagaagaatttttgggcagtctttgatgttattgtagagacagcccgcgcctcgatccatttggtgaagtactcaacagcgacgaaggtgaacttaaggttcccctgagcggtgggcaggggcccgacgatgtccaggccccagcgctggagaggccatgtatgggcgatcagctttgtatactgcgaggggctgcctgaccgaggagaaaacttctggcaggcttcgcaggaccgtgcgacccgatttgcggcgcagatcattgcgggccagtaaaaaccctggcggatcaccttggcagctagggcccttggccctgcgtgtgagccgcacgtgccactgtggacttcgcgtaggatctgcatgccttcggcttcggtgacacacttaagcattggctgactgaccccttttttgtagagttggccttcaatcagtgcgaagtctcggcttcgatgtttgaggcgcttggcctcactgatgtcggctggatgataatacccctgtaggaacagggttattggtgcccgccagtcctcggtcatgataaggttgactatgcggtggccctcgctgtcgttggttatttggagcccttcggggctccggacggctggcgtgccgatgacatgaaagaacacgtcggagggcagagtttcgcccctggcggcagccttggcccaatgcgtcggcctcttcattcttggcccgatccacatgctgcaaggtgaaccccttgaattgcctctcgagacttcggatggccgcgaggtactgcatgagcgcggggtcctttgccgcatagtctttctcgacttggccggcaactaccttggagtctgttttgatgatgcaggtggtgactccgagggccctcagcttgcggaggccgaggatgactgcttcgtattctgctatattgtttgtgcatctgtcggattccagattgaagctgagtcgtgctgcatatctgtgcttgaccccgactagtgaggtgatgactgcagcgacgcctgcccccgcatggcaccatgcgccgtcgcaatggatcgtccaaaccttctctgcggatgggtctgactgtgttgttggcccagtccagtcgacgacgaagtctgccaggacttgagacttgatagctgtcctgggctcgaagcagatgtggtagccggagagttcggccgcccacttggcaatcctcaccgacgcctccgggtttctgaataattcgccgagtcccctgtttgaggtgactcggaccttgaatgcttcgaagtaatggcgcagtttgcgcgacgacatgacgactgcgtaggcaatcttctccagctctgtcatgttgcacttggacggtgtcagcacttcggagacatagtatacggggcactgccggaccacgccctcgacagtctgctcctgcaccagtgctgcgctgaccgcatgtggcgaagccgcgacgtagagcagcagggggagcgaggggtcggggctggtaaggacggccaactctgtcaggtactgtttcaatgaggcgaaggccgccgcctgctctggtccccaggcgaagtcctttgcaccacggagtgtcttgaggaaggggagacttcgctcggcggacctggagatgaatctgttgagagcggccaatctgcctgtcaggcgctggacgtccctgacggactgcgtaggcgtcatgtctaagatggcctgaatcttggttgggttggcctctatgccgcggtgtgataccaggtagcccaatattttgccttggcgaacgccaaagacgcacttttccgggtttaggcggagttgtgcgtctcgcatgttcgcgaatgtttcggcgaggtcggcgaggtggtcctccttgctcttgctggcgacgacgatgtcgtccacatatgtgaatatgtttctgccgacttgcccctcgagcacagttttggtgagccgggagaaggtggacccggcgttcttgagtccctctggcattcggatgaagcaatatgtgccgaagggtgttataaagctggtgctagccttgtcttcttccttcatgtatatctggtggtaaccggagaagcaatcgaggagggacatgacctcgcatccggccgcgctatcgactattttgtcgatccgcggcagcgggaaattgtcctttgggcaggctttattgagactggtgaagtcgatgcacattcgccacttcccgctctttttctgcaccatcacgacattggagagccatgtggggtaggccaccggctcgatgaatttggcttccaggaggcggtgcacttctgccttggcggcctccgtcttctcgtcggacatcttgcgaagccgctgctttttcggccgtaccgaagggtcgattcccaaactgtgctcaattattgatcggctaaccccgaccagatcgagggccgaccaggcgaagacatctttgttcttggccaggcagcagaggagcttctcttcttcatgcgaagtaaggtcttcgctgataatgactgtctgcctgggcgtggcctggtcgagggggacaatcttggtcccgtcgttgctctgcagctgggccttgtcgtgctgcttattggttgggctggcaggcgcagggacctcgcgttgggccgtgaggcagtgcacgtttctttgatcgggcacgaagtcccgctctatgttgcgcgcagtctgttgattgccgaagactgtgatgacgcctaacgaacctggtatcttcatgcataggtacagtccgtgaatggctgcttcgaacttattaatggagccccggcccatgatggcattgtaaggatataccatgtccacgatgtcgaaggttatttgctcgcttcgggcattgggtgctacaccgaaggagagaggcagctctattttgccgacggggaaggtgcccttgccaccgaagccatacagcgggttgtccgaaggcttaagcaggctgtggcttatgcccatgcgatcgaaggcgtggaggaagatgatgtccgcctgactgccgttgttaactaggactttgtgcaggtcccagcctgccacgctgcaattgataaccattgcgtcgcagtggggggcactgcgcaggtcgacgtcccgtgcgtcgaaggttaacggtatgtgggaccactttgtctgcacgactggacccgtgacggcgacatggttgatgctacggtaatggtcccgcttctgccgcttggtgtcgaagtcagtgctggaccccccagttatcatgtggatgactccgcgatatggttgatcggcgaagtcttcctgctttggggcatgggggatgttttgatgttgctggtgtggtggtgggggtggaggaggtacgatttgtacttcctgatggtgttggtaagcgtggtgcggtggatgcggggcgggagcgtggatatatggtggaggaggttgctggtaattgtgcgcgacaattctggggttgtcggctggctgcgcccgtgccattctctctctggtagccttcgtttcgaggcagtctttggtttggtgggcgcagtcttcgccatggaagaggcagtagaatcggcgcggcggttgcgcacgccctcggcccctaccacgagtgccatttccgcggccctggggggatattcctggcggcgaggggggtcagcagcgggatgctggttggcgatgttgtgcacttgctgctggttgcggccgtctcgaccggagtctggctgcggagtccttgtccacgtgcggctggactgtggggcatcttttggcttcctttgggactcaatcttgcgctggtggagttcttcggatctggcgtacttttcaaacaactgatataactcctggaggctctttggcggatctctgatgcagtggctgtaaaggacgccagcgcgaaggccactgatagcatagtggatggcaatctggtcatcgactgagggcagctgtgatttgagtgttaaaaatttgcggtaatactccctcagagtctccttttccagctgcttgcatagcgagagttcggccagggcgtcggtgtctgggcggtacccttggaagttgagcaggaacttgtcccggagacttctccaggaatcaatggacagcggaggcaacctggtgaaccaggtgagtgccggaccctcgagggcgatgatgaaagacttcgccattgtggcgtcgtcccctccggaagatgcaacggcgacctgataactcattatgtattgagccgggtcggtgctgccgttgtacttgggataggtccctgcccggaagttagctggccaaggcgttacttgcaggtgtggcgccaggggacttcgctcatcgagatagttgacctcttggaacggcgcggcgtgcgggaaggtgaagtcgcgctgggggaaacgcgggtcctccggttgcgcgcggtgttgcagggggggggccatgctgcaggccgaagtggccttcgcgcgtgtcttcgagttgtgcgcgctgctgggggggtgcctcgtgctgcaggccgggatggccttcgcgctgcatcagcgcaatctcccgctcgagttcttgggccttctgctcttcgtcgcgtatcatttgccgcactttggctagtgcggacacacgctggcgcttggcctccagtatctccttctgcctctggagattgcggttcttgaggcgcagggcgcgcagctgtagctgttcttctgctgagacgccgaggacttcaccgtcctcggtgaggtctgcgccctccggtggtgcgaagcctgagggcagctgcggttgtccttcagggtcgcaggtgcggagggtgtcgtcttcacaggcgcgaggaacgttgtcttcagtggcctcttggtgggtggagtgggtgagggcgagggccttgccctttcttgcggcgagcagtgctgccttcgcagcctcgtcagccttcgggttagctctcttgggtgccatcgcaggtggttttctcgtagcacgaacggtgggcgccaaatgttggaacttgctctcggttgcaaggggatccaacaagggtgaacagtggtgtcaacagggcacacgcgctagatggcaaaagctctgttaatctggcctctcacgtgcactgtgcaggggtatttataggtacctgagcgcgcagcgccttgagctaaggacgcatgtgccctcagctacctagattatccccagaatattcccataaagcggggttacagaccgtaattacagggatgtctttacaaattaggcccgtatagcacggcggccacgcggggcccgtaacgatgggccggatcacacgtgggcctctgagctggacgaggctgcactgtgggatgcccttcgtcgccagtcttcgtctggtgcggtacatgcgaagggtgtccctgcctgttttgtctccgttagctcagctgctgcagcgaagacttcgagcggagggtgacggctttgccttcgccccaacagttggattcaccaaattcatgaggattcaccaaattcatgatggcacttcaacctaattcttgcctcagaggataagaacaatgacaacattaatagagctatgatggatcggttcctgcattatcgcttttggccacagtgaggaggccttctctcttgtgcttgttctattcttttttggaccctcttttccttcttaatataatgacgcacggtagtcaggagaaccgatgtcgtaggatgggaggcactcggggactgacccggccacagtgagggatcgggccggcggcggctgcacagagggaggagccggcggcggctggagaggaaagggcagccggcagcggctggagaggggagggaggaaaaaaatggctctatgccatgtgggaaatcctaaccctaacttggggttgggttatgtatttaattgacatgagttaactaggcctggcccattacacagaggtgagagtaaatacatggggagaacccaaaccctaaacgggattctaacacctggtaccatccggactgttctgactctggctctcttacgagcttgtccagtaaatcagcttgccgtcaagaatgccttcctccatggcactctgacggagacggtgtattgcactcagtcggtcggctttgtggacccgacgcaccacgacatggtctgcaagctcaattggtccctctacgacctcaagcaggcgccccgagcttggtacaatcgctttgccaccttcttgatttcacagggcttcatcgaggccaagacggacacctccttgttcgtctttcgccacagtctggatactgcatacctcctctacgtcgacgacatagtcctcacgacctcctctcccaacctaatacggcgcatcatctcctctctccatcaggagttcgcgatgaaggatctgggtgagctacaccacttcctagggatcaccgccgagcaccggccctagggcctgttcctccaccagcgccagtacaccatcaataacttcgagcgcactggcatggctgattgtaagccctacacgactccggtggacacttagggcaaggtctcctccgatgatggccctccgatagctgatccgaccagctattggagtctcgccggggccctgcagtacctcgtcttcactcgccccgacatcacctacgtcgtccagcaggtgtgcctcaatatgcacgccccacgggagccacatctcaccgctatgaagcggatcccgcgatacctctggggcaccaccgagttcggcctcctccttcgacggtctactaccaccgacctcgttgtctacaccgatgccgactaggtcggctatcctgacacgcgtcggtccaccttcggtttcgctgtgttccacgacgacagcctcatctcctggtccttgaagcggcagcctgtcgtctcccgctctagcgccggggttgagtaccgcgttgtggctaacggcgtcgccgaggcggcgtggcttcgtcagctcctccaggagctggacagtccgctgacgcggagcgcccttgtctactttgacaacatcagtgccatgtacctctccaccaaccccgtacaacatcagtgcacgaagcatgtcgagctcgatctccacttcgtccaagagcgtgtcggtgatgtgcgggttctccatgtcccgaccacttctcggttcgtcgacatcttcaccaagggcctccctacatcggtgtttgaggagtttcggtccagtctcaacatctgtcgtggctagagtttcgactacggggggtgttagagttatttgtggccttgtactgtaatggggtgtttcctgtggaatgggcttaggcccaacaactatattataaacatatctctccctaccctagttagggttagggtttctagcccactaacataaagtctagagcccccttgagctggatggtcttggcattttggatcttgaacgcatgagttgggctttgcagatcagatggctttggttgagtaagattgaagcttctaaggagtggtctggacttgaaattctgccacataaaaacgctatagctatcttttccatggctgttacaacttctgtgggaaatggtcaacacatcttatcctggaccgatagatggtttatggaaggtagtcttgctgacattgctccgacgatatctgagatagttccttccaggctaaagaagatgcaaacagttgatcaaggtttggtcgatcgtagttggactaatgatatccaagggaacctgtcattggttggctactatgaattatttcaactctgtggtggcttacatgaagctaagctctccactcaagaagaccgacacttttggatattctcaagtaatggaaaatacacctctaagttggctttttgatgttcttgtaaggttctattagctttgaacactagagacagatctggaaatcttgggctcctcctaagtgcaaatttttggttggcttctcgaaatcggtggcaaaaaggggccttcctcatctggagcattgtgtgctctatgatcaggaggaagatgtgcaaaacaattcttactagttgtgtcttcaccagagaattctagttcagagttttctccaaccttgggctagcttctagagcacctaatcagtcgacctacagcttcgtcgattggtggaagcgctcaactaagcgtttgacaaagccgattagaaaaggggtcaacacactagtaattttagggccatggtgctacgaagcatagaaatgcaattgtatttgatgaggctaggccttgtgtgcaagttgctcttaggtgctttgaggaggaacgccatctctaatgtttcacaggctgcaagcccttggtcatgggcctggtgtaagctaggtctacatatctggtcgatatgggccatgtcttctattaagaacctaatgtgggcacctggtactaccacgacttcaccctccgcgctgacacactaggcccgcccaccacaccgcgcaaaaaaatagtgcagagcgtgcactcgaacccacaccccccctactccagaaatttggggttaaccaccaaaccacattgaacttagtgtttgagtgaactttatcaaaacaggagatgcaaatacgactttctttcatgcgcaagccaggttcaggaaaaagaagaactttattcatacactgatggttgacgagaacattgtttcttctcaagaggctaaacagcaggttatgttttagttttataaggatctgattggtaaagtgtttgagcgaaattttagtcttaaccttgctaattttcacaaaggcaatttggagctctcgcattttgataatcccatatctttggaggaaattaattgtgctattttaagtcttcctaatgataaagcccctggacctgacggtttcacagggcgcttttataaatgctgttgggatataatcaaatgggacctactggctgcaatcttaattctccaacaaggatcccctggaaggcctagcatatattactctcattccaaaacatgttgaggctattcttccgggagattttagaccaatcagcctagttcacagctttgctaaacttatcactaaaatcctggctaacagattagctcctaaactggataaaatggttagcacaaatcaaagtgccttcattcggggtagatgtattcatgataactttattatggtcagtcaaactgtcaagatgctgcaccataagaaaatccctgctattttcttgaagctagacattaaaaaggcctttgactcagtgcattgggcatttcttctggaaattcttcgacatttgggttttggacaggtttggtgcgatctgattttgaacttactatggacttcttccactcaagttcttgttaatggagtgcctggacagcctataaaactcaagcgtgggttgagacaaggcgatcctctgtctccctttttattcatcttagtcatggatgttcttaatagtctattcatcagggcagatgagtgtggattattacatccccttgctggcagaagcattagccaaagggtttcaatgttcgcagatgatgttgctgtttttgtaaaaccagtttctcgggacttagtggtggtcagagaaattttgaggtgttttggtgttgccacaggtcttcaaactaacttgcaaaaaagtttctcctacccagttcagtgcaattctgagagaactgtgttggctgttcagaccttggggtgtgcctaaaaaaactttcccacaacctatcttggtctccctctgagcagcaaaaaacttagtgctaaagacctcgctcactggatagagaaaattgctgccatgcttccaggatggaaggctgaacttttaaatcttgcggggagaatcactcttatcaaatctgtactctctaccatcccagtttacttatttactgctcttaatgctcctaaatgggttataaaagccattgataaaattcaacggaacttcttatggaaaggaagaaaggaggctagaggaggtaactgccttgtatcttaggataaaatcactcggcctcttgatttgggggggtcttggaattcctaatctccaaaagatgaactgggccctacaattgcgatggctttggctacaaaaaactgctccttctaagccttggggtggcctggatcttaaaatatcatcccaggcccgtgctttatttcaggttgcagtgtctaccactattggtaatggtatttcaactttcttttgcaaagataagtggattcatgggtattctattatggatatagctccccttattgctgctgcagttccgaagaaatttaaagatgtaaggactgtgcagcaggcccttacctctcacttctaggttcatgatatccagaggaatctctctctggctgagattgaacaatatttacaattatgggaggtaattgattcttttcagcttcaaaattcaaatgatcaacatgtgtggattttttagcagcaatggactgtatacctccaaatctgcctatagagcttttttcattggagcggaatcctttgagccctgaaaaagaatttggaagagctgggcagcccctaagtataaggtttttgtttggctggccataaacaataaatgttggacagctgacagactcaaaaaaagagggcttgatcatcctgaaaattgtgttttatgtgaccaagaggacgaaactgtgtagcatattttatctaattgcgtcttcacaaggcagttttggcatagtatctttactccaattgatctctcttctgtgggtcctaaaagaagagatttagactttgctgaatggtggagaaagacttcatctaggattcctaagagcaaaagaaaggggtttaatagtatggtaatccttggggcttggagtatttggaagcagcgaaacaggtgtgtttttgatggtgctcgaccctgcctttctaccttagaagacggatttaaggacgagatgagattatgggttgctgctggagccaggaacctgcgctctcttttcaaccctggataaagtaaagtcttgaagcctattgaaagactggggtgttagtgtgttgtatgtgtctgtgttgtgtgtgattttgtggatgtgagtgtgtgtttttgttttgtgtgtgttctgtttgtcccggacctcaggccttttttactctattttaattcaatgatacgcagccctcctgcgtattcgaaaaaaagatacccccttcgtcccagtgtataaggtgtaatcacctctggttcaaagatcaagaaatatatttaattttctctataccactgcatcgatatacgtatgcatagggagaacacgccttatattgtggggataagaacaaaaagtggtaaccgtagcaaagcacgggcaactgactagtatattctataagtatgagctaaaagagatgtaagtttgtcccctattttatctcgggtaggggatgtagattgtatcggactttttctctcttcttaatataatgatacacaactcctttgcatattaaaaaaagataatgaatttatttgaacttgtagttgttaatattgtttttctaaattcttggtcactgttagagaagttgtaattagggcaaagctaaagtgatctgtaatttggaactgggggagtatttcacaagggttgcttctgagaattttttaagttgtgctttctaacaaccctctggtatatcttattcacgcag

SEQ ID NO: 458 - DNA, 23176 bp, Zea mays
  Intron number 4 from transcript GRMZM2G028004_T01 (locus G RMZM2G028004) derived from phytozome v7.0 (chr-ID 2; pos 8 1953005 to 81976180 reverse strand)
ggataattgttttccataattttcttagttcagaggtttgtctctctcgtaacccaaggcattaacgctatgtgttatgtcactataaaccatagcgccaacataaatcatagtgggcaataccagtgccacttagattcctttgcttgctcgaaaatggaattatgtagaactgtagattgctcttattgctagtaacttttacatatgaacaggaatgtttatttccagtccagcaatacatgaagtgtgttgttgttatgaccagcagcccaacagccctaataaaatcagcgagtttgtttagatggataagcatcaggtagtttgtttagatgaataagtatcaattagtttgtttaaatggataagcattagctagtttgtttaaatagataagcattaactagtttgtttaaatggataagcattagtttggaactcctagatagagttggttagtttgttaggggttgctatcacagcctatatattgtacccctttggttaaagaaagaatcaagcaggcaattatattgccatgcttctcccatctgtcactgttcatagtgcactattcattgtggttaccatgccttctccaccaatagctcgacgccgcccaagcgctggggtcttggccctagatcccaaacccaccactcgtacgaccttcgtaaccctaatcccaacaatctggtatcggaagaccttaccgatcctaggatgtcaggcgaccctcccatgccttatgttcccccggcgatcatcaacccctatggcctttccagcaatgggggcatccccaccgccatagttgttaaggcgttcgttaagcgtcgcttaagcggtaaggcactgattagtagcaaggcgtccttgtcgccttagactggagagtaaggcgtccgccttggccaatatggcttcgccctggcgccttgaatcttgctaaggtgttgcattgaggacgccttgaagacctgcggcggcgacgacggggcataggtggccgcggcgcgcaaggcgcaagcggccgtgacgcgcagagctctgaaagggtgcgacaacggcgtggggacaggaagaaagagagctgcgggagagggacggagaagaacgacaacaccgggggagagggagaaagatgggagcggcgacgtggggaacagaggacagaggagggcggtggcgctagggtagagggagaaagagagagcggcggcgtgggggagaggcttgctgtgcggacgggctcagggtggtggctgagaaaggaatatgataagtgtaggttaggtcaagtagtgggctggatgggctgagaaacagcaggccggtggcccatatgtctttaaacccctttatttttttatcttttactcctatcagtaagtctattagttatgtatttattttttcctaatcttctattactacctattaattatgttgtatttaagtctattatgttgtcttatgttgaacttgtgctcctatttagtactatcatccctacctatttaatactatattcctatatatttctatatttatatattagtaaggcgtcgcctcgccttacgcgttactgcttaaaagggtaaaaagggggttgaccactttacctcaccataccgccttaaaaactatgcccatcgtgcccgctgcggcaccctccctgcccctaacagtgcttccatccatcgcccctgcgcccacagcctcccacgtcgctgccgttccatcacccaccgctgcccttgtctccacagcacaaatcaacccttccaccccctgctcatccaccaaattccctttccacactccacaatcccaggctttcccgaccccaccatagcatacagctccaacccgcagcagcaccctcacaacccgcactaccataaccttctctttcccaccttcgacggcaaggaagatcttgttggttggctgtctcgctgtgagagcttcttctacaatcaagggacgccgaagatggacaaagtctggatggccacatactatctcacgggcgctgcatagctgtggtctgtcatgctgcgacgcgatgagcccacactgcactggccgcgcttcaaaacgttgtgccagtagcgttttgggcctcctctgcgcagcaacacgttgggcgaggtagcacacctttcgtttcgctccacggtggaggactatcaggatcgattcctggctctcctgtgccacacgtagcctgtgccgccaccgcaccaacaagcacaactcttcaccgccggacttccatggcatctccgggtggacgtcgaactgtgcgcgcccggcgacctgcagcaggccgtggtcctcgtccgggcatacaaacgctgccagcaagcaaggctcggacggccgcacgcctccgccctctacgcgtcgactagctgcgccatcccccacatcggcatcaccggctgggccagcagctgctgcctcgaccccgacaacactgatgttcaagtgcctcaccccaacagagacgacagagcgacgccaccagggtctgtgctacaactacgacgagtcgtttgtacgaggccatcactgccatcgtctcttctaccttgaggtgaccgccaacgacgacatggctgcttcggaagatcccccacccccgtaatcttgccttccagcttgaggacgagctgtttgtggtggccgggagagatgttatgaccgacagccaacaaccctaataaaatcagctagtttgtttagatggataagtatcaattagtttgtttagatggataagcattagctagtttgtttaaatggataagcatagtttggaactcctatatagatttggttagtttgttaggggttgctatcacagcctatatattgtactcctttgattaaagaaagaaccaagcaggcaattatcttgcccgtgcttctcccagctcgttgttgttcatcgcgcactgttcatcgcgtgaacagtaccacaccttctccaccaacagccgactgcacccaagcgtcagggtcctggccctaaaccccaaacctaccactcatacgacctctgtaaccctaatcccaacagttgtgcaggaacaaaatgcaactacacaatttttttgaatggttgggaaagagctgagcattttataaagatactagttgagtacctgtgctcaatgttttcaagtcggacgacttgttggtcgttctggctgaccgacttgggtgattaatcgcgattaatcacgattagtcggacgacttggtgattaatcacgattggttcaaactccaaaccgacttgggtgattaatcgcgactaatcatgattaatcggtgttggaacttgctgtcagtcgcaagaaggccaacaggggtgaacagtgtggacagtagggttacgcgtgagatggcaaatagctctgttaaccaggcctctcacgggcactgtgcgggggtatttataggtacctgaacgcccagcgccttgtgctaaggacgcatgtgccctcagctacctaggttatccccagaatattcccataaagcagggttacagactgtaattacagggatgcctttacaaattaggcccgtaacacgcggcggctacgcagggcccgttacaatgggccggatcgcacgtgggcctctgagctggacgaggccgcattgtgggataccttcgtcgccggtcttcgtctggtgccgatcaagcgaagggtgcccctgcctgctttgtctgtcagaacagcagagacttcgagcgaagggtggcgtttctgccttcgctccaacatttgccctccgagggaccagttcgacaaagtcacctggtgccgaagacgtcgctagatggcggagacgctgccctcgctcgaagtggttccgcgggggtttttgatgtgaccgttgattgacggcgtactgttggattgcgggtttcccgaagcgccgcgccctgttggattgcgggtttcccgaagagccgcgccctgcctataaaagggggcgggggtcggcgctttttgaactttactttccgcgctccgcgaaaaccctagccgcccgccgccttgctgctcgcctgcccgccgtgctcttgttcgccggagatctggcgcgagtgaagcagactgcccgccgccgccgacggtacgtagcgatgccgtcctcctcttcttccgctgccgctacgccgccggccgactcctcgccgccggccgccgcctcgtcggaggagacgctgagtagtttgatggcggaggagttgcgcgccggcgattctgttgatttcggcgtgtcgcgaatgtcgtcggcccgcgtggaggatatgcagcggttgggctacttcggcggcggagttgctcgtgccccggggacggagaaagtccccgagccggagggcgaattggttgttttcgaggcgttcttcgccgccggtcttcgcttgcctgcacaccggtttgttggcgaagtcctgcgcaggttcaacgtgcaaattcatcagctgacgccgaatgccgtggtggccctgtcgaagtatgtctgggcgacgacttcgtacgacggacagccatcggtcgaagtttttgcgaagcattattgtttacactggcagaagagaatgatcggggacgaagttgctcagtttgggtcctgcacgttcacgccgaagaccggcaagaccacgatgcaggtagtagagttggttccttgcgcccgcaacaagtggggcaactggaatgaattttggttttacgttgctgagggtaccgtcgaaggccacgagggacttcccgtgtccgagatgtgctctcatttttactcggcgtacccgccctttgaagtggcggaggatgatgtggacgaaggggcccttcggtgtgccgccggacagagcagtgggcgcgacttggttgaagagtttgcggcgtacggggtatggcccttggcgcatggttgggcgttgggcgaagtatgccctcgccagatgcctttccgtggtgggaaggtggtgcggagtcccgccttcgcgctaaatctgcgaaaccgtgatccggccgcctttgtgcgtgaggcggaggatgaggcggtgcggcttgttgggcgttatgtgccgaggacagagggccagcgcagctgggagatccgcgggtcgaatgaccgtctgaatagggtcttcgaattgaaccaactgccatatgacggctactctggtcaagactgagagcacctagaccgggggggggggggtgaataggtgatcctataaaacttcaaaacttaagccacaaaaacttgttaagtgttagcacaattatggccaagtggctagagaggagtcaaaacacaataaccacaagaaatcaatcacagagatgacacggtggttatcccgtggttcggccaagtacaaaacttgtctactccacgttgtggcgtcccaacggacgagagttgcactcaactcctctcaagtgatccaatgatcaacttgaataccacggtgttcttgcttttcttttctcaatcccgtttgcgaggaatctccacaacttggagcctctcgcccttacaaaagatgttcacagagaatcacggagcaagggagggattagcaactcacacacgacacaaagatcacagcgaatacgcacacacaagacccagacttgagctcaagagactagcacactagaacggagctcaaatcactagaatgtagaacaagtgcgcaagattgatgtgtgagtgatcaagagtgctcaaggaatgcttggttctctcctccatgcgcctaggggtcccttttatagccccaaggcagctaggagccgttgagaacaaatctggaaggccatccttgccttctgtcgtcgggcgcaccggacagtccggtgcacaccggacactgtccggtgcccgatttctttccttaacagtcgcaaccgaccgttgccaaccgttgcagatctggcgcaccggacagtccggtgcacaccggacagtccggtgcacaccggacagtccggtgcctccttccgaccgttggccagaccacgtgccgcgcgcagattccgcggccgaccgttggctcggccgaccgttggctcaccggacagtccggtgcacaccggacagtccggtgaattttagccgtacgccgtcggcaaaattcccgagagcggcgtcttcgggccgaggcagcctggcgcaccggtcactgtccggtgcaccaccggacagtccggtgccccagaccgaaacagtctgttggctgtacacagccaacttctccttttcttcttctctctgtttctaacacttagacaaatatattagtacacaaaaccaatgtactaagtcttagaaacatacctttacttgtgatttgcaacttgtccatccatgggcatagattcacatttaagcactttgtgttggcactcaatcaccaaaatacttagaaatggcccaagggcacatttccctttcaatctccccctttttggtgatttatgccaacacaacataaagcaactagaacaagttcaaaatcacttcaaataaaacaaatttgagttttattcaattttggcatatatggatcatcctttgccaccacttggtttgtttttgcaaatcaaactcaaatctctatctctaagtcaaacacacatgttgaagcataaagagagtcattccaaaagagattgatcaaagatttcaaaaactccccctttttcccataatcactacttctccccacaaaaaaccaacttttgacaaaagagacaataagagagttttgacaaaacaaaaagctctatttcactattttcaaaatttctcaagtggtagctgatccatttattgctttgacctttattttctccccctttggcatcaagcaccaaaacggaattaatcttggccctttaaccccattgcctcaccaaaatcttcaattaagagcaaatggcaataagagttcatgagatggacttggaataagttaccctctcatcggagtgcagtggaagtctttcatggtccaagtccaccttttccctttcaattctccttcgagactaaatcaagcaatctcaagcatatggttagtctcaaagggtcaagttgtaacacatctccccctaaacatgtgcatcactttgcaacggacttgtgaggtccagggagtgtttgtacaacttgagcaccataataagcaacaaaatgcagaatgaacatgatcaaaggcataaacacatgtatgctacaatttaatccaagttccgcgaatctaagacatttggctcactacgcagcctgcaaaaggtcttctcatctagaggcttggtaaagatatcggctagctggttctcagtgctaacatgaaacacttcgatatcccccttttgctggtggtctctcaaaaagtgatgccggatgtctatgtgctttgtgcggctgtgctcaacaggattttccgccatgcggatagcactctcattgtcacataggagtgggactttgctcagattgtagccaaagtcccggagggtttgcctcatccaaagtagttgcgcgcaacactgtcctgcggcaacgtactcggcctcagcggtggatagggcaacagaagtttgtttcttagagttccatgacaccagggaccttcctaagaattggcacgtccccgatgtgctcttcctatcgaccttacatccagcatagtcggagtctgagtatccaaccaagtcaaaggtagacccctttggataccagagcccgaagcaaggcgtagcaactaaatatctcagaattcgcttcaccgccactaagtgacactccttaggatcggattgaaatctagcacacatgcatacgctaagcataatatccggtctactagcacataaataaagcaaagaacctatcatggaccggtatgctttttgatcaacggacttacctcctttgttgaggtcggtgtgcccgtcggttcccatcggagtctttgcgggcttggcgtccttcatcccaaaccgctttagcagatcttgcgtgtacttcgtttgggagatgaaggtgccgtccttgagttgcttcacttggaacccaaggaagtagttcaactctcccatcatcgacatctcgaatttctgcgtcatcaccctgctaaactcttcacaagacttttggttagaaccaaatattatgtcatcgacataaatttggcacacaaacaaatcaccatcacatgtctttgtaaaaagagttggatcagctttcccaactttgaaagcattaacaattagaaagtctctaaggcattcataccatgctcttggggcttgcttaagtccatagagcgccttagagagcttacacacatggtcggggtaccgttcatcctcgaagccagggggttgctccacgtacacctcttccttgattggcccgttgaggaatgcgctcttcacatccatttggtacaacctgaaagaatgatgagcggcatatgctagcaagatacgaattgattctagcctagccacaggagcaaaggtctcctcgaaatccaaacctgcgacttgggcatatccttttgccacaagtcgagccttgtttctcgtcaccactccgtgctcgtcttgtttgttgcggaacacccacttggttcccacaacattttgcttaggacgaggcaccagtgtccaaacttcattcctcttgaagttgttgagctcctcctgcatggccaacacctagtccggatctagcaaggcctcctctaccctgaaaggctcaatagaagagacaaaggagtaatgctcacaaaaattaactaatcgagatcgagtagttactcccttgctaatgtcacccagaatttggtcgacgggatgatccctttgaatcatcgctcgaacttgggttggaggtgccggttgcgcttcttcctccattacattatcaaattgtgctcccccttgatcacacgcctccacttgaggtacctgttcgtcatcttgtgttgggggatgcaccatggttgaggaagaaggttgatcttgctccaagtgttcctgtggtcgcacatcaccaatcgccatggtgcgcatagcggccgttggaaacatcttcttcatctacatcatcaagatcaacaacttgctctcttggagagccattagtctcatcaaatacaacgtcgctagagacttcaaccaaacccgatgatttgttgaagactctatacgcctttgtatttgagtcataacctaataaaaacccttctactgctttgggagcaaacttagagtttctacctttcttcactagaatgtagcacttgctcccaaatacacgaaagtaagatacattgggtttgttaccggttagcagctcatacgaagtcttcttgaggaggcggtgaaggtagaccctgttgatggcgtggcaagccgtgttcacggcttccgtccaaaagcactcgggggtcttgaactctcctagcatcatcctcgccatgtcgatgagcgtcctgttcttcctttctaccacaccattttgctgtggtgtgtagggagcggagaactcgtgcttgatcccttcctcttcaaggaactccacttgaaggttcttgaactcggacccgttgtcgctccttatcttcttcaccttgagctcaaactcattttgagctctcctgaggaagcgcttgagggtcccttgggtttcagacttatcctgtaaaaagaacacccaagtgaagcgggaaaaatcatctacaataactagaccatacttactccctcctatgctcagataggcgacgggtccgaagaggtccatatgcagcagctccagaggtcttgaagtggtcatcacattcttgttgtgatgcgctcctcccacttgttttcctgcttgacaagctgcacaaggtctatccttttcgaattgcacgttagtcaaacctatcacatgttctccctttagaagcttgtgaaggttcttcatccccacatgtgctaagcggcgatgccacagccagcccatgctagttttagctattaagcatgcatctagactggcctcttcttttgcaaaatcaactaaataaagtttgccgtctaatacacccttaaaagctagtgaaccatcacttcttctaaggacagacacatctacatttgtaaatagacagttataccccatgttgcataattgactaacagatagcaaattataaccaagagactctactaaaaacacattagagatagagtgctcattagaaattgcaattttacctaacccttttaccttgccttgatttccatcaccgaatacaattgaatcttgggaatccttactcttgacgtaggaggtgaacatcttcttctcccccgtcatatggtttgtgcatccgctgccaataatccagcttgaacccccggatgcataaacctgcaaggcaaatttaggcttgggttttaggtacccaactcatgttgggtcctacaaggttagtgcaaatatccttagggacccaaatgcaagttttgtcacccttgcattttgcccctaacttcctagcaacaattttcttatcctttctacaaatagcaaaggaagtatttaaagcacaataaattgtagaaggttcatttactactttcctaggagcatgagtaatattctttctaggcataacatttttcctagacatatttccattatgcataaaggaagaactagaagcaaacatggcatgagagttaaaatcatcatatgcattataactcctataagcatttttagtttgtctcctatcatgatacataaaagcatggttcttttgcacactactagccataggggccttccctttctccttggcgagaatgggagccttatggcttgttaggttcttggcttccctcttgaagccaagtccatccttaattgaggggtgtctaccaattgtgtaggcatcccttgcaaattttagtttatcgaaatcattcttgctagtcttaagttgagcattaagactagccaattcatcatttaacttggaaattgaaactagatgttcactacaagcattaatatcaacatccttacacctagtgcaaatttcaacatgttcaacacaagagttggatttatttgcttctactagtttagcatttaaatcatcgtttatgctctttaagttagaaatagaatcatggcatgttgacacttcacaagcaagcatttcattcctcttaatttctaatgcaagggatttttgagcctctacaaacttatcatgttcttcatacaacaaatcctcttgcttttctaaaagtatattcttttcattcaaggcatcaattaattcattaattttgtctatcttagatctatctaagcccttaaacaaacatgaataatctacttcatcctcatcactagattcgacctcacttgaagaagcataggtagagttgcgagtacataccttcttctcccttgccataaggcatgtgtgacgctcgtttgggaagagggttgatttgttgaaggcggtggcggcgagtccctcattgtcggagtcggaagaggagcaacccgagtcccactccttgcctagatgcgcctccccctttgccttcttgtaatgcttctttttttccctcttgtttcccttttcctggtcactgatcacgattcccttccccttaggatccatctcttcgggcggttagtccctttcttgaagagaacgactctgataccaattgagagcacctagagggggggggggtgaataggtgatcctgtaaaacttcaaaacttaagccacaaaaacttgttaagtgttagcacaattatggccaagtggctagagaggagtcaaaacacaataaccacaagaaatcaatcacagagatgacacggtggttatcccgtggttcggccaagtacaaaacttgcctactccacgttgtggcgtcccaacggacgagagttgcactcaactcctcttaagtgatccaatgatcaacttgaataccacggtgttcttgcttttcttttctcaatcccgtttgcgaggaatctccacaacttggagcctctcgcccttacaaaagatgttcacagagaatcacggagcaggggagggattagcaactcacacacgacacaaagatcacagcgaatacgcacacacaagacccagacttgagctcaagagactagcacactagaaacggagctcaaaatcactagaatgtcgaacaaagtgcgcaagattgatgtgtgagtgatcaagagtgctcaaggaatgcttggttctctcctccatgcgcctaggggtcccttttatagccccaaggcagctaggagccgttgagaacaaatctggaaggccatccttgccttctgtcgtcgggcgcaccggacagtccggtgcacaccggacactgtccggtgcccgatttctttccttaacagtcgcagccgaccgttgccaaccgttgcagatctggcgcaccggacagtccggtgcacaccggacagtccggtgcctccttccgaccgttggccagaccacgtgtcgcgcgcagattccgcggccgaccgttggctcggccgaccgttggctcaccggacagtccggtgcacaccggacagtccggtgaattttagccgtacgccgtcggcaaaattcccgagagcggcgtcttcgggccgaggcagcctggcgcaccggacactgttcggtgcaccaccggacagtccggtgccccagaccgaaacagtctgttggctgtacacagccaacttctccttttcttcttctctctgtttttaacacttagacaaatatattagtacacaaaaccaatgtactaagtcttagaaacatacctttacttgtgatttgcaacttgtccatccaggggcatagattcacatttaagcactttgtgttggcactcaatcaccaaaataattagaaatggcccaagggcacatttccctttcaaagtcgatgcggaccgccgagggaagaaaccggtggtggagactaaagacgaccctgcgccggcggccgccccatcctctaagaagaggaaactaggtactgtcatgggaggacttggggtttccgatggctttgctagagagttgatgaggacgtgcgcggccccgggggaaaggatgtcttcgcccgagctccgggagtcttcggctcggatgctgaaggttaccgggggttgctggcctaggaatgttcctatcccccgcgcggccagcggggacgtttttacatctcgcatggttcgcaaatggagagtttttccttacgagcggaatattgctgctgttgtgtcggcagtgatggacaaggatcgccaggggctgcacaaaagcggtaggcggctatcaggattgttgaagccaggccaaagaggcaaaagcgggagtcggcgaaggctgcggcccccggcggaggcaagccgccgctggcggcgaagtcaggcgtccctgcatctagcaaggcgccagaggcagcgcgcgggcgccggaggctccaaaccggcgaaggctgcgccgccgcccagcagggtggcggaggccgcgaaggcggcccgagcgttgccgtcggcaggcaagcgtgtcgccgacttcgccaccgacatttgtgtggaggactatcttggtggtaagtcgctgtttttttttattcgttgatgcgttgcagggtcggacgagggccagcttgctatggttgcgcctgccgcggcgatcgcgacggctgccatagtgccgaaggcaaggggcgaggctcttggctccggaggcgaggtgtcggccctcgcggttgtcagggacgaggcgggcgcagcgacccgccggctgaaggaggtgacggaggcgctgagtcaggtccgctgagctatactctctcccccccccttttttattttttttaggaaacggccttacatgtgctctgcaggtggctgacttcgccagccgtactgcgtcgggggccctcacggcagctgtgtctgccgaagtcgagagacttcggacgcaacatgctgacgctgtccgtgagaaatcagcctccgacagcaagtgccgtaaactgacggacaaggtggccgcactggagatggagaaggctgacctccggcgccaactggcggcggagaggagggaggccaacgaggccatcgccaaggagcaggctgcgcaggcggaggccaagctggcgcgggcggagggcaatcttgccaaggagctcgccgaacatctgtaggagcggctcaccgccctggagagccgcgcgaagggggccgaggccgcgttgcgtgcggaggccgaacggacgcgcacgcagcttaaggatacatatcgtgagctgggtgcgcggaccggtgacttcgaggtgccggaccgagagcccgggcttcgttgtctgcaatgggtgcaggaggagctgcaggaactccctgctgtcgtgggggggttcatgtcgtacgcctccctggtcacctgcgagggggcgatgaacgcgctctcccgcgaagggtgccggcacttcgaggtcttcgaccaggcggatgaagattttgatcgagatgtctataaggttgaagacctcgtggtgaaggattctgccggggccctctacgaccggatgtggggtccgcacggtcgcgaggtggtcagggagcgggcggagacggcgatggctcaggtgacattttcgtttgtttggcgttttttgggtgtgggttgtgcgtgtgtttgctgaattttgcgtgttttgtcttaggcgttgcgtggcgagcgggtggacgacctcggggcgttgaacagcgcgctgcctgacccggagccgacccctgcggaggccgtgtccggggtcgccctggagccaaccccggagaccgcggcgagcgcgacggctgcccccatatctgctgcggccggcgaagacctgcccccaaaggtggccgaaggcgcccctgatgcccccgcagctgctgtgccgagtgctgaagattccgcggcggaggcggcggaaacaacggcagaagcggcggcggagccagcggcggaggctcccgcagcgtcagggccttcgcaggtggcgtagtgggtgtatagggttggggaattttggatattttgctgaattttggttgctgcgcaggttcaagattttgggcctgcgcacgcaactgctactactgaatttttggcggcttcgaccgcagaaggtggtaatggatatggtgaatctgagttttttgattttactgactctgggagctcggttgagtggactgaggagtcgtctgaggaggacttggattattttgcggccttggacgtggctgcggcggaggctacgccacatgccgcggacgcgccagacgtgccaggtcctagcaccgggcgccgacgacgaagggcggttgcaaagcgtagggttagcgcggaggaaggggctcggcttcgtgtgagtagggctggtcggcaggaactgttgtctttgccggccgccgcgagtacaggggaaggggagctgcgaagtctttttacgggtgaggagcttaggataatgttatttaattatagggagatgggaattattcctaaggttgagccgctgtagagtgtggcgccctcgcttgtatatgtgtaaaggcttgtacgatgaagttgtgtgccctcgcttgcttgtgcctgcgagggcgttgtgtactttgtctggtatgtttggttacgctgtgctggtgtgattatagtcggtcttagcgcggacggtttgatgctgtcgtttctgcttttgttgtactagttcggctgcgcccttaggcggcttctgcgtggatagtcttcgcggtaaacttcgggtttttttttcgcacttttttttcgcacttgttgtgctagtccggctgcacccttaggcgacttctgcgcggagtcttcgcgagagacttcgggttttttcgcacttgttgtgctagtccggctgcacccttaggcgacttctgcgcggatttgtcgcacgcgagggtggctatcgcttagcctcgcggtgacctcgaattggtcgaatgtcgaagaccgtcgtcgcggtcttttttcgacgcatgtttttgcgggggatttttcacacatatattacatggctccgcctcgttaaaaacctcaccccccgggaggaaaagagtgcgggccgttacaagattgtttttggcgaattacaagggcagaatcagccccgatgagtcaaacaaaaaatttgcggaggttgtcgatgtttcaggagtgctccaggtcctcgccgtttggcgttgcgagcctgtaggcgctgggggaagcttttgtcttgactataaaggggccctcccacttgggttccagcttgcccctggactccgtccgagctgttcggacgagtacgaggtccccttcgctgaactccctcgggatgactgcgtggtcgcgccatgctttggtctgggcttggtatttgtttagggcctgcagggcgaagacccggtctccgtcaatgagatcttttgaagttggctcgtccacgtcggggacggctgacggaaccgttcgcggggacccatgctttatttcttgtggggtcatggcctccgatccgtatagaaggcggaaggaagtaaacccagtagccctgcattcagtcgtgtttagtgcccagactgcctcagtaataagtcggtccatctgcccttcttttcatcaaggagcatcttcttgacagctgtgaagattttcccattggcgcgtttcacgaccccgttggactgcggatgataaacagaagcgaaggctagcttggtgccaatggagaaacaaaaatccttgaagtcctggttgtcaaactgcttgccgttgtcaactgttagctcggagggtactccgaagcggcaaacaatgttctgccagaagaatttttgggcagtctttgatgtgattgtagaaacagccctcgcttcaatccatttggtgaagtattcgacggctacgaaggcgaacttaaggttcccctgagcggtgggcaggggcccgacaatgtccaggccccagcgctggagaggccatgtatgggcaatcagctttgtatactgcgaggggttgcctgaccgaggagaaaacttctggcaggcttcgcaggaccttgtgacccgatttgcggcgcagatcattgcaggccagtaaaacccttggcggatcaccttggcagctagggcccttggccctgcgtgcgagccgcacgtgccactgtggacttcgcgtaggatctgcatgccttcggtttcggtgacgcatttaagcattggctgactgacccatttcttgtatagttggccctcaatcagtgcgaagtcccggcttcgatgtctgaggcgcttggcctcactgacgtcggttggatgatagtacccctgtaggaacagggttattggtgcccgccagtcttcggtcatgattaggttgactatgcggtggccctcgctatcattagttatttggagcccttcggggctccggacggctggcgtgccgatggtgtgaaagaacacgtcggagggcaagggctcgcccctggcggcagccttggccaatgcatcggcctcctcgttcttggccctatccacatgctgcaaggtgaatcccttgaactgtctctcgagacttcggatggccgcgaggtattgcatgagcgcggggtcttttgctgcaaagtctttctcgacctggccggcaactatcttggagtctgttttgatgatacatgtggtgactccgagggcccttagcttgcggaggccgaggataaccgcttcatactctgctatattgtttgtgcatctgtcggattccagagcgaagctgaggcgtgctgcatatctgtgtttgactccggctggtgaggtgacgactgcagcgacgcctgcccccgcatggcaccatgcgccgtcgcaatggatagtccaaaccttctctgtggacgggtctggctgtgttattggcccagtccagtcgacgacgaagtctgccaggacttgtgacttgatggctgtcctgggctcgaagctgatgtggtagccggatagttcggctgcccacttggcaatcctcaccgatgcctccgggtttctgaagagttcgccgagtcctctgtctgaggtgactcggaccttgaatgcttcaaagtaatggcgcagtttgcgcgaggacataacgactgcgtaggcgatcttctccagctctgtcttgttgcacttggacgatgtcagtacctcggagacatagtaaacagggcactgtctgaccgcaccctcaactgtctgctcctgcactagtgccgcgctgaccgcgtgcggcgaagccgcgacatagagcagtagggggagcgaggagtcggggcttgtgaggatggccagctccgacaggtactgttttagtgaggcgaaagccgcttcttgctccggtccccaggcgaagtcttttgcaccgcggagtgttttgaggaaggggagacttcgctcggcggacctggagatgaatctgttgagagcggccaatctgcctgtcagacgttggacgtccctggcggactgcggaggcgacatgtctacgatggcctggatcttggttgggttggcctcgatgccgcggtgtgacaccaggtaacccaatatcttgccctggcgaacaccgaagacgcacttttccgggtttaggcggagtcgtgcatctcgcatgttcgcgaatgtctcggcgaggtcggcgagatggtcctccttattcttgctggcgacgacgatgtcgtccacatatgtaaatatatttctgccgacctgcccttcgagtactgttttggtgagtctggagaaggtggacccggcattctgatgaagcaataagtgccgaagggtgttataaagctggtgctagccttgtcttcctccttcatgtatatctggtgatagccggagaagcagtcgaggagtgacatgacctcgcatccggccgcgctatcgactattttgtcgatccgtggcagcgggaaattgtcctttgggcaggccttattgagactggtgaagtctatgcacattcgccatttcccgctttttttctgcaccattacaacattggagagccacgtggggtaagccactggctcgatgaatttagcctctaggaggcggtgcacctccgccttggcggcctctgtcttttcgtcggacattttgcgaagcctttgcttttttggtcgcaccgaagggtcaattcccaagctgtgctcaattatggatcggctgactccgaccaggtcgagggcggaccaggcgaagacatctttattcttggccaggcagcagagaagcttctcttcttcatgtgaggtgaggtcttcgctgatagtgactgtctgcttgggcgtggactgatcgagggggacagtcttggtcccgtcttggctctgcaactgtgccttgtcgtgctgcttatcggttgggctggcgggcgcagggacctcgcgctgggtcgtgagacagtgtacgttcctctgaccaggcacgaagtcccgctctatgttgcgcgccgtctgctggttgccgtagatcgtaatagcgcctagcggacctgatatcttcatacataggtacagtccgtggatggcagcttcgaacttattgatggagccccggcccatgatggcgttgtatggatataccatgtcgacaatattgaaggttacttgctcacttcgggcattgggtgctacaccgaaggagaggggcaactctattttgccaacgggaaaggtgcccttgccgccgaagccatacaacgggttgtccgaaggcttgagcaggctgtggcttatacccatgcggtcgaaggcgtggaggaagatgatgtccgcctgactgccgttgtcgactaggactttgtgtaagtcccagcctgccacgctgcaattgatgaccatagcgtcgatgtggggggcgctgcgcaggtcgacgtctcgtgcgtcgaaggttagcggtatgtgggaccactttgtctgcacgactgggccagtgacgacgacatggttgatgctgcggtagtggtcccgcttctgccgcttggtgtcgaagtcagtgctggacccccctgttatcatgtgaatgactccgtgatatggttgatcggcgaagtcttcctgctttggggcatgggggatgttttgatgttgctggtgtggtggtggttgtggaggaggtacgatttgtacttcctgatggtgttggtaagcgtgatgcggtggatgcggggcgggagcgtggatatatggtggagggggtggctggtaattatgcgcgacaattctgggattgtcggctggctgcgcccgcgccattctgtctctggtagccttcgtttcggggcagtctttggtttggtgggcgcagtcttcgccgtggaaaaggcagtagaaccggcgcggcggctgcgcgcgccctcggctcctgccacgagttccatttccgcggccctgggggtgatattcctggcgacgaggggggtcagcagcaggctgctggttggcgatgttgtgcacttgctgctgactgcggccatctcgaccggagtctggctgcggagtcctcgtccacgtgcggctggactgcggggcatctttgggtttccgctgtgactcaaccttgcgctggtggagctcttcggatttggcatatttttcaaagagctgatatagctcctggaggttcttgggtggatctctgatacagtgactgtagaggacgccggcccgaaggccactgatggcgtagtggatagcgatctgatcatcgacggagggcagctgtgacttgagtgttaagaatttgcggtaatactcccgcagagtctccttttccagctgtttgcaaagcgagagctcggccaaggcgtcggtgtctgggcggtacccttggaagttgagcaggaacttgtccctgagacttctccatgaatcaatggatagcggaggcaatctggtgaaccaggtgagtgctgggccctctagggcgatgatgaaagacttcgccattgtggcgtcgtcccctccggcggatgcaacggggacctgataactcattatgtattgcgccgggtcggtgctgccattgtacttgggataggtccctgctcggaagttagctggccaaggcgtcacttgcaggtgtggcgccagggaacttcgctcgtcgaggtagttgaccccttggaatggcgcgccgtgctggaaggtgtagtcacgctgggggaaacgcgggttctccggctgtgcccggtgttgcaggggtgggccatgctgcaggccgaggtggccttcgcgcgtgtcttccggttgtgcgcgctgctggaggggtggctcttgctgcaggccaaggtggccttcgcgctgcatcagcgcgatctcgcgctcgaggtcttgggccttctgctcctcgtcgcgtatcatttgccgcaccttggctagtgcggacacacgctggcgcttggcctcagtatctctttctgcctctggaggttgcggttcttgaggcgcagggcgcgcagctgtagctgttcttctgttgagacgccgaggacctcgccgtcctcggtgaggtccgcgccctccagtggggcgaagcctgggggcggctgcaattgtccttcgggcccgcaggtgcggaaggtgtcgtcttcgcaggtgcggggaacattgtctttcagtggggctcttggtgggtggattgggtgagggcaagggccttgccctttcttgcggcaagcagtgctgccttcgcagcctcgtcagccttcgggttagctctcttgggtgccatcgcgggtggttttgtcgtagcacgaacggtgggcgccaaatgttggaacttgctgtcagtcgcaagaaggccaacaggggtgaacagtgtggacagtagggttacgcgtgagatggcaaatagctctgttaaccaggcctctcacgggcactgtgcgggggtatttataggtacctgaacgcccagcgccttgtgctaaggacgcatgtgccctcagctacctaggttatccccagaatattcccataaagcagggttacagactgtaattacagggatgcctttacaaattaggcccgtaacacgcggcggctacgcagggcccgttacaatgggccggatcgcacgtgggcctctgagctggacgaggccgcactgtgggataccttcgtcgccggtcttcgtctggtgccgatcaagcgaagggtgcccctgcctgctttgtctgtcagaacagcggttgaacagcggagacttcgagcgaagggtggcgtttctgccttcgctccaacaatcggatgacttgaaaatattgcctgtgcttcaaatgttgcttggttacatttgcacatttgatgttgagaattgatactatgggaagacaatgactcgatccattaaaagaatttgttagagggaggagattgttgatacattaagaacttaagaagtttgtttgagagttttttgggtatttggttagaggtttttgggaagttttggaggaagggagcgaatggacttacttcaatctcagtttgctaagttgactgtgttatgatacatgagctaactcggtagacatgaattagatccaatcgctttgggttgccaagaaacttgtccaaagtcccttcaaagggactgcataattgatgcctaaccaaacaatacctaatagtcagaactgtgaatcacatttgcaccataacatacttcagtttccattcttctttgcataatttctttggtaccttcctcctcggtcattttttaagtactttcaaatgtaatagctttttatctatttatacatgtattatcttatgaattcaagtccattcccctgttgatcgtaaccaagacaccaaatgtttagcaaaatgcatattcctttgtatttgaatgctattttttatgtttcgttcttctggtaatacatttaatctttacaggagtgtgattaccta

SEQ ID NO: 459 - DNA, 2146 bp, Zea mays
  Intron number 1 from transcript GRMZM5G809579_T01 (locus G RMZM5G809579) derived from phytozome v7.0 (chr-ID 3; pos 4 587818 to 4589963)
gccctgacatccagagctaacagaaagagcactgcctattgcaaaccaattgccattagttttagttttggtgtgactacccacaatacgacctatacttggcaagcgacagctaaaaaatcctttgtaaggcaatacaaaattaaggtgtcaaggatattgctcctctcattgctgttgcagtaccaaataagtataaagatgaaaatactgttcaacagaataaatttcttttgcgttaaatgaaaaggagggattgcccttgagcaaaggtcagtctaggagacagaagcataaaacattttttctctctaagaaacacaaatgatttcgacggggaaataatgtgatgatttgggatcttcagttgagtctcacacatctgagttcaactgaacatttgacgccagatttcgtagatacaaataaatagaataagtttcttttgcgttaaatgaaaaggagggatttcccttgagcaaagggcagtctaggagacagatctaaaacagccaacctggtggttgcgcttcgcctcagttaagcagaaaactccaaaatcagagtaaaacatggcacaaatctgttgtagtttccctacaatattcttggagacatgtgcatagtcaaataatcatatgagttgtagggtagcaaattctagaatactgcaagttaaataatcatatcagttgtagtataaaatatatatggtacgacaaacaatactattatatgcaaaatttgttggacaaaatgcgccataatattattataaatatgccaatctaaatagacttaattgatgtcgaacaaacattatcaatatcgcacaaattatttctaaagaatcaatatagactcttttgacgaccgtacactaatctattcttttttagcgatattgattagtctctagtgtatgtttgcacaacatcaggtaatatcctcatgagaaattgagataatgaaaggttgggtttagaaaattgagtcagccaaaactgagaagaaacagctaaggttgacctcagttagtaggtagcagtggcttagcaatagcagtttttagttaccagtggcttcagctagcaaatagcagtttaacaagtttgaacaagttctaattagcaagtagtagtggcttagcagtatcagttaagcaagttgcttagtagtagcatgtttcagtttagcagtagcatgttttcgagactgatcagggcaaagcaactgattctagccaataggaggttttaaggttgcaagggaaaaggggtattaccggtgatggtaagattctgtcaagtcaaactgaggtggatgggaaggctggtaatggtaggattccaataaagaggtgttttaaagctcctgccgaagaacaatggcgttgtgatggagagtaatgattgcaaggtggatgaagacactggggacgataggatttcaatgaagaacactaaggtggttgatctgcaagccacatctggccatgtgctcaacaaggttgaaatgaagaagccaaggggaggacccctgaacaaacataagtaggatctcagtaacaagataaaacatttgcttttagatattgggtgaaaattgacataaggcagaggaaaaacaaagattatgaagactcggtctatgtttctcctaacgagactggctattggtgcagttttccaagaatagtttcaaaatatgggtcactcatctaaacttaataatactaaaccaggtgcttcattagctctatattgaaggatgatctagcattgctaaaaaagaatatagtgaagaagactaataagaaaatttgtggtgctgaaaagaaacctggggttagcagaaacatagtctcaaaagatatccttgcaaatagagattctagaaacaagcaccagaacaaggaggagaatagacaattcagtttagtagtattttcactgaaaactgaatcactgaaaatcgaatgagactctgtcgtaacctcctagactgaaataaaatagcacatagcattatagcacagatcaaacataccagtatgaacaaaattgagctaagtattaagagagaaaaagagaaagcatgaagcaactaaccaaatcttggaggacttatcaaaaactaaattgca

SEQ ID NO: 460 - DNA, 3118 bp, Zea mays
  Intron number 2 from transcript GRMZM2G115757_T01 (locus G RMZM2G115757) derived from phytozome v7.0 (chr-ID 7; pos 1 37455539 to 137458656)
ccggggacgtgtcggagctccagatcggcgtcaaggtatcctactaggactgttttcccccactcatgtgcgatatgttatgtttcattccctatgttatgtttcattccctccattcattgttggattggactgggccaagcagagcagtatggaactgttgttttaatcagactggagattctgcttacggggacagcatagtttttactttctagaacggatcgagaattgtagaaacacgatgttatgggagtgatgatctatgaaaataaggaattgtggtgaaagtaagctgtgcaggagaattcaatcatttttgtgggattgactggaccattgggcaaaaaggttatatgcttgctcgatataaaattcgtgtgtttattttgatgggaaatttggatatttgagactccaaataatgcattttgcagtttccaattaacgctgccttagcaaaaacacgacatgttccacttgattacaatgtcatttcgtgtattttcttctgttcctattttctcctcgtacttggcgtttgaaaggatattttttgccgttatgcatgtttatgtgtcgaattgcaatggatggctgcccgctcgctctagcctagagatggcaatgggtacccgcgagccgatacccgatgggtatttactccattagggtatgtacgtgggttaaatattctatctgtgggtctgttatcgggcaaaaatcttcacccaatgggtaaacgggtattagaacgttccaccttcactcatacccgttaacccgtgggtataaaatacccaatataaacttagccaagcatgaatttagactttagtcatccatcttttttaatatttaataatcttttaggtcattatgtcatagaaggcttaacgacaatttaatgaccatgtaatggaacatgtaattcactcattgtgtgttgaatggatggttaaatgatgctagaaattttgtaatggtatttagatggatatactcgatgtttgtataatataatattttgatagatgtttaatttttgtgggtacgggtgacccgatgggtgacccatacccacgtgggtatgggtatgggggtaaatccatacccaccagtgtacatgggtgactcggtggggttatttttttatcgtgtgtatgggtatggggtagtaatacccggtgggtatttacccattgccatctctactctagcctctagccatgaccgccaccggtctgcccctgtcgccccagcgttggccacggcaacccttgcgctagcagcgctcgctccccgcttggccccgcccggccttacgctggccacacctgttgcctgcctcgcgcttgccctcgcactggctgtgtctaaaagtttttgaactgcgcaaaaaaaaacttttcacaacaccacacaataacacataatagatatataaattatgagcatatcacacaataacaaacacaaatgagttcatcttataaaactacgaatttagcctaaataagttcattaaaaaactatatttttgttccaactgagttgcatatcataccaaaaatattatgagtttatattttatcacaaaataaaacattcatatatcataaaaataccattcatccaatatgtagcctattctttgaagtttgaagttatcttaattgatgtagctagaataggaattctcataggacttaatactagtctgtatagaattgtcctctctaacaagaacgcaactcggttgcacagaaatatagtatgacaattacatatatgtaaatatattctatatggtagttgtgttaatatttcttatattttaatgatacttattggaccatctcgtattatttcttcaatagtttgcttatgtagtatgctaagttctcatgacttagcttttgtaacattcctactaggatgatttcgctttctacaagtaaaataaataaattttataataatataatgcctcaagttttagatgaagaaaattaatacttgtcttttttgttgtcctattgagtgggcatttggaactatcttgcttgtgatctttttcatcacatctcatgcaagttatacgttctcttatcattttctttccctttgtattggttggagcagtagtattatcatctccgttgataccgttattatcttgacacattttcgcttgtggccacctttcatatgtccttttagtcttaattttcttcgtcttcctgcagtttttttagcaagtggtgcaacaacaacaaaagatagtttgactttggccattagattttgtcagtcaatggctcaatttctaacataagcattctttaatttattcaccgagttatactcatacacaaattattcaaggttaacttaacttactgttgtctggttacaaaggtcaatacatattaacatggcttaccagtatgttaccattcaagacaagtgcatgtcatttgatttaactttataacatgtctttcaattttcttgctatggtctcaaaactttacactgcaatcagcaaatggtacaattttcaagtccccgaaacctcagtatttgctctaaactgaagtataatatttggaagtatcattcttttaggtagtctatataatatttcatttttttccataattgcatgatcatttctttaatcctatcaagaagcttaacaatatgtaagcctttaatgtctcatctccgattattgaagatctttttctgtattcaatattgacctctaatgatattgaaccttagcaagaggtcttcaataacaagatataagatattcaagacttacgtgttgctgagattgctgataagattatagaattgaacatgcaattatagaacaagagaataaatatttgatacagactacctgaaggacggacactttgaactattattcttaagatcaaagaaaataatagagatttgggacacttaaaattgtaccatatgctaattggagtgcaaaaatttaggatcgcatgtgctgccatcatttgcaccaattattttaggcaggttcttatattgatgctatgcctgggtattttaaaatgcagtacaagccggaatc

SEQ ID NO: 461 - DNA, 10861 bp, Zea mays
  Intron number 3 from transcript GRMZM2G161819_T01 (locus G RMZM2G161819) derived from phytozome v7.0 (chr-ID 3; pos 2 02368544 to 202379404 reverse strand)
tccttgccattaccatttgccttcagccaagtggagtatgtcgggctgtcacttttcagcagacctgaagttcttgccaataccttcatttggtcaagttattacttgcaattatcaggtgccttcagttgagtggaccatgcatgttcgcagtttttcagtggatctcacgtttttactcttacccttgtttgatctggtcgtgggcatggacaggctacaacgatatagtcctatgctagtgaactggtctaacaaatggatgagcattccctatcaaggagcaactaggtgtttacaaggtgttcacccttctgtttccacaggagcaatagtggagctgtggttactctcggccacctcccagcagaaccgtttccctgacagcaagatgccaataatcaatactcaggtgcaggatattcattaccagtttttggatatttttgaggatctagttgggttgcctccaagcaggcctggtgatcacaatatccctctgttactcggtgcacatatgtttactgtgtgcctctatcagtacacaccgactctcaaagatcatgatacgtaagcacaagagttattgactcaattggtcatcgtctctgcatatcccaattcacctttcactatgcagttggtatatggttcaagtgatctggtcagggatggatgcttcgcatgcaacttgggaggacgccgaagcgcagaagaatcactttccattagtggtcgcttggggacaagcggcgttcgaagaagggggaatgtcagcatcagcccttcgacagagcaggtcttgccggttgtggcacaggagcggttgaacgctgagttggatgatgggtcagaagagcaagctgatgatgggctgagaaggggcgttctgtcaaaggaaaatgaacccacgatgcacaagcagagactggagtatatatatagtaggaatgtgttgcggtagagggtatgaaatgtaataacctaaacttccacttgtttccgaccgtcacggcgctaccagctctctaccgtatctctctgttcctctgtatcttcctcttctctcatacatctccactagtaatctattaacagagggtttttatcctttgaaagaaggtcaaatattttagataccaatttttgagaaactcctccttaaaatatagatattgagatagaatttcttagaagggtactaatctcaaagataccaattgaaaaacaactttgcttcgaatttttttgaaattagcgtggtggtgcggtccttttgctttgggctaatactctctcccccgttggcattaatcgccaaaaacggagtagttagagccctttttaaaccccccctttggcaaacaatatatgagtgaaagattataccaatgtggagagcgatacggagtgacggcgaagggtaaataataccagtagagtggagtggaagccttgtcgtcgccgaagactccatttccctttcaatctatgacttagcatgtaatacacttggaaacacattagtcatagcacatgaaagagatatgatcaaaggtacataaatgagctatgtgtacaaagtgtcaatcaaaattcctagaatcaagaatgtttagctcattcctaagtttggtaaaagttttctcatctaatggtttggtaaagatatcgactaattgttctttggtgctaacataagcaatctcgatatccccccttggttggtgatccctcaaaaagtgataccaaattagggatggcaattttacccgcgggttcaagtatccatggatatccgacccgtcggtttcgggttcgggtacgaaatttaacccgcgggtctcacccatacccgacccgtgataaaatcgggtcgggtacgtgttttatatttcacctgcgggtcctgacggatatccgaattattcttagttttcagcccaccagagtctagaaaccggcccaatgtccatttttattccctattcagtattcacgtctctcctctctggctctctcacgccgtcacgcgtctctctctgtctcagcccgtcagccgcctgcccgacggcgcctagccacaagcttgcgtccctgccgtccgtccggcgtccctgcgcccagaaaggcagaaccgtagaaaccgagcgccctgcccctgcgtccgtccgacgtccctatcgtccagcggttcaggtccggcagcagttcaggtccggctgccatggtgtcggtgaaccgatcagccggtgccgcctgcgccctgcctgcgaccctgcgtgcctgcgtggctccattctccacccgccaccactagcgagcggacctgcgtccctggagctgtggagtgcccctagcctacgaccggcgaccctgcgtccgtggctccatctccgccgccactcgacattgctagcgaggagcgagtgtacctgcgtagctgcgctgcttccctggctccatctacatagtccttgccgccctgcaagtggatccgataggttctcacaccatccatggcgcctaaaagtggatccaactctgagtgtaattatacccgcgggtatccgatacccgcccgatatccgatgggtacgggcacgggtacaaaatcctacccgcgggtatagtcgcgggcgggtatgagtaatacccgcggtattgttgcgggcggatatttaccatacccgatttgaacctgacccattgccatccctataccgaatggctatgtgcttagtgcggctgtgttcaacgagattatccgccatgcggattgcactatcattatcacataggagacgaactttggttaatttgtagccatagtccctaagggtttgcctcatccaaagaaattgctcgcaacaatgacctgcggcaatatactcggcttcggcggtagaaagacctattgaattttgtttctttgaagcccaagacaccagagatcttcccagaaactgacaagtccctgatgtgctctttctatcaattttacaccctgcccaatcagcatctgaataacctattaagtcaaaagtggatcccttggggtaccaaagaccaaacttaggtgtatgaactaaatatctcaagattcttttcacgaccctaaggtgaacttccttaggatcggcttggaatcttgcacacatgcatacagaaagcataatattcgatcgagatgcacataaatagagtaaagatcctatcatcgaccggtataccttttgatctacggatttacctcccgcgtcgaggtcgagatgcccattggtcccatgggtgtcttgatgggcttggcatccttcattccaaacttagtgagtatgtcttgaatgtacttcatttggctaatgaaggtgccctcttggagttgtttgacttgaaatcctaggaaatacttcaactcccccatcatagacatatcgaatttttgaatcataatcctactaaactcttcacaagtagatttgttagtagacccaaatatgatatcatcaacataaatttggcatacaaacaaatcatttgcaatagttttagtaaagagagtaggatcggctttttcgactttgaagccattagtgataagaaaatctcttaggcattcataccatgctcttggggcttgcttgagcccataaagggccttagagagcttatagacgtgattagggtactcactatcttcaaagccaggaggttgctcaacatagacctcttccttgattggtccattgaggaaggcacttttcacgtccatttgataaagtctgaagccatggtaagtagcataggcaagtaatatacgaattgactcaagcctagctacgggtgcataggtttcaccgaaatccaaaccttcgacttgtgaatatcccttggctacaagtcaggctttgttccttgtcaccacaccatgctcatcttgtttgttgcggaagacccacttggttcctacaacattttgattaggacgtggaactaaatatcatacctcattcctcgtgaagttgttgagttcctcttgcattgccaacacccaatctgaatctcttaatgtgtcttccaccctgtatggctcaatagaagacacaaaagagtaatgttcacaaaaatgagcgacatgagatcgagtggttacccccttatgaatatcaccgaggatggagttcatggggtgatctcgttgcatcgcttgatggactcttgggtgtggcggtcttggaccctgatcgtcttccttgtcttgatcattggcatctccccctatatcattgtcctcctcttgaggtggctcttcttcattttcattatcttgagcttgatcctcatcttgagttggtggagatccttgcatggaagatgacggttgatcttgtgcttgtgtgggctctttggattccttaggacacacatccctaatggacatgttccttagtgcgacgcatggagcctcttcatcatctagctcatcaagatcaacttgctctacttgagagtcgttagtctcatcaaacacaatatcacaagacacttcaactagtcaagtggacttgttaaagactctatatgcccttgtgtttgaatcataaccaagtaaaaagccttctacagccttaggagcgaatttagattttctacctcttttgacaagaataaaacatttgctaccaaatactctaaaatatgaaacattgggctttttaccggttaggagttcatatgatgtcttattgaggattcagtgaaggtagagacggttgatggcgtagcaagcgatgttgattgcttccgcccaaaaccggtctgaagtcttgtactaatcaagcatggtcctcgccatgtcaagtagagttctattcttcctctccactacaccattttgttgaggtgtgtagggagaagagaactcatgcttgatgccctcgtcctcaagaaagccttctatttgagagttcttgaactccgtcccattgtcgcttctaatcttttttatccttaagtcaaactcattttgagcccgtctcaagaatccctttaaggtctcttgggtttgagatttatcctggaaaaagaacacccaagtgaagtgagaataatcatccacaataactagacaatacttactcccactgatgcttatgtaagctatcgggctgaataggtccatgtggaatagctcaagtggcctgtcggtcgtcatgatgttcttgtgtggatgatgaacaccaacttgcttccctgcttgacatgcgctacaaaccctgtctttcttaaaatgaacattggttagttccaaaatgtgttctccctttagaagcttgtgaagattcttcatcccaacatgggctagtcggcgatgctagagccaacccatattagtcttagcaatcaagcaagtatcgagttcagccctattgaaatcaactaagtatagctgaccctctaatactctcttaaatgctactgaatcatcacttcttctaaagacagtaacacctatatccgtaaaaagacagttgtaacccattttgcataattgagaaacagaaagcaaattgtaatctaaagaatctacaagaaaaacattggaaatagaatggtcatgtgatatagcaattttaccaagtcctttgaccaaaccttgatttctatccccgaatgtcatagctctttgggggatcatcatttttctcgtagaaggagaacatccttttctccccagtcatgtggtttgtgcatccgctatcaatgatccaacttgagcctccggatgcataaacctacaaaataagtttaggccttgttcttaggtacccaaacggtcttgggtcctttcacattagaaacaaacaccttaggtacccaaacacaagtctttgaccccttgtgtttgcccccaacatatttggcaactactttgcctgatttgttagttaaaacatatgatgcatcaaaagtcttaaatgaaacattgggttcatttgatgcaataggggatttctttttaggcaatttaacatgagtggattgcctagaactagatgcctcactcttatacataaaagcatgatgagagccagagtgagacttcctagaatgaattctcctaatcttgtgctcaggataaccagcaggatacaaaatatagccctcattatcctgagccgtgggagccttacccttaacaaaattagataatttcttgggggcattaagtttaacattgcctccctgttggaagccaatgccatccttaatgccagggtgtctcccactataaaacatacttctagcaaatttaaaattttcattttctaagtcatgctcattaattttagcactaagttgagctatgtgatcattttgttgtttgattaaggctaggtgatcatggatagcatcaacattaatgtctctacatctagtacaaatggaaacatggctaacaatagatgtagagggtttgcaagcatttaattcatcaatcttagcatgtaatatggcattctcatttataagattggaaatagaatcattacaaacatttaaatccttagccttagtaattaaattaccattctcaatcttaaggctagaaagtgattcattcaacttgtcaattttagaaattaaactagcattatcatttttgaggttgacaagagaatcatcacaaacatttaacttctcaaccttagcaattaatttggcattttcaattctaaggttagagatagtatcatggcaaatgctaagctcactagtcaatttttcacattttcctatctcctgagcataagcatttttaaccttaacatgcttctcgttttccttaattaggaagtcttcttggctatccaaaagttcatccttctcatgaatagcactaattaattcattcaatttttccttttgttgcatgttgaggttggcaaaaagtgtgagcaaatcatcctcatcatcactagagctagcctcatcactagatgttgcatatttagtggaagctctagattttaccttcttctttttgtcgtcctttgccatgaggcacttgtggccgacgttggggaagagaagacccttgtttacggcgatgttggcggcatcctcgtcggaggagtcggtggagctctcatcggagtcccactcccgacaaacgtgggcatcaccgcacttctgcttgtagtacctcttcttctcctttttcttacccctcttgtcgtcgcccctgccactatcacttgataatggacatttagcaataaaatgactgggcttaccacatttgtagcaaactttcttggagcggggcttgtaatcttttcccctcctttgcttgaggatttggcgaaagcttttgatgattagtgtcatctccccattgtcgagcttggaggcgtcgatggggagcctacttgacgtagactcttctttcttctcctccgtcgctttgaatgcaacgggttgcacctcgggtgtggaggtggtgcctcgctcgatgatttgtttggagcctttgatcatcaactcaaagctcacaaactttcctatcacctcctcgagagacattagcttatatctaggatcaccacgaattaattgaacttgtgtaggattaagaaaaacgagtgatcttagaataaccttgaccatttcatggtcatcccattttgtgctcccgaggttgcgcacttgatccaccaaggtcttgagccggttgtaaatggcttgtggctcctctccttggttgagcatgaatcgaccgagctccccctcgatcgtttcccgcttggtgatcttggtcacctcatctccttcgtgcgcggtcttgagcacgtcccaaatctctttggcactcttcaacccttgcaccttattatactcctctcgacttagagaggcgaggagtatagtgatggcttgggagttgaagtgccggatttggtcgacctcctccgaatcatagtccttgtccccttcctttggtacctgcgcaccatactcaacaatatcccatatgcttttgtggagtgaggttaggtgatgcctcattttatcactccacatagaataatcttcaccgtaaaaaaccggttgtttgcctaatgggacggaaagtaatggagtgcgtttggaaatgcgaggatagtgaaggggcatcttactatacttcttgcgctcatggcgcttagaagtggcggatgccgatttggagctagaggtggagggtgacgaagagtcggtctcgtagtagaccactttcttcatcttcttcttcttgtcacctctccgttgtgtcttgatggaggaagaggattcctccttgtgcttgtggccagactccctcgagtgtgttctccccgagcttgtggacttgtcgccgccggtcccgatctccctcttggcggatgctcccgacatcacttcgagtggttagactctaatgaagtaccaggctttgataccaattgaaagtcgcctaggggggtgaataggcaaatctgatatctacaaactttaggcacaactacaagccggggttagcgttagaaataaagtcgagtccgaaagagagggcgaaaacaaatcacaagcaaatgaaagcggatgacatggtgatttgttttattgaagttcggttcttgcaaacctactccccattgaggtgttcacaaagaccgagtctctttcaatcctttccctctctcaaacggtcacctagaccgagtgagcttttctcctcaatcaaatgggtcacttagaccccacaaggaccaccacaacttggtgtctcttgctttgattacaaaggtgttgagaacaagaaatgggaagaagaaaatcgatccaagcgacaagaactcaaatggacacaaatatctctctctcactagtcactaattgtttggagtgattccggacttgggagaggattcgatctcttgtttgtgtcttggagtgaagtctagagctcttgtattgaatgcaatggctgaaaacttggatgccttgaagtgttgtggttggggggtatttatagccccaaccaccaaaatggtcgttggggaggttgtctgtcgatgggcgcaccggactgtccggtgtgccaccggacactgtccggtgtgccagccacgtcacccaaccgttagggttcgaccgttggagctctgacagcctaggccacctgacagtccggtggtgcaccggacagtcactgttcactgtccggtgcgccttctggcgctgctatgacttctgcgcgtgctgtccacgcactgtagtgcattgttcactttttgcagacgaccgttggcgctgttaggcgttgctctgcatggcacaccggacagtccggtgaattataacggagtggctctccaaaaacctgaagctgagcagttcagagttggtctccctggtgcaccggacactgtccgatggcacaccggacagtccggtgcgccagaccatggcagccttcggttggttttgctcctttctttttgaaccctattttggactttttgtttgtttgtgttgaacctttggcacttgtagaacttataatctagtgcaaactagttagtccaattatttgtgttgggcaattcaaccaccaaaattatttaggaaaaggtttgaccctatttccctttcagttggtccacgtgcaacggagttcgatgattcatcccatatagtgcttgggcggtgacatcttcaaactagcctggtagccgttgttgtaagagaattatgcataaggtagccttttgtcccaacctgacttatcttgcaaagcacaagctttcaacatatattctaagatttggttagttctttcagtctgaccatctatctgcgggtgataagctgaattgaacttcaaatgtgtgcccaaggcttcatgcaactgctgctaaaagtgagaagtaaactaggttccccaatccgatactatcttctttggtactccatgcaagcatacaatccgagacaagtataactctgccaacactgcactattataggtggtcttgactggtatgaaatgagccgcctttgttaagcggaccacgagaacccagatggagccataaccggctcaagtgcgaggcaaaccgactataaagtccatcccaatcttatcccacttctattgaggaatctataacgactgcaacaaacctgcgggtctttgatgctccgccttaattctctgacagctatcacatatggcaacatactctgcgatctcccttttcattccataccaccagaaacttttctccagttcttggtacatcttctcgctgctaggagggaaactgatagcagcacccagcaagataacaatgccaatcaccatcggttacatacacaacaccagaactgagcaagttgtatttgacatagtagacatggagtacccctgcaatgcagttattggaaggtgaacattaaatgccttcgaagcagtattatacccagcatacttatgcatgaaaataccatcaaattaaggtccaattgttgtacatggaagtcaagaagctacaagaagagccgaaggaaactggacagactccaaggctatccacaacatagacgaagctaaagcccatcaacaacataaacatgtaagggataaggcagcttcggcagatcaaccaaaatctatactcttatgtgaagatataactgatcaaaaggtgttgtttggatctcagttaaccgaggagcaagaaaaaaaattatgtctgaagctttgctgcaaatgctaaaaccttagtttctatttgcaggtgcatattcagttctgccattgatctactatacc

SEQ ID NO: 462 - DNA, 1513 bp, Zea mays
  Intron number 7 from transcript GRMZM5G876003_T03 (locus G RMZM5G876003) derived from phytozome v7.0 (chr-ID 4; pos 2 32140132 to 232141644 reverse strand)
ccattatccagcttggcttttcgcttgtttcaaaggtttgtatgttttccaactgagttctagatttgaattgttattatgtagttgtacacaataagcgcctgtaagtactgaaacatgtggtgctaactagcattggttctctatggacccaatcaatctactttccaatctccagaattgcatatgtaaggtcgaccatatggccctattatggatgccttcctaggcccacactatcggcgatgcaagaagcatatgggcaagcattaggcatggtttcagagatgcagtcgaattggaagttaagttagctaatcgttaggagattagttagcctcggtttactaggtcctaattgagattggttgcaagcttgattatgttttaatggcctaatggaagaaaatcaagcaagagttaatttatttgacatgattctccagagcctccttgagaggacaaacatgctccgcgtcgtgctgcgacgtttccatttactacctatacaagaatcgttcacggcctgataaaggagcacctcaaatgcttgcctgtgaatttcttcaatttgatattttggttcacttgcagagttgcaattattgaatgaaaattgatatatcttgcttgcatgatccattccattcgttgttttctcctggtttaattttggttatggtttgtgtggtgtctaacacgagctagcgtgcggtgccgtaaataccatgggacaggcacaactatggtcctgtttggttcctagctcatttttagaatctcattctagaatcccattattagccaaacaactcctagctttggtactggattttgtgctagaatctcacaatctcaacataagttgataataacatttacattggattttgtgtagtatccaacttgtcaaaatctatagggaaccaaacaccacatatattgtatcatccaggacgttatgtcctgtagaatgaaaatagctgggttacctaaatatatggtggcactatgtggctcctaagtattgagtactactccctccgtcccaaaatataattcgttttagattaatcatatattcattaagtaacatatgaacgtagtttccatgtatatctatattcattatcatttgagtgaatgtggacggaaaaaaagtgagctagaaagaactatattttgggactgagggagtattaaattatgagtctgagagctttgctcgctgcatccttgcaatacctgagagctaatcagttcgttaactatttgtggagttggtatgcaatgccggtttgtgaaacatttgcttcgatttgcgattgccatgtttttacatgtgaacatccgtaatggactagacgtttgctcggtcccttacattttggcaccttcatgattttttatatacagtgcatttttttactaatgaaatattgcacttcatttgcttgataatagattattctgatggtactttctaattggctatcggtatcgtttctgcagg

SEQ ID NO: 463 - DNA, 1323 bp, Zea mays
  Intron number 3 from transcript GRMZM2G171444_T02 (locus G RMZM2G171444) derived from phytozome v7.0 (chr-ID 5; pos 1 90752479 to 190753801 reverse strand)
attgctggtgtaggagttgagattaccttcccagtgtaagttgtttgtgtgttcacctgtgctgtgtagatatttgcttaatattttgcagtgacactgttaaaatattagcactcaatttttttttatgtatgcatggaaacaattgactggatctatgtcattctgtatattaaaatagatatgagtctactggaatactggtatattaaaaatttggagtgcagctatgccattctttatatatcttgtgacttttgtgctctcataatgggatacactttgaattgggttgattgaatctgataagtaaatacacaatgaaataatgaacatgatatgtggtatacctttgtattatagacccaaatgggtctgaccgacccttcccctgacccgcgcaagctgtaccacatgcaccgggctgcccccttatgtggtataccttagcttaagctgtctatatagttggttcagtttgcagtacctacgaatgcatagaggaacttcaaaatcttttgaaattctgatagattgtcatgcattctagctcaatatgcatcatctctcagtatcataccagaagatttacagaaccttcttgatgtctgccccatttttcgtacattttgtatgctcccctctttcttaatgaaatgacacgcagttcttctgcgtgtttgaggaaaaaaagatttacgaaaccggataaatgtggtacctctacctgaaccattctttgatcctcttccttcttccttctttataagttcattaacattctgcttcttctggaactataatcatatgagcgaaactgaagagctatcacataggatcagaagcattcaaatatttgcggtggcctcttgtcatgctgaacaattatcccatactcccattataccatgacactttgttttgctatacctatgtgaacttcagtttttttttcaaaagaaaatgcattgagattaagcactataattgcagagtttattattccttattttttttgtcaacttggccatcaatttaccccttttgtgtgtatgcaaatggacttagctatctattatgtactgttatgtgttattctatgttttcagcagatggaaaataccttttttcccagttatgtggttacctgcagttctgtttttcagtaatgattaacaatttaattagatacgttacggtcacttaccacgcatgctaaatgcttgaaacttcaaactcggaataattgcagcaaatttggtgactgcacctgcatatttcattgcaggtactcacccaggatcaaggaaatcacggttatca

SEQ ID NO: 464 - DNA, 25396 bp, Zea mays
  Intron number 12 from transcript AC207728.2_FGT003 (locus AC207728.2_FG003) derived from phytozome v7.0 (chr-ID 6; p os 126360073 to 126385468 reverse strand)
tctaggttagtactttttttctcgcattagcataagttatgcttgtgatggcctcacatcaacaaatgttatgattgtgatggccaattttgacgtgataaaatactttttttctctcgaatacgtaggagagctgcacatcattatattaaaagaaggaaaaaagggggaatacccctgagaaagccttacatatacatcacaactccgcactaacctggatcaaatgcctggaggaaggagacccttcgctctagccaaacaccaagcccaaacctcctccctagcagtgaggagagcctcagcgactaggggaggcaccctggaacacacacttattcctatgctttcgaagaacccaagcaccaagaatcaccaaggaattaaaaccctttttttagcatcagtaaaaggttggaccagtatttcatctatccaagccatgaatgcaagaggctcactattatggatctaaggttacggaggtagtacgagtggtaggtttggggtgtaggaccccgaccccgacgcttggacgccgtcaggctgttggctggggaggcgtggtagtgtggtactgttcacgcgaatgtcagtggatgaacaatactacagtactcgcggtactgttcactggatggtctgcgaggggtttgagggcgacggctagggttaggggcgttggggaggtcgaccgcaaagatatccccatggccggcaagagagaagggatttccttctaatcttttgattaccttcaattgatacaatccctctccttatatagattgggttacttgacctctaagcactagatctaatcttatatctaattctaatcttatcgcaaactagccttatctttatctaaccaacctaagggcgtgctacaggaccgacgtcactgtagcgagccttcttgggccttgacactacacccctcctggacaagcaggtcgtcctcgagctgcaacctaacgatgacgctaacgatgactcagctagacacaagcttaacacctaaaaagaagtcttttacatctctgcttattttattattctgaatctgatttttttctcgaacgcgaaggagaacttcacatcattatattaagaagaaagagagggcccaaaataggccagtacagcaccactgttatggtcgctagatcggtgagggattggagaggggtatcgatgggcaggaatgtcggccaagggcctctgcccacggccgagcaagaggagagtttctcccttcttgttggaatgtatctatgacagcccatgtggggcgcctggcccattggcccatgtacattgtaaccctactgtaaccctagcctatcaggctatataatgaagtcaccccacctgtaataggtgtgcggtattattctacatggtatagagccaaaacacgatcttttctttccgctgcccccgcacccagacgccgcgcacgcgcctctgcagccgtcgcgcctgcgccgccgcctcccggccccccaatcggtcgccgcgcctgcgccgacgcctccaggcccccgcgccgccgccaccagcctgctgcactcgcgcagccgctcccggcttctaccccgccaccaagccgctgcgaccccgcagccgccacctggctcccgcgtgccgctaggccacgcgcgccgccaccaggcagtggcgccaaaccccgggccccgccccgcctccaggacgcgcgcgccgccgccttccatggccaccgacaccacccctgcagaaggccttgccccgtttttctttcccgcctacgccgccgtcaacgtgaagcagcacgtgccgatcgatcttagtctcgagcgccccaactactccaaatggaaagccttctttaccgccctctgcggcaagtacggcctgctcggccacatcaacggcacagtgcctgcgcgcccggctgatcccctgtggtctcagcccgacgcgtgtgttcgcgagtggatgtacaacttcgccgatgacgccgtcctcgatctcgccatggagcttgatcaggacgcccgcgccctgtacgtctccatcaaggccctgttccaggcgaacaaggagtctcgcgccgtcatcgagcatgagttccacaacctgtcccagggcgacctctccatcgacgcctatgcccagcaactgaagcgtaccgctgatgcgctccgagaggtcggccacactgtctcccctgcgcagctcgttcttaatcttctgcgtgacctcaaccctcgcttcgccaacaccgccgacatcatcgccaacacgtcaccactgcccgacttcaagtccgccaccaacatgctccgtgtcaaggaacttcgcctcgacaccgagaataaggaagcttcggcatcggcactcgctgtttccaccgccccatcctgcacgtcgcctgcctgccattccacctcctcctccagcaatgggggcagtggcaagggcaaagggcgcggtggcagcagggacggtggtgctcggcgcaaccagcagcacggcggcggccggcgcaaccagcagcagggtggtggccgccaaccaccccagccgactggtccttgggtttgctacaacccctggactggtccgtggcctcctcagcagcaacagtgggcgcctactccgcctcctccacagcaggcccacaccgcctttgcgccaccgcagttctccgccgcaggtgctccttcaggcggctggaatacagctgaaagtcgcctagaggggggggggtgaatagggcgaaactgaaatttacaaagttaatcacaactacaagccgggttagcgttagaaatataatcgagtccgcgagagagggtggaaaacaaatcgcaagcgaataaggagtgtgacacgcggatttgttttaccgaggttcggttctcgcaaacctactccccgttgaggaggccacaaaggccgggtctttttcaaccccttccctctctcaaacggtccctcagaccgagtgagctttctcttctcaaatcaaccgggaacaaaacttccccgcaaggaccaccacacaattggtgtctcttgcgtcggttacaagtgagtattgatctcaagaaacaatgagaaagaagaaagcaatccaagcgcaagagctcaaaagaacacgacaaatcactctcactagtcactaatgcttttgtggaattgggagaggatttgatcacttgggtgtgtcttgtattgaatgcctagctcttgtaagtagttggaaggtggaaaacttggatgacttaaatgtggggtggttgggggtatttatttccccaaccacctgggtatccgtttggtggatgctgtctgtctcatggtgcaccggacagtccggtgcacaccggacagtgtccggtgcgccagccacgtcaccaggccattgggttccaaccgttggagctctgactgctgggcccgcctggatgtccggtggcacaccgaacatgtactgtagagtgtccggtgcgccacttcgcgcgtgcctgacttctgcgcgctctggcgcgcattaattgcttctgcaggtgaccgttggcgtgaagtagccgttgctccgcttgctcaccggacggtccggtgtacaccggacagtccggtgaattatagcggagcgaattcccgaagctggcgagttcagagtcgcttcattcctggagcaccggacattgtccggtgtacaccggacagtccggtgaattatagcggagcgcctctgagttttcccgaaggtgaagagtttggctttaagtcccctggtgcaccggacactgtccggtggcacaccggacagtccggtgcgccaaaccagggctgccttcggttatcccttgctctctttgttgaacccaattgttggtctttttattggctaagtgtgaacctttgacacctgtataacttatacactagagcaaactagttagtacaattatttgtgttgggcaattcaaccaccaaaatcaattaggaactaggtgtaagcctaattccctttcaacagccaacttgattgctgcccttaatcaaatggcggtgcaggactccccttcatgggttatggacagcggagcgacatcccacatatcctccaacgacggtatactcctctctcgttgtcattccccaccgtgctccattacggtcgacaacgggcagtccatcccttcatctggtcgtggcacatctctcttacctatagctgatcgttattttcatcttaataatgttcttgtcgctcctcagcttgctcgtaattttgttagactacccgtctagggtttggggtcttccccctgtaattaccatctcaccctcactgtattgggtctggcccatttactgagtctattaataccactcctagccctgtttagggtttaggttcgcattccaacatggtatcatcagcctaggtttaggtttcctgtccaacagcagctacagccgccgggggcttcctctcccctgcagccgccggcccccagccgccggctcctctccctcctctccccttcagccgccgccggcccccagccgccggctcctctccctaccacccccggccgccagtcttcctccccggcgcgccgcccgcccctgcttcccgccgctcctacgcggccgccgccaggaacgccgccgagcagagcagagcccgcgaccgtccgcgccgagcacaacagagctccgcgaccgtctgcgccgagcaggctccgcgcccgtccgcgccgagcagggcatcgcgcccgtccgcgccgagcaccgcgcccgtccgcgccgtgcagcgcgtccacacgaagctcctgcaccgactgccctgcgccgccccgacgtccgcgcccgaccgcgcgaccccgccgccagggacccgtctccggccattcgatgccctctggcggccagcagggctgcgccccaccccgaccgcgccctgcttcaccggctccgcgcctgcagctcgtcgcgctagccctccccacgctggtgccgctgcccgccttcgtcgccatggacgacaccgccaccgccaccaccggccccaccacccctgctgcgatcagcagcgagctcgcccatggaggggccccctacatcgccggcctcgggccgctccacgccgttcccccgctgcccctgcgccgtggctccccaccgggctttcccgccctcgcttcacccacctggagtcccatcgtcgcaccctccgcactccccgccgccgactttccgctcgtcgacaccctcgctacgatccaggccgcagtgacggcctcgcgggagcgcgagcgcgtcgcctccctcgccttggagagagagcgtgccctgggcgccgctttgaccacccagatggccaccacgcagcgcctcctcggacgcccgccgaccgcccctgcggaacccccagaggaccccctcgcctctgacctcgacgccgacctcatcgctgctctccacgctcaagccgcaggtctgcacaacatccgggccctcgtgtccgtggtgttggatctggcgtctccccactacccccgtcggcgaggacaggtccttctcacgctgcggaggttcgtcctcgacgatcacgtcctcgtcgaccacgacgctccgccgcctcgctcctggtgcctcatggacagcgttgtcctctcgtggctccacggcaccatcaccgttgagctccaggacatcatccgcgaccaggcggacactgcgcgacaggcgtggctcgctctcgaggaccagttcctcggtaatcgggatgcgcgggcgctccacctcgacgcccagttccacctgttctctcagggggacctctccgtgggagaatactgccgccagatgaagggcctggctgactctctccgcgatctcggcgagccagttgccgatcgcaccctggtgctgaacctcctgcgtggcctcagcccccgctacggccacctgaaggctctcatcaagaggagcgtgcccttccccaccttccacgccgtgcgaaacgagcttctcctcgaggagctcaccatggcgaatgaggcgcccactcctgccttggctctctacagcgctcctaccagcggtcagccaccttcagggggccaggccacccgtcctccgtcgaccggggctcctacccgccctctacccgtcgtctcggcggcccctcgtccgacctccacgaccgacggaggtcgtcgctcccgcaagggcggccgtgggggtggcggccacgcgtggccgtccttctacaacccctggaccgggaccatcgccatgtggtcgggccaggcaccgagtgcctcccgtccctcggcgccggccctcctgactgcacctcactacggcatgcccccgtcgcctccttacagtgtgcccgtcgtgccccaggcttcgcccgcgctcctgcccccggggacccacacctcgacgccttggtccccgccggctggcggttgggacaacgcctccctcgctgctgccttcagcaccatggcgataaccccacccccctccgactgggtgatcgactccggtgcctcgtaccacaccactcccacgacaggcacgctctctcgctctcatccccccctctcacccatcctcgatcgtcgttggaaacggttccactctgccagtcacctcaataggtgcctcggttctccctgtgccgttttacctcaacgatgttctcgtagctccccacatcactcacaatcttctttctgttcgtcgattcaccactgataacttctgttccattgagtttgacccctctggtttttctgtgaaggatctggccaccaggacccttctcgcccgctgtgacagctcggggccgctatacacgctccagccctccaccgccggcgtgtctccacctcctgtcctggtctccaccacctcctccaccacttggcatcgtcgtctcggccatcctggacccgacgtcatgaccaagattaccagtagtctagatccttcatgtagtaggggatattttgagggtctctgtgatgcttgtcagttaggccgatatactcgtctctcatttactacttctcctcgggctgagcaggcttttgacctggttcactgtgatctttggacctcccctgtactcagtctttctggttataaatactatttgatgattttggatgatttttcccattttctctggaccttcccgcttcggttgaagtcggacacattcaccaccctcacacacttcttcacctgggtatccactcagtttcgtcgcccggtccgtgctctgcagtgtgacaatggctgcgagttcgataacaacgcctctcgctctttcttcctcactcatggcgtccagttgcgtctctcgtgcccctacacctctgcacagaacggccgagccgaacgcatgatccgcaccaccaccaatatgctctgctgcctcctcttccaggcgtctctccctgccagctactgggcagaggccctgcacactgccaaccacctcctcaaccgtcttccctcgaaggcggtgcgccaccctacccctcacttcgccctatacggcacagccccttcctatgaccaccttcgcgtgttcggctgtgcctgctaccctaacacttccgctaccactccacataagctttctcctcgctccacccgctgtctattccttggctactctcctgaccacaaggggtaccggtgtctggacctcacctcccaccgcatcatcatctctcgtcatgtcatcttcgacgaagatgtgtttccccttgctggctccaccccacccaccgatcttgactccctcctcgagtccgatccgattcctcccccacctccggctccccgtcttgcgccgttacctgctcctcgtgcggccacgacgacctcttccgcgccacgcgcggccccgtcgaccccgcctgcgccacgcgcggccccgtcgaccccggctcgcttcgtcaaccccgcactcgtctaccatcgccgcggccacgccactacctcggcgccccccgactcgggcccgtcgacgagcgcgacccgtttcgccgaccccgccgtcgtctatcaccgccgcgagccggccacaccagccgctctcgacgttccggcggttcgctccgagtcgtccgtttaccacccggtcaccatccaccgcgaccccgggcacgtccacccgatggtgactcggcgtgctgctggcgttctccgccccgtcgaccggctgatcctggcagctgatacgtctagcactccacccgacgcttccccggtgccctcctccgttcgcactgccctcgccgacccacattggcgtcgtgctatggaggagtacgcggccctcttgaccaaccacacctgggacctggtgccgcgtccaccaggcaccaacgtggtcaccggcaagtggctatttcgccacaaagctgacctcggacggctctatcgaccgctacaaggcccgttgggtccttcggggcttcacccagcgccccggagtggactatgacgagaccttcagccctgtcgtcaagttcgtcattgttcgcgccgtcctctccctcgccctctcccgcgactgggcgatccatcagctcgatgtcaagaatgccttcctccatggcactctgacggagactgtctactgcagccagcccaccggcttcgtcgacgctgaccgtccggatctggtttgccggctgaatcggtcactgtacggtctcaagcaggcgccacgggcttggtacagtcgcttcgcctcctacctggcctccatcagcttcgtcgaggccaagtcggacacgtccctgttcatctaccggcgcggcgacgacaccgtctacctcctgctctacgtcgacgacattgtgctcacggcatccaccgtcgaccttctacaccgcacgatcgtcgcccttcagcgggagttcgcgatgaaggacctgggccccctacaccacttcctcggcatcaccgccgaacgtcggcctcagggtctcttcctccaccagcgtcagtacgccatcgacatcctggagcgggctggcatgtctgactgcaagccctgctccacgcctgtcgacactcaggcgaagctctctgaggacgacgggcctccggtcgccgacgcgacgtcatatcggagcctcaccggcgcgctccagtacctcacgttctccaggcccgacatcgcttacgccgtccagcaggtgtgcctgcatatgcacactccgcgggagccccatctcactgcgctcaagcggattctgcgctacctccgcggctccctcgactacggcctcctactccgcccatccccgacttcggagctcgtggtatacaccgacgctgactgggctgactgtcccgacacgcgccggtccacctccggctacgccgtgttcctgggcgccaacctcgtctcttgggccgccaagaggcagcctgtcgtctcgctccagcgctgaggccgagtactgtgccgtggccaacggtgtggcagaggcctcctggctgcgccagctcctccacgagctccacagtccccttcagcgcgccactctcgtctactgcgacaacgtcagtgcggtctacctctccaccaaccccgtgcagcatcagcgcacggagcacgtagagatcgacctgcacttcgtctgcgagtgtgtcgctaccgatgacgttcgggttctcagcgtccccaccacgctgcagttcgctgacatcttcaccaagggactaccgtcgagtgtattcttagactttcgatctagtctcaacatctgtacaggatagagttgtgactgcgcgggggggggggggggtgttagactacccgtctagggtttggggtgttccccctgtaattaccatctcaccctcactgtattgggcctggcccatttactgagtctattaataccactcctagccctgtttagggtttaggttcgcattccaacaaatttgttatctgttcgacaacttactcacgacaataactgttccattgagtttgatgcctctggtttttttgttaaggatctccaaaccaaaacggtcctccttcggtgcaatagcaacggggatctctacaccattccacatcgtctgccgcctcgctgccatgttggtgtcgttgctccagagttgtggcatgctcgcctcggtcatccagcaccagccgccgttcaaaccctaaataagctttcagctatacagtgtaataaagcagctcgccgcatttgccatgcctgccaactaggaaaacatgctaggctaccttttactagttctgtttgtaatacatctacaccttttgaactcgttcattgtgatatctgaacctctccagtttttactatttcgggctataaatattaccttgtcatacttgatgattttactcatttttgttggacattccccctgcgtcataaatttgaggctcatgaacatattgttcagttcactgcttacgctaacacacaattcaactcttctgtgcgctgttttcagacctataatggcactgagttcattaacagtgccaccgccgccttcctggctgcccggggcatccttcttcgcacctcgtgcccctacacatccgcccaaaacgacaaagctgagcggatgcttcgcactctaaacaatgtcgttcggacgcttctgatccatgtggctatgcctcctccctattgggccgaggctctctccaccgccgtgtttctcacaaaccggcggccttcgtcgtccatacataatggtattccctaccatctccttaatcgcaagatgccagattactcaatccttcgagtttttggttgcctatgctatccaaacctcagtgccacgaccccccacaaattgtcccctcgatccacggcgtgtgtctgtctcggttatcctccttctcagaagggctaccggtgtcttgatgtatccactcgcaagatcatcatctcccgccatgttgtatttgatgagactcactttccgtttgcggcttcacagcctcgaccagactcttttgattttctgctacatgatctactccccgcgccagcctcgtctacctcagacgtacgacaaaagcgggtctccgacgatgccagcgatcctgtcgggctggacccggccatcctgtggcacgacgctgcctacaggctgccccaggcgccccggcagacggcacctaccagcaccagtaacggtgcccccgcgaccgccgctgggtcccggttcggcatccattacagtcggcgttcgcatccagcaccggctccagcgctgcaggcagtggcacctcagtctgcggagccccctccgcggcagactcgttcccggacaggctccctgccaccccccatacaacggtatggattcaccgcggcggccaccagcttggcgtcgccactgccaggctccacccgcgtcgcgctcgccgatgccaattggcgcgcggcgatgactgacgagtacaaggcccttgttgacaatggcacctggcgtctcgttcctcgcccacctcatgccaacgtcatctccggcaagtgggtcttcaagcacaagtatcgtgctgacggctccctagctcgccataaagccaagtgggtcgttcgtgggttctcccagcggcacgacatcgactacgacgagacgttcagcccggttgtcaagccgcctaccatccgagtcatcctcagcatcgccgcttctcgctcctggccgatccatcagctggacgtgaagaacgcctttctccacgaccacctgaatgagaccgtctactgtgagcagtcgcccggcttcgtcgactcggccgcccccgatcacgtgtgcctcctgcaaaagtccttgtacggactcaagcaggcgcctcaggcttggcaccagcgcttctccagcttcgtacagcgatccggcttcactgcgtcagcttcggacacgtccctttttgtctacaaaaagggcgctgacatcgcctacctgctactctacgtcgacaacatcatcttgacagcctcgacgacccagcttcttcgtcgcctcaccgagcttcttcactccgagttcgccatgacagatctcggggaccttcaccacttccttgggatctctgtcacgcgttccaaggacgacctcttcctctcccagcgtcagtatgctgcggacctgctccaacggcgactcctgttgacactcaagccaagctgtccgctacggatggcgccccggtggctgatgccaccctataccgcagtctcgctggagctctacggtatctcacgctgactcggccggatctcgcctatgccgttcagcaggtgcgcctattcatgcacgatccacgcgagcctcatttggccctgctcaagcgggtcctgtggtatgtcaagggtaccctctccactggacttcacatcggcaccagcagcattacgggtttgtctgcctactccgacgctgattgggcgggctgtccagactctcggcgctccacttcagggtactgtgtcttcctcggcgacaacttagtctcatggtcctccaaacgacagactacagtttctcgttcgagcgcggaggctgagtatcgtgctgttgcgcacgctgtggctgagacttgttggcttcgtcagctactctaggagcttcatgcacccatctcttcggcgacaatcgtcttctgtgacaacgtcagtgctgtctatatgactgccaaccccgtccatcatcgtcgcacaaagcatattgaaattgacatccacttcgtacgagagaaggttgctttgggacaggtccgggtgctccgtgttccatcgtcacttcagtttgctgatattatgaccaaagggttacctgtaactatttactgattttaggtccagtctttgcgttcgtaacactcccgattagactgagggagggtgttggaatgtatctatgacagcccatgtggggcgcctggcccattggcccatgtacattgtaaccctactgtaaccatagcctatcaggctatataatgaagtcaccccacctgtaataggtgtgcggtattattctacacttctaattcttgcctgctttatttctcatccattggttacataaacaggccggttggccgcccctatctagctagagatccttatctgcttaaaactctcctaaaaactctcaacaaactactaactgataaccttcctagataatcctaaataatctcaactaatcttctaatcttatctctaactatccttatctaatcccccttggaggtcccatggttgctgctgccgcagcccctccgcgggcctccttaggccctgacactacacccctcctagacaagcagctcgtcctcgagctgcaacatgacgggtgctcaaagaccgagtctatttgacccaaaaccagacacctagaagacaagtacatctcggcttatcttattattccgaatatgatttttttgaccccataagataaagcggacaccctccgcgcactggacttgcacgtgtgcagccacctggatcccatggacgccatctggacgaaaggggagcacatggacgagcacgtggagtaggtcgcaacaataaccagcggaggcgtcctcgtggcggccggtagcggaatgtggtggcgctaaatagtgcgcccttgccgatgacgaggggagtgccttccctaccgccgctgccgtagagttgaagttcgtcgctcgcgggacacgtaccatgctcgcagttggagatagcggcccggtgccgctgctgatggccgtccgacagggcgaggtcgtgcccctgtgtgccgagatcaaccgtcaccaaggctgcctcgagcatttgtcggcgcatatcccgcactctccgtcgtgcaaggaagccacgagcagcagcttgtatgcccgcagccgccgacgtctggagccgtacggacaacgccagttgttgctgctcatgttgtactgctgccttgatttgcagcagcccttgctcaaccctctggagcgtggcttgcatctttgcgagatcagcccttatgttagtccacaagtcccccatcgatggagctggtgattgctgagccgtggctgcccctagtggcgtcgcccacgggaacggagacgccgtcaacgaagatgatgtgacgaaatttggcgttgtccctggggatgggcacgccagcatccaggatgtggtgataaaattggcaggcgatgctgcccatggagatagggacgccagttgctaggatggcgtgacgaaggtggcatgtggcgcagcccatggagatggggacgtcggttgccaggacggcgtgacgaaggtggcatgttgcgcagtccatggatatggggacgccgtttcccaggatgactccgcgatattggtagcagaatccatgggatcagttcgaaactcaagctatccaataccagatgttatggtcgctagatcggtgagggattggagaggggtatcgatgggcaggaacgtcggccggaggcctctgcccacggtcgagcaagaggagggtttctcccttctaattctttcctattttatttctcatccattgattacataaataggccggttggccgctcctatctggctagagatccttatctccttaaaactctcctaaaaactcttaacaaactactaactgataatcttcctagataatcctaaataatctcaactaatcttctaatcttatctctaactatccttatctaatcccccttggagggcccatggttgctgctgccgcagcccctccgtgggcctccttaggccctgacagccaccaattcacgatggccaataccaaagatacaagaacacatccatggtaaaaccactatacgactcccacactaagttggccaaatggcgcgcaggccgctccatccctacaccaaacagcagcttctgctttgatatcctgaaggagacgctgagcatttggggggcactccatcgaatacacatgagttctgatgcttccaagtccaccaggccacaaggattaccaggtaaggccttgttcggttattcccattatacatggattggatgggattggaaaatatttagaactttgacttgcttggtatttaaacccacccaatcccactcaatccacatggattgagagctaaccgaacaaggcctaattgagcccgtttctgagaggtttggcgacttgctgctcagctctactccaccattcttgcaaatcctggtcctcaggtcctggggcatgctggggcagatgcaccaggccgagcacattaaaccaaatgcacctcgtgaaagacacaagaaatcagcaagtgctggatagattccgattcttgatcgcaaagaggacaattatccgagtgatcaagaccccgacgagcgagtcgatccgaagtccaacagcaattcaaagtagccaaccacatgaagtacttgcacctccaagcagcccagctatgccaaatgcgattagctggctcaaatctgatggcaccaacaaaatatctatcataagccgaactagaagaataaatacccgaggtaaccggttgccaaatatggtgatccgggacaccttccagtaattgaacttgctgtagcatgtcccataagagcaggaattctgacagggcctgggcagacaaatgtccctggttatctttgatccattgcaggttaaacatggcgtcctggactgttctcttgcgctgtaggcgccttgggattagtccggagagagcaggagtaagaactgctattgattggccatgtaaccacctgtccatccagaataaggtgcatgtgccatctccaactgcagagtacacagaagctgagaagagagcagtcgcattggggtggatgtggggctggagttcactccaaatgccgcccggattggttttttcttccacaaccacctcatatttagtgtccagccgagaatctccaaattgtgaatactaagaccaccgagattaagaggcatgcagacccttttccacctgaatatcctttctggctttccacagaaatcccctcctattttgttgatggtcttgatcacccatttgggacactgcaaaacaataaagtgatagatagggacagcagtgaggaccgctttgacaagaacggcatgaccagacgagtgaagcaaggccgccttccaaccagggagatggtcaacaaccttattaatcatagagagtagagcccctctagtgagctttttagatgccaatagtaggcccaggtaagtgcatgggaattggaccacattacacggcaaggtatcctgcaacattgtcatgtcaagatcttgacaatgtataggggtcattgagcacttggacagattggtcacaaggcccgaagccaccccgaataccctgagaatttctttaatcagtcgcagctccgtaacacatggtcgaaagtagagaacgacatcatccgcatataatgaaatcctctgaccgctgcctctatgcaataaaggttgcaacaaccctagctcacaagcctttaccaccagagaattaagcacatccataacgagaataaataccataggggatggaggatccccttgcctcaaaccccgttgatgacaaataaggtccccaggttccccatttaccaacactttagtggaggagcgaagcatcttacagatgatattgcaccacaatggaccgaatcccaaatgcctcagcacttccaacaaaaagggccaggaaactaagtcgaaagccttacttatatccaatttatagaggactccgccctttaacaaaaggactctggttcggtgataccaagtttgggagcaaggcgattggccaaaaaggcaaaaacttagtcataacttttgcaaagcaatgaataagacttaccggcctaaagtcctttacctccaagacatccggtttctttggcagaagggtaatctatgcagaattggggaggtagagcttagtaacatccccttgaaacactctctcaatggcagccatgaagtcaacctttataatcagccaagcagccttaagaaagcgacccgtatagccatctaggcctggagccttgtctgtggacattgacttaatagtagactagacctcttccgaaatcggttgctctagatcagataaatccaccccaggcacatgagatgactaaagattaagagaattctatgtcaacagaataccccagcagctgattataatattctcccaccacttcatgtttatccttttgatcagagacaatgtgatctccacttttcagcttagccacaaagttcttttgcttcctgtaccgagcgtggtggtgaaaatatgatgtgttggcatcaccctccttaacctagctaagcctcgacctcatgcgaaccatagttctctcaagggaagcaaggccaaggatatgccgcttaagctgacggcggagccagtcctcttgctgcgacagcaaccgagactcctgagcgatctcaaactgatgtatgatctccctggcatatgcgagatgctgcttgatgtgaccaaccttgctttggctccaggactgcaaatcacgagagaggcgatgcaacttttttgccagatttttaaaaggacaaactgaagaacccggctgggaccaagagctagttacctctcaagaaaaccgtccagccagtgccagaaacattcgaagtggaagcgacgcttgccttgagtgaattcttgcagtcccaacaacaaggggcagtggtctgagatcatagaggtggtggtctgtgttggaatgtgaaccccaaaccctaacggggggttgggcgatatattaataggatgagtaaactgggccaggcccattacagaggggtgagatggacattacacggggaagaccccaaaccctagacgggttagtctaacacccccccgcagtcacaactctatcctgtacagatgttgagactggatcgaaagtctaaaaatacactcgatggtaaccccttggtgaagatgtcggcgaactgcagcgtggtggggacgctgagaacacgaatgtcaccggcagcgacacgctcgcgaacgaagtgcaggtcgatctccacgtgcttcgtgcgctgatgttgcacggggttggtggagaggtagaccgcgctgacgttgtcgcagtagacgagggtggcgcgctggaggggactgtggagctcgtagaggagctggcgcagccaggaggcctctgccacaccgttggccacggcacggtactcggcctcagcgctggagcgagagacgacgggctgtcgcttggcggcccaagagatgaggttggcgcccaggaacacggcgtaaccggaggtggaccggcgcgtgtcgggacagccagcccagtcagcgtcggtgtagaccacgagctccgacgtcggggatggacggagaaggaggccgtagtcgagggagccgcggaggtagcgcagaatccgcttgagcgcggtgagatggggctccccgcggagtgtgcatatgcaggcacacctgctggacggcgtatgcgatgtcgggcctggagaaggtgaggtactggagcgcgccggtcaggctccggtaggacgtcgcgtcggcgaccggaggcccgtcgtcctcagatagtttcgcctgagtgtcgacaggcgtggagcagggcttgcagtcagacatgccagcccgctccaggatgtcgatggcgtactggcgctggtggaggaagagaccctgaggccggcgctcggcggtgatgccgaggaagtggtgtaggggcccccaggtccttcatcgcgaactcccgctggagggcgacgatcgtgcggtgtaggaggtcggcggtggatgccgtgagcacaatgtcgtcgacgtagagcaggaggtagacggtgtcgtcgccgcgccggtagatgaacagggacgtgtccgacttggcctcgacgaagccgatggaggccaggtaggaggcgaagcgactgtaccaggcccgtggtgcctgcttgaggccgtacagggaccgattcagccggcagaccagatccggacggtcagcgtcgacgaagccggtgggctggctacagtagacagtctccgtcagagtgccatggaggaaggcattcttgacgtcgagctgatggatcgcccagtcgcgggagagggcgagggagaggacgacgcgaacagtggcgaacttgacgacggggctgaaggtctcgtcgtagtccactccggggcgctgggtgaagccccgaaggacccaacgggccttgtagcggtcgagggagccgtccgaggtcagcttgtggcgaaagagccacttgccggtgaccacgttggtgcctggtggacgtggcaccaggtcccaggtgtggttggccaagagggccgcgtactcctcctccatagcacgacgccaatgtgggtcggcgagggcagtgcgaacggaggagggcaccggggaagcgtcgggtggagtgctggacgtagcagcagccaggatcagccggtcgacggggcgaagaacgccagcggcgcgccgagtcaccattgggtggacgtgcccggggtcgcggtggatggcgactgggtggtatacggacgactcggagcgaaccgccggaacgtcgagagcggcggtagtggccggctcgcggcggtgatagacgacggcagggtcggcgaagcgggccgcgctcgtcgacgggcctgagtcggggggcgccgaggtagtggcgtggccgcggcggtggtagacgagcgtggggttggcgaagcgagccggggtcgacggggccgcgcgtggcgtaggaaggatcggcggggccgcgcgtggcgcaggcgtggtcgacggggccgcgcgtggcgcaggcgtggtcgacggggccgcgcgtggcgcaggcggggtcgacggggccgcgcgtggcgcagacaggatcgagggggccgcgcatgacgcaggcatgatcgtcgtggccgcgcgaggcgcaggcggggtcgacggcgccccacgtggcgctgggatgggcgcgagcggtggcgtcgtggctgcacgaggagcaggtaacggcgcaaggcgtggcgccgggggtggggggggaaccggatcggactcgaggagtgagtcgagatcggtgggtgtggtggagcctgcaaggggaaacacatcttcgtcgaagacgacttgacgagagatgatgatgcggtgggaggtgaggtccagacaccgataccccttgtggtcaggggagtagccgaggaagaggcagcgagtggagcgaggagagagcttgttaggggcggtagcggaagtgttagggtagcaggcacagccaaacacgtgcaggtggtcgtaggaaggggctgtgccgtacagggcgaagtgaggtgtagggtggctcaccgccttcgagggaagacggttgaggagatgcgtggcggtatgaagggcctctgcccagtaggttgcagggagagacgcctgaaagagaagacagcggatcatgttggtggtggtgcggatcatgcgctcggcccggccgttctgagcagaggtgtaggggcacgagagacgcagctggacaccgtgagtgaggaagaatgaacgagaggcgttgttgtcgaactcgcggccattgtcgcactgcagggcacgaaccgggcgccggaactgggtggatacccaggcgaagaagtgagtgagggtggtgaacgtgtcggacttcagccgaagggggaaagtccaaaggaaatgagagtagtcgtctagaatgaccaggtagtatttgtagccggagaggctaaggacaggagacgtccagagatcacagtggacaagatcaaaggcctgatcagccctggacgtggaggtggaaaaaggaaaacgggagtgacggccaagctgacaagcatgacagaggtgcgtagaagagccccgagtataggatatgtcagagtggccggcaagctgggacatgacgtcaggtccagggtgcccaaggcgacggtgccaaatggcggaggaggtggtggtagtagcaagagcatatgatgtggtggtagtagtaagggcaggagatgaggctactccggtgtggggagtggtgggcaagtgaagggaatagagggggccggagctgtcacagcgagcgagcacagcatgtgtgggaaggtggcgtatgatgagaccccaggggtcgaactccatagagcactggttgtcactagtgaagcgatgaaccgagaggaggggatgagtcagtccaggagcaacaaggacatcgttaaggcagaatggtcctggaagaaccgatgcacctactgaggtgaccgggagggtggaaccgttcccaacgactatggaggaaggatgtgaggggtgtggtggatgggagtggagtaacgaactagttgtgggggtagtgtggaaggaggctccggagtcaaccacccaatcggtggtgggagggggaggtgttggtggcgaaggtacggtgtgagcggagagggctaaagaaggtgccccgatagaggcgctaggtggggagggagatgacacgggctcaaccgctagggaggcgatcgcagcacatgggaagacaagcggtccaggcacgtggcggcccgcctgagggtggatctcaacgcagtcccggagaatagggttccagactggatcgagggacacgaacatgccccggatgagctggccgttgtggaggagggcacgcacagtcacaggagcgacgggcgaggtaaagctcatgtacagcgagggtgacgtcatggaatcggtgtggggaaaacactggtaggggaagcgcagcggcgcgagaagtgaggagggccgtccagaagggcgcacgctgccagaaggatcgagtcgggcggcttggctaggagttggggccgacagcgactgacggcaagtgaagaggaggctgcagcggggagtgctcgcggcagagagaagggcggctggggaccagcggatgacgggagcgaggggaggaggccggctggacgccggccgacggagaaggggaagaagcgagccggggcggatccggcggcgctggcgcggaaggacacaagccgcgcgcggcaccggcggctggaggagacggcgcaggtgcgcggtccggtgggagcagagggagaaggcgcggagtcgcgtctgggcgcgggccagaggcggccgggcgcgcgggatcggcgaagtcggccttgggcggcttcctggcgcggcggttgcaggaccgacggtccggccggagcgcggacggcgcgcggccctggctgggcggcttcctggcgcgcggcccaggctgggcggcttcctgacgcggcggctggagggtccggccggcgcggcggctgggggggcgtcgggtccggccggcgcgcggccctgacggctggaggcgcggacggcggcgcgcctgggggagcacggcgcgcggcggcgcggcaggcaggggatgccgggcctgctggcagcgcaggcgtttgagggagatgggccggcgggatgggggctggcggctggctgggggccggcggctggctggctgggggccggcgactgtaggggtggcggctgcaggggaggagagctcccagcggctgcagcggttgcaagaaaaaaaaccctaaacctaggctgataccatgttggaatgtgaaccccaaaccctaacgggggttgggcgatatattaataggctgagtaaactgggccaggcccattacagaggggtgagatggacattacacggggaagaccccaaaccctagacgggttagtctaacagtctgaagcacacaattatggaagaggtcttcccattcagccgtagcaaaaatccgatcaagtctgaccagggtaggggcttcacgctcattagaccatgcatactttcttcccaagagctcaatctctcttagattgagatcactaatgaagcctctaaagcgccccttcattgccctgtccacattatcattgtttttgtcttcagctcgatagataagattgaagtcgcctcccaaaacccagggtccattacaggctgatttgatatctcacagctcttgcaggaattgacacttcaaagcatcaaattgtggtccataaacccctataaaccaccaaggtaccccatccgcatgtgcaaaaagaactgaagccgaaaacacatcaactctagtattcaaagcctgatagacatgccctcttcaagcaaccagaaacccccgcgagttccagccgcaggcagaaaaacaaagtcagagaattcgaccccaagagtggccaaaaccattcttctagaaatagccattttcttagtctcttgaagacaaataagatcaggtttaacataattgacgaccacccgaacaacatctcttctagacttgcgattcaaacctctcacattccaaattaagaattctgacggacccacagacattaaaatataggagaaggaacgacctgaagataacagaaggggggtggttgggtgggggggggggtgaatcaagtttccacatcagtcgcccctctgatgacttccacggtcccaatttcttcaatctgctccggaactgtccaaccgaacagagctgcaagagcagcggacttagagagtggcatactgaacagacggcaatatacttccaaggcttcgttacttggtacttcttgacccttgctcaggttaagagattgggcaagattcagctgaacttgctgcactaccagggagtgcagcgtgtttcgcttcatggccaagcgtctactgcgacgaggaacaaaatcttgcgaattagaccacgactctttatttttttgaccctttaagataaggcggacaccctccgcgcttggacctgcacgtgtgcagccacctagatcccatggatatgccatctagacgaaatggggagcacatggatggccacctgagacgccctcgtggaggccggtagcggaatgtggtggcgctaagcagtgcgcccttgctgatgacgagggagcgccttccctaccgccgctgccgtatagttggagtttgtcgcccgcgggacacgcaccatgcttgcgcttggagacaacgggcaagcacggttgctgatggctgtccgatagggcgaggtcgcgcccccgtgtgtcgaggtcgaccgccaccaaggttgcctcgagcatctgccgacgcacctcgtgcaaccgccgctgcactaggaggccacgtgccacagcccgcagccgcaccgccgctaataccttgtaggcacttgtctgcgcaatcggcttcctccccgcgagctgcttcaaggttgctgggacgattggtcgccaccgcctgacgcgacgataggggctgaagcggccggtggtggcgcagaggacgctggaggcgaggtggtggtgggtggagggcctgacatcactgttaccagattgttatggatctagggttacagaggtagtacgaggggtaggttgaggtctaggaccagtacttcgacgcttggacaccgtcgggctgttggctggggaggcgcgatactgttcacgaggatggcagcaaccgcagacgaacagcgctacagtacccgcggtactgttcactagatggacttgcgaggggtttgagggcgacggctagggttaggggcgctggtgtggccggccatagggatttccctacggccggtaagagagaaaggatttccttctaatctcttgcttactttcaattgatacaatccctctcattatatagagagagggttacatgacctctaagcactagatctaatcttatctctaattgtaatcttatcccaaactaggcttatctttatctaactaacactcactgtctactagccattccgttttatgttagaagtttaattaggataccttttttcttaaaacatcaattaggatacttcatattgtattcataacgaaaaacatgtcctgtcatctttaactggcttttattttcatttttgcctttttattctaatgtataatacggaaaatctcttgctgtccttaaaaaacatattgtattcatgaggggaacttcctacctctggtcagtattgtttctcatgttctttgatacactattgaaaatggctggactcagaatgcatgcaatttttccaatgacacaacattcaagtacaatatgttttgatctcgatgctcatcaaacttttcttatcctttaatcatatttttctttcctttatctaggtatctcattg

SEQ ID NO: 465 - DNA, 892 bp, Zea mays
  Intron number 3 from transcript GRMZM2G049340_T01 (locus G RMZM2G049340) derived from phytozome v7.0 (chr-ID 9; pos 1 38897818 to 138898709 reverse strand)
gggtggcatatattggataatcttgcccgctggatgtaaatcacttgtatctcactttattctttattttttttcctcgaacacgcaggagagctgcatatcattaatattaagaaaggaagaaaggtccaaaaatagaccaagtataactacaaatacaaatacacaggaaaggcaccctatggtggccgcaacttagagtacataaaagcatccatgagaaaacacctaataagaccacaaactacacagacccgatacaccggctctgcaccagacaacaggttcatctttgatgttctggagcaccaccgagacacttggggcgatgctatcaaagacacaagcatttctatgcttccaaatccaccaagcaaccaggacgacaagggaattgaaccccttcttgtgatgattcaacaccttctgctccgatttgctccaccactcttgcaatttgctatccagagggcttggagcgaaccactttattctttcttatatgatctgccacaacaatgtgaatataaaagatgcaatatcatattctatcagcgagtcagcctcctaattttctgttatttccgatattttaatgcgtgggatctaaattgttgattctataaacattttaaacgtaattgttaagaagtaaatttatgatgactttattcattggactcatctgtttgtgtaaccttgcatagttctttttaagcaaccttacattcttttaacatctacaaccataaaaaacatctctatggactagatttgttgttctaatccctctacattttatgttcccttgttcaagcaatttggctttggtcctctttgtgatgttaatgttttcatttgaactgcagatctgggttcatcattttgggga

SEQ ID NO: 466 - DNA, 2899 bp, Zea mays
  Intron number 2 from transcript GRMZM2G551332_T01 (locus G RMZM2G551332) derived from phytozome v7.0 (chr-ID 4; pos 7 8536224 to 78539122)
ggccgtgacatacagcaacgcacgaccaagaaaaggttagtatagcttatcaaatcagccttaagttaattcattttactcccttgacattgtatacttatataccagagcgttcgatctgttagagctcattcatcgccgataaaaaggctatgaagaaattgtttgtaagtcaacttgaatgtaaagacactcctgatgagcccaggtatgtacttccttactgataaacaattagcagattgcaatcgccaattgttatgttcaataaacatatatacatctactacggttgaacttctacattccaaattagaggctctagaatttataaaacggaactaggaaaggaatactctcttctaaaaaacatacatgtgcgtatgtagataacttcatctaacatcacaaagtgtcaccttaacacaaagaattaaaagctctgtcaaagtttacgatactatacatcccagctcctcaagctattgttatttttggctagattgactggactgctagatggttagattcagatcaactctgaattgattttgatgtatatcaaaaagggctttgttgtatgtatatagaatttttcgaatatgaactagctcaggcatttaagagtcttgttcaaatgtttagatatttcagccattgcacaatctggtagtcttcaggccattacctgtgttgtatagtcataccaaccactgcacactcaaccagccttttgaacatttttgtacgtataaatggagcagaatagtaacgcatttgtcttgatgctaacaaatagcgatcgtcgagtagctaccaaaacaatattattggttctttttatgtgagcatagataataactttaagaaaatatgtctaatgatgggaaaatatgtctttgacaaaaatgacttctaccctagacaacacacttgggttgttggttttagtaatatcttcattttttgcattatattttaagaatagcaaatttcttaaattatattataaatgcggagcatttcatcaaaaggcctataacttaaaattttaagtatcacctgatgacagaaaggtgtgccacattccatgtacctagcagattatgtgtttagttgtggcccagaaaccaaatcatttgtagcttcatcccactctttaacacgctcattttcatctatataagagatcccctctcgcttgaattttacgaaacctcaaggtttttcagcattgaaaacttgtgttggttggctagatgacttttttgttttgtacttcctgcataccaaaatgaccagaagtctgacccagaaaccatttgcaataaagtcaatcaatatttttcagaaggataaaattaacttccatcaccaaatttaggtgttacaatacatatccctactaccctatatgacggtactgtgggcatccgcagtagcctcaccatgcccccgctaaggccgcagccccggcaccgcccgccctccccccgtgcacatctcgtcatgcctgcgtgcatctccggccatgtctaggccgtgtccacatgccgcagccccggcacctacctcccttcccccacccccgcacccgcacgcccaaccttccgtcctcggctgcggccagggtggaagccgtggaggtggacgaaatccaagccgaaaccaccagccccttacatcctaggcgctctcttaccatcctcgacagtctcttcccatcggtggcccttcaatcccccatctagccggtgctacatattaatccaaagggaacgtctccaacatcttctaggttgagctcaacgaacagtctatcaatccccccatttgggcagacattgatgacgacgacgaggattacatcgccaccactgaaccgtcgcaaccctgtctggatttggttgagctcctcgccgcttttcaggaggtttgctttcccccaccttctctatatgccttgtggtttggttgtgggaaaacgtatctatattaacaacgtacactttgaaggctatctgatcgccacagcaggatccaaataatctcagaatattaggtaagaaacattaggccagttcttggttagtaaggctgcgtttggtttcatacggactatagaatcttgagtttgcgcttgatttccaaaaattagtaccaatcaggaagtacagaagtagtagtttaatcaaggcgcacttgatttccaaatgttcttgtttaatcaaggcacacttgattaccaatcagcaagtacataagtattaccaatcagtaagattgaccggttgtgtgatttggttagtaaggagcacttcatttcccaaaatcagtaccaatcagcaagtagatactgaatattgtactgatactgaatcagcacttgaatattctactgaatattctcgtttctatactgaatgttcttgtttccttttctactgatactgaatctcttatcattccagcacataagtagtagttaatgtatttgctctgattccatatgattgaaattgtcaaaatcacagaaatgttatttttttgatgataaatctatgatgttgtccttgcctagaaatctaaatattttggtacatttgggaaattttgaaagtttatttgctaggaggttgctgatgcggtggacggtgttgtcatcagatctgttggtgttcttcccagctgctttgtggtttgtgtgggcatacatgaaacttggagtcggtattaattgagaggagagacgggaggggtggatgtggctgctagccatggtcctgatcagtccttgcttggtattgattgatcatggccattttcaggtgagttttactgcactaataatgtgtgtgatttaggtggggcaagtgcgtggaccagcagagtcctttgt

SEQ ID NO: 467 - DNA, 2061 bp, Zea mays
  Intron number 1 from transcript GRMZM2G071021_T03 (locus G RMZM2G071021) derived from phytozome v7.0 (chr-ID 3; pos 2 21687265 to 221689325)
ccacgactcccgagcgctttctccgcctgcgtgtggcggcagcatggcgactgcgaacgggagcagcaaggggccgttcgaggtgcccaaggtggaggtcaggttcaccaagctcttcatcgacggcaagttcgtcgacgccgtctccggtacgtacacacgcccgcctccctagctagctagctccggcggcatgcagcactcttgctagtgaatcacgtcacgggcgggcggccgggctcacggcctgccgcggccatatatgtacggctaggttcactggtgcagaatccgatggctccaatcttggctgctccgatggagcgcatgaaggacaagacaagttgcctcgatcgctcgctagctagcttcgcatgtggcttcgctgttgggaccgcgtgtgtgttgtggtaaatcagtaaccaagtactagtagtacacagagctagctgacacccatcagctttgcgtactcgtgttttcgtctgctcgcggggacagtagcttcacgggctactactagctaccttcgtcctactagatcttatgtttatttcttttgcctagatttagattagattaaagacttacagtggtttcttatagaattaagaccgcaagctagctagctggaaccttgtatcatcccatgaacatccgacgacgacgacactcgacagtgaccacccgtcgtccttctcctcgattcaatcgatcgggcaagcagaccaccgatcgagaggccgtcgaaatccaaacggcacaagcaagcagattgtgctagcaaagcatcagtgtcctgtactgtggcctcgctcgtcgcgggccggtctttaatctagctggctagtatttccccgtttatttttagttgtcgctggatagttcaattttacactatccagcaacaactaaaacgaaacggagggagtatatggggcctgtttggttcagctttttctgaccagcttttctgaaaatctggctgtggagagaatctggctgtggagagaatctgagtatcattacgattacgtgcggaggaagataaagttgttcatagggctcaggatctagaaagtgatggattcctactattacaacgactcaaccaattatgtgtttatgttgattttggatggtttttgtcccaacgaattttatagaagctggctgaaaagctgagcgtttggtattccgcgcaaactatcgacgaccacacacgcggacgatgacatggctgcctcaagaaggttgttacccgcaccgggacctgccaacctatttctgttgaacatttcagtccaacagagtcaaacttgtttccgtcccattttatgtcagtggtaattagtttagtagctaatggatggatggatgtctgcgtccgtcgtcctcagccacccagacgtatgtatgtgtagaagccgccatgcttgtgcagactgcagttgcatatcccgatcggccaacagcctcgatcacctgatgagtggctctcggtgccattcccctcccagggccaggagtctcctcgctcaatgagttgcaaagtgcgccaccactaactgcgcactaattaattaacagcacaagtctgtctagacgccgacgcaggaagcgacagtcgtgggctgtcaacttggcgccacgcactgtccatcacttagcttgttgtctgcatccgcgtgcttgtgattggatgagttgattattgcatgatttggttatcgtcattgattgattcgggcaggcaagacgttcgagacccgggaccctcgcaccggcgaggtgatcgccagcatcgcggagggaggcaaggccgacgtcgacctcgccgtcaaggccgcccgggaggccttcgacaacgggccctggcccaggatgacgggatacgtaagggccttgtagccggccccatccatctcggttttattcaaatgctcaacacgcttgtttcccgcaggagcgtggtcggatcctccacaggttcgcggacctgatcgacgagcacgtggaggagctggcggcgctggacacggtggacgccggcaagctgtt

SEQ ID NO: 468 - DNA, 1382 bp, Zea mays
  Intron number 1 from transcript GRMZM5G860612_T01 (locus G RMZM5G860612) derived from phytozome v7.0 (chr-ID 1; pos 4 7899379 to 47900760 reverse strand)
gccactgaagaatcttgaccttcatagtgctacctggaatgcaacaatatataaacaagagacgttttattcactgcatcttgtcatatgcagaatccattgaacaagtaatgtatgggcagtttgaattagtagtccactacgcagaaaagaaatcctcaatcaactgatgaagagaatgagatatttgggctttaacatattactgcagagtgactcttacaggaaaaaaacaattgatccacatttagggtttcccaccaaaatataaccccaaatccagaggtctcctaacagcaatgccagcaccagtggagaggagagactaggacacgaactagagattgaaaagatccttcagagttgctggatgtgacataagaaacagtgcgccggaactggatcaacaggattgctaactgttacacgagataagtttaaataaactcaagctaaatcctagtatcatcgtacatcataactgacatcataaccgacgcaacaactaacattagactgaaatagaccaagaagtcgtgaaaatggcattaccaatttgtgattctctccagttatttgggaatcaataactttgtaacttcttaatctgggagcaagaacgagagaagggacatgcacagactgggcatccgccagcacagtggaagccagagaaaggggagccaactaataaggcagaggcactggagcatatggcatgatccgagaggtcatgaaagttggtggtgtgggatgtgggagcagcggctggtataagaccccgtgctcactggcttggaggaaggggaggagggggaagggggatgaccggatgagagactgcactattggggctaaagctagtatccctggtaagtggtaattactgggccaattcagtgctggcctccagcgccaagcctacgttcgcacatagatcgggctggtttcacgctctgtagatctccttaatacaaagtttggcattgctccatagatgttatgcttcctcaccaagtaaaccgacagcacgcaccatgaccaactaacaaacaaccatgttgatcaacccactaggcccgactccgatggagacacagtggtcagcttcttcctcccctccaatgatccacttgtggcacactcagccctgactgcctgaggcctgacccggcactgcccatgaatggcgtatccaggattttaagaaagggtggtccaagttaacataatttcttttagtactgcaaatgtaacatgccaacatgcaagtaaaaagtttaccaaaatgtttaaacctcagggggaaaaatgcatgttacatttgctaatacaaataacttgccttgttggttgctgcctccacctctcgattcagccag

SEQ ID NO: 469 - DNA, 3194 bp, Zea mays
  Intron number 7 from transcript GRMZM2G383274_T01 (locus G RMZM2G383274) derived from phytozome v7.0 (chr-ID 2; pos 1 68399757 to 168402950 reverse strand)
tcttgttagcgcatcaagtaagtggcgacatcacaacccctacaagcttgtgccttaaaacaagaggatacaagaagttggagtgcttttgtgaaggcttttgcgaatcacttgaagcgttagtacttttgtgaatgattttgtaaagtgtttgcaaatatgtgcaaaacataataacacgtgtaggttttgtgaatgattttgttgtggtgcttgttgatggtttatgtgatgtggatctatcattgtgcaatactaattaaattcatatatctatgtgattatgtgtataaaaattggtgatttgtgatgcttttgtatatataacagttgttggatgctaattaatggtatattatcattattaacgactataactaggggcaactttctgttggttgctaaatttatagtataacgactcacgattggttgctaaatctatagtacaacaacccacagttggtcgctaaatatataatattagcaacggacggtcggtcgctaaaaagatgtcggtcgctaaagcctttagcgacggcacttacagcgaccatccttatgggtcgctaaaagtttttagcgaccaaccgtaggtcgctgaaggccgttttagcaaccaaccgtaggtcgctgtaagtgaaccgtcgtgtagtgataagataggagtctcaatttggaaattggttacgttagttaatttgtataactaaccatctatctcattcaatgttaatccactaaaagtggtcatgtttacattagtgcatgtagctaattcctttgttagaaccaattggaattagagcacgtaacgtctagttattcgtttacccgtagtgcgcctcgagtataagccttaaccctcgtgagacctttccccgcctctttctaaccatggtaaattcattatcgtatgtgatattctatgcatatttacttcatttgttctcttgtatggtgtactgtttgttccttaatttgaatggatggatgtatgtatgcttgcaatcgcatagagaacgattcggtcgaggagcccgaagaactcgcaggagaagcccccgagcagcagtcggttggtggaggcaagtgtcctttgacctatctctgtcctattcattctttaattcacctcccgcattacacatttatacctaaggattgactagcttttgttatccatatccttgtttacctatgtgggttggactattattgtttagctttgtgctattgctcaaactctaatcaataaaaatgatgagattatctatgatacgctgttttcccctctcttattatgatgttatacttgtggtcttcaagggggctcgagcggtttctcgagtgcctctccgtaaggacctgttctatggatgaccgcccgggaaaacagtgcaaccatgagggtggaatggggtgcccttagctgaataattagaggatccggggtgtagttcgcttcgccgtcgtgccgtcaatggggctcggtgtatgcgactcgctctgccaaggttgatttgtcccttggggaggagtgcggtacatttaggaaacctaacgggcggctacagccccgaagaatctttgtaaaggctacgtagtgaaaccctgcctattcaccttggtagtgtttaagggtttgatcggcccgaggcaagagggaatcgcggcttgtgggtaaagtgcacaacctctgcagagtgtttgaaaactgatatatcagccgtgctcgcggttatgagcggccaagggagctccaatgattagtggtacttggtcagagacattttggtttacaggtggcaatgagactgatggtttggttatgtctatggtgctggtaagtggtattctttccgtttggaaagggtacatcgggctaataacttgggttaatgttaaaacctggctttctactagtaaataataatctgacctactaaaagcaactgcttgacttatccccacataaagctagtccactacagccaaacaggatacttgctgagtatgttgatgtgtactcacccttgctctacacaccaacccccccatccctaggttgtcagcattgcaaccactgctcaggcgaagatgaagctgtggaaggagacttccaggagtttcaagactacgacgagttctaggcgtgggttagcggcaacccccagtcggctgcctgtgaaggccgcgtttatctacgtttcttttccgcactttgatttattgtaaggactatatggacgtctcagacgtatgatgtaatcgactattatttcccttttaatactattttgagcactgtgtgatgatgtccatgttatgtaactgctgtgtacgtgaataactgatcctggcacgtacatggttcacattcggtttgccttctaaaactgggtgtgacactcaggctggtgctctagaccttggacgtcaagtggacaggctcattgtttttgagacagtggagatgaatgtggtttttggtgctgcacttagtattgctactgtctactttgcttcctttttgtgaggagatgattacagtccatcatttgttccagttagctgttattcgattttgatgttgacatgcttcttgggtgacttgtccatgccactgatgaatttggcttgcctgatgtggatgttgatgcaaaacctgataatgagcacactagaagaacctctgattccatcctgctcagtcgtcttcactcagagttcctgaataagcgaaagaatggaaagctaccataagggatgttgtatttctctaccatagcaaatcaggtaactggtattattaaatatattgctgatgttgtattgctctattttgaagccttattgttattactgagcaaataagggatcgacaaatataatttccttcttttttagattaggggtaaatatagcctcctactatttagagatgaaatttatgtgtcttggttttccttatataacctcctatttcaattattgagaaacaatatatgttaacttgtcccaatttgttataatactggaaataaagggggcgccttctataatgccttgtgctcaatactcctagcattatgtgactcaggaactaggcggattaaatcattataatatttctctcttcaaaatttgttggagacaattttgacatgatttttcccttttttaggaacaat

SEQ ID NO: 470 - DNA, 4570 bp, Zea mays
  Intron number 9 from transcript GRMZM2G357654_T01 (locus G RMZM2G357654) derived from phytozome v7.0 (chr-ID 7; pos 1 54111775 to 154116344)
atcccaatctcgagcatcgatatcgtaagtgccgagaagaatgtcaacagaaagacaaagatgttattaaacaattagttggcatactccgtggaaacccgtactctgagcaccttaggagcatgggccatgttgagaaccttgatgactatcgtatcacactgaaccttgaccagacgttgaaccaaaagacatataacatgcctctcacttcagaggtcgctgctgtctggatcgaggggagcgaacggcgaggccagtttagcaagagtgttatgctacatgggaaggataggtcaagccacggcatccgctcataccatggatgctatgatgcactatcgtatccactgttcttccctagaggtgaacttggatggcatgcaaacataccaaaggtcggtgtatccatgggcgaagtggatgcataccgtgcgacgcatagggcaagtaatgcaaacgatgaagatgcaggttagttgtttctttgatatttcttacataacccattgttaactatcctttcaacatcacaaaatgatcaatccttacgtatgcagaatctcccaatcatctatgtgtgtccgtacgtgactattactgctacaaattccagattcgtccagggatattcaatccaatactctatggtaagcggcttttccagcagttcgcagtcgacacgtacatcaagattgagagctcccgtttagatttcatacgtaagaaccaggaccggttacgggctgacctgtaccagggcttggttgatagtatgttagatggagacataagagcagaaaaggttgggaagcgaactgtgttgtcgccgtcgtttattggtggtcctcgtgacatgcgacgtcggtatatggatgctatggcactggtccggaagtttgggaaaccagacatctttcttaccatgacatgtaaccccaactgggatgagataaggacagagcttctccctgggcagacaccgcaagatcgtccggatcttgtagtgcgtgtctttcacgcgaagctacaagagttaaagcataggctgactaaacatgatattctcggtaaggtccgggcctacatctatgtcgtggagtttcagaagcgaggtttgccccatgcccattttctactaatcatgcagaggaagtacaagctcacgtgccctgagcagtatgatcttttgatctcagccgagatcccagacaaaaagtaccctgaactacgaaagatggttatcaagcatatgatgcatggcccgtgcggatcgctaaatcctaactgcccatgcactaagggtcgtgcatcgtgcaagaatcattacccccggcctttctgtggcgcaactttgcaagggaaggattcatatcctatttacagacgtcgtgatgatgggcgtaaggaaaaggttcgaggatacgaattggacaatagatgggttgtcccttacaacccttacctccttcggctcttcaactgtcacatcaatgttgaggcgtgcgggagcatcaaggctgttaaatacttgttcaagtacatatacaaaggccatgatcgtgcgtctgttgttatgagagatgcgagcaaggcagatgatgatgtagatgagatcaagcagtacagagatgcaaggtgggtgacccctccagaggccttatggaggatatacggctttgagcttagtcagaactctccacctgtgatgcagttgcagctccatcttccaaacatgcacatggtggcatttcacgagcgccaaatggtcgagcgagtcgtccaccgtccaggtgctgataggtcaatgctcacagcatattttgagacaaataggctacatgaggaggctcggggcatcctatatcgtgacttccctgagtggtacacttggcaaagcggtaagggcaaagtatggcaacggaggaaacgggatacgggtggacaagtcggtagaatagtctctgctcatccggccgagggggagcgctactatctccgtgttctcctaaaccacgtgactggtgccacctcctatgtgaatctaaggacagtagatggtgtcacactaccgacttttcgtgaggcagcagagagaaggggactgcttgagtcggacaacacactagatgactgtctcaccgaacgtgctcttttccagatgccatcggcgctgcgacggctttttgccacaatattggtgtactgtgagccaagcgatgtggctgtactctggcggaaacacctagatgctatgtcagaggactatcaacgcaggagtcagagcaaaactcatgttgaacagatggtattgattgacattaggaacatgctgcagtcaatgggaaaggacatacagacattccctcttccacctatcatcgacgcgtatgacgatgctataggtaccgctagggaggtttacgaggaggaaagtatcgaactggcatcgacagatatggctctcaaggactctcttaacgaggaacaatgggtcgcctatgataagattatgtctgtcgttaacactaatcagggtggattgttctttgtggatggacctggtggcaccgggaagacttatctatacagagtgctgcttgcgacgctacgtagccagggcaagattgtagtggcaacggctacatctggtgttgcggcttccataatgcctggaggaagaaccgcacattcacgcttcaagatacctctcactattgacgatggcgctgtatgtagcttcacaaagcagagtggaaccgcagagttgctacgaaaatcatctctcattatctgggacgaggcttctatgactaagagacaagccgtggaggcactagacaatagcatgcgcgatataatgggtcgccccggactgccattcggtggtaaaaccattgtcttcggtggggattttagacaggtcttgcctgttattcgtaaagggtcaagggctcaagtggtcgcttcttcgctacggatgtcttacctatgggagtctatgtcccacttaaagcttgttagcaatatgagggcaaaaaacgacccttggtttgcggagtatttgctacgcgtaggtggtggaactgaggtcacaaatagtgatggcgacatccgtcttcctgacgaggtatgtgtgccttatagtgggagtgacaatgatcttgataatctaatagacttcgttttcccaaatctcaacgaaaatatgtcagattccacctacattacttcaagggcgatactgtcaacgcggaacaactgggtggatatgataaatactaagatgatcgatcgttttcaaggggagcatatggtgtaccatagtttcgatagcgccatggatgatccccataactactacccacctgagttcctaaacacgctgacacctaatgggctgcccccgcatgttttgaagctcaagattgggtgccctgttatattgcttcggaatatagaccctgcgaatggactttgcaatggcaccaggctggtggttcgtggtttccaaagaaatagcattgacgcagaaattgtactgggtcagtacgctggaaaacggattttcctgccccgtatacctctgtgtccctccgatgacgagatattccctttccagttcaaaagaaagcaatttcctatacggcttagttttgcaatgacagttaacaaagcacagggtcagactattcccaatgttggcgtgtacttgcccgaaccagtgttctctcatggccaactatatgttgctctatctagagcgacagcccgatcgaacataaagatccttgccatcccagccatcaatgggaagaagaggtcgaggaagggtgtaagaaagaatcccacagtagatggtgggacatataccaagaacatcgtctacaaggaggttctaacaaactagacctaggtaagtcaaatctcccataaaaagatttgtcttttttgtttttccatatacaagttgaatttaaagtttatattttttgtgattaaggacatcataacttattctagaaaaatatgttaagaattttttatcattattttatatttagttttgtaccattaaagttattatcttatctgatccctaacctatcaaaataattataaaaaatataatatattttttctaggctaaattatgctattatatctaataaccaacaaaatttaaactaaaaacttggtttgtacataaagaaataaaaagacaaaaaaattaaggggtaaattaaaccaactcaaaagagtgtcggggtaaaataaactaaaaaatactttagggggttatgtgaatattgtccataggtgaggggagtaatttggactttttcctttaacaaataacatggagattggtagtcgattatttctgctgcatatcttgctagccattttcttaattatttcctcatagcctgtttgtgtgcagggggatacaaatataattaaatttgagggtgatcataattctccaagacctcaatcatattatgattcagtttttatattcttctacaaatctttgcatcctcctctactgtctgcagcacgatca

SEQ ID NO: 471 - DNA, 3464 bp, Zea mays
  Intron number 6 from transcript GRMZM2G083068_T01 (locus G RMZM2G083068) derived from phytozome v7.0 (chr-ID 8; pos 8 6863251 to 86866714 reverse strand)
tttatctcctgagtcacttaaagcagcttgcataagtaagttgttccacctgaaattttgtagggttaaatttatatgcactaaaattttcctgataaattatttattgatgataacatggaaggtaacaattgaatctccatttattttaagttacattgaaataaatttaatgattaagtgttttgcttataaaattacacaaaatgtttaggatgtatactgtgatttttatttctttttaatcatctacaattacaaattccctaaaattgtatattttgaattccagttagttgtaataaatttcatggaccagaacttgttggaatgttttattaggaggtatatgttggttttattacatgtacccctgatctacgtaattttacaatatttatctttttgaagtactattattgtattgatgtgtatcttagaatgctacaatgactcatttctctattgatatttctaatagctttcacagaaaacttagcatctgttttatacattcctagttattaatgttataaataacactcgtactcaatataagactatctctagcagcttactcatctccctttccatattcaaactccactccacgaacagtgtagtttacagtgcaaaacagtgttttgcacggccatatgggtaaactgctggagacggtgtaagggcactaggcccaaatatacacaccaatacaggatagtgaccatgtacaacaaggattctatatatgaaaccgaatacaataaggacacatgcgtaggcatctaacactcccctaaaactcaaactcaagatggatcaaacacaactgctgagctttgacatccttcgtgaagaaatcaaccaactgaagctttgaagatacatagtgaatatcaatcacatcattctaaacatgtgcatgcatgtaataggtattgacacctatatgcttagtaaactcatcggatgcaacaaatactaatagcattgatactgtcagtcaaaagaggagtctagaaacagaaacaccaaaatctgcaagcaaccatcgtaaccaagtcaccttcgctgttactagaaccatagcatgcaactcagcatctatactcgaacaagaaactgatgtctgcttcttagtcttccaagcaataagagaggcaccaagaaaaacacaatacacataaagagatcgatgatcaggggaatcactagcctatgtagcattacagtaggccttgagctgtaaataacttgtgcatggaaagaattggtcttatgagataggccctgtttgtttcggcttctagcaacttctggccaccaaaagctgttgcggactgccaaacgctcagcttttcagccagcttttataaaatttgttgggacaaaaaccatacaaaatcaacataaacacataatcggttgagtcgttgtaatagtaggaatctgtcactttctagatcctaagccctatgaacaactttatcttcctccacacgcaatcgtaatgatactcagattctccccacagccagattcttcccgaagccagattttcagaaaagctggtcagaaaaaagctgaaccaaacaggcacatagtgtcacgaagataacataagacacgaaataagtggctatagtggagttgagtggggactgaaacaagctgactagcaatatgtagaaaataaaaaatatgatgagtgacaccaagataaacaagattcctgactatatgacgataacacgtaaaagtctcaccatcagtgtcactaagatgaacattgagctccatgggagtctcaaaggtacggtgatcagtaagagaagcataatttagaagaccctgagtgtacttttcttgagacagatagtagctctcaggcatggaggcgacctcaattctgagaaattaacaaagaggaccatgatttgacataaggaactgctcacttagacttgtgtcacacccgggtttaggggcaaaaccgaatgcatagcatatgtgtgctaggatctattttccacacatatgttgacgtcacaaatgtaatatatcaaaagacaatgtaataaaggcgttaaagagagtataataaaggcgttaaagtggggtgggtttagggtgggatgggaggacggaaacaaaaccctagccctgataccatgtgggaaaccctaaccctaatgagggggtgagtgatgtattaatagactgtgttaggtgggcctggcccattaccggggtgagatggtaaatacacggggtagaaccctaaacgggtacattaacatcacccactgtgtaatctctttgacgaatagcaacaaggtaagtagagtgatcaatacgataatggcgatcacgaagagaagtccacatctgatgagactaataaaagtgaacaatcttggtagcaaattgatcctccacactagcagcaagaacaaaacttgcacgagcatcctcatcgaaccacaacttgtaagcatcgaattgagactcatgatgccatgggatgatcaaaatcagcaagaagttttgccttgtcttcatcggttgccttctctggtatctgagggcgcataagagtcgtgggagaaggcgggcatagaagctcaccggtgagaaactcccaaagtcgtaggacacacatgtgccagtgcatctgaacaacttaggtatgatagttggtcccatcaaatagcaacaaatagctaaggacaggaacaccaccactaggggaagacgacgacatctcagacaagtagacaatgaacatttttgaaggacttaacagtcacagaatcatgaacatgatgaattcacggatagaggagcaacataggaggccacacacggtgctttaccaagcagaggcgccgatgcgtgcgagcagaggcggccggtccaagtgacggcctatgcgggtgggaggcaggcagaagagtgtgctagctggcgagtgcacgtgaagggcgggtagacagacaagagtgagcgccgacagacgggtcaccgcaagcgacgggcaaactccagtgagcgatcacgaagatgagtgccgctaggctaaaggagttgactgcgaagatgtgcagcgacaaggcgatgagacagagccaccaagcgacgtgagaggaacgtttagggaaagagagaaataactaaccttaatttttgcctatgtataccatcttacgaattgcactctatgaggactctaggcccaaatatatacatcgatgcaggatagaggatagagagacagaccgtgtacaacaaagactatatatgagaccaaatacaacaaggatacatgcatagacatctaataattaacagtgtatacttgcaaaaaaaggtgtcaacactttatattatccttgtcttaatcatattgattatgacaaaaggttgattgtaacactatcttgagttgtttttcgcagtggcat

SEQ ID NO: 472 - DNA, 16271 bp, Zea mays
  Intron number 4 from transcript GRMZM2G478501_T01 (locus G RMZM2G478501) derived from phytozome v7.0 (chr-ID 3; pos 2 1149327 to 21165597 reverse strand)
ggacgctagactgctgcaccaaggaaacagagcgtgtaagaggacagcaaacatagaagaatggttcaaaacacacaaaggagacttcattcggcatggttccaaaaacaaaaacaaaaaagaagaagggtttgtatgtgtgaaatgagtcttttgtgtggtgctcaatagtattcatcagttcccagaagtttcctcccatgcatttctcacaaattaaaggaaaattcattcggcacctaaataggctgtgagtacaggatccggatcgagtgaggttatccttatctaaatggggacctaatgaccctacagaccttgtggattactacaatcagcccctatatttccatagtacatgtccaaattaccctcttcctaatctgttacttcacatctcctctttctaaaatgtatggcgctttctttatgcatcttctatttcagttaaggtagtgcttcatgtcctaatagcataactgggttctccacatgcctcagcagttgtcatgacgaggcataggatattagttagttgcatgaagaagctttcttgactcacattagtattccttgtgtattatacctaatcggcacatatctatttgatggttcttctgttgcacagcatctggtacggcaccaagacgagaaatgttaatttttagaaacttaaattgagctttaggaaaaaacttaaattgatactactagtcaggacttctgtttgataaccagcagtaggggtacttgcttagcatagcagttcaatatggagtttgagtttttattgattcttgaggtctgccatatttggaaatctgtaattcgactaacttgtgactaattaaaaggctgatgaactagacattgtttgctttgtcatgataagtttctgaaacccaggttgctttttaaaaggctgatgaactagacactatgttgtattgctgttggcatgtaccaatatttcatggcaaatcttatatcccaagttttttatatgccgtagaggactaagtacaacaacatggagctggatgctattgatttctttggggaatgtatgaatagtccctgaaatggtcgtactccgcttgcaaatgagatatatgtaagttacatgtactacactcaagtaaatgcctggttcaacacttttgtatggccttgttactaagtacattcattttatgtaggagcaaatggttgcagagaaggaaagagagctagaagaagaagaagcacaaaagtcaccctccaagattgttgctgatagtctcagccagatcagtcgctcatctaccttccttccaaacattggtgtctgtttgaatgcttcaaacctttgtggtggaacctttgtatgtttgaacctctgttgtggaagaactagtgtgctggaattgtgtatgacttgtgatgagaatgttgtgtatgatggcttttctgtgtattatgattctgtgagctatcatgagagctcagtgtgtcgtcactgtatggtcactgtatgtgggtgccatattaaacggtcccaacattaggtgacgcgttgactggaaaaaatgtgacagataacaccgtcatatatagcaacaatatgtgacggatgaacgcagccgtcacaaaaggtgatgacattatgtgacggtactctgaacagtcgtcagaaggtacataatgtgacggtcgttatatgacgacccttatgacgcagcatttttgtcataagatgctttttatgaccaattttgtactaaacatgacactttacttttgtcatacaaaaccatttttttgtagtgggactaactagtttgctctagaattcatatattcacaggtgcataaggttcaacacaaaccaataaatattcaagttagggacccaattcaaaaggagcaaaaagaacttgagtgtgctgaagtatggcgcaccggactgttcggtgtgccaccggacagtgtccggtgcaccacaagacagtgtccggtgcaccaggaccgtacaactcaaaccaaccactctcgggaaatcgaaggtgcactccgctataattcaccggactgtccggtgtgccactggactgtctagtgtgccagcggatcaacggctaacttgcgcaacggtcgactctgcaaagtgctacagtatgtgaacagtgcgcggcagaagttagagcagaaattcagaggggcaccggactgtccggtgtggcaccggactgtctggtgccgcaagaagacaaagctccaatggtcgaccgagctccaaaccctaacagttgggtgacgtggcagtgcaccggacagtgaataggacctatccggtggcgcaccggactgtccggtgcgcccatcgacagcagcctccccaacggctaccttggtggttgaggtctataaatacaccccaaccaccacaactccaagcatccaagatttatgagtatcacattcaatacaagagctctagcattcactcctagacacaattcaaaagatcaaagcctctccaagtcccaaattcatctcaaacacttagtgacttgtgagagagatattttgtgttcttttgagctcttgcttcttggattgccttttttctttctcattcttgttctcaagtgacttgtaatcaaagcaagagacaccaaagtgtgtggtggtccttgcggggtctaagtgacccgtttgattaaggagaaggctcactcgatctaagtgaccatttgagagagggaaaggttgaaagagacccggtctttgtgaccgcctcaacggggactaggttctttggaaccaaacctcggtaaaacaaatcaccgtgttcattcgcttgattcccatttgatttgttttcccctctctctcggacttgactttaattctaacgctaacccccgcttgtagtgtgtgcttaagtttataaatttcaggtttcgcctattcacccccctctaggcaactttcacccacaaggtttgaaagggaaatgttcccttgggctatttctaaatgttttggtgattaaatgcccaacccatcactttgaactaacatgctactgcgagtatgaacatagggtcaaagagaagcaaactgagagtgataggagtgaattgaacattctattattttggagaaacaaaggtatgattctagcactcagtcaattgtgttgtgtactaattatctttgtctaagtgctaggaggcttcccaaatcgagataaaactaaatggaaatgtttggctcaagctagccaaacctgcaccaacctgaggtgcactagacagtgttcagtgcccaagctggagccctaatgaataggccgctctttggaaaacagaagggcgtcgcggctataattggtcggactgtccagtgtgcaagagactgtccggtgtgtcagccacgcgcctagccaatggtcagcttcgccaaacaaggaaggagatcagcacctttcattgtccagtgctgcatcgaacagtccaatgcgcccacggacagaaggcaatcaaggcctttcaaatggagctccaatggctcctatgacccttggggctataaaagggacccctaggcgcatggagcagtacacaaatcatccattgaacatcctacaacaccaagaaatcgcacccacgcctttgctttgctagatagagatttgagcatgtattttaagttgtaactccactgtgttgtttttgtgctcctctctctcgacttgtgtgcatgtgttgctgcaagtttgtctcttgtgtgtgtctctacttcccccttactcttgtgtttatttgggatcaattgtgtaaggcatgagagattccaatttatggagattcctcacaacgagaaaagataagaaagagaaccatggtactcaagttgatcattggatcacttgagaggagttgagtgcaaccctcgtccattgtgacgccacaacatggagtaggcaagcattttatgcttgactgaaccacgggataaaaatcgtcatgtcacttgtttactttactttactatgattatattctttctagcacttcacttaacttacaatattgctctaagtttaaacccatcttgtgagagcaattaagtgaagaagttgtctcctctcatactcttcattcaaacttggttttcgatctcactaatccattttagaccaagtttattttataaagctattttttataggatcacctattcaccccctctaggtgctctcaaggttgttaaatagtcaaaagaaatggatgactgaagtccaagttcatgcttttgggctaagtttataccgggtattttatactgatgtgttaacgagtatgggtgagggcggaacgttctaatactcgtttgcccattgggtgaaggtttttgcccaataaaatacccatgggcagaacatttagaccatatacataccataattgagtaaatacccattgggtatcgggtcgcgggtacccattgtcatctctaggtagaacacccaagtctatcttgaataatcatacacatatgatgttggaccaaacaagtccatgtgaaggatctctagtggccttaatgttgatacgaaagcttttgtagtatgtgtatttgctacttgcttgttggcttgacatgcactacaaagcttatccttttcaaataccatatccttcaatcctcaaacaatttatttcttcaatattttcttgagtgtcctcattccaacatgagcatggattctaattcataaccacctaagtgaagttttggcgcatagccgtgttttcaagttagcatctccagaagtgaagtgcactaaatatatattattctatctaaatcccttgaacataacttggttatcatctacttcatacacaataatctcctccatgaataggaattgatagtcaatatcacataattaacaaatggatatgaagttaaaactaagcgatgcaactaagaggacaattgacaaccctttcaatttgctctttgaattgtcccaaaggttatcttatcttgataatccacatcttcattaagtgaggtgaacatttgaaagtcgactagatggggggtgaataggcgtaatctgaaatttacaacttaaaacaacaaactacaagccggggttagcattagaattaaatctgagtccgggagagagggggaaaacaaatcaaccacgaaataaagcggatgacatggtgatttgttttaccgaggtttggttctaaagaacctagtccccgttgaggtggtcacaaagaccgggtctctttcaaccctttccctctctcaaacggtcacttagaccgagtgagctttctccttaattccacgggtaacttagaccccgcaaggaccaccacacaattagtgtcccttgccttgcttacaaaacacttaggaacaagaatgaggaaggaagaaagcgatccaagcaacaagagcgcaaagaacacgaacaaacactctctcaagtcactaggaggttggaatgaattttggcacttggagaggctttgatcttttgatttatgtcttggagtgcatgcactagctcttgtattgaatgtggaactcagaaaacttggatgcttggagtggtggtggttgggggtatttatagccctcaaccaccacatagccgttggggcaggctgttgtcgatgggcgcaccggacagtccggtgcgccaccggacgctgtgaggtgcgccagccacgtcgcccaaccgttagggttctagagcagttgaccgttggaggcttgtcttctagtggcacaagacagtctggtgccgcaccggactggcactgttcagtgtccggtgcgcctctgacgggcgactctgactctgcgtgcactattcttcactattcatctgaatctttagcttttgcagtcgaccgttctgcgaatagccgttgctccgctgtcacaccggacagtccggtagcacaccagacagtccggtgaattatagcggagcgccccctaagaaacccgagagtggtgagtttgcgactgtacggtcctggtgcgccagacactgtccggtggcacaccggacagtccggtgcgccagaccagggcacactcaagtttcttgttcctttgaatttgaaccctttcttccatcttttattggtttgtgttgaacctttatgcacctgtagaacatgtattctagagcaaactagttagtccattatttgtgttgggcattcaaccaccaaagttatttataggaaaaggttaaccctatttcccttttaataatctccccctttttggtgattgatgccaacacaaaccaaagcaaatatataaagtgcagaaatgaactagtttgcatattgtaagtgcataggttacttagaattaaaccaatatgaaagtcttgttgcatatgaatacgagtgaatggattgctttcttttatttggtattttggaccacatttgcaccacttgttttgtttttgcaaattcttttggaaaatcttttcaaagtctttttgcaaatagtcaaaggcatatgagtaagattgcaagaagcattttcaagatttgaaattttctccccctatttcaaatgctttttcctttgactaaacaaaactcccgctgaatgaaattctcctcttagtgttcaagagggttttaccaatttttgtaaatatcaattgaacaagatcaaatacatttagataccaatttgaaaaattcttgaaaattttgaaattggtggtggtgcggtccttttgctttgggctaaataatttctccccctttggcattaatcgccaaaaacggagacttcgagagccctcttctcatattttctcccccattggtacaaataaatatgagtgaaagagtataccaatttgagagtgttgtggaataccggtaaagggtaaataataccgatggagttgagtggaagcgtcgtctttgctgaatactccatttcccttccaatctaagactaacataagaaatattcatggaagcacattagtcatagctttggcacaagaagaataagaaatatgtatatgtaccaaatgaaagagatatgatcaaaggtatataaatgatctatgtgtgcagtgtttcaatcaaaattccgagaatcaagaatatttagctcatttctaagtttgctaaaggttttctcatctagtggcttggtgaagatattggctaattgatctttggtgtttacataagctatctcgatatccccctttgttggtgatccctcagaaagtgataccgaatgtatatgtgcttagtgcggctatgttcaacgggattctccaccatgcggatagcactctcattgtcacataggagagggactttgctcaatttgtagccatagtccctgagggtttgcctcatccaaagtaattgtgcacaacaatgacctgggacaatatactcgacttcggcggtagaaagagctacggagttttgtttctttgaagcccaagacaccagggatctccccagaaactaacaagtccctgatgtgctcttcctatcaattttacaccctgcccaatcggcatcgggataacctattaaatcaaaggtggatcccctagggtaccaaagcccaaacttaggagtataaactaagtatctcatgattctgttcatggccctaaggtgaacttccttaggatcggcttggaaccttgcacacatgcatacggaaagcataacattcggtcgagatgcacataaatagagtaaagatcctatcatcgaccggtataccttttgatctacggatttacctcccgtgtcgaggtcgagatgcccattggttcccatgggtgtcttgatgggtttggcatccttcattccaaacttcttaagaatgtcttgaatgtacttggtttggctgatgaaggtgccatcctggagttgcttgatttgaaatcctaggaaatatctcaactctcccatcatagacatctcaaatttttgtaccatgatcctactaaactcttcacaagtagatttgttagtagacccaaatataatatcatcaacataaatttggcatacaaacaaatcatttgtaatagttttagtaaagagagttggatcggccttgccgactttgaagccattagtgataaggaaatctcgcaggcattcataccatgctctttgggcttgcttgagcccataaagcgcctttgagagtttataaacatggttagggtactcactatcttcaaagccaggaggttgctcaacatagacctcttccttgataggtccattgaggaaggcactcttcacgtccatttgataaagcttgaagccatggtaagtagcataggcaagtaatatacgaattgactcaagcctagctatgggtgcataagtttcatcgaaatccaaaccttcgacttgtgaataacccttcgccacaagtcaggctttgttccttatcaccacaccatgctcatcttgcttgttgcggaatacccacttggtacctacaacattttgattaggacgtggaaccaaatgccatacctaatttctcgtgaagttgttgagctcccttttcattgccatcactcaatctgaatctcttagtgcatcctccaccctgtatgacacaatagaggacacaaaggagtaatgttcacagaaatgagcaacacgagatctagttgttaaccccttatgaatgtcaccaaggatagagttcacggggtgatctcgttgaattgcttggtggactcttgggtgtggcggtctttgaccctgtatttcttgctcatcttccttatcttcattgtcttcatctcccccttgatcattgacctcttcttgaggtggcttatcttcttgattgtcttcttcatcaccttgagcctgttcctcatcttgagttggtggagatgcttgattggaagatgacgattgatcttgtgcttgtgtaggctctttggattccttaggacacacatccccaatggacatgttccttagcgcgacgcatggagcctcttcatcatctaattcatcaagatcaacttgctccacttgagagccattagtctcatcaaacacaatgtcacaagaaacctcaactaatctagtggatttgttgaagactctatatgcccttgtgtttgagtcataaccaagtaaaagccttctacatctttaggagcaaatttagattttctacctcttttaacaagaataaaacatttgcttccaaagactctaaaatatgaaacattaggctttttaccggtgaggagtttgtatgatgtcttcttgaggattcggtgaaggtagagccggttgatggagtagcaggcggtgttaatcgcctcggcccaaaaccggtccggagtcttgtactcatcaagcatggtccttgccatgtccagtagagttctattcttcctctccactataccattttgttgaggtgtgtagggagaagagaactcatgcttgatgccctcatcctcaaggaagccttcaatttgagaattcttgaactctgtcccattgtcgcttcttatctttttgatccttaagccaaactcattttgagcccgtctcaagaatccctttaaggtctcttgggtttgtgatttttcctgcaaaaagaacacccaagtgaagcgagaataatcatccacaagaactagacattacttactcctatcgatgcttatgtaagcgatcggggcgaataaatccatgtggagtagctccagtggcctatcggtcatcatgatgttcttgtgtggatgatgggcaccaacttgctttcctgcttgacatgcgctacaaaccctgtctttctcaaaatgaacatttgttagtcccaaaatgtgttccccctttagaagcttgtgaagattcttcattccaacatgggctagtcggcgatgccatagccaacccatattagtcttagcaattaaacaagtgttgagtttagctgtgttttcattaaaattaactaaaaatagctgaccctctaacactcctttaaatgctatttaatcatcacttcttctaaagacagtaacacctatatcactaaaaagacagttgtaacccattttgcataattgagaaactgagagcaagttataagctaaagaatctacaagaaaaagattggaaatggaatggtcaggagatatagctattttacccaaacctttgaccaaaccttgatttccatccccgaatgtgatagctctttggggatcttcgtttttctcgtaggagaacatccttttctcccctgtcatgtggtttgtgcatccgctatcaataatccaacttgagcccccggatgcataaacctgcaaaataatttatgccttgttcttaggtacccaaatagtcttgggtcctttcacgttagaaacaagcaccttgggtacccaaacgcaagtctttgagcccttgtgtttgcccccagcatatttggcaactactttgcctaatttgttagttaaaacataagatgcatcaaaagtcttaaatgaaataataggctcatttgatgcaacaggagttttctttttaggcattttaacatgagcagaatgcctagagctagaagcctcattcttatacataaaagcatgatgagaaacactatgaggtttcctagcatgaattcgcctaatcttgtgctcaggataattggcaggatataaaatgtaaccctcattatcctgaaccatgggagccttgcccttaacaaagttagacaatttcttaggagcattaagcttgacattgctttcctgttggaaaccaatgtcatccttaatgccagggcgtctcccactatagagcatacttctagcaaattgaaatctttcattttcaatctcatgctcattaattttagcagttaattgagctatatgatcattttgttgtttaattaaaccaaggtgatcatttatagcatcaatattaatatctctacatctagtgcaaatggaaacatgctcaatagtagatgtagagggtttgcaaacatttaattcatcaatcttagcatgtaaaataacattctcatttctaagactggaaatggcatcattgtaaacatttaaatctttagccttaaaaattaatttatcattctcagttctaaggctagaaattgattcattcaatttatcaatattagcaattaaactagcattttcatttctaagaccatcaattgaatcattacaagcatttaatttttcaaccttagtaattaaactatcattctcagttctaaggttggaaatagtgtcatggcaaatgctaagctctttagtcaagttttcatttttctctacttcctgagcataagcattttttacttcaacatgctttttgttttccttaataaggaattcctcttggctgtccaagagtttatccttctcatgaatggctcctatcaattcattcattttttctttttgttgcatgttaaggttggcaaaaagagtaagaaaatcatcttcatcatcactagaactaccctcatcactagacgtagtatacttggggtggttctagattgtaccttcttctttttgctatcttttgccatgaagcacttgtggccgatgttggggaagaggaggcccttattgacggcgatgttggtggcatcctcgtcggaggaggagttagtggagctctcgtcggagtcccattcccatcatacgtgggcattgccgcccttcttcttgtagtacctcttcttctccttcttcttccccttcttgtcatcgcccctgtcactatcactagacattggacatttagcaataaaatgaccgggcttaccacacttgtagcacaccctcttggagcggggtttgtagtccttccccctcctttgcttgaggatttggtgaaagctcttgatgatgagcgccatttcctcattgtcgagcttggaggcatcgattggaagcctacttggtgtagattccctcttttcttcttccgtcgccttgaatgcgacggggttgcacctcgggtgtggaggtggcaccttgctcccagttgacgatgtgtttggagcctttgaccattagttcaaagctcacaaactttccaatcacttcctcgggagacattagcttatatctaggatcaccacgtattaattgaacttgagtaggattacgaaatatgagtgatccaagaataaccttgaccattcatggtcatcccattttgtgctcccaaggttgcgcacttgattcaccaaggtcttgagccggttgtacattgcttgtggctcctccccttggttgaggacgaattgaccgagctccccctcgatcgtctctcttttggtgatcttggtcacctcatccccttcgtgccgtcttaaggacatcccaaatttctttggccgtctttaacccttgcaccttattatactcctctcgacacaaggaggcgaggactatagttgtggcttgggagttaaagtgccgaatttggtcggcctcgtccgaatcgtagtccttgccccctaccttcggtacctgcgctccatactcaacaatatcccaaatgcttttgtggagtgagtttagatggtgcctcattttatcactccacatagaataatcttcgccatcaaaacatggtggcttgcctaatggaacggaaagtaatggagtgtgcttagagatgcgaggatagcggaggggcatcttactatacttcttgcgctcatggtgcttaaaagcgacggacgacgagtcagagccggaggtggagggcgacgatgagtcggtctcgtagtagaccactttcttcatcttctttttcttgtcgcctctttgatgggacttgatggaggaagaggattcctccttgtgcttgttgccggactcccttgaaagagtcctcctcgagcttgcgggcttgtcaccggtcatgatctccctcttggcgtgatctcccaacatcacttcaagttgttaaactctaatgaagcaccgggctctgataccaattgaaagtcacctagaggggggggtgaataggcgtaatctgaaatttacaacttaaaacaacaaactacaagctggggttggcgttagaattaaatcctagtccgggagagagggggaaaacaaatcaaccaagaaataaagcggatgacatggtgatttgttttaccgaggtttagttctaaagaacctagtccccgttgaggtggtcacaaagactgagtctctttcaaccctttccctctctcaaacggtcacttagaccgaatgagctttctccttaattccacgggtcacttagaccccgcaaggaccaccacacaattggtgtctcttgccttgcttacaaaacacttgggaacaagaatgaggaaggaagaaagcgatccaagcaacaagagcgcaaagaacacgaacaaacactctctcaagtcactaggaggttggaatgaattttggcacttggagaggctttgatcttttgatttgtgtcttggagtgaatgcactagctcttgtattgaatgtggagctcagaaaacttggatgcttggagtggtggtggttgggggtatttatagccctcaaccaccacatagccgttgggcaggctgctgtcgatgggcgcatcggacagtccggtgtgccacctgacactgtccagtgcaccaccggacactgtccggtacgccagccatgtcacccaactgttagggttctggagtagttgaccgttggaggcttgtcttctagtggcaccggacagtccggtgccgcaccggacaggaactgttcagtgtcctgtgcgcctctgacgggcggctctgactctgcgcgcactgtttttcactgttcatctgaatcttcaacttttgcagtcgaccattgcgcgaatagtcgttgctccactgtcacactggacagtccggtggcacaccggacagtctggtgaattatagcggagcgccccctaagaaacccgagagtggcgactgtacggtcctggtgcaccggacattgtccggtggcacaccggacagtccggtgcgccagaccagggcacactcaagtttcttgctcctttgaatttgaaccctttcttcaatcttttattggtttgtgttgaacctttatgcacctatagaacatgtattctagaacaaactagttagtccattatttgtgttgggcatttaaccaccaaaattatttataggaaaaggttaaccctatttccctttcaacattcaagggtcttaggccatgtgttggatacatccactatgaattattcgatgattccaattggtctggtagttcacctacatgcaaggagaaccaagctttatgtttaggcacctaaacttgatgggggtatacaactttctcatccaatgtttttgcaacccgaagcttcttaggtatatttttattcaatggacctaagaacataaccttcactttgccacttgaatcttttataatcaaataatgtgcattcaaggaaaaaggtactaagtgctttagtaatgggttagtggtgtagttttgctattatggccaaagtgtccatctttttcacactcaaagcaattctttggttaggggataactttgtgcttctgctttcttttctaaaggcttggtagccaataccactcctatccactatcatgatcgtgttcatgagaaactcatttaggaggtattaggcttttgtgaacttttacaagtcagtagctaggtgacccttttcttgtttgagccttttgtttgcctctatgagttttttatcgtcaagagtcaatgaccttcttctctatgataatgtttcctttggttgctaaattttccaactatttattaagcttcatattttctaatttgatttactcaatcttctcatgaagctcgtttttgttcacttgcttgcatttgtttttagtttcttacccaaggttctcaaacaagtcattacatgaagttgctacatcaatctaaacaatttagttagtagcctcatgtgtttcgatagacaaaagctcatactcagtaataagattaccatgattaactttgatgagtgttgtcttcttttaaagaactatatctaacattaagctccctattcgtttcatcaagcttatcttacctttattttatatatctaagggaggacttaatatctttggtattggatgacatagcttttattttcatcttttaattaatcactagcttttacaattatgtcacacttagcaattaaagatgtgttccctttttaaatttctcatttttggctcttgtctttctaatgactttagtatattattttagcaagtcaactaagtcatcatactatggcaaaaaagctactcatcattaccactatcgctactatcatcatcattttgtacctttgttcatccttggccaagaggcataggtgtgttgaagatgatgacgacgatagtggtggataataaaatcccatggcaggtgtggccaccttcttagattcatcgtcactatcatataatgacgagttgcttgtggagtcaatgttggtgagccaatcaccaacaatataagcatctataccctttttcttgtggaattgtctcattttccatctctcttcttgaagggctttttgtttatcttgtcatatttgcttccatcatctttaatgtccttgagcttgttcttattaggcttggtgaattgatgagaaagataaccaagatcaccacaactgtagcaatctatttctgagatgggctttctctttctacttgtgaagaatttcttctttcttgaatcgaactttattccttatcgattaagctttgagcattttggtggtattattcaccataagtgtaagcttcgtgtcatcaatatcatcatcacttgagctttcatcttctacttgcacttttactttgtcctccttctcaggattacctttaagtgccaaatccttcttatttcaagaagaggtatgacttgcgggattcaaatacattgagaaaccaagtgggtggatctatagttcattgatgtcgtcaaagatcctggtgctccagctatttaggtaatcataacagtaaaccttcctctgtattgatgtcggatttggtgtagctgttgaggaatcagggctccgacgattg

SEQ ID NO: 473 - DNA, 14966 bp, Zea mays
  Intron number 8 from transcript GRMZM2G053019_T01 (locus G RMZM2G053019) derived from phytozome v7.0 (chr-ID 2; pos 4 8116125 to 48131090)
gtttatccgtaagtgccacctaacttgctgtctttacagttattttattgaaaacagaagcacttctgcttcccaagaattagttttagtttattattaattgtaatagtttggtgaatattgttgattgtcagttaattactctgaatgccaactatccatgccttgccacttttggtatatgcacaaaatgagtatgcttgattgcttgggcaataagagaaatgctctgtattagaaagcacctaagacattagtttggctcaaccatactccctctgcccctttctaactaccattctcacttccagataagtcaaacatgtatgtatgtattatgggcctagagcccagcccattaaggccatgttcgtttgatcccaaaaccatagggattgagggggattggaagggattggagaggattttgacttgtaggggatttgatccccctcaatccctatagatcagcacaaaacgaacagggcctaagggtaacatatatgtaactaggtggatgcccgtgcgttgccacgggagttaaaatttagtataaaacatagatacagaaatacaaacatcactatgatatgttaaatccatgtggtaagactgttccaaattataaatgttttagtatttctaacgaatcagtattgaagcacacattgacgacgtcgtccgtggcgcccatgacgccgtagtgacacagcacgtggcgcccatgacgccgtagtgacacagcatgtcgcagaggcgcgtgccgcactgcatggacgtggagatggcactgaggccagttcaagcccactttctggcacaccctgttatgctccttgtgttggttggccacgcataccagcgtcacggggagttccaaggcctcgaactccgtcaccagctgctccatggtcagcttggcggggcatctcacgagagtcacgagccccaccaccatgtatgtcggttaagtatgtcggtaagccgatattcttaacataagaacgttgatctattagagtaagaacgtcggtttctagccgacatttttctagtagtggtagtggtgcggtgccggggtgatgaagtcgtgcgccatcagccacgacaccaaaggctctaagttgaaggggtgcttgcccgtgagccggacaagcgccgggtggcgccgcacccacgcgtcagatgtggcctcgccacgcgagtcgcagacggctggctccacctcgaggcacaggaggtacgatgatcgccagtccggcgggaatgttgtatttttccatggaatcaaaatcggggcgggtgcgacgcttgcctcctgggccaccggagcagaacatgttgaagctcttgggaggcacaatggtcgaccacgagtgggggggcaggtgtcgctcaacagaggtcgccattgtcggcacgagctacgagaacggtttttaattgtgatgtccagaggtcgaggttaatcggaagctcgaggaatataatcatgcatgccctcagaaagaaaacacagaataaaaaagaatactcaataaattaggcaagggaaaccgtctgtcacgattttctgatacaatcaggtgatatattaatagatattacacgaccattatatatgaagcaagtattaaccacattcattatatcaataggtcgggaaagtatattacacgacaattataagggaaacacaataaatcaggcaagtatattacacgacattgcatagaatacaatcaggagcaaattcagatactatgctgatccaaactgctgtattcggtagattatgtttgcaaatctacgattctagggacaactcacgtaaacaaaacttaagatttcaaaaaaagaagccaggttaggtaagactaccgcaagactgttactgcaagcaagctggcataaagctgcattcgagatcacgtttttattcatcttggtcagctcgccttcatgctgatttttgtatttgccaaaaaagtgttgggctgtaatatagttgaaaaagaatccccaagtgtctctaatgattcctgcgaaaagtcctctcggcaattctttgctgtaagtgcttccagaatctgcaagtcaatgaacatgggttaaaaataagaactatgttcgtgtaatgccacatcaatccgaaagtgactattgcattaggtatgaacatatgggaatgatcaaactacttccaacgaaaagaacaatcgacaaatgcatgtgtaatctattgactgtttgatggaatgcaaaatttctacagaactctagatttcaccagaaataattacattttgacaacggggagttctacacactttcctgcttagacttgtcagatctctatcacaacagctacaaaacgatcagaagcctaagcatgtaaggagagaacatgagtgatgatcatgtacatcatgatgggcgaacaaatcaggagcaactacaccactgctgggaagtagcgacgaacattaattacattacaaaatagtatagtaataactaaaaacaaccctacgtatttaccagtctccatatcctacattcttaccttaattactctggacgagcatgcgccagtttactggcttaacactggcggtacttcatcactaatttttagtccctttattttatttcattttagttactaaatttctaaatagttaaactaaaatagagttttattttccatatttaatattttagggactaaaatataataaaattgatggacaaaaaaattagtccctataaaccaaacacccccttaaataatttacatagttttagctctctcagatactgctgagcccctcctctctagatgtttcagggcccctttggcagggctctggcttctccaaaaacgactttggctctggctcacgaggtgaagccacttctttagatgagccaaagccattctgaaaaattatttggcaaaacggcttataggttgtttttcagaaagacccttgtatagtttatctctcctgtacgtggctagggattgagggcaggaccaaaaaaaataatttggactggtgggagggctattgtgcaaaaatgacgtgagctgaagccgggtgagccactttttttggctcatgccctctagttcattttggaaaagcacttcactggtgaagccatttgaaaaagaggtgtttgacataacttttgcatgagtcagagccgaagctgaaaaataagccctaccaaaggggccctcaatatcaccttcgtttgcatcggccctgcacatgagggagccaaaaccaaaaaaattgaccatggcagaagcctgccgcccctgctctcctagctcccgatatgcccaaagttgacaccactctgtcgtctaatgtgctctgtctaatgggatataaagccatgcatgctctgcaagatgtttccatgcatatagatgaatttcacaaactattagcaatgctcacaaggaaggatttttccaacggttatttgcatatataatttacctgttttttctattattaaaatggaaaaagaatagccaaagtgccatccaggcaggtgtgattgtgcgcctgctttatgcattcaacacagttagtcagtgtgcatataactttctgctggggtatttgcaaataacatgtaaacatataggttacatgaaaaataccagccaacaacatatttaaccttgtttttaatttttgctaaccaaattatatagccttattttcacaggaagaaacatgggtaataaactacactttggaaccacatgcaagactgtaccaacaagaacttaaagtgaatatatttgtggtcactaatcttataagataggcgtgattgcttagaatattaacactgacatgaacatcaacccaaacaccgtgcaagcatgtggagggtgtagaacgagatagtaagaaggaagacaccattttccacagagagacaaagcacggggacgacagttacagacggatccacgatgtcaggggagagggaaattggagagttggaagcagtgggaccgctgtacctcgggtgccatcgcggaaggccttggagacatgcttgggtgtccagcacaggccctcatggcggtcgtcctcgtcaagccccaacaccagccgcccgatggccagtggcgtcctgtcgcagctgtaccaccagggcgtggaggtcgacgcgctggtgcgggtcgaggtgcgtgcgttgcgtcacagtaaaacctttgttcgtcgacggacacggtgtctctgatcctttttttcccacaccgtacgctgcagacggacaggatgcgcgcggcgctccaggaggctcggcggcggcacgcgcggggtgtggtcgcggccgtgggccgcgcggcggaggctcggctccgcgccgcggaggcagagctggagcgcgcctgccgccgcggcgcggatctggaggagcggctccggcagctggccggggagggccaggcgtggctgggcgtcgccaggagccacgaggtcgtcgccgctggcctccgcgccacgctcgacaaggtgctccagcagcccgccgtcgccgccgccggcggaggagaatgcggcgtggcggaggacgcgcagtcctgctgcttcgtggcatccccgtcggggctcgtcgccggcgacgcggtgtcgacgggttcgtcgccgtcgtgcaaggcctgcggcatcgttttgctcatcatcatcgcatgcggaagcgacggccgcgaggtgggcctgctcgagcgctcccatggcggtagatgcacccatctcagaaacgagattagatctcgattgatcccttggcgacttcgcgagccagtcagcagcttggggaggagagagagagtgcgtacaggagagatgggggagaggagatggagcgaagcccgggttctggtcgatgccgctagactcgagatcgacaaggacgagaacggcgggcgagatggtaggtgcgtatgggtatcgcgcggtgtcggcggtgtctcaagcataaatttgatgtcggttttcagttttctacttacccgaagtccccaggtgctcgtaccctacctcctgcgtgccctccctgtctgcttcgctgccgcgcggccgcgctgcacgcgttgcttgcgtcgtcgcggcccctggtcgtggcgcttggaacggcattcgcagacgacgccgaggttgttacgaggatgaggggttgtggatccccggcatcacggacgtgcgcagcgtggggggagcaggggcggggagggggctaggggatggggggttgcagatccccggcatcacggacgcgcgcagcgtgggggagcaggggcgggggctggacggcagctattgcgcaggggtttgcggcgtgctgccgtgcggtgcgggaggccgttgctgaacgggagcgggggcagtctacaaatggctattaatagctgtagagattagggcatatcatggtcttgctgtaaagtaaggtatcacacataggtgtatgttagagtaatcgctctcttaggacagatttagtgatcagagatccatggagaggaatcctcttgctatttaaaattgaataacaagagaattctttttccatggatcctcccgtggagtggaggcaatcttgatatttacgttaggataaaaaacaccccaaaatttctctgcctgaaattcacgttatatcttttgttataaaataaaagtacgtggttttagcttctaaagtcaaacttttttaaaaaaatcgatcaagtttatagaaaaaaacatgtgtatctacaatatcaaattaatatgattaaacccaacttcacttgaaatagtacacatatttggtattatgttacttagaacaaaagcacatgatgaaaaggtagaaaacagtgaaagaacaatcagaataatttaataaatgggttgttgaaagcatgttttttcccaaaaataaattagttagttgctttgaagagcttcttgaagacaaaatacaaagaaacaaagaacgagagaaatcctacaaattctcttaacgttgtttttaaatctattgctaatatagagtattttgacggatcactcgttgcaggtcacaactcacaaggcaaaaaggaacaagagcaggcggccaacccaatgccaacgcggtccagccaagtccaacccaccccaccacacccaccacgtcgtcgacgccgacgcgtcgccaacggaaacttctcaaagcgccgacggggttccacggcccgtaatttcaaccgtccccaccgccgcgggctcctcctgacggaccccgaaggtcgccttgactcccgcccctcgccggcgacgcccggcatgccgtcctcccgcctcgtccacctcatcctcctcgcgacgctctcgctcctcctcgcgcaaaccctagcctcctctgcccccgtgcccgccgccgggtcggcgtcggcggagtccggcgacccctgcgcgaccaccgtagctgacggggaagctgacgttccgctgtgccccgtgtggtgcttccgcccagacccggtctgcggcgccgacggggtcacgtactggtgcggctgccccgaggcgacctgcgcgggcgcccgcgtggcgcgacgcggctactgcgaggtcggctcggggatggggggttgcagatccccggcatcacggacgcgcgcagcgtgggggagcaggggcgggggctggacgacagctattgcgcaggggtttgcggcgtgctgccgtgcggtgcgggaggccgttgctggacgggagcgggggcagtctacaaatggctcttaatagttgtagagattctattgtagcccatggatgttaggattttcattcctccaacatggtattgaaccaaaggtcttcttcccttctcgtcccctagctgccggtggtggacaaggtcccatggttcgcgttcctctcctttcctctgactgctctcctctcctcttcttcactggccgctgttgggcgatagtggccacaagcccacgacccctcatcgccctgtgaccctatcgctgccccctccaccatagttgttatcgctggagcatgcccctaggcagcccgctccccctccacctcccgtccagggctcacctgcctctgctcctgcgggtggtggcctagctgccgttggcccagccgcccttggcctggccgtcgttggtctagctgcccttggcctaggcatggttggcatgggcacaggcctcgctaccgctggcatggttattgttgacgtgggcccgagcgtggctcccatcgtccccagcatcttgttcttgccctcactgtccttcgtgcctccgtcggctgctcttccacattctgacgttgcggctgccaactgcaccctggttgtggcctcatggctgctaaggccactgtggccgttgcctgcaagcggcaacgggtcgtaatcctcgcttaggagcatgaatgcaccacgacggatgctctcacccggcaacttgttgagggtgagtgccatctcactggttcttcctgccttaaccttctcctagagccctcggtggttgaccccccttcggcgtatgaggtcgtcgtcatcgctaacctccacacccaggcgatgggtgttcagaacattcgctctctggcccccatctttctcaacctggcttcctccacctacgttcgctagtgcgaccttgtcctcctcacgctgtagcgctacaccctagataaccacatcctcaccgtccctcactatcccttcttggcggcgaatggatagtgtggttctctcctagatcattaggacgaccactgttaaaatgtaggatgtcgttcgctaggcctaggttgccattgaggagcagttcctcagcaaccgtgaggctcgtgctctccaccttgacaccgcctttcggaccttcgtctagagggacctctctgtcactgagtactgctgccagatgaaggacatgtcggcctcctcttgggaccttggggagcctgtctccgatcgcacgcccgtcctcaaccttctctagggcctcaacgagcgccacgatcacctccagacttggatcactcgcttggtcccattcccttccttccacaaggtccgtaacgacctcatcctcgaggagctcgccaagggggcgcctcctcgctccgccaccgccaatgctctctacagttccgaggcccaggcctaacacatgacttccttcattcttgcctcagaaatattaatatttatggtacattattagtatcattagatagattgttgcatctatttttacaataaatttatttgttgatacaagtactgctaatattttctacaaaccttgtcaaacataagaaagtttgaccaacacggataccattaaaaactcggccggggagggaaaggctgccctcccagtattatattaagaagagaccgaaacatggtcccggccgagaaaatccccgaaccctagcccccatcactagcgggccgtcaccgcccactctgcaacggcccagccggagggtggcgcgcaggacgtgcaggatgtcagcgcttctgcatgatgaggataattaagtgaccaatcttagaaaaaataatacctttgctttactagaccaatatcttactcctgaattttgctagttcgtgaaacatgatgaccactttctttctatattctgtgtaaagttagttctgctttggaggaactccatggtttaacataaatagaatggaccagaaatttctcagtgtacctgctctttgcctgtcaggtgttagggatggaagaaccatagagcaaggtttcccaagtaatgagtagtaaaatgggattatgtaatattccttagggttgttgaggtcaaccattttcactattttcttaaacggttgtttagcccatttacgcaccgttaaatgctccatggtggtactccgtttccatttaatcagttgtttagcctgtttaaagttacaacatcaacatcaacatagccttttagtcccaagcaagttagggtaggctaagcttgtttaaagttaaacaaccattttgcctgtttaaatggcagcatagcctttaggataacattttacacttatgtaataaattgttaccatttttttcctttaggatgacatttttaacaaccattttgctcgtttaaaatatgatatcgtttgcgagagggcatgcaactgaattggttaggtggtctgagtagcactcctcagattttgagtccaattgcccatgggagcgaatttcagaatggagttaaaaaacctcttgtcccatatcaaagtataggtctatggcatgaccttggtcatggtcattctcacatgggctacggtctgttgcgtacgagtggggtagaatttcaatgttttttcttgaccagtgttaaaaagtcttctctatttatgatgctcgggactgtcttacccccctgcgggtcaattaaaaatgataccgtttaccatttaggataaccctaactattgtacacttcggcaataaattgttctttatatgttaaattggtatttgaaagtgatgtagtagatttgtctcaaaatctagtttcaatacattacaaatatcctgtgttgagtgtttgtttgtgtgggctgtgtttgcctcttttgtagtgttctgttcttctctctttaatgaaatgatacacaactctcctgtgtgttcgaaaaaaactcgacctgcgaggggtaacacaacccccgagtattgtattaagaagaagatcttctcacacaggtcgagaaaacccccgaacccctgccccacccatacacatcgacatcaaagcccatgtgagaacaaccacgaccgaggccgaaccttagacccatgctttggcgtgggacagacgagggaatttttttaaccacagcctaaaattcgttctcacggggagttgaacccatgacctgcagagtgcagagtgctactcagaccacctaaccaactcagctagaggtcctttcgcctcttgtgtgttcgagaaaaaaatacattacaaatatcctgtgataaaaaagtaagttgaagttttgttttgagaccatcttgatttccaaaatgtaacttttaattgagggatttgtatctgtcatgtggggccgcaccgacacgcgggcccgcgatgccaggagggctgaggctagggcgtttaaggtaggcgccaacagcagcccacctaaggaaggttcatccaaagaggaaagtagcagcagctcaaccaaggaaggtccgtccaaggaaagtggctagattagtggccaaattgataggccttaattgtaggggagttggtttccaaataagtcatttcctaaattagaagttacctagtcggtcgggccagtggcctatttatatggaacccatgagacaatgagggataagaaacatatcacttaatctcctatctacctctactatctaagcctacggcggaggaatacctcgccggagaagacggacggcggatacgagttacgtagccgcggtccagctgctcgagggcctaacgcccttgacaacctggtatcacgatcccggcgatcctcttcccagcccaccactacacccgccgccaccacttcaccacccacagctgcagcaccaacctcaccgacgtcctcggtggcgtcctgcgttccagccatgggcgattccaacgacttcaaggccttggccgaggctctcaagtcactgcaggcgtccgtcgcggccaacgcccaggccatcgccagcctcacagccgaccacacgtccgcctcaggccacaagatcgactatggagagcaccatggggaccggccaccgaggttccaaaagctggattttccccggtacgatggtaaacccgatcctctcatcttcatcaaccgctgcgaatgctacttctatcagcagcgcatcatggaggaggagaaggtctggatggcttcctacaacttggagcacgaggcgcagatgtggtatatccaggtccagacggacgagggtacttcgtggcgccggttcaaggagttgctactttcgtcgcgctcatcgacacgggctcgacacacagcttcatcggggaagcggctgcgcgacgctcagggctaaccatcgagccgcggcctcgactcacggcaacggtggccaatggggagcgcgtggcctgcccgggcgttcttcgccaagcttcggtggacgtgggcggcatcgtattcggcgtcgatctcttcgtaatgcccttagccgggtacgacgtcgtcctcggaacgcactggatggccacactcgggcccattgtatgggacttcaccgcccgaaccatggcattccagtgggaggggcgagacgtctgctggcacggcgtggcacctccatccgcaccgactctactagccgccgcagccgacgacaccctcatcgacggcctgctacacgccttcgccgatgtattcacctagctgatcggactacctccagcatggggccgcgagcaccacatagtcctcaagccgggttcctccccagtggcggtgcgaccgtacaggtaccctgcggcgcacaaggacgaactggagcggcagtgcgccaccatgatcgaccagggcatcgtccgccgcagtgactcagcgttctcttctccggtcatcctcgtcaagaagccggacgggtcgtggcgcttctgcgtcgactacggcgtgttgaacgcgctcactgtcaaagacgcgtttccaattccggtcgtcgacgagctcctcgacgagctccatggcgcacgcctcttcaccaagctggacctgcggtcggggtatcaccaagtgcggatgcggcaggaggacgtccataaaacagcgttccgcacccacgacgacctctacgagttcctggtgatgccgttcgggctgtgcaacgccccagccacattccaggctttgatgaatgacgttctatgagcctacctccgctggtttgtgcttgtcttctttgacgacatcttgttatacagcacatcatgggcggaccacctccggcacctccgagtcgtcctccacaccctgcgccagcaccgactctttgtcaagaggtccaagtgctcctttggtgtcgacgccatcgcctacctcggccacgtcatttcagcagctggcgtcgctatggacctcgcgaaggtccaagccatccacgactggccccaacctcgttcagcgcgagccgtgcgtggcttccttggtttggcaggctactatcgcaagttcgtccacaactacggcaccattgcagcacccctcaccacactcctgaagaaagaggggttcgggtggtccgacgaggcaaccgccgcttttagtgccctcaaaagggcagtgacgacagcaccggtgttgacattaccagacttcaccaagcccttcgtcgtggagtgcgacgcgtccacctatggcttcggggcggtgctcatacaggaggctcatccgatcgccttcttcagccaaccggtggcgccctgccatcgctccctagcggcctatgagcgcgaactcatcaggctttgtgcttgccgtacggcattggaggccgtacctgtgggggcgacgcttcgtcgtcaagacagaccactacagcctcaagtacctcctcgatcagcgcctggcgaccattccgcagcatcattgggtgggaaagctcctcgggttcgacttctctgttgagtacaagtcaggagcaacgaacacggtggccgacgcgctctcgcgccgcgacaacgacgaggacggcacatggactctccaggcaatctcggctccccgcttcgacttcatcagccgcctccgacacgcccaggctactgagcccgctctggctgccatccacgacgaaatcagggcagacacacgcactgatccatgggcggtggccgacgacatggttctctacgacaggcgcttgtacatcccaccggcctcgccacttctgcaggagattgtggcagctgtccataatgatggacatgagggcgtccagcgcacactacaccgcctccgtcgtgacttccattttccaaacatgcggcgtgtggtgcaggacttcgtacgggcatgtcccacttgtcagcggtacaagtcggagcatcttcatccggcaggtctcctcatgcccctaccaattcccaccgtcgtttgggcagacatcggcctcgacttcattgaagcactgccccgtgtcaacgggaagtcggtgatcctctccgtcgtcgaccgcttcagcaaatattgccacttcatcgccctcggccatccatacaccgccgagtcggtggcgcaggccttcttcgccgacattgtacgcctccatggcgtgccgcaatccgtggtgtccgaccgcgatccggtgttcacctcgacgttctggcgtgagctcatgcggctcatgggcactaagctacacatgtcatccgccttccacccacagtcagacggccagacggaggcggccaaccgcgtcatcattatgtacctccgctgtttcacaggcgaccatccttgacaatggcttcgctggctgccgtgggccgaatacgtgtacaacacagcataccagtcctcgctccgggagacgcctttccgggtggtatatggtcgtgacccgccctcaatccgctcttatgagcctggtgaaacaagggtggatgcggtcgcacgcaacatgaacgcgaggcattcctcgccgatgtgcgctatcgcctcgagcaggcacaggaggtgcagaaacgacactacgacaagcaacaccggccagtgacatatgcagtcggcgactgggcgctccttcgacttcgccagcgagcttcgtcctcactgccacaacagacatcgggcaaactgaagccccgcttcctagggccataccgtgtcatcgagctcatcaacaacgtcgccgttcgcctggagctaccaccacaggcccgcattcatgacgtcttccacgtgggcaccctgaagaagtttgtaggggcacctccatccgccccaccgcccctacccgacatccatcatggggcgattgttccagagccagctcgggtggaacgcgctcgcctggcacgaggtgttcaacaggtgctggtccagtggcggggcgaaccagaaacttcggcgacctgggaggaccttgacaagtttcacgccacctacctagattttcagctcgaggacgagctggtcctcgagggggggagagatgtcatgtggggccgcacctacacgcgggcccgcgatgccaggagggctgaggctagggcgtttaaggtaggcgccaacagcagcccacctaaggaaggttcatccaaagaggaaagtagcagcagctcaaccaaggaaggtccgtccaaggaaagtgggtagattagtggccaaattgataggccttaattgtaggggagttggtttccaaataagtcatttcctaaattagaagttacctagtcggtcgggccagtggcctatttatatggaacccatgaggcaatgagggataagaaacatatcacttaatctcctatctacctctactctctaagcctacggcggaggaatacctcgccggagaagacggacggcggatacgagttacgtagccgcggtccagctgctcgagggcctaacgcccttgacagtatcttatcagtgctccaatccttcccttataagtgtttggaatgtggtggtaatgtctcctgtgataaggcctcccatgtaatggacagcctgcaaagttagttttagtaattctaaagttactaattcttgtgaaggaatattaagaaacaggaaatctccttttgtttcaagtaaactgaaaaggtgttgctgatttcttcccatgttgcagctacttgcctgaagag

SEQ ID NO: 474 - DNA, 2864 bp, Zea mays
  Intron number 3 from transcript GRMZM2G148751_T04 (locus G RMZM2G148751) derived from phytozome v7.0 (chr-ID 2; pos 8 8725336 to 88728199)
gggcgctcaacgactattttgagaggaccggacaggttatcccacactttagtttcttgttcttctgtttgtagtttgtcagtcttgtttgttttggttggatcaatatctctgattcctctctggcaggcatgtgttctttttttattttgaaaagaggaaaacctctgcctttaagaaagcaacagtatctcggatcaccagtttaccggagaaagcataacaaagaaactaagcctgatacagaattaaatttcaatgatgtctaaaatcatcacaccactaggcttagtgagtgtgccaagcaatgcaagggcgtgttgctttttgtccatcgactcaccaagatgtcatgcacagctgagtagaagatagattattcatgtggttctttcatttcatgacgatagatcacgctcttcaccttctctatcattgtgtcccacatctcatatcaaatagaggcatggcttgtcagtatcatcttcccgtatcatagcatagataggctcaatgaaactaagaaaatagctcatttttataccaccacagatcattcaatcttctccttgacaaatcgagcttgacgaggattatctttcctataggcactggcgcactgcacttttcactcactaccatcactgaaagagcatcttttatagcaataaatctcttcaacatcacaatagcagaggcaaattttgtgtcagcaatggcaatgaatttcactttcctttcctcattgaacatagacaacctcatggagtgattcatgatgaaatttttaatcatgctggcatctccaatgacttcgtgaatccactagaattcagtataaagcacatcttcaatttccctaggagcacatatgttccttaaagcaagattcaaagtatgcacaacacaagggatccaaaaaatgagggtgcttctgctcaactttgatgccagcagctctgcaattggcagcgttgtcagtgatcacttgcacaacattttgtgccccaacatcatcaattactgctaacatcttctctgaaatatgctcggtcttggatattccttcagtggtgatcgctctaagaaacattgggctatcttctgtaacagccaagaaattcaagagcatctgaccatccatctgaaataatactcacacctttagagctcaaagtttccttcatgggctgcaacattctctccacacgtgtcctctcttgcacaagaagagttgtcctcaacttgtagcttggagcgacataacctccaattggcttattggcagaaagcatgaaagcctttctactctccactctgatgacaaggtccccccagtctggtggatgggcattccagatttgttgccttagcaactaaaatagggctgaattcagtaattattttggtcgcctggtccctgtggaactcaccatagtgagtgttcaatgtagctgttctcaatgtgcagcttattcttaagcagatttctgaagaggctaatctctggtgtgtagctggtgctagtgggttagcttacttagaggccgctactagataatatggtggcttgtgtttagctgggtcattgttgtcgtcatttttgctcttcccttttcattccagttatttcttgtggcgtctaggctcctttgggagttttagctcttcttccttgttaacgtaatgatacgtagctcacgtaatgatacatagctctcctacgtatttgagaaaaaatagtaaacaagtttatgatacatcacccaatcgaaaatggtttgattcaccaaaccaagcattccattagagtggcagttgatgccattgtcgtacaaggatttggcaatgctaaaatgttttaagttgctttttgtgtgtgtggcattgccaattcttagactgaagggaaggcctggtgcactctagagtctccacttgtatcctgaagtcgtgtgggtttgaaacagcgtaattgcaaaatgtatgtgagtgctaggttgtgtagtcagtaaggttattatcaccattgttcttttattcagaatattctgtactataatatattcattattatgaatatgactgaagaaggataggttttctgtagtggtgagagctgtcttattgagtcagttggtttattgagttacttatcgtgggttcaaaaaagtctttctgcatgtggggaaaaacttacctcggtttattgagttacttatcgtgggttcaaaaaagtctctgcatatgtggggaaaaacttaccttaggtcttactcggttgcaagggattaaaccccaccatagatttaatctgggtctggattgagtggattcataccttatacctaatcccatggtgggattaaattcatcatttaatccatgtatcactcaaagctagttattcttttgaatcatggattctaatataaatttgtacattattttcatagatttgtttcatatctaatgagctatggatataatccatgtgttacataatttaaaaaattaccaaacccttgggttataatccatgatgggtttaactgaataaaaaaaatctgagtaggcttggattattttggggcatggattgtgaaatagatttaattttaatccatgttaatctagatctggattggtgcaaacaaacaaggcttagtttattagttctcgagatccagtcatgtgggagtcttcggtactggctgtacctttttaattgtgaacgtgactgaaatgtttctagcaatctagcaaaatcaatgtttttataattatgtcgtataaaagagcttcgcatttgctcgaattctgtgacaggagatagattcgagcacgctggagcacagttgtaa

SEQ ID NO: 475 - DNA, 4146 bp, Zea mays
  Intron number 10 from transcript GRMZM2G033619_T01 (locus GRMZM2G033619) derived from phytozome v7.0 (chr-ID 1; pos 264504387 to 264508532)
aatctatacaggtttgtaatactgtacttgtatgatatttgttatttgcattgatgaaaagatctcgttttcatgagaactgctgcttatctcaactagagttttcatgtcttcacattcttttgttgacatggatgttaaatttacatgcttctattatttacaatcttgtcgccttcactagactattattgtgtttttttttaattttttaatccttattatttttatgttaaaatagccccacaaaaaacgacgcaagagagctgtgtgtcatttcatcaagaaaggaggaagaaaaaatacaagtgggggaccaagggccaaaacccgcacacttatagacacaggcgcgccacacacacaagagggataacgacccaacaccggggggggggggggggcttgctcaagagcccagccctaccaaccttgcgcacaggaagctaagtgcagaattaccagctagacaccataggttgccttcctgcacaaccttacggtagactacagaaatactaggcctaatcctctcaaacacaatcgttcctgtgcttctagatctccccggccaccaaaatgatcaaggagttaagacccttcttcacctccttaggaactcgattgactgccccggaccaccagcctgaaaaactcttaccatcaggttgcagaataatagctaacatcctgaggccattaagaattatggtccaaacttcacgagagaaaacacaggagacaaggagatgctgtatagtctcctgttcctggtcacaaaggggacaaacattgggctgtgtgagccctcgcttagccaagcaatcctccgtccaacatttattcttcaaagccaaccagatgaagaatttgcaccggagggggccccaactcttccaaggtccaaacttaatgcccccaagaaaaatgcctgataagcagattgataggaatacagcccggattgagtggacctccaaaggaactgattaggaatacctggttgcagtgttacctcaacaactaactcccaaactctcaaatattcgaccagcacttggacagtgagagactcactgatgtctgttacccatcttcgattggtcaaggcttgagatactgtgcaccgctttcttgttttcttggataccgccaaaacaaggttcggagctaattcatccacagaattcccatgcaaccaccgatctgtccaaaataggtcctctccatcacctatcttgatttgaatggctgcagcaaaaagggcttgagcatttcttggaacatggacaggaaggtcctcccaagggcgatccgaatcattttttttgaagccataaccaacgaatgcgcaaagcccatctcatggtttcaagattaagaatccctagaccaccatattgctggggtcgctgaacgttctcccatgagactagacagtttcctccattagccttttcttgactggaccacagaaaacccctccgatgtttatcaatagctttgattacccattttggcaggtctagagcagtcattactcattagatgaatgtgaattgctgaaaaaacagtcttgaccaacgccagactccctgcgcagttgagagaagccttccacttggggagacaatcagccaccttaccggctaatggcagcaggttggctttagatgatttcctaatagtgaggaattctgagctagttacagggaaaaacactcactccacaagccacggcccgaatgacatccaaatcagcctcagtacagttgataggaaagacagagctcttaacaaaattggttctgaggcccaatgcatgaccaaaaacatccagtagtgagatcaacccgattgggcctgaggaacataatctcctcatccgcataaagagaaacctgatgtttagcctgtggaacagccaaccgctgcagcagatttcgtcttgtggccttaaccactagggcattcagcacttccattaccaaaataaaaggcataggagataaaggatacccttaccttaaccctcgccgatgcaagaccatttcccctggttctccattaatcaacacacgtgtgccaatgtccttgatgctacaaaataatgttgtcgcgccacatgtgtcggggcgccaagatgtgccacgttggacggggatttacaagtggaaaacattatcacaccactctcgatggcacaatagtacagctttgtcgtgccagcaggagtgccttgacaactgacaaggctccaccttagaaaatgtttccatacaatttcggatgataactatttttatatgaaaatggtagagcttgatatgatctgcaactctagttttaagttttctcatttgagattgctaagatgctaaaaaaatatataaactttcagcagcatatacacgcatcagtcgtcttagaaaaataatatctttttgtatgatgtcaaatgaaatactttttatatgaaagttatagctctcaaatagatatacaaattcatacttttgagtttatatttgagaccgttaagatactgaaattctgaaaagtaattaaagtttcatcaacatattaacaatgtaccaaaatcatgtgttgttaaataataatagttttatattaaagtcgcagttatctatgagatttagattttgttttcagttttgagttttttatttgacactgacagttaagatgctcaaaaaacaatagaattttaaaagagcatattagttgtgtatctgggcttattttttaaaagagtattatcttttttatatgtcaatgtcagataaaaatactttttgaatgtaagttgcagatcttattgggagttacatattttatataaaaagtatatttatctaatatcgcatcagtaaaaataatgattctttttaaaaaaaactagccttggtacgtgattaatatatttcttagaatgtatattatttccttgagcattttaaccgatctcaatgaaaaacctcaaaactaaaaagttgtcgttctcatcgatagctacaactttaattttaaaacaatcttcattggacatcaaacaagaatcatgttttgttaggcgattagtctagatacacgactaatatgttgatgaaactctacattatctttttagcatcttaatgatcttaaatgtaaaaactcaaaaactataaagttttagatctcattgcgagctgtaacttttgtataaaaagtatctttattggacatcatacaagaaatatattatttttctaaggcgacaagtgtttttacgtgattattatgctgctgaaagattatgttattttttgagcatcttagcgaccccaaataaaaaaactcaaaactataaagctgtagatctcattgatctctccaattctcatatgaaaatcatcttcatccaatgtcatatgaacaatatatattttttctaaagttgagttgagccttgtcacgcaaatcccgctggcgtgaaaatagtatttccgcgccattgggagtggcatcacaaggttttccatgtggaatttgctatccaatgtggcacattcttgccgcactagcgcatgcggcgcaacagtgttattttacgacgttagcgtgaccaaaagggttaaaattaaaatgtgaggatattgggaagaaattaaaaaaaatgaaaattttagaatatctctacgattatgtgtcttttgaatacatgcactgataccatgtgggcctggacatatttgtgtggtttaaacagtacgataatgagattattaaaaaaatgaattttaattatagtggcttttcagggattttattttttgggttactccagtcattagtttgtttggtttgtcataaatctcatatttacatggttctacgatgctcttggctattttggcaaaagtcctaccctttaatgtaactgccctgtaaccctttttcagaaataaagtctcagtagtttcttatatctgtagcagaagacatttgtcaatgtttcttgtaggcattattttctttttacctttgtaatacattcggtattttgtgctgtcacttgaataatcttttatccatttttctcgatcagctatcaggaacacttcttgatcaaaatcaagtaag

SEQ ID NO: 476 - DNA, 3833 bp, Zea mays
  Intron number 3 from transcript GRMZM2G090675_T02 (locus G RMZM2G090675) derived from phytozome v7.0 (chr-ID 2; pos 1 02900411 to 102904243 reverse strand)
actggaacttggttagtttatcgtatttttttctactattgtcgtgtattttttagtccttactcgtcttagctgaatagtgcttcgttagctttgactattacatctacgaacaaatcaaagtgatctaacaacaataaagacttttagtttcaagcaagtttgagtagactagagttgaaacctaacagaaaaaaatcaaagttcaaagttcaggtacgtggataaccgtttcccagtcccttatattcaaggctaaatttttgtgtatattctattttttcaaatctcctttacttcctctttttatgtcaaccttcccatgcctttcttcctattattattgcattagattcccactacgcatttgtgcctttggcgtcttcattgaatatgtccaaatcataccaatcggtgttagacaagcttttttcaattggtggtatcatcgtttcaaactcgatctctttttatatggacataaaatcaacgcaacatacacatttcctcaatacttgtctgaacatgacttctttttgtaggccaccattttgcaccatacaacatagcgggttttatccccatcctagaaaacatgtcttagtttctatggtacaatcttgtcacatagaacgccagatgtttggcaccactttctccaccctactttgattttatagctaacatcttcattaatatccccatttctctgtaccattcatcctaaatagtaggcacttcttgatcttccaaactaagatctcattccttatgtgtagtagtgctaaagtcacatctcatgtattcggttttagttctactgagtatacaatctttggattctagaatttttttgctataacttcagtttcctatttactcctatttggcttttatcaactagcactacatcgtccacaaaaagcatacaccaaggagatatatcattttgtatgttatttatgacctcatttatcaccaaggcaaaaagataagggttcaaagttgatccttgatgtagtattaatctaactaggaagtcatatgtgtccccatctcttatttgaacactagtcacaacattattgtacatgtccttggtgagcctaatgtactttgttgaaactttatgtttgtccaaagcccactatatgagatttcttggtattttgtcataagccttctccaatttggtgcaaaccatatgtaggtcctttttttgcttgctatactgctccatcacttgtcttattaaccaaattggatcatagagatcctcgttattcctctagacggtgcttgataactctctctcatagcttcatagtgaggctcatcaacttatggggtgttttgtttaaggaatgggctagtccatcatctctcactcctcactatttttgtttggtttgtgaaatggaatgagttgatccatcaccacctcattcctcatagttagttagtactaatatgaggaatggagtcatcccaccaaatttgaggaatgaacttatgatgcaccacctaaatttggatggagtgattcctcaaaccaaacaccctcttaatttttcgataatggatacaactttgaatatctcccttgttcttgtagattggtaccaatatacttcttcactcgtaagagtttgactagaagatatggttggactatttggttagtcatagtaaagctatgttcccaaggcatctccatgtctcgattgaagtaccatcaaggtctactgtcttaacccatttcatccttttcaatgcttctctaacctcggattcttggatcctatgcacaaagtgattattggtgtcatcaaatgagccatccaactaaaaggttgtgttcccattctccacattgaataattggtcaaaatactccgccatctatgtctaatctcatccttgttcaccaagaggtgccccatttcatctttaatgcacttagctcgattgaagtcccctgtctttctctcacgaacattggccatcctatatatagccttctctccttcctttgtactaaaacttcgataaagatcctcgtacaccctatcctttgtgacacttaaaactcgctttgcggttttctttgccaccttgtactcctctatgttgtccacactcttgtcgtggtacatacatctttatcattccttctacttaatagccctttattctttctcgttccactatcaagtatctttagcttcaaatccactcgctttagttgctccacacacctttgagaccatcttcctaatgtaggttgccatctttttgacatattgtttgcgtctctttttcttttcaagtgccctctttgatgaccctttcgttgaagacttctgacgtctgcactttattctcgcaatcttggcttgtttatccctaccggcgcacacctaaaactaaaagtctgctaccataactccataagctagtgattttaagaaactaaaagtttgtttctgaatgaattaagttgctgggatacgactggtgctaagtagttagcaagtttcggtcttcctgctgttattagtagggtctaggctggttttttccttttttggtctagtgatttggcttgccctatgggcagtgtattttggtcctcttggaccttttcctctcttaatataataacgtgcagtcctcctgcgcgttcgagaaaaaaaataactccataagcttaagttgagagaacacactttctaggtgtcaccttgcaatccaagcatgctcgtttatcctcttttcttgtgaggacaaagtcaatctgactagagtgttggccactacataggttacaaaatgctattcactctttctaaagaaagtgtcggctatcaatggttcaaaagctaccacaaaatccaagacttcctctccatcctgatttctactaccacacccaaaaccttcatgaaccccttcaaaacctgtacttgtacctacatgcccattgagatctcctatgaaaagcttctcactagtagttcgagatctaaccatgccatctaagtctttccagaaaaatctcttagcactcttagcatgtcctacttggagggcatacacactaatgacgttcaagaccaaatcacacacggtaagtttgaccaagataaccctatctccttgctttctaacatatgccatactattcttgaagttcttatcaatcaaaactccaattgtatttgtagctatcaatgtacaccaaagattaaagcctatattgttcacccccttcgccttttgaccctaccatttagtctcttggacgcataagatatttacacatgttctggtcgctttcttaactaactcctttaacttatctgtaagcgatcctacattccaactacccaaacggatcctagttagttcgactagctttcttactcttcacatttgtcgataatgggaagattcttgctcagtttttactatacctaagcgccgatgtagtgcgccactaagaaagcggctatcgatccttgttcacttgacatcatgtctagatcatggcatggcgcgttaccaagggagtgccaacctagcctttgcacatttaacaccataaccaggttttgatatgccgcgtcgcttagagggttgccccaatagattttttgggttttgtcccattagtatggttaggtttaatgttggctcgctaagcctatcacaacctgcctcctttatgagggcttatgacctgctaacatagaccgacttagcgaagttatatctatgatgtctattatatttccagtattttcttccacaggttggggttgtatcagatt

SEQ ID NO: 477 - DNA, 5927 bp, Zea mays
  Intron number 4 from transcript GRMZM2G106462_T01 (locus G RMZM2G106462) derived from phytozome v7.0 (chr-ID 3; pos 5 6813589 to 56819515)
tacgggtcaccccttgctgccgtaagttctttcctcgcatatttatatatatactaagggctagtttagaaaaaaaactccattttttcaagtaattttcattttactaagaaaaattatttcattttctcttgagaaaatagtaatctctggaaaaaattgagtttccaaactaactctaattgatcatcaacctcttttcttacctttttaacgaggctttatttgtttgtttgccgtaactagattttgagatgctcctttttatttcatgttctctttatatatagtttgtactcccttgaaacatcacgatgctttacaatgatgtcagttaaaattaatttgtgaccggctaagttcttactttgcaaaagtaaaacccataaatttcacatacataagcaccaaactgttaatgagccagcaaaggtttatttggacagatatatataaatgcgaaaaaaggtcttcgagatatttttcttctagcaatccatttgtgtccgcaattgatcgatggcaaattaataattgatgtttataatggacagcaggccgcttgtggggcaattatcttttgtggtgttgtccctttcaagattatttatttgttaaataagaacaaagcccatgcaagtcttaaaagacatgtgccccaaaaaaatagggatattgatatattctgtggtcatatatatcagggttatcgtaccaaaaaaaataattttcggtttagtaggtcctcctcaatctgccctagtttttctatatttttttagcagatccacggtccacaattccacagcaacagttccacttgcagcaagagtttatatattgtgtggcacatgcacgcctgtatatggtaacgaccaaaacttgtggacctcacgccaatatggatgacagattttcctttactatcttttgccaatccaaattgaattggtccttgcgtttatgctgatttaaaatagtgcctcaaaatttaaatactagactattaaagtgtttaggcactaaaaataaatacgatccaaacagttagacactaaatcatgtattttagtaagtaaattacattattgggaaagaaaaatgttgagaatgatatataaaacaaggatatgacactagtctagggtatattatatttaggttattttatggtgtgccctatactttttttcacaaaaattataaaatatagcattgttagagccgtttttattagttgagccatatattttaagatagggcgtagatggagatgcttttactttatctagtagaactataagaaataaatttcatatattaaagttagattatctccagcagtttacccaatcttcatacacatattcaaactccaatatacgaacagtgtagtctacaatgcaaaacagtgttttatgtgaccatatgtgtgaaccattagacacagtcttagtgatccaaattctgatgcaagaaattaatgatgtcttaaaagcagataattaataaagtaaaaatgattagatttgaatttgaaataaaaagagaacactattttggttcaatcctccgtttgacatggctaaaccacctcaatttaagaggcttcatgtgtaaagccattttgtttatcctaattaacagaaaaacggctccaaacatcttctgaaaccggtaaagaaaatgtgctaaacatctcgtgccttttttatatttctgcctcttctacattgtggtgtcatatagggctggatagttacctcggctcggtcgagctagaactgatttgttaaggtaatcgttaaagaatcgagctagaaaatcagcttggcttggctcgtttgcgagctcgatctaactcgtttagctcgcgagctacaataaaaaaataatatatatatataacaatataatcaattactaattaaatctaaactaatttaacactcgaaaagtgtaatattacttataatttcacataccatataaatttaacacctaattaacaagtttattatttattactttatctaacattagtgggagctttgatttgctaacaaatactagctcatttgagctaacgcctcgagctaggtcattaacaaatcgagttgagacgctagctcagttcatgacaaaactgaaacaagccgagtagagtggagccaacctgatcacgagtcgagcgatctgacgagctacagatattttgtccatctcccaaccccaactacgaatattttgtccagccccattcccccttcccccgtgttacgtgagatacccaccagcgtgcggtctccactagtgatggcaacggtgaatttctcgtcggggaatggcttcctatctccatccccgtccccacgaatggtttacggggaagtttttcctcctatccccgtccccgtcgggaatttatccccgtggggaaccccacggagaatctatccccgctaggagtaaaatatttatagataaatttaaattgattgtatcaaattaatacaaatttaataaacaagataaaaaattacaagagacatctagtttagagtttagtttgctattttataatatgctatgtactgaacttttactataattttaacaagtaaattgaataattttgataaaaaagttttgcggggcgggtacacgggcccattcccttcctcgcaaacacgatggtgattaaatttccctatttagatctctacgaggactaaattactttcatacttattccctaataaagtaatttctggcgaggaatctggaatcgggtcgcggtctccacaaaacgcgtggctagggatgaaaacgggacggatacagccggatacagggtcatcctgtatcctaccctaatgtatttctctcggatacgggaccagatacgggtagttaagattcgggacggatacaagacgggaccgggtaataatccggacgggtaagaaacggatgacgggtactactcgggtaggtacaggataattgtcgggtagttcatccgatgatattaaatgtccaaccatccataagttaagcaatacataatcatgtatatgatagatcagatgtaagaaaggaaaccagtaaaattgacatcatgcagttcaaagttgcttatcacaaggacattgttgaaccaacaccgcaatatttaaaattcataaaatattctagtttcactaaaaaattgtaaataagttacaaaaactaataaacatttttatatgaagataactcaagtcctcgtatgaaaatgataaagtgaagtactgattatgttgaaacttggatacttacactaatttcacatgtaactcatacaaataagtgaaagtaaaaagaaagaaacgtgtgcatcttatagatcttatgatccaaacatttttatggttacatatgaacatatgttgtatctccgtaaaatttcacgatttttcgaggctatttatgtattattaatttcttgtcatagaaaataatcaaaatacaattaaatcattaaaatattgtagtatcgaccgaaaatacaaacaagttaccaatactaataaatagtctataaaaagataacgttaagttcccaggtggagataaccttaagcccccacacaaaaatgataaagtctattaatttaatataaatttggacattatttcaatggttatggtctaaaaatatgtttaaacaaaaaattgatgtattacaaagtcatagatctcttcaagctctataattttcatataaactttatcttcatccgatgtcatatgtaaaagttatgattttataactatattatgcaaaaaaagaaaaaacgggtacccgaattccgggtacccgtatccgacccgggattttcgggtactgaccgggtattagtgattcctatcatacccgtatccgaggttcaatatccgggtaatacccgtatccgtcccgataaacaaaatacctgtatccgtatccgaaattacgtcccgttttgatatccgtatccgatactcgttccgggtacccgtcccgttttcatctctacgcgtggctcggagcctccgaccctacgtggtccgacgagacaaccagcgatgggcaccttaaccttagctggtttgacaggcccggcctgctattcttgtccgccctgcagttcttgtgggcctcgtcggatggggtctcgctgtctgattccatttccatcgaaagtgaaaccagccgtacgcccatccctcgccgagatcacggcacgtgttgttgtttcccacgagttgatacgccgatcctaatgtacaaaaagaatataactccgtgccggttaaaatgactcgaccaagcttttaggagttattgaatgaggtcatgtttggttcctttatttcctaaatagtttagtcattaaagtaaactatttggttctagtgactaaactagactaaagagcattaattgatgtaaataataactgtattgcctctattaattagtgaatgtttgctgcaagaaaaagtggagatgcaaataaggtaaaaatcctaatttagtcccttttagtcacctcttgtgactaaaaaactaaattttagttactccactttagtcactatattgacatctttaggaactaaaagtgactaagggggtgtttggttagagggactaaagattagtctctagtttttagtctcatttagtcccttttttgccaaacactaggactaaaatatggactaaaataatttagtctttagtccttcatataggtgctaaaagaggtcactgtctttttacactttaaatatttaccccctattaagcatataataccaattattatgcttaacatgatttcggcgtttgctcctattaaatatatttcagttaaatttctgccatttttattttgaaaataattcaaattgttgcaatataatttgaattgttgtcaaaataatttgatttttttaaaaaataatttgaattattgacatactttttattatattagaaatatagtcaaattgttatccaaatagtgaaaaagtataattgtctttttatcaagacttaacaccacaaagtagtgacatattgacatacaacaatttcgttttaaaaaacaggggcaaacatgcaaaatctaaaaaatagggacaaaaaatctaccgttacaccctaaaacagggtcacattattccaattacccctttaagaaaatataaggaactcatgacaagttgaatacttagtctggtttggttcctttagtcacttgactaaagtttagtgactaaagtctagtcactaaaataccctatttggtttatatgactaaacttgaataaagaacattaatttgtacacaaaatgaccgcattacccttgtttactaccaacaaaatgcaagtgggcgtgcatggttttaatgagagggtaaaggtggtaaaaatccacttttagtcactttttagtcactctttggtgattagagaactaaattttagtcaccctatatttagtcactttgtttggctttttagtgactaaactagtcactttgtttgactttttagtgactaaagtttagtcactctaaaccaaacgggcccttagagagttagagtccaatttcaactcgagaaatcaaaccagctttgcacggagtgataaatacttaaaaaaatcaccctacaattcaataaatatgtgtgtgattagtataaccagcacctcattgtaccgtttaacacaatttcctgtttaggtcgtcatctcgttgtacttgcattctcatcaacagaaaacaaatcaagtttattcaacaaaatgtatgtacttgtatgatatgactgtgcatgcgtggtgtcgtacagaaaacggtgatcaccaccaagagcgtggagttcat

SEQ ID NO: 478 - DNA, 19551 bp, Zea mays
  Intron number 1 from transcript GRMZM2G031981_T01 (locus G RMZM2G031981) derived from phytozome v7.0 (chr-ID 2; pos 1 3831723 to 13851273)
gcgcatcgaagccgtcgtggatcgttcgcactgaggtattggtctctcccacttgtgctgctcggttctgttcacgtccgcaattcgttgaacgcctgctaggtgggggagagacgtaggtgagccttggttgccgtagctttctgttatccttttactgcacggtgtggagtaaggcgtttcttaattggtctgcgtactgcacaaacagccagaatccaaaattacatccagaaaaacgggtcgacggaggtggacgtgtacaaaaaactcacatttggttgttgcagctttgttaacttatctgaaactcggggtaatggatgttgcgtaaatcgtctgccgctgattatttatgcagttaatcaggcatttattgtgctattatgaactgcacacactctaaaaaacgaatgctctgatgattcaactgttttattttgtagccatagaagacactttgctcttgttgcaatgtttcttttgattgaacataatcgcgttgtgtttacagctatacaccaaatgaaaacaaacaacgtagacagcacagggagaggctaatgaagttagattgtagaggactgcgtaggtcctccatacggagaaggtgaatatacagaagcctgttttcagacaatcaacacaagacaagtccatagtttagcttctttaccagatttaaatgctcagtgatttgtgatttttctgaattctgcagtgctcttgtgaattggggcaagatctgcattattcttttttatttgaaaaaggagtctgcatttttttaggatgaaatcttgtgcaccaaattaacctctgcacttgggggcaccaatttgttgcatatttgccaaataatcaagatggggaaatgcctccttgctctttgcctgtcagactgtcagttcccttagagggtgtttggtttgaggatttactccatcaaggatgaggtggtgcatcataagtccattccttaaatttggtgggatgacaattcctcatgttagtagtaactaactaactataaggaatgaggtgttgatggatcaactcattctattccacaacccaaacaaaaaaaatgaggtgtgagaagatgatggactagcttattcactaaaccaaacaccctattagactatctccaacaatatcctctatatccctcatttatagtatcaacttggccgataggggcaagaccgccccacgacattatattaagagaaatgtcacgaaagctggtcccccgtgcaatatgagggtccgcctcctataggccggatctttactcgtgctttgagccctcccagccgtacacgaggatccacccccaataggccagtccatctcgtgtgcacacaaccaggggaactaacgagtgaccttttttaacctcagcctgaacttcgctcccactgggattcgaagtcaggacctaaggagtgccactcagaccacctaaccaactcagatagaggccctttcaccatttatagtcttctcgaaaagattttctcctctatatctcattcctctccaacagcatcctatatacgttaaaacacccatattaggacatattttgctctaatgttttgtatgtacatatttttcatacccttaaatatcttatgcatattttacttttgcttaatctgtcgttcaaagtataaaaatggatagaggagaagagataattatatatagatgttatgaatcctggtgcgatgcgcaggacggggaggcgtacaccatgaagggtgagttagtagggtggattaagtggaggagcgcagggaatagagcacgcaacgtggcggctgaggaacacgatcaccaggggacgtgggggtcgccaccgtgatcaagaagccgcccacgcatgtgcgacttctttgataaaaaaccctattacaatctgaggcacccttatagctccggggcctaacaactctggagattattaaggagataagctccagggaggataagcctccttaaacttctctaacacccatacgccatctaacaaatggctgggcctaattattctggcgcctggcatattaccggcccacaaaagagtctataacacttccccctcctcgacaaagagctcgttcgcgagcgcgaatgttggatgctgctgtttgaattcttccacctgttcccatgaagtatctgcatctgaacgcccaatccatttgaccaacacttcccagactcctctgttgagtctggcccttagaaccttttctggcgctgggataacacgcccacgtagaagaggtggcagtggaaccatatgggatggaacaagtccttaaatttcttcaggagagagacgtgaaacacatcatgaattcttgcatttggtggtaactgaagcttgtatgaaacatcccctatcctctgaatgacttgatatggaccaaagaatttgggccccaatttggatggtgcagctgaggtgacgcccacagcagtcctttgttgcaatcgtagccatacccaatcaccaatgttgaattccacctcccgacgtcgtttatcctgataactcttcatagttacttgggcttgcattagtcggtccttgatttctgcaagaaattcatccctgtcctgcaactgggagtcaatcgcagccacctttgagtcccctgcttgataggagaccattggaggagggtcccgtccgtagacaactttgaatggagaacatttcaatgccgattgatatgatgaattatagcaagattctgcccatggtaaccacttcagccatgatttaggacggtccccagctagacatcgcagatacatggtgattattctgttaacaacttctgactgaccatcggtttgtgggtggaatgctgagctcatttgtaacttcactccagccatggtaaacagttcagtccagaactggctagtgaaaactgtgtcccgatcactgactatcgagcatggcagaccatgaagtttgacaatttcgtcaaagaaggcctttgccactgatgctgctgaatatggatggcctaaagtaataaaatgaccatacttagagaactgatccaccactgttagaactactgacttgccaccaacctttggaaatccttcaataaagtccattgatatatcagcccacaccatagagggaattggcaagggttgaagtaggccggctgggtgaagatgctgagtcttatgttgttggcaaactgcacagctgcacacaaactccctgacacgttggagagctttagaattgtaaaatgatgtgcgccacctgtgagctgtcttctccacgccttcatgaacagactcatgtgcttgggcaagaagttgaggccacaaagtggatgcattcgggatgaataccttgcctttgaaccgtagtaagccatctgtcattgtccagtcaggacttgcttttccctctgctagctgagcgtggactgcagccacttgagggtccgagtcagcctccgtttgcaaagtagagaagagatgaaaggaaggggaagaaagggtatacacagttcctgtatcttcctctcggcgagacaaggcatctgctgtgccattcaacttgccgggcctgtattccactgttatatcatacccaaacagtttgctgacccaagtatgctgagggattgttgacaaccgctgatcgagcaagaattttaagctatagtggtcagtgtagactgtaaagagtcggccccagacatatggtcgccagaatcgaactgcctttaccaatccaatcaactcccgctcatatgctggcaatttttggtgatgaagggacaccggcctgctgaagaaggctatggcaccattgccttggcgcaggactgctccaaatccggagccggaggcagcacagtcaatgaaaaaccttttgtcgaaatccggtaattggagaagtggtgctgtcatcaaggcttgtttgagttgacagaaagcctcagctgtttcctctgtccagtggaatgcatctcttttcaggagggctgtaagaggagctgccactgacccatatcctgctataaacttgcggtaataccttgtgagtcctaggaaactgtggagtgctcggatggtcctcggtatggaccatgattcaaccgcgtccaccttggaagggtccatggcgaccccctgcgcagagacaatgtgtccaaggtaagtgactgtagatttaccaaatgagcacttggacttcttaagaacaaggttgttgtcccgcagtaattggaatacttgcttcacatgttgtaagtgttctgtccaggacgagctatatatcagaatgccatcaaagaataccagggtgaactttcggatgaacggcttcagtatatcattcatcagagcttggaatgtggatggtgcattagtcaggccgaacgacatgactagaaattcaaagtgaccacaatgtgtacggaaaggctgttttgtggatgtcatccgagtgcatgctgacttgatgataaccactccggagatccagctttgtgaagaaacttgcacctcagagttcatcaagtagctcgtccaccactggaattggaaatttgtccttgatttttttttgcattcaattcacagtaatcaatgcaaaacctccatgttttatctgccttcttgaccaatagtacaggtgacgagaatgctgatgtgcactctcgaatgatgccttgtgccaacatctgatcgcactggcgctcaatctcgtctttaagcagttagggtattggtagggtcgtacaatcactggttctgtaccagccaacaaccgtatgtgatggtcttggtgacgtgatggtggcagtccctgaggatcctgaaacaaatcagagaaagaggacaacagttcttccagacattccctgttcttgtccatggatgcaaatcccaacactgagtccccaacccctgtcaattgtaccaaccttcccttcctccagaatgccattgtgtgtgtgtcaaagttgcagaccaccggtcctagagaccgcaaccactgaactcctaatacgagatcgaacccaccaagaggcaaggaataacatgttgtggtgaatttctcctggccgatggtgagggttgctgtgatttgacccttgcttgagatgcgttctccattgaaacttttactgataggcctggctgggacaacacttgcaatccgagacgtgccactgcagcttcactgaggaatgtgtgagtggatcctgaatccactagtgcagttaaattgatgccgttgattgtgactgggagcctgagagtatctgtgacgcttatcccagtcatggtctgaagagaaattcccaagtcgactggtaatggaggttctgtggttgtatcctcttcttccagttcaagcaaaaatataccacgacctgaacacttgtgctctgttaaatatttttccttacaatggtagcattctctactggcgcgtttggcggctaactcatccggagacagacgcctaaaacgtggtcggttgaccgtagttactgccggtcgtgccattgttggtgctgcaggtttggagggtacttccagagctgctgttgactgtccagtggagctgcccgtgagcatcaaacgacgttcatacaccctggccagatgcatagcacgctgcagcgtctctggagtttgtaattccacatcagttcggagaggttcgcctaagcctgctgtgtacatgttggactattgtcgatgagacatgtcgtcacaacgacacaacagggtcaagaattggcgcgaatactcttccacagtgcctgtgcgcttcagttcttttaaatcagccatgccattgaacctgagtggtggcccgaagcgcatctggatgaactcaatgaagcgtgtccaagtcagcacgccgcctagatcgcgctccaaggcatagaaccactccgcaggcacgccttccaagtgaagtgatgcctgccagaccctctcgtcttgatgaactgccatgccgcgaaaatatgtaccacatttgttcagccatgacaagggatcagaatcaccatcataatggggaaaagaaaaattgggcctgcgtggtcctccgtcgtcgtggcgatcacggtgtccaccaagaatgccccggcgaccacttccatatcctccgtcgctgcccccagatgcagtgtgccctgcaccaacatggctctcgagtgcaggacccgtaggcagggtcgtcgagggcagaggttgtccacgcggcgagcccgtctgggtggggggggggtcctgctccaggagagtgatacgctgcgcatgagtatccagacggtgattcatggtggcgagttgccccagaatgcgatcaagcttctcggagtccgtcatcttcccagtctcgtcgtcgccgccggacattgatgtcgatgcggcggttgaatccgataccaaattgttatgaatcctgctgcgatgcgcaggacggggaggcgtacaccacgaagggtgagttagtagggtggattgagtggaggagcgcagggaatagggcacacagcgtggcggccgaggaacacgatcaccagggggcgtgggggtcgccaccgtgatcaagcagccgcccacgcaggtgcgacttctttgataaaaaaccctattacaatctgaggcacccttatagctccggggcctaacaactcaggagattattaaggagataagctccagtgaggataagcctccttaaacttctctaacacccagccaccatcttacaaatgactgggcctaattattctgatgcctggcatattgccggcccacaaaagagtctataacaatagaggatgaaggagcatctctatatttagaggacaccactggagcatatagaggagagaatctttctctatatatagggtaaggggctttctccgctggggacaaccttatatctcttggggttcagcagaaaggaggtgaatatacgacatcctgtactttaacaatatttaagtctttaatttactttaacaggctccagagaacagtcatttctcaggctttacagaacattttttccctgatcagtttgggggagcaggctccacgtacttgtatttcatagagtgaaaacggggctgtcagcctacagcaaacatatatcccccaacatagagagttacaacaaagaaggttgtctctccaaagtccaaacctcgatatcagccttatctgtcatgtatctgcatgcccagaagtccacttctctaacagcaacacgaatcacatttttaggtgtgtcattccggtcctgttccgagcatttcagacacgccacgggatgatcaaaatcataccaactggacagaggagggtagatcgaggcttctccaatgagccagggctggcactagtcaccaggcggcactggaatagggagacaactccagaccctttgagcacggctgcagaagacgaaaatgtgatccctggtttcaagggttctgggacagtttttgcagaaagaacttaaccttcccaattcccaggaagtctgcaatcccatatcttcaaaacgctgcagacatggcgccccttcctttcccgcctgaccgttcctatcccctgaccctctcctctacccccgacgcctcttcaccttcctccaccagccccacgctggagaccactccgatcccggcggccaatcacctctcctcttccccggcgtcggcggggccctctgcttgtggtcggtccaaggcgcagcggtggcgtgacgacagcgcagcaggcgcggcgagcgtgggtgctgccccggcggacgctgtcccggcgggcgcaggtgctatcccggcggcggcgggcgcgggtgctgtcccggcgggcgctgtcccggcggctgtgggtgtggcctcgtctcagaatcgccgctcctacagggatgcgctggtgtcctcgcagcgccctgtttctcggttagcagtggatagggctggtggcggctgggagactgtccagagtcgtcgcgaccgccgcttggctcgtcgccctcccctgccagtacctagacccgtgccggttgatctgcggggcagatgtttgaactgtttctctgctgatcatcgggtggcgcggtgttcgaacagggtgcggtgcttcttctgcaggcggccggggcaccgtgtgagcgagtgcccgcgcaggcagacgaacctggccgctcctgtgcgcagactggtgtggcggccaatttccatggaggccccggcggcggtcactggtgtcgaccacgccatggcgggtggctcgacgcttggtggttccgatgccgtgatcagcgggaagcggcgtacccgccgtgggcagcgaaggcgcaggtccgggcctagtggtggtcttggtggtgatcctctgctgctatcttcgggaaacttgtcgcccgcggctcaggatggtcctcgccctgtgaggtttattgggcggtccagaatgatcgaccatgctgagttggagcttcgccatgccctgatcgtcagcgttgttgggcaagaaggaactggttgcgccacggaggttagagaggcgctcgcctcaaggtttgaccttgatgcagatgcgctccgcctacgtcgtgctgcgccaggttcttttattgtcctcttcccttcggaggagctggctgggcaggtgtttagtggaggaccgtcgctctttgtccctccattgaggttgcatattaagagatggactaggcaggcttttgcttcgggaggcagtgtcttgtcttccctcattgacgtcgagctccgtggtatccctgctcacctttggggactggagacagcggaggttttgcttggtccatactgcctggttcagggactgcacccggattctatcagcggggaggacttgtcggtcatcaggttgagtgcatggtgtcgctctcccgtggagttgccgaaggtgttggaccttcatgctgtggagccagcggtccccgatgaagacggagtttggattccacgttcgttggtgttccctgtgttggtgaagattattgggccggagggtgtccttgtggaggagcagctgcagccacctccatcggatccctctgatgatgagccggagctgagtcgtcgggctcggcgggtgcagagactgggtgatcaggcctcattgcctcgggcttcggtgcactcgcgactgggccctcgtcttcattcctcgtcgacgcgtgttggtccctctgatgatgtggggcttttggatgcgtcgatggataacagtgatgctgtggcggcgtctgtctcttcggattcgttggcaaaaccagttgatgcccctaccctcccgtgtgctgcggttgagatgctggcggcgcctgttgttctggccttgtgtgatgttatggttcctgattattctcctgatggtgcctctgctgatttggctgctgagttgagggaggattcggttttggcagtgagttgtgttgtcagtgcttcttctgctagatggaatttgaagccgcctgtttttagagtctactccaggaggttgagaccttctattttggatgatcaggatggcccgttggttcagtcgggtcttgataattctatggtgatttcttcgcccttgtgcgagttccagtgtttggtcactaaaccagtggatgccttgctgccaactccacagattccaaagagaaggaagaagcctctacctagtaattttataccaaggcggagcaggagggtggccaaatttcctccagaactcggttctgaggctactgcccaggtctgcaggcatttgggtttctgtgatgataatgaagttatttctgtccaggatgccggtaattatgcgaagctatttgtttctgggctctctagcgtccatattgctgctttggcagcgctgtttggctggacggtgccgctgaatggacctgtttaggtgtggtggggctggtttgctggtggtgtttgatctttgtttaaatggattcaagctgttttttaatctggaatgtgagagggctgaatgatcgtgtgaagagagattctgttaaatctttggtggttgatattagaccttcggttatttgcctgcaggaaaccaaactttgttctatttcagattttgatgtgctctcaattttggggtctggtttcagcaattttgtttacagcccagcgattgtaccagaggaggggtactggtatcctggcgcgatggagctttttcatctttggcttcagttatcaggcaattttcggtttcagttaaattgcaagagaaaaatggttcttgctggtggttcactggagtgtatggtcctcaccaggacaatcttaaatcctcctttcttcacgaattaagagaaatcagaaatacctgtgtgggaccatggatcattgggggagattttaatctgattttcagggaggaagacaagaacaattccaatattaacagggctatgttgggggacttccgtaggcttattaattccttggatctgaaagagattcatttgaagggaaggaggtttacttggtccaaccagagagatgccccaactcttgttaagctggaccatgtcttttgcactggctgttgggaagatctttttccagacgcttcgcttcatagtaatgctaccacatcttcagatcattgtcctttgatcctcaaggtcagagagggctgcttggggaaaagacggtttcattttgagagtttctggcccaaatttcctggttttctggaggtggtgggtgcgtcctggagcttgccagttgggggctcctgcccgttggagcatgtgtcattgaagcttaaaaggttagctcgcacattgcagtcctgggggcataaagaagtgggtaatgtaaggttgcagctggggcttgtcagagaagtgttgcataggctggaaatggcgcaggatatcagaattttgtccagtggggaagtttggttgctaaacttgttgaagcagcggtgtcttagcctcgcgtctcttgaaaggattgttgctcggttgagatcacggatccactatctaaaggagggtgatgccaacactaagttctttcattcgcaggcatgttatcgaaagaaaaagaatttcatttccaaacttgaggaagatggaagattggctaccaatcatgatgacatgcaacaaattcttgaggagtattttcataacctgctgggggctgatttgcagaggccatttactattgatctgagtaattgtcacagggctgcgatggatctaactgatttggagcagcctttttcagaggaggaggttagggacaccattgcttgtctcccttctgataaggcccctgggcctgatggttttacaggaaaattttacaagacatgctgggacatcattaaggtcgacataatgactgctcttaattccctttaccatggaaatgcctataaacttgatttgctgaactcagcgtatctcattcttcttccaaagagggaagatgcttcctcagctggtgattttcgaccaattagcttgattcatagttttgctaagctggtcactaagatcctcgctaatcgtttgggaccataccttcaagacctagtggcagctaaccagagtgcttttattagaggaaggtcaattcacgacaatttcatgctagtgcaacaatcgattaagttccttcataagaggaagatctctagtttgctgctgaaactggatatttccaaggctttcgactcagtctcgtgggcgtttttgttggagattttgacacatttggggtttggtcctgtttggcgtaatctgatctccaacttgttattcacttcttctactcaggtgcttttgaatggctcacctggtaaccatatttttcatcggagaggtcttcgccagggagatcctctttctcccatgttatttgtgatggttatggatgtgcttagcagcttgttccgggttgctgaaaatagaggcttgttgcagggccttgggggagctgatgttcgcagtctagtctccatctatgcggatgatgtggtccttttcataaagccaattgaagcagatctgaattgtgctaagataatactaaactgttttggttcggcttctggtctggtaaccaatatgctcaagagcagtgctattccaattagatgtgatgatcagcaggtgcttgctggttgcagtgtgctgcattgcagtcccgctgcgtttccttgcaggtatctggggctgcccatttctgataaaaaattgaggaaatgtgaccttaagttatggattgagaagatcgcagatcgactgcctaactggaaggctcggttgctcaacctggctgggcggactgcgttggtgaagtttgttctatcggccattccgacttatcttcttattgcaatcaatgtccctcagtgggttattaaatcaattgataaaattcggcgaggatttctttggagaggaagaaaggaggttaatggtggtagctgtcttgttccatgggaagttgtcacgaggcctctgaggcttggtgggcttgggatccctaaccttaagctcaaaagctgggcattgcaggcaaaatggttatggttggaaaagacggatcagagcagaccttggcgtgggttgtccctcccagtgcaacgtcaggttagacagttctttgatttgtcggtttttaccattttagggaatggggctactactctcttctggtcggatagatggattcatgggaatactatccaggacattgcccctgaggtggtgggtatggttggccgcaaggcgtattcttccagaacggtggcacaggctctggataattggcattgggtcagtgatattcgtggtgctctttccttgagtgggttgcagcaatatctgttgttatgggatactttgggggacgttaggctctctcatgatgctgacagacatgtttggatgcactcttcttctgggatgttctcctcaaagtcctgctataaggcttttttcatgggttcaatttcgtttgagccatggaaacgtttgtggaaatcctgggctcccccaaaatgcaagttcttcctctggctggcgataaggaataagtgttggactgctgatagactaaggaggagagggctgcaacatccggctgtttgtgttctttgtgaccaagagcaggaaacagtgcaacatcttttgtgtacttgcagttttgccaggcaattttgtcatgctattcttgttcccttgtgtcttggggatctcattcctgctgttgatgaaatctcatttgctgattggtggaggaaggcgcttaagaaggtgcccaaattcagaaagaaaggcttcaacagtctcattattttggggtcttggtgcatatggctgactagaaacaaagctgtttttgatggtgtaaacccttccatgtgttttgttaaaagcttatttctgaatgattaagttgttgggagagggctggggctaagcagctagcaagttttggtcttcctgctattatgagtagggtctagagtgtggtcaagtgttctgtttgccctacgggcattgtactttggtcctcttggaccttttcctttcttaatataatgacgtgcagtcctcctgcgcgttcgagaaaaaaaaacgctaggatctgttacatcgacaacatgaaggaggtgatatgcttgattgctgaacaaagaaggagatagggggaggttcatgaggcgcgaatctgccacgactgtgatgtgaatggagccgagaagatcatttagatgggaaagctcttaggtggctactacaatgagccgaagttggaggacaaattcaactctaccagagagaacatcatggacacagaaacatggacggacatagtgaggaaaaagggctgggaaggcattggctagcagattagtcaacaaccatcaatccagccagaaagttgtcgtcctaccatctcctagctgcactctggtcaaagagtggaagagtggcttctcatcttgggtaatacgagcaaggaaggagtcagatgctccttccaaattgggctcaagttacagagaagccaggatttccaagggtaatcgtttggggagagcagcttgtgaacgaacttcatgagaaggcaatgattttgatgatctatattacacacaccgagcccgccaacacgttttgaaaggcagatacgatcccaggcaatgaggcattgacccgtgttgcacttttccacactatctagaggaaagtctgacacttaccaccaatggtttctctaactgtcttgggggaggagcatgaataacatatagtggatccataagctaccaagaatagtgtttacaagcaccatgcaaccaccatagtttaggaaccgggacttccagccaccaaggtatcggtcaaaggaagagacaagtggatgataatcagacactcaacttgtgaggagagaggggacgcctaggcaaggctaggggaacgagaaaatgtagcagcccaaaatctaagccatgacctgtcagcttagctcaggactcaccatcgacgacgacgctcatggattggcactcacacgcacagaacaacagatggcgagaggtagaagatgaacagtggcacacacagacaatggcgctcaagcgctcggtgacaaacacttctcttcgattgcttgctattgagtgacacagaggttacaagggagctttatagctcggccgacacacccacgtcccacgctgcctaaaattcgctggtcgacccgctctgcttcgccgcgcttgccacgacgcgctctgccgcatggcatggactaaagattttgcgcacgaggcgacatcggccaacggatcctaacgaattccctccacgcaacaaatgtggagagctatctcgatcgctgatcgccacaagatcaacacacactaacaccgtgggctcgcgcatacacgtgccaccgtgtttaacgtttgtgtgcacacacgcgtttcgccatgcacacccaccagccgtgctcaacattcgcaaatgggtttattcctaacaatcttaccctaaacccagcatcgccgacttcaagtctccacaacatcgtttgctcctccttgtcgtccaccgtgtccgccatgacttcctccttgggcttgtggcaatcccgggcaaaatgttcctgaatcccgcaattgaagcacttgtcgattcccgaccttgacttgtcgatccttcctgttcgcatccgtgagtaggagcttgtcgtcgttagcttgacctccgttcgccatctgcacaccgttgtgagtgctcgtcagaaggcttcaaatgcccaagcgcctcctcgaacgccatcttgtcgacatcacagaattgttcgttccccgccaccgctggatataagccgatcggggactgtgtcgagcattttcttcaccatggcgacatcgtcgagcgtggacccgaggccaacgaacttcttggccatgccgttgaccttcctagcgtagttgtccaacgcctccccgtcctccgtgcacagcttgtcgaactcccccttgagtgtggcgaggcgtgccgtcttgactcgattcgaatcgagtcttgaggctcacccacacctccgtcgtggtctacttggtggagacctgcatcatgatgtccttgggcagagcttagagaagctacgtccgcgtcgtcttgttcttccgctcgttcacctttccatcactcaacggagacacacaatccaagaaaccttgcgcgttgaggatcacctctacctttatcgcccacgtcgtgcagctcgccagcgacaacaccgggtacgacatcgacatcatgctcccccaacacctcgcagaatcatccccatggactcggactcgaggtagcagcgcagaatcttgggcataaaatggttccgatgccaaatgttagctcagctcgggactcaccctcgatggcgacactcacccacaccgacgatgctcacagattgacactcacacgcgcagaacaacagatggcgagaggcagaagatgaacagtggcatgcacagacgattgtgctcaaacgctcgatgatgaacgcctcacttcaattgcttgctattgagtgacagaggttttaagggagatttatagtttggtcgacgtgcccacatcccatgcgctacccgaaattcgccggtcgacccgctctgcttcgccgcgctcgccacaatgcactccaacgggtggcgtggactgaagattccacgcacgaggcaacaacaaccaacggatcctaacgaactcactccatccacgcaacaaacgcgaagagctacccctatcgttgatcgccatatgatcaacacacattgacatcgcagccttgcgcacacatgcgccaccggtgttcaacgttcgcgtgcacacacgtgccacaccacacacaccagccgaccgtgctcaacacttgcggctggatttattcctaacataaccgtgacctcagttgcatcaatattcaaagagattgtgtggattggttgattagatgagatgccaaattacatatatgtaggctgagatcttgtggtttatagaaacaccaccaattaagaatatccacatatctctttaggttgaggagatcttgtggtttatagaaacatcaccaatcaagactctcctaaccatataaggctgggctagccgactgaacatgccaggctcaaggcccacagctccgacatgttagatagcattgtttgaccccctggccgtagttgaagtgtcggtggaacaaacattgagactggattggaactccgtgaaaactgacaaagacaaacccttggtgaagatgtcaacaaactgagacatcgttgggatgtgaaggacacagacatcaccaagtgcatgttgtggacgccttcctgggtaaacaatactagcgtaggcgtccttagattgttcagtttgttagtaacagattgattagaagttgagaataaattagggaaggcttatccttatccctttggttagttagttagttgaggattttagggattatcactttagccatctgttagtagagatatcagggacctctaatctataaagagggagtaacttgtaacaggaaaatcattgaagaagtaaatcccggttgggtaactccttcggtcatcgtggttgcattttagcgcagcactggtgacgaagtccccagccgatccccatatccaccgcgttccctttcctaatccaggcgttcacggtgcaacatgctcttagacaaaaatgggaccgatcctcatatgtttggtgtgctgatgctgaacgggattgaaggacaattagattgttctgatgttgtcgcagtacactaaagttgttttgcacaggggcaaatccataggggggagggcaaaggtggccatgcccccccccctcattttttgtaaaaccttctacacctaatattcatttaatgttaagtatacaaaaataaagttctaggtggattaaatcagccccgttctaatcttctcgtcagatcgacctagtcctcctgactttcgtcctcctccttagtccagtccatgcatctatctgtttggccccattctatttgacgtcgttcaagtcagtccgccctaatgccgccagccactgcctccttcccgatgctcgacgctacccgacttcaaatcctcgcgacaccctcactccacttgtcatcatcacgatgtcgacacgtctggcaggcccgatatcgctcgtcgcgatgatgcaactcatcctcggcggtcggcaagcttggtgaaccaacgagccctggcttagtgtcagagaggcctcctgacaccgcccccttctcggtgccccagccgttcaaggatagacattcaacagatacttacgacatcaatttggtcaccaagaacttagcgacatgtttgcttcttttgtttatatagttttcttcttttaacttgtatcatgtattgacattaaacttgaattctatgcaacactagtttttcggtcgtgcttgattttgtcacgtggttttcttggcccccccatgaattctcgttgccactggttttgcacataggagtgcaactcatacaagagttggcgtaaccaggtgatttcagcacactcaactcgcattggagggggaaattccgaaattgtattctggtgcttggactaccatgagaccagattattacctagcaacaccgcatagccacaggttgagcgacggatgtcaggacaccgtgcccaattaatatcagagtaaacagccaagtcagactgagaacagggacgcacaaataggcccatatgcagcatgtcgcggacatagtgcagataaacttgagagcgcgagatgaggctcttgtagataatgcatatgagggtagacttgttgaactgcataggagatattgggccttttgaaggtgaggtactgaagagcactcgcgaggctacaaaagttcggacactggtgtgttgctggagagctttggatttacatcaacaagcgtggatgagggcttgcagttagccatgccaacactgtcaaggatctcaaacatatactgacgctgagagagacctgagcctgtgtgctggacttgcatacccagaaaatgatgatgagtgccttaatccttcatggagaactcttgctaatgagcagcaatgatgcgtccgagtaagtccgagtaactcgtagagggaggctgtcagcacaatgtcgttgacacaaagtagaagataggcagtatctactccatgatggtagacgaaaaggacgtgtttaacttggcttcaacaaaaatgaactgtagaaggtgggaggcgaacttgctgtatcatgcatggggtgcctgtttcagtccattgagagaatgtttgaggcaacacaagtaatcaggatgactggagtcctcaaatccagaaggtttaacacaataatctgtctcggacaaagtaccacggaacaaaacattggcatggaaaaatgtcacagctgcttttagtaaccaatgctaggccggctaggtgcatcccctaatggaatttcaggtggggagtcttttcctccggtagaccctaaaaaaaagaaacctagatatcttcttcacattgtagactgacgaagaccataagtctataatttaggccatgtttgaatgcactaaaggtaataattagttgttaaaatcagctgaagacatctagtctagctaatagttgaagcattagctatttttagcaaattagctaatagttatttagttaatcccactagcaattttttagtcaactaaactattagctctattgtattcaaacacccccttaagccgaatatcttatgtacattggttatttatatgctaactgaaattatggttgcagtcaaacgtgaggagggagagagcaaaacgacctga

(The sequence listing continues in the following parts.)
